United States Patent Application Publication US 2004/0031072 A1 - sequence listing, part 17

SEQ ID NO: 76182 - DNA, 2147 bp, Glycine max
  unsure (1)..(2147): unsure at all n locations
  Clone ID: PAT_MRT3847_39806C.1
ctttttttgtagaacagtgggtcaataagaatgttggaatgaatcttgagtcaatgattgagtaatgcaaattaggctactttccggggcaggacaccatttcagttttgcttgttaacacaatgttattaataagcaggtaccttgattggcaagcacgcgcaagggaggaagtctcacatgttttttgcaaccaaataccgattcttgatggactgaatcaattcaggaggctcaacatgattttgtatgaggttcttagattataccctccccgagttggtgttcctccaaaagttatcaaggatgtgaaacttggaaacctatcatttgctgatggagggggggtaaaggaatcaacaagcaaacccaagcatgtttcccatctcttcggggatgatgaatggctcgagtacaatcccaaccactcagaagaaaactgccttgaatcggctggttaaggataatgttgcactaatagtggttctagaagcaaaagttaacaatcagccatttgattatgctgggaaaagacagcttctttgtgtggcaaatacacatgtaaatgtctcccaagatctaaaggatgtgaaactctggcaggttcatactctcttaaaaggtttggaaaaaatagctgcaagtgcagacattccgatgttggtttgtggagattttaattcagttccgggaagtgctcctcatgcacttcttgcaatggggaaggtagatccttcacatcctgatttagcagttgacccgcttaacattctacgtcctcacagcaagttggttcatcagttaccactggttagtgcatacacatcttttgcaagaacagttggccttggatatgagcagcataaaaggagactggatggtggaacgaatgaacctttattcacaaatgtcactagagattttattggcactctagattacatattttacacagcggattcattggttgtggagtcattattggagttgctggatgaggagagtttgaggaaggacacagcacttccttcacctgaatggtcctcagatcacattgctctcttagctgagtttcgctgctgcaagaataaatctaggcgttgacagttaaggtcactttcagtgatacataaagaaaaagtctgaaagaagcatttggttggtaagttttttgtaaaaatggtagatcatgcctgtctttttcaggtatctccatgtggagtcattgcaatgatctgctatgtatcatgtcacctttatctcagagaaaaaaaatatgattttctgccttatcgatctattgaaaaggatgtgaaacttggaaccctaacattaccagctggagtacatgttttacttccaacaattttgattcaccatgatcgcaaattctggggtgaagatgctaaacagttcaatcctgagagattttccgaaggagttctaaaagcaacaaatggtagggtttcattttttccatttggatggggtcctagaatatgcattggacaaaacttttccttattggaagcaaagatggctttgtcaatgattttgcagcatttctcatttgaactttctccagcatatgctcatgctccaactgcgttgattactattcagccacagtatggtgctcatatcattctacgtaaagtcacaatatgaaataaaatagtagactcttattgtgtgattatagtacacaactacggtaaagcttatactttattaccaaaatgatcacttcttagatcctgtcatatgtttaattactttcatttacatgtttgtgtgtttatatcttttgttgaattgtaactttgtaattgaatagacaaagaaataaatgtgatttcatactaaaaaaaaaaaaaaaaaaaaaaaaaaaaaaaaaaaaaaaaaaaaaaaaaaaaaaaaaaaaaaaaaaaacttgggggggggcccgggccccaatttcccctttaaggggagtttatttaccccctctcttggccggngtttttacacgtngggaatgggaaaacccttgggttccccaatttaattcccttggaagaaattccccttttcccaggtgggggaattagaaaaaaggcccgcccgattcccctttccaaaaattggccaaccttaatgggaaatgg

SEQ ID NO: 76183 - DNA, 313 bp, Glycine max
  Clone ID: PAT_MRT3847_39807C.1
aggtcgaggatattcctctggtgaagctatggaacccaaggcctggaagtttccaaggtcggatttgcatggattggcctaatgggagtgttcatcgatcctgcatcctaagaggcaggcatttatctgatcaaactcccatacaccaaacgggtaacttggatggattatgcagaagattatggatcacgagccactcaaatgatggttctataggttatcagggacttttcttgagatcaaatgcttattgccacaaaatttgacattctcaaaatggagaattgtaatgcaatactgaacgaattccctg

SEQ ID NO: 76184 - DNA, 575 bp, Glycine max
  Clone ID: PAT_MRT3847_39808C.1
aaatatccatcaattatagcagcccacgtaactgtattcttttttgacattccatcaaacactctacgagcctgagctaacttgcccaatcttaaataactacaaatcaaattattatctacataagtaactggatgtataaaaaatttcaagacaattgggggtacccttcctacttcttccatattataacacaatcgcagccaatgagctactaattctggattgaagcattgacttttctcagctaaattgtctatcttccagcaaaaagcatccgggggagacttgataatatcttggaaattcaactctgcagcatttagggcctcaatgctttcagttgcagcatctaaacttttacagcagccaagcacgtgttccaaagctttaacaaatcattttgcctttcgagattgtatccataagattcagctattgtatgaagatgcataaaaaattcttttgtgaaatctttacgactgctggagacaatttcacaaattttagatggattccctttgatcatttcgataagttcattgtgcccctgcaactcttgatctctttaagct

SEQ ID NO: 76185 - DNA, 288 bp, Glycine max
  Clone ID: PAT_MRT3847_39809C.1
gtttgaatgtctcagcttctgtatctggtgttcgtcttgctggaggaatgaactatgctgaagccctcctgcatagatttggaatacttggacctgatggagctcctgggattggtctctgtaaagggttggaaaacttacaaaaaggaccattgtcaaaactttttaaggcaactcctctcattgttgataattcagaagatgttggaagtggaagagaagggaaagaaactggttttcctcaactgaaaaagcctggtgatgtggatgtaactgtagaattgagag

SEQ ID NO: 76186 - DNA, 381 bp, Glycine max
  Clone ID: PAT_MRT3847_3980C.1
cactacctcactggctcctcttcctctggtagttttattagatcctataactccaactgacttccaaatgccagagtgcccaggtgattgctttctgtcccttgaaatcatacttatgtgccaaggatgatttacccctccagccctcatctctccactgaacttggcctagtacagcccattgcctgctcacagcacccctcgatgcaggcctctcaaggcaagcctgtctaaggcagaactcttgcttttctccacttgcccagatccatcctgactccagctatccccagctcagtatatgacaccatcctcacccaaggtcacataaaggtcatccttccttgagtcatctctttatctcatctccacctccaaact

SEQ ID NO: 76187 - DNA, 121 bp, Glycine max
  Clone ID: PAT_MRT3847_39810C.1
caagtggtatggtcctgacagaatgatcttcttgcctgatggtctcttggaccgagctgacatcccagagtactagaccggacaagacctcggacactatggctatgacccatttgaactg

SEQ ID NO: 76188 - DNA, 436 bp, Glycine max
  Clone ID: PAT_MRT3847_39811C.1
gggaaaaacaggcttggccccattttacttcccaaagaaagctttttttttccgcaaacttttgaaccccctttggtttgatatcccaaacttgggggacaaacttagggaagggcccagggttaacattaacaagttcaaaagggcaaaggggccatccaacctgggggggggggatttcctcaaaaggctcgggcaaaacatttaattttttgcccctttaaattttgggggtataaacaaatttcaagcttggatgaagaaagcccttttccctttcctttgggttccccccacccaaagaggaatcctcttctggcacttttttaaagaaagggcccaaaaacctgccccccccttgggggaaggaaaataaacattttgggggggggcatattatgaacaaggctcccattaaaaagaatccccttttttt

SEQ ID NO: 76189 - DNA, 466 bp, Glycine max
  Clone ID: PAT_MRT3847_39812C.1
ggaagtgaaatctatgtatttaatgtcccctcaaaggaagttttgaggaaggaccaaaatcacatgcattttttcttctgcagagcagcatttgtcgcctcccatttcaccatgtactttgtttctttttattattactaatatcagacattgtacctgaagcatggcccttcccccctaaaaatatcaccaaccactgactcacacaccaacactccaaaccgacgaccataacacaaactaacacctagaaaattaacaactaaacaacccatcttttagtcagaaaccataccaccaaatccaacatgcaaaacctcaatttcctctgcctaaccatcatttccatttctctgatccacaactacagcatcctagtccaagccctgacctcaccctcagacattgcagcactcaaagccttcaaggcctcaatcaaaccctcctccatcacacaatggtcatg

SEQ ID NO: 76190 - DNA, 478 bp, Glycine max
  Clone ID: PAT_MRT3847_39813C.1
tcggcacgaggccgggcagaccaggagacaacacatgcgctacgccaacaaggtcctttccgtggacgaggccattgcccacgtccgcagcggcagccggctgatgctgggcgaattcgtcggcgccggtgagcccgcctgctgcatcgaggcgctactcgccagcggcaccaaccagctcacgctcatcgccaatacggcgggcctgcgcggcggcttcctcaaggccagactgtttgcttcgggccagttggcggagtacatcggcacgcacgtcggcaccacggatgaatcgacacaggcttacctgagcgacagcgtgcgcgtggccgaattcttcccgatgggcacctgggccgagaaagtgcgcgcgggcgcgatgggcctgggcggcgcactcgtgccggtgggcgtgggcatcctcgaccagccggggatgttccccgcgcgtggcgcccccaagcagacgctcacagaa

SEQ ID NO: 76191 - DNA, 1565 bp, Glycine max
  unsure (1)..(1565): unsure at all n locations
  Clone ID: PAT_MRT3847_39814C.1
acgagaaaccgtgtagctgaatttcctcatcctgttcaattcatttactgcgaaaattgatcatcacaataacatggcttcagattttaatctatccccttcggatgcacatcccgagactatggatttcctttcacttgcatggtgtaactttgctgtgcaagctctgcagcctgagccacaacatggatcagttgttctacttgataataactctatgaagcaattagagcctagtagccccaacgctcctccttcgatggaaaagagtgatagaatggatggtgcagatttcgggtcattcccagcatggaagtctaataatgtaaagtcatggatatggatgcagcaagcgatgcaccctgaattgaattacaacagctgtttccggaagaaatggatgccatggaagcagatcataccactgaaaaatgtctcaataaaaaaatggtttaaggaaataaagatgaagagaaaagaagatcagaggttgcaaagagcagaggtgcatgcagcaatatcagttgcagggattgcagcagctctagctgctattgctgctgaaagttcaaaaaatgagtcaaaccaagatagagatgcagcagtggcctctgcagctgccctggtagctgcacagtgtgcaaaagtagctgaagcaatgggggcaaagaaagaactgcttagcactgtaattggctcagccatgagtggcacaagtgcaagtgacatcctaactctcactggcgcagctgcaacatcattaaaaggagctgccacacttaaagtaagatcaggatgcaagaacagattgaatgggggcgtccctatcttgccccttgaagacaacaatgatctagattttgactttgaaaaaggcagatcaattcttgcacagggtgctgagttatatgtagaaacacccgaagggaagtatatgcctagatcagtgtctgtaatcctaaacagcgaagccaaggttgtacttatgatgaggaagcataacctattcaaaagcaagagggagggtgttgtgatgactctgcatgcggatctgtataaaggttcagaagctgaggcggctgatacgtgttatctgatcgttttaacaacaagaggaggcgttttcaagctagacatggcagatgatttccgtcgttacaagacatgggcaacaacaatcaatcacatgctgaagatttcatcttcttttgcaaaatatgagctccaattttactgaaattaacgttatcaatatcagcacttactttatgtattggtttgcatctttgtaccctaattatatttgtaactattacaacatatcgtccctactattaaattcaaattatctgtggtctgtctaaaataatttgtgcaaacgtgccatgttaggtattatgctattgctacatactttaatttgaaatagtatgatttacgaacaatatatcatgagcacaaagagcatgcacaagatttcatttaaattgttagacctcaaatagtttgttttatgattttgaatgtaacattaaggcatgctcgcagtgcttagannaaagcaa

SEQ ID NO: 76192 - DNA, 657 bp, Glycine max
  unsure (1)..(657): unsure at all n locations
  Clone ID: PAT_MRT3847_39815C.1
atatcagaatgtgaatttaaaggatttcttgatattgatggagatcgttctttttctgaagcagtacaattggacatacaagtacctggtgcttttcctaaatttggaactacagatggaacgattacgaaaaatgttgtcattgaaaaatgttattttggctgttcagatcatcctaaaatgaaagcgtggaatagagctattggctctcatgccagtagatatanctgctattatgaaaacattcatatcaatcaaaacatctttgataatttaaatgagtatgctttacctcctctaaagtcaaaagacacatttattacaaaaaataaatttataaattgtaatggtggaataagatttcttggagtgaaggatggtaaaaatgctgccgatcctattacaggacaagtgatggaaactcaagctggtgagaatttcaatgtgataggtaatacttttattggtaagatgaaaagagatgcgattcatattagaagttatcatcacgtccaacatcaaaacgtttttatagcggcaaatcaatttgaagatgcttcacaatcaatacatttagaaaatattaatggacttactttaaatcaggaacaaacaaaaatcaaaatcaagagtattgatgtgaaaaacatcagtaat

SEQ ID NO: 76193 - DNA, 510 bp, Glycine max
  unsure (1)..(510): unsure at all n locations
  Clone ID: PAT_MRT3847_39816C.1
ggaccggccggattttggggcgacgaaacctccacgaacaannnnagggacacncgcccgagagagcccaaggaagagagccccnaagagagggggacaancactctgggcagacaggtagaaaggggaaagaggatcagttgaggatncccaaacagcttttttctgaaaagggtgtanagnaaggnaggaaccaaagggagangaaaagaccccgccggngggggggagcacacgcccacgattgcctctgatggctcactcttaacttggggggctaatgacttagggcaattgggtgatggaactgaagagcgaaggaaacatccagaaaaagtaaagcaatgagaggcagagtttgtaaaatcctgatcctgaggagcacattgctctgcttgcattgctgaacctcgggaaaatgatggttccatctccacgagaaggctctgggagagggggcaaaatcagggatcgaaccttccaaggttgttctggggggccttaaaccta

SEQ ID NO: 76194 - DNA, 233 bp, Glycine max
  Clone ID: PAT_MRT3847_39817C.1
gcgttaaggtttatcctacagtggttaagctctcgaggcatggcccacaatgtgtgagacccaggtttaacggcaaaaacttatcatcccaccttgtgtccctcaataaccttttgcacgtcctccacttcttgcaacttcactacaccatagtgcttgtccccttagtatagcacatactttaccagcttgtttggaccaatcccttcttccacgtgtatcttctccttaat

SEQ ID NO: 76195 - DNA, 183 bp, Glycine max
  Clone ID: PAT_MRT3847_39818C.1
ctcgaccggcaatggtggccacagatggtagtcctgagtacgatggtatagcagaggcctgcgccaggtacagatcataataggggcgcgccagtgctcatagatacaccaggtgcactcaggactgggaaatctggactcctgcttgtagaaaagcaaggactacgtcagttggtccacacc

SEQ ID NO: 76196 - DNA, 561 bp, Glycine max
  unsure (1)..(561): unsure at all n locations
  Clone ID: PAT_MRT3847_39819C.1
cccacgcgtccgaaaaaaaaaaatctttggatgatnaaaaaaaaaaaaagaaccaaataaaaagaaagagaaattaaaaaaaaaaaaaaaaaaaaaaaaaggacatacaaaaaaaaaacaagaaacaaaaaaacacacacgcaaaaaccaaaaaagggccgccccttttaaagaacccaactttcctcccccggcctgccaaaacaaaagcttttttaaagggcccccaaatcccaatccccggcccctcgttacacacccccggaccggaaaaaccccgggcgtcccccaccttaacccccttgaaccccacccccttttccccaacgggcaaaaaaccaaaaacccccccccgaacccccctccccaccattgccccaccctaaatgccaaagggccccccccctgaaccggcccataaaccccgtnggatggggggtccccccccaggggacccgttaccttgcccagccccctaacccccgtcctttcccttttttcccctccctttccccccccgtcccccggtttcccccgcaaggctttaaacgggggcccccc

SEQ ID NO: 76197 - DNA, 359 bp, Glycine max
  unsure (1)..(359): unsure at all n locations
  Clone ID: PAT_MRT3847_3981C.1
aataaaaactacaaaaatctattnccacagatcgagaaaacatataccatctcatccttccattaaaataaccctaatattattatattttacttccaaaaagaacaaaacttttaaataacaaccataatcattccttatccaacatatacaatcttcaatattaaattaacattaatgtattatattttataaaacaagttacttttcctaatttactgtcttaaaaccctactcataatcttcatcaataccctccttaaaataaatcacaatatcactactttgaaaaactctgaacagtgtatttattttttttttaataactcaattaaaaaacatccttaatttacataaat

SEQ ID NO: 76198 - DNA, 413 bp, Glycine max
  Clone ID: PAT_MRT3847_39820C.1
ggtaataacgacatctccgatcgaaatcacgggtgtttgtttcgactcacctatggcgagctcgactcggagatcactggctcaactcggaactatattacccatgaagaaaagttcgggcccggatccaccttgcttttcagctattactagctcctagggttgcttcagccatctctcgctcgggatctgcggcaaatccactagatctgagccgggagggggcaatcatcggactctgccatgtcaattggtctattgaaaaaggttcagggcttggtgcagaaatggatgcttagattatctggcatgctatttgggattgaggctggagaaaatgattacacaaaggagcccccctctttatatgatactggatcacctttgccctttgaagttgttcatgatctacc

SEQ ID NO: 76199 - DNA, 372 bp, Glycine max
  Clone ID: PAT_MRT3847_39821C.1
gttggagttctacttaaccccgctcttgtatacctaagtagtgcatcatccaacatatcagcactaagagccaagggactgccacacgtaaagcctgccgtggatgtgtcccactatcaaaactacaatcgcttaccaatctcttcctgagcctgtgtattttaaaaatgaccacactgagattatttaactctgtacatgtgccgtcagacatgcttcagaacgctaagaatgcccatgctagacgacgctcttagacaacagagatgcatggctgggttcctggattcctgtaagggattgctttgaagatgagcttcgcgctttacaaggaggaaaagatggccttatgccctgcgtctgggagaatga

SEQ ID NO: 76200 - DNA, 389 bp, Glycine max
  unsure (1)..(389): unsure at all n locations
  Clone ID: PAT_MRT3847_39822C.1
ttttaaagaataagagctatgctcataatacagggnattcttgtcatatatccttatataaacccgtaaaaatataggaaaattgtacgtgcaaaaaaagaacctagaaatagaaactcttatgatgcggagctccctgaatctaatactacaaacccagaccaattttgatgactgcacccatggataacatttttggaaatcaaaaaccaaaaatgcttcacgtctgtgggccatcacaaccattagaacgtagtgttaaccaccaagcctgattcccaattcttgtttacttaaatcccctccttgacattctgggcatgaaaagaactcccccatcatcccaaatttacaccgccacctgaaaactcgagctcctgagcggacat

SEQ ID NO: 76201 - DNA, 347 bp, Glycine max
  Clone ID: PAT_MRT3847_39823C.1
ataaataacaaaataaaaaaaaaaaaaatacaaagagaagagaaaagaaaaattaaaatggaggggaaggtgacaggatgtgtcgctggcagcgaacaatttcccggagagacagcccattgggacgaatggagacgggcccgcacgactgtaggggctaccagcagcgggaacaatctcctctgtttgccccgacggatttcacttttcttttctttgacagagtaaggatagccgagtttgcgggcacttttctgtttctatgcatcaatgtcttaaccgtcatgggagccgccggggctaagtctgagtgcattaccgttaagactggggggatcgcttgggcc

SEQ ID NO: 76202 - DNA, 596 bp, Glycine max
  Clone ID: PAT_MRT3847_39824C.1
ggctcgagctcgttcgtttcttcgttcttcttttcttttctctcttcctcctttttctcgtccattggttaagttcttcttcttcttctcattctctctctctccgaacatgcatatgcaatctttgagagaagggtagaagtcattaaaggaaaaaaaatcgcagtacaagaaagcgcgtttttcttccctctgttaatgtaacggcttttctccttaacgcttagagattgtttccaacatacgctgagggaaaagagacagtgggtcttcttttcttctcagaaaatttccttcttgtctccaatctcttcgttttcttcatctctgtccaaagggtctcgtgtagtgtttttttgtcttctttttctggctctagaacatggtggcagtgagaaacattgtgctgctgttgctgtgcgttactgttgtggctccgattgtgctctacactgatcgccttggcacctttgagtccccttcaaacaaacaggagtttattgaagatgtcactgcttttacacattcagtgcagccgactctagccacttgaatctggtaccccaggaaacttcacggctgttaaagaccccgta

SEQ ID NO: 76203 - DNA, 531 bp, Glycine max
  Clone ID: PAT_MRT3847_39825C.1
ttccaggaaggtttcccgtcatcactgtatgacgtcctccttctttgggggggggggggggataaaaagaaagataacaggcgtaggaagaggaaataagaagcagcctagtagaaaggtggatccaagaaggagataaaatgcattgccaaaaatttcagtgcttacgcttttatgcgagaaaaatatgtagcagaggatgagctctggcatagatagctaggcatacacaccagaggttaacgtaagccagtttgggagtttgttggaagttggacgttcgaaagcctattagtttggcgaaaggcgtagcctggtgcgtgaaagccaaggagatataccgaccgcttaagagtgagggcttaaatgagaaacggaaacatttggtggtataagttgacgcccagtttaagcgtagggataaacctcgccataacagagcgagagataacgatagatagcgaatagaagcgaataagaagtagactggccgtgggatgaacgtataggatacccacggaggagctatgc

SEQ ID NO: 76204 - DNA, 231 bp, Glycine max
  Clone ID: PAT_MRT3847_39826C.1
ttagaaatcctgactcacttgcgcagcatcgttgggaggtgcctagggtgcaacctgcaggttccaagttcatggatgctgtcatccgaaccacgattgctagggcatagacagagcgcaccagctgtaagaagcgaacatgggttgcaccgttgcagggcgcgttattggctactgagccctactaaaaagcaaagacgctcgtgagattgaggaggcgcagtcatgact

SEQ ID NO: 76205 - DNA, 1207 bp, Glycine max
  unsure (1)..(1207): unsure at all n locations
  Clone ID: PAT_MRT3847_39827C.1
tcggaattcggctcgatgtaattaaagtggtgtgactattgagttctatgaaatgatgccaccaacaaccacacccactcattgattcatttggttccctcactttccccacttcctttgtctccatataaacccttcaccctgtgacccttttcccactcccaaacccctctcttcattccaattttggcaccacaccatgccaaccctcaaccatgtcctcacattcacattcttccttctcctctcttgccattgccacctcctcaatggccaagaggacacctcatttggccgtgccatagacagaaaattgttaggcctaaagagaaaagaaaagctcagccacttcaaattttattggcatgacatagtgagtggccgcaaccccacttcggtggcggttgttccgccaccgccgaaggtgaacacgaccacagcatttggcttggtgaacatgattgacaaccctttgacgttggggccggaattgagctccaagcttgtgggaaaatctcagggtttctacgcgtcggcctcgcagactgagattgatcttctaatggctatgaactttgctttcattgaaggtaagtacaatggcagcaccatcaccatcttggggaggaactgcgtcttccacaaggtgagggagatgcctgtgattggaggaagtggactcttcaggtttgctagagggtatgctgaggctaggactcattggcttgatctcaagggtggggatgctattgttgagtacaatgtttatgttatgcattattgattgatgatttaataattatgttatatagaagagattatacttttagcttttgctttagcaattggcaattggcactctttgtttcttttttttttctttttttctttccatttgttgcttttgattcttaattagctttgccttttctagaggtggggtttgttcttgtaagcccatcttaaaatttgttccctatttaattatgtatttgtggctggtgtgataattggaataataatttatgatgcaattggaaagtgagtagcgtagatgtaagtggcatggaagaggagggaagggcgagacgcgcatgaggaggcgaaatntacgatgaggtaggagaggatcgagtggtgtggtgtggagcgtacgaggtcgntaatagtgagttagacnnagagtaaggaaatgcatantggaata

SEQ ID NO: 76206 - DNA, 707 bp, Glycine max
  Clone ID: PAT_MRT3847_39828C.1
attccaggctcgagcctcattccaattcattttggcaccacattaactctaaacacaccatgccaaccctcaatgatgtcctcacattctcattcttccttctcctctcttgctattgccacctcctcaatggccaagaggactcctcatttggccatgccatcgacagaaaattgctaggcctaaagagaaaagaaaaactcagccacttcaagttctattggcatgacatagtgagtggtcgcaacccctcgtcggtggccgttgttatgccaccgacgaggatgaacacgaccacagcatttggcttggtcaacatgatcgacaacccgttgaccttgggcccagaattaagttccaagcttgtgggaaaatctcaaggtttttacgcttctgcctcgcagagtgagattggtcttcttatggctatgaattttgctttcattgaagggaagtacaatggcagcaccatcaccatattggggaggaattgcgtcttccacaaggtgagggagatgcctgtgattggagggagtggactcttcaggtttgctagagggtatgctgaggctaggactcattggtttgatctcaaggctggggatgctattgttgagtacaatgtttatgttatgcattattaattgatgatttaataattatgctactaagagagatcattatatatactttttagtttttgcttt

SEQ ID NO: 76207 - DNA, 430 bp, Glycine max
  Clone ID: PAT_MRT3847_39829C.1
tttttacacatcaaagactaaaaaaacaaccaaaatcttccaaacagagacaagcatattggatcaaatgatgccattatattcagtcaaaaaccaagacttccaaaaggctagttagatcttcatcttaactactcaattttcatggtcatcctctgcctttatttatcagtccatcccccatctgatcaattatttttagtagggtttctgttgtactccccaaatggtcaaaccatcataggcaagattcaatcatcttttcccaagtaggtgctactactttctctcatgcattaattcatgatcttatattttcttgtattatactttttttgctactttattacccaatgctgatctaggctgttcaataaattttcctttgagcttgagacacctttcaatcagaaataacacctggaacatt

SEQ ID NO: 76208 - DNA, 639 bp, Glycine max
  Clone ID: PAT_MRT3847_3982C.1
aattcggctcgagattttatttgtctgctcaaggatccatttgtagggttgtaaatacatatgtaccttagtacctctggtactttttattatatatataaaattacttttgctgatcaaaaaaaaaaaaaaaaggaggaagtcgcatggtggaaggggatgcaagaaatgaagggagcaaagagtgaaggagggaagtgaaaattccattgttaatgggagatgatggatgagagtgggtcaatctggttgagtgatatttcgacctcatggggtggctgatagtgatagtgcagactatgacagtggttgtggagggtagagtcttgtcgtgttctgatggagggtctatgcttgcagaaactagcgtggatggtctttgggatgcaggatttgaaggtaatgaaaatttaacttatggtcaaatacataatttggtagtggatacaggacacaggtttgtactgatttcaaattacaaaataaaattcgaaaagaaaaggtgaccagtaagcaagaggtgggaaccttttgtcaccaatatgggatagaaactattagagctcccagtgctatacagaaaagaaaaattagaaaacaatctaaaccaataaatgtttatagaaaaccttaccaaaa

SEQ ID NO: 76209 - DNA, 568 bp, Glycine max
  unsure (1)..(568): unsure at all n locations
  Clone ID: PAT_MRT3847_39830C.1
ttggtagtatttcacgctgacatatactaactttcttcccaccctaacaacactatcttgttcacatcaatgatatcatcacctgggtctaatctgagaaagcctattcttccatattgcgtgaagaatcatatgaaacaagtcatacttaacaggaactttgtgccacaggaagtgctgctgaaccttctttactcccaaatgcagtgccaggtacttctcttctgggattgagagaagtatgtctctgagacttgggacatccctttcacgaacaaacagggaaaatgcctcccacttcaatacctcaaataaaggaggcacataattatctgatatgataactggcacacacccagaaaaaatggcctcaattattcttggggtgtgaacctcatagcctctagcacatatgcaatacttgctgctattcatatattccatatacatctttttaccttccaaatcacgtggcattggaccaaatattttcatgtcaggttctttattcgcccagtgttttagcaggataggacggagatnaccatgcatgcttcctgcaaaaaag

SEQ ID NO: 76210 - DNA, 642 bp, Glycine max
  Clone ID: PAT_MRT3847_39831C.1
ccccttttttttttttttttttttttttgcaaaggaaaaaaaacattttatagcattcgaaaataagaactcaaatttattgaagttatatggtttacaagtaattaatttacaaggtaagcttaaccaccaaaacaacaaatgtaatttttttcccttgcagcagtttgataaagaatatcaaagcttccctaaatgcattgacttcttgaaaacacgcattatcttgtcagttgtcacccaaacaactaatctttcaattacaagtatctttatgtaatcagattgaaattggcattcctcaggagagttgaatttcatagggtggggatagaggtattggtagaaattcattccattcactacgtattattagccatcgaatgatactgccacaaaggctaatttttccaagagtttgacaactccatgattccttatgatcttgggtggtttatattgactagctgatgttccctttttaatggctaatttctgataactgatcaaaagcttcaggccttatgatgaatatccgtaagctccttaattgacctttatccttctggaccttgtatttagcttccaaccccacttttaagagaggtgattctttttttaaaaatttttactgattccttt

SEQ ID NO: 76211 - DNA, 460 bp, Glycine max
  Clone ID: PAT_MRT3847_39832C.1
ggctcgaggtatcttaaacgatcatcgagggtttttttcttaactgaactctgtcttctttctgtgtgcatgttaacaagcccaatattgacgctcctaggccaacatgagaacataacccatgtggcaggtaccatttctctttggccaactcctatctcacctgcttatactgcgtcattgattaggctgacattactctgatctcagagcaagaatggcgtaatggcattcttggcagatctatcaacaatgattcatgtgctgacttgttggctattgactatacaattcaagtttgggattccgggcgcgctgatctctacaattgagacgttgcggattcctactattgggcaagtaataatgaccacgagcgggtggtgccatgaaacacggcaaggtctctcattgatagcatacatagatcttgagcctgttgtcaagctgtccctttcat

SEQ ID NO: 76212 - DNA, 167 bp, Glycine max
  Clone ID: PAT_MRT3847_39833C.1
tagggcgatgcttatgtattcaacaccagagtgagattgtgctacagtgtgggaggagatagtgattccgtggctttttactcccatccctcaccaaatacatagccagagtggtgagcaagactaggtcccgccaattgcctttgcaccaggacatttctacatcc

SEQ ID NO: 76213 - DNA, 415 bp, Glycine max
  Clone ID: PAT_MRT3847_39834C.1
cggtctcgtgggcggacgcgtgggctgacgcgtgggcagaaatgctaactatactccgtggtgtggactgaaaagtgctgcataaaaggacacaccggctgctggcttgtgggtcaagactgtccttttgtagaagggatgattgcagagcaggatgtgagctccatggtggatatgcgctaacagctatgtggagtagcataaataatgagacgctaattaactctagttgtgaaaaattgctgcgccagactgaagctccaggtgtgagatgacaatcgttgaaaaattttgattctttgtgcgtgtatggtgacgataacttaattagtgatcatgaatgtgacaagccttacttttgtgtatgtaaaatgacaagctctgtatctggctataagattgccattactgatgg

SEQ ID NO: 76214 - DNA, 360 bp, Glycine max
  unsure (1)..(360): unsure at all n locations
  Clone ID: PAT_MRT3847_39835C.1
gggtaaagcttttttaaactaaaactatataaccaaagatccaaagtgaaaaaaacattggccagaagctctaccaacgcaacggtatctaattcacatcacaaggatgagggaccttccaaggcataaaccgagctattggaaaccccctccctaagggtgtgggacagccccancaaaanccatancaaaacaaaacccctcnaccggggggggcagaggggcacaaatacccacaagaggcaggaaaccaaagggaacctaccaacgatgaacaacaccgacctagctgagtacatgctctggactaagagggaaacactaagagctacctgccaccttgatcacggaaggactgac

SEQ ID NO: 76215 - DNA, 398 bp, Glycine max
  Clone ID: PAT_MRT3847_39836C.1
ttttttttttttttttttttttttttttttttttttttttttttttttttttacttttttttttttttttttaacggaaaattaaaaatttttatttttttggggttttttacaataaaacataccccaggggggggggtttcaaaccaaccaaaccacaaattttttgccctcgaattagcaaccaattccccccacaatttcccacttttgtttttccctctgaacaataaatctccaaacagggttttaggccaaattcaactgcactggaaaacaaataatgcgcatccatgaaccaaacccttttttggggagggggaaaaatggcccaagcggggggggccgccacttcaacaggggcagcattttatttgcaagtgcattttttttggcgg

SEQ ID NO: 76216 - DNA, 1045 bp, Glycine max
  Clone ID: PAT_MRT3847_39837C.1
gggtttgtgtacgctagggggggtcccttcttgccgcttctggtgattcgggtccgcttcgtggggtggcggtgttgtgcatattgttgggatgtggaaactggtaaagtgaaaatggtattcaaggggcacatggactatttgcattgtatagttgctcgcaactcatcaaatcagatcataacaggttcggaggatgggacaacacgaatttgggattgcaaaagtggaaagtgtacgcaagtgattgatccagcaagagatttgaaattaaagggatctgcttcatgggttggttgtgttgctttagatgcaagtgagagctggttggcttgcagtagtggacgtaatatatcactttggaaccttcctgcttcagaatgcgtatcaaagattccaactcgtgcttgtgtacaagacatgtcatttgacaataatcaaattttgacagttggtacagatcctctactcaatcgctttgacatgaatggcactatcctttcacaaatacagtgtgctccttcgtcatctttttctatctccttacatcctgcaggggttatggcagttggaggttatggatgtcttgttgatgttatctcacaatttggcagccacatgtgcacatttcgttgccagtgtgtctaagcaaagatctaatatagtttgacaattttgatacctcaaggccacccaaaacaatttcgaagtcaacgaatgacacgcttcgggatttagtacagaatcgcaagctcttcgaaagtttgaagtttgatcgagtgaatcgtggatatctgtattatgtggattacctgaaaaaagagattgttttttctgtttaggcttctagtactgagttttttttttttaaaatgggagtagggtatgaaaagcttgtatcacttcggaagtttttgcttcctgtgttaagtgttagcatctaaagtccttatgctgaatgagtaacatatcttccattcttctcataaatatgctactcagcttatttaccaaaatacaaagactcctcatctgcatcatttgt

SEQ ID NO: 76217 - DNA, 352 bp, Glycine max
  Clone ID: PAT_MRT3847_39838C.1
aaaaaaaaaaaaaataaaaaaaaaaaaaaaaaaaaaaaaaaaaaaaaaaaaaaaaaaaaaaaaaaaaaaaaaaaaaaaaaaaaaaaaaaaaaaaaaaaaaaaaaaaaataaaaaaaaaaaaaaaaaaaaaaaaaattgacgagcaatatataatattctgatgtaataaaaaaaaatgaatggcattagcttacttattatattatatctaaattttttattccgcaaggattggttaaaagatatagaggatcaaaacttacttattatcaaatgataattcaatactgaatagatagtggtacttacattgaagatattaattaagggggcaaaacgtaatgatttcaca

SEQ ID NO: 76218 - DNA, 684 bp, Glycine max
  Clone ID: PAT_MRT3847_39839C.1
tatcaaagattccaactcgtgcttgtgtacaagacatgtcatttgacaataatcaaattttgacagttggtacagatcctctactcaatcgctttgacatgaatggcactatcctttcacaaatacagtgtgctccttcgtcatctttttctatctccttacatcctgcaggggttatggcagttggaggttatggatgtcttgttgatgttatctcacaatttggcagccacatgtgcacatttcgttgccagtgtgtctaagcgaagatctaatatagtttgacaattttgatacctcaaggccacccaaaacaatttcgaagtcaacgaatgacaagctttgggatttagtacagaattgcaagctcttccaaaattaagtttgaaatttgattgagtgaattgtggatatcttataattatgtgaattgcctgaaaataaaaaagatattattttttctatgactgtatttaggcttctagtgcgaggttttaaaaaaaaaaataaaaatgggagtggtggctgaaatattaaagtaggaaaagcttggatcacttcggaagtttttgcttcctgtgttaagtgttaacatctaaagcccttatgctgaatgagcaacacatggcctgtctgtactctggattccattcttctctacatatgccactcagcttatttacc

SEQ ID NO: 76219 - DNA, 363 bp, Glycine max
  Clone ID: PAT_MRT3847_3983C.1
aagccacttccgcgggttttattagccaatcgatcattacaatttcccaccaaccggcctaagtctacctgcctacctgacacaaccattattaaccgggcccccaacttaaattcttgatcaatgaattgaaatccgtggaataagaaccttctttcttcacaagacgctttggcattccagccagcttttttggtttggtccttaatttctttggcttcttttcaaacatgaatcttcttaaaagccttttaaacgggttcttttttaaaagggccctttccattattccaattcaaggttggacccctacccttaacccaattttaacttttgtccgccaaaacctaagcatggaaaaat

SEQ ID NO: 76220 - DNA, 172 bp, Glycine max
  Clone ID: PAT_MRT3847_39840C.1
catccatggtcagaggttatatatgactatggagcagaggaggtattttagggaggagtatggaattgagacctggacttttattcagaagttacgagatgctgtttttatgcgagttggtttggctctctatgtgataaatcaggatggctgtatcaaggcggcactggag

SEQ ID NO: 76221 - DNA, 669 bp, Glycine max
  Clone ID: PAT_MRT3847_39841C.1
agttttctcgagtgagagtgtgggaatgaatgaagacaatctctcttcctccgactcttccacacagcgccgcggcgtaactgtggaccagtgccaacgcatgattcataagagtctcctttctccgcaggtgaagttcctgagggaacatttggagaaagctgggtgtctcgttggagataatttcataaaagctgttaagtgtgacaacattgcaatagctggtggttatactcagggtgaagggatagttgtgtgctgcaacgagatggaatctcaagatgatgttgaccagctgttaaagcatgagctaattcatgtatttgatgactgtcgtgctggaaacttggattggacaaaatgtgctcaccatgcttgtagcgagataagagctggtcatctaagtggtgattgccatttcaaactgggaacttcttaaattagcttctctgaaaattcgagggcatgaacaagaatgcatcagaaagaagaggtatgaaatcattgtctgcaaatccttattgctctggggtggcaaaggcttccttggaatcggtatgggatgttggttacaatgataccaagccctctggacagagccccttaacaaaacaattgcctggttgttactgcatttaatataccagcaatgtgttccattttgggctt

SEQ ID NO: 76222 - DNA, 498 bp, Glycine max
  Clone ID: PAT_MRT3847_39842C.1
gggcggcccaggaaaccaaaagggggatttcggccgaaaaaaaaatatttggttcagcagcaaacttaaaaaccaccccccgggggggggcaggaaacaaaccaaggaccccgggggggaattttggggaagaattccccctagggaaaccacccgggggaaaaaaaacaaaaacccgggaaggccctttttcaaaagggggggggaaacaccctaatccccccaccattggaacaaattggccaacgggagaggggcccagaaatcttggacaagcgaggggcccccaaacacaaatttttggggtttacagcaccctggggaagcaaaaaaccacccccccaaacaaattcttcctttataaggaacaaaacagggggggcccgccccctttggacaaattttgggcccccgcctttgaaaaacccattaaaccccccatgggggatcattttaaaaaaaacccccccgggcccctgggaaggggggccccgggcc

SEQ ID NO: 76223 - DNA, 393 bp, Glycine max
  unsure (1)..(393): unsure at all n locations
  Clone ID: PAT_MRT3847_39843C.1
catctgtgcgctgtgcagtgtttaaagaagatgtaaatgctgcgatactggatggaaaagaaatagatgtttcttttgacaacttcccttactatttaagtgagaatacaaaaaatgtcctggtggctgcttgctttatgcacctcatgcataaagaacatgaaaagtttactgcagatcttacaaccataaaccctcgtattctactctctggacctgcagggtctgaaatatatcaggagatgttggtaaaagcacttgcaaaatactttggagctaagctgctcatatttgatagtcatttgcttttgggtggtttatcttccaggaagctgagctactcaaagatggacttaatgctgaaaaatccttccgctgcactaaactaantcc

SEQ ID NO: 76224 - DNA, 159 bp, Glycine max
  Clone ID: PAT_MRT3847_39844C.1
ttgctcgagccgagtcggcccgagcaagaagacgaagttctgctgttggaagagcgtgtaggtgaggccaaaagattagccgccatgaaaatgaaagacactggacggaagaacaaaccgaggggccaccaacatatgtgggacaggattagatttttt

SEQ ID NO: 76225 - DNA, 465 bp, Glycine max
  unsure (1)..(465): unsure at all n locations
  Clone ID: PAT_MRT3847_39845C.1
ctcatcctctaccactaccaccaccacaacaacaaccactaccttcctcctactactactctacctcctcccaacacattccttcttcaaccacaacccaacaacttcttcgctctctgtcaagcactcttcacacgacagcctcttaaactcactcaaccgtctccacctccaagtcacctgacttgccggatccggttactgctctataatacgttcttctcttttctgactcttccatccgggactgtttgctgtttccacacggaccaggccaacctccattctccggatcactctaacatcgtccttgaggccttcattggacctgcgaggacttcttccacttccctcttacaatatgtacccaactcccncagcatccccaacccaaaatggattctgcgcacccgaagaccgcctgggtcaaagtctagctggtcgactccagttgactggcattct

SEQ ID NO: 76226 - DNA, 346 bp, Glycine max
  Clone ID: PAT_MRT3847_39846C.1
gacagatcttgttgcttatggtcgcttgttcttggctaatccagacttgccaaagagatttgggcaagatgcgcctctcaacaagtacaaccgtgagaatttctacactcatgacccagttatcggttacactgactacccctttcttgaatgaaaccaatgattaagcatccacagggaaacatcattcttttatggaaaataatatttagacatctaaaatgctacatgaaacttgtgagagagataaaagagaatactataggtgatataacatgatagaaagagagaaataaagaaaaataattagttttaagcttaggtgtttgaaaaaaattgtgataga

SEQ ID NO: 76227 - DNA, 2213 bp, Glycine max
  unsure (1)..(2213): unsure at all n locations
  Clone ID: PAT_MRT3847_39847C.1
gttggatgccaatgtcaaggaactggggtcagaactggcaaagcaacaactaccttaatggtcagagcctctccttcaaggtcacaacaagtgatggcagaactgtggcatccaacaatgttgccccatctggctggtcctttggtcaaacctacactggtgctcaattccgctagatcttgttgtcacacgcataccagtagtgctatatagtataatagatatatagtattatgttctaggagtattattatttttatgactggttagtgtactagggtattagatagtatgctactaggtgaagggtaagtttttttggtgattttagaggccagggaattaagatctaagaaggggcatgttttaaattgctccttcattttaattttaatttctcgggtcaacaagtggggacctaattttttagaaagggaacccgctcccgccccatttctcccctcccctcctctctctcttttgctcatttcctttgactcctcattatcaaagaaaatggctctcattgggttgctcttgatgggttttctcacaatgttctcctctgctcatgcctatggtggagggtggactaatgctcatgccaccttctatggagggagtgatgcatctgggacaatgggtggggcatgtgggtatgggaatctctacagccaagggtatggaacaaacactgctgctctaagcactgcactgttcaacaatggtttgagctgtggctcttgctatgagattaggtgtgccaatgaccacaggtggtgcctccctggctctattatggtcactgccaccaatttctgtcctccaaacaatgccttgccaaacaacactggtggctggtgtaaccctcctatgcaacactttgacctctctcaacctgttttccttcgcattgctcaatacaaagctggaattgtgcctgtttcctacagaagggtggcttggaggaggaagggagggatcaggttcacaatcaatgggacactcctacttcaactctggtcctcatcacaaacgttggtggtgctggtgatgtgcattctgtttcaatcaagggttcaagaactggttggatgccaatgtcaagaaactggggtcagaactggcagagcaataactacctcgatggtcaaagcctctcctttaaggtcaccacaagtgatggcagaactattgtgtccaacaatgttgccccatctggctggtcctttggccaaacctacactggtgctcaattccgctagatcttgttgtccaaagttctaagtcacacattcaaatactactactatatagcataatagatatatggtattagtaggttctaagagtattattattatgagtttatgatgactggttagtatactagggtattagatagtatgctgctaggggaaggggtcagttttttggtaatttttgaaggccagggaattaagatttaagaaggggtatgttttaaattgctccttcattttaattttaatttcttttgtgtcaacaagtggggacctatttttttaggcccttcttgattacaggggtgtttttttatataactttttcagaagtgtttttttgaaccttcggtggctgaagagaagaagctagtgaaggtggagttcttttttatgggtgaggtactaaattggaagaggtggactttgttgttaccacccgccaattagtattgggatagtgtgtttttcattttggtgttgttattggcagttttattaagtgttgtttgctttttattactgatccttttgtcatcagcctgggctgtgtgtcttcggttgtgttggagactgaaaatgtaaattttcttgaaaggaaagttactgtagttactagtaatatttcctttttatttcttaattgctaagagttatatttaaattgggctaccttgctccctcttgtcactttcaactttntaaaagtntttttttttttttaactcaaagcttttggggagtttccctgctttctatccaagtggtaaatgatgcaactttcttcttagagttggtaaatttacagtgaaaccactgtttttggcttaatggggttaattaatataactttatgctaaatttgtatttttttaatgtgtagaaccaaatttttaatttttaactgatacaaataaaagttaccccttttttttttttttaaaaggggag

SEQ ID NO: 76228 - DNA, 735 bp, Glycine max
  unsure (1)..(735): unsure at all n locations
  Clone ID: PAT_MRT3847_39848C.1
tacgaattcgagctcggtacccggggatcctctagagtcgacctgcaggaaggataggaagcagaatacatattaacatcaacagttaaacattggcggtgaggacaacagacaatatcactgacaatagtcttatgtcaagtaacggttaacaattacagatattgaactagatatacacctgtcagaattttggaaatcacaatggttacagttcataaaagatacagctatgaaacacaacatactgaagaacaaagttcatgtgacatgggaaaaaatagacaaatagaaataccaaacttatagagaaattcctgaacaaaagagcctcgcagaaacactatagactcattaaattcaagtgtatcatcggtttgcactgccaataaagttagcataacagagatataaatctttcattccacaagtcaataaataaaaacaagaaaaggcaacaggcaataactgaaatgtatcaagaatgagaatgagagattggaactctttcaaaatgctgaatatgggtcatttttggagaaaaacacatgcatggtcacaatttaataccaagggaaaatagagaattaaaagacattcacacttaagtcctgagtaataaactccaaagagaaaatattgcagaatgatttcattatcagcatattntacatgataaatttaaaaattacaatttacaacttgttctggccagacctgctaatgtatgtaata

SEQ ID NO: 76229 - DNA, 233 bp, Glycine max
  Clone ID: PAT_MRT3847_39849C.1
ggtaggccttcaagccaagcggacagggcataaagcgaacagaaaaacaaaaacaaaaaaacagaccaaaaccaaaacacaagggcgaggagagacaagaacaaagcaagacacgggaagaggccaggaccggagaccaatccgaagggcaaggcacaaaaaacctccagcccagagcagtggaaaggattgctaaagccacggcccaaacagaagggccagagcccttccca

SEQ ID NO: 76230 - DNA, 214 bp, Glycine max
  Clone ID: PAT_MRT3847_3984C.1
gggatatatccaacgactatactcgaaaaacatggtgggagtatgaactatcaaccttatctttcatatcacatacaaaagataaaaattcctaacttactaaactattacccatagtaatctacctgaacagttaaaaatgatcaacaacgattgcttaaacctttaaaaaaaaaaaataatagggctgtcaaccgcttttgctctcacacac

SEQ ID NO: 76231 - DNA, 203 bp, Glycine max
  Clone ID: PAT_MRT3847_39850C.1
accttcgcgagttagggcacgctcgcacccaaggcccagattgaccggcgactgctggctgcaaagatcggcaggccttggataccattgacaacttcgcgggtcaggccgagctgaaccaaaagattgtggaataaatgacaaacgttgctaagatcgaggggaaactgactgactaggagctcaacttgctttatattggg

SEQ ID NO: 76232 - DNA, 452 bp, Glycine max
  Clone ID: PAT_MRT3847_39851C.1
ctttctcttcaaaaatttgccttccttgcccttctccattctttatccatgttccttcgcactttacatggctattttttttttcctcatgcttcattcttttttcttcccgtagatttcccacttcgcattctgctaatttttatttaattttttttttctattaattttacaatcatctttcattttcttttgtcttcattactgtattgttattgtaagctcctagattgatggtgattgtttgcataaattttgatttatttatcatgaatttctttaattttttcgtttgttttttagatttatgtgtagtataaattatttagtttgtatttaataacgtcttaggataatatgtttatttcacattaataatgttaatatcattaataaattttatccaaaaatttagtgtgattaatctaaatctcctgtttatatagttatca

SEQ ID NO: 76233 - DNA, 512 bp, Glycine max
  Clone ID: PAT_MRT3847_39852C.1
gctggtaatatgtcccattacagcatgttcataaaattatagagtaatattttttacatactaataatgtgatacatatcatttctctctttttattacttcgtatatatataatttatcatatttatacctctttttctgttgatttttttcttcttcatctgagtgtctattagcatttagcatggaatgttcacacattatttttaatttatcaaaacctagcttactgaggtttataattcataaaaactattatgtaatttatatgggtaatgaaataagtcagcattaggatttttttttattaattgagaattttcaaaattaaaaaaaattaattttattatttgtaaaaaaatgttttaaataaattgatttttttagataatttgtaatttaattttttttgtactttacctttatttataaatgcttatatgaatcacgagatacttactgatgattgaattaaaaaagaatggtgacataacggttgctaatttacatgg

SEQ ID NO: 76234 - DNA, 692 bp, Glycine max
  Clone ID: PAT_MRT3847_39853C.1
catgctaatctcaccaaataacatttttttatcagtataaaattcaaacaaataatgaaaagttgaaaaatctcagataatatattgtaccatttatattctcatgccccctttgacgacaaatatttggtaagtaataatttactttcaaaattccatttctcacattttgaaagtccccccatcccactcaatagaagccactcaggaattactttatcctatgagcccttatcagctacgctatcttttccattattctattcatcctcgattggcgtgggttacaccaacttccgctggccgaataacacgatcataaagcatatatcctgccttcagaacagctgcaacagttcctggaggcttagaaccatcggggatttggaagatggcattatgcctgtgtggatcaaagggctcgttggtaggatcaaatttttctacaccaaactttttaagtacctctactaattgtttctctgtcatttcaacaccttgcagaagtgttttcaggagttttaccacttcagcagagtcactagacgtatcaatttttgaaaaattttccgttgcaaccgaggaagctcttcccaaattgtccgcaacatctagtaaactctttgcaaaattctacagcatacttaaagcacggagcaaagttgaagaggaaattatttgggacaaaaggg

SEQ ID NO: 76235 - DNA, 164 bp, Glycine max
  Clone ID: PAT_MRT3847_39854C.1
cgagttttttttttttttttttaaacgacgataagtatttttcgattgaatttcattggtgatacaggcattgtctcctacgatataaatttcaaattgaaatcctgttatccacacaatgaagaggagacaaataattgatcatttaaagattccagaatatt

SEQ ID NO: 76236 - DNA, 1110 bp, Glycine max
  Clone ID: PAT_MRT3847_39855C.1
ccacgcgtccgcgaaaatgaaacgatccggaattgggtcttggagctcaactcggtcactgtttttgcgggctggtacaaaacaaaagctttgatcttttttttttcttttgctttctattgaacatttgacacaattgatcttatggtcctatcagtttttgtttttattgtctgttgcatgaaacagaatgggtgctgatttcataagctgtatgtgactcatgtacccaaatgctttttggctttttgctttgataagtctagtgctaaagttcatagtggcaatttgggttgttgaagttgagcagtgttatgagaatttgtgagatcagagttattgcataatttcaagtgtggaagttgacagatttagtttaactggagtaaatagtgagcataaaaagaaaaggaatctgaggaattggggagacaaagacaatggatttgcatttgaagagtttgtttaacagatttctggagcaatttgggtctggtcctggtcttggccctggatctgggacatgtatgatgaaagtggatggcattgctccaaatttcattaaatctatatacaaagcttctgcagctttgtatagagctgagccgtggaagaggctgcgtccagggcacttgtttggcgtccgggttgggaaagattcggattggcctggcaagaaacaaccttttccatgtgttcagttcattggaggggatggaggagatgttggattttacatgtttagatcagagaatgatgctaagaaaatgacagggtctagagagaccattcatgttccaaatgttgagcttctgagggtcacatatgaagtggagtctttgatgttcccttctaaccggaagatgatcaagtctttgtcattggaagcatcaggctcagatcggtttccagttattgatgttgcacgatgcacgccatctggtgatcttcgatttagaaatccaaaccttgaagagcttagatttgtctatgcattcatgaggccatttccctggtgcactccttacttcaggttgacagggaaagtggtccaaagtattcaacagtggtgtgttttgaaccttttatagagactgttgatgttcagtg

SEQ ID NO: 76237 - DNA, 225 bp, Glycine max
  Clone ID: PAT_MRT3847_39856C.1
aaaaccaaaatttctatcaaaagaaacctaatatctactttaaaaaaaaaaaaaaaaacaacggcccccatctattgaactggtacacccatcaattaatcaaataccgtaacctgcacacgtaccatcacttcctatagagaaccgtattatagcatgccgtaaacatggacataactgttaactctgagaaactgaaatacgctcacaataccacacaacata

SEQ ID NO: 76238 - DNA, 213 bp, Glycine max
  Clone ID: PAT_MRT3847_39857C.1
atggaaggggaggaatatctcaactgtgcactaagaccacacacccaacccaaaaaccatgctgttttgagggggaaaatgggttttcaaagaagcctcaatctagcgccacttatcaccgatagagccactattatggccgtgattgcagccactacaccgttattcaaaactttacagtggccgctttgcgctgctaaagtgcgctattga

SEQ ID NO: 76239 - DNA, 1984 bp, Glycine max
  Clone ID: PAT_MRT3847_39858C.1
tattttctatgatacaacagttaatcagtaacagatggttggcctttgaacctagaagtgtgtcatactatacatatcgcaatcaacaataataatatcatcatcagaatacaaaccaactctctcagaattattatactagttcactctaattttttttttatcaataagaatcgaatagagatgaagaggtgacttataataatttatatatatttttaatcaaatgagtcgcacttttttgatactaattcacttaatcaccactttgaatctcacattttcttttaacttactactaataataataggctcatttatctgggcctaccggcattggatccaggcccaggataagcaggcccaccctttatagccccgccagccacttgatggaagccggcagaaccgtacacgtgtccctgatgcatcatgattccaccaggaacagcagcagcagcagcataattagcactctcgtaggcactgttggtagcattcgtaagaggaggcgcgtccttgtcacgcgccgccacggtcttctctccttccatttctcggaagcgctggaggtagcctttgagaggctccacgtagtcctcgaagcccagagtggtcatcgcccagagcaggtcgtcgccgttgatcgtcttgcgcttctcgcgctggcacttgtcggcgaccctcgccggtgatgaaagctgatgaaactttgacacgcacctcttgcaccgtctccttagcgtccttcgagatcttcgcgttcgccggcagcgccttcttcatgatgcggctcacgttcgcgatcgggagaaaccggtcctgctcccgcggcgacatctcgctccccttgccgccgttgtgcgcgccgccggagtcgttgtcggagtccgccatcgactaacggaaaaatcgaagacgcgctgagaaagatgaaacgaatcactaagtcagtgcagggaaaatatcggacgagttcgcgaaatcgatttgaatcgctttgactagttcgacgtgaaattgaagtactgttcgctgttcggaatttgaaaatcgattgagaattcgaaccacgaatccctttgtctctgttccacgtgaaattgaagtgctgtgctgtttcgcggaagaaacttgttcagaatctgaaattcagtgttcggtgcggttttcttcggaatttaaaattcgttcgggaatgaacgaggaattgagaatccgagtcacgaaccggcttgacttggtggttctgcgtggaattgaagcgctcttcgtagaagaagctccttggaaactgagattcagtgttcggtgaatttttcttcggagtttcaaattcgatttggaatatgaatgagaagttgaaaattcgagtcacgaactcggcgcgaatcggtttgagtcggtggttctgcgtcaaatggaagcgcttctgaaacgaaatcctcgagacctgaaaattgaaatcacagaatcgtgcaattttgtgtgggactcggaaagggtgtattgggagggtcggatacggtggccagcgaccggtgacggcggctccggcgggaaggggaaaggtgaaacggaacggtggggtttccctggatctcgcggaagccgctggaggtgaatcgtcagaggctccaacgtactcttcgaatcccagggttgtcatggccccgtaggagatcgtcgccgttgatggcctggcgcttctccctctggcacttgtccgacgcattcacccgttatgaagctgatgaactccgacacgcattcctgcaccgtctccttcgcgtcccttcgagatcttcgcgttcgccggcaaggccttcttcatgatcctgctcacgatcgctatggggagataccggtccttgttcccgaggcgacaactcgctcaagtttccactgtttcccgcgttctgcgcccctcccgagtcgttgtccgactcagccatcttcacaatcaatccaggaatcttcttca

SEQ ID NO: 76240 - DNA, 540 bp, Glycine max
  Clone ID: PAT_MRT3847_39859C.1
gcctctggcctcagctcggccgtctcatcggctgcatcaggcgcaacaagcgagggatccagcctcgcatccgccgtctcatctggcagcatcaccggctcagcagcctctgcctcggcttcttccatcatcgccggagccaactcgaccgtcgcgtctcgtctgtcgtcgctcaactctgagctgtccaccatcgcctccaccgctacctccctccgatccagcatctcggccgagatctcgcgtgccagcgcctcgttgtcgtctgtccaagctcaggtcacctctgccgtagactctgcgggcgcttctgcttcagcctcggccactggtgagggtgccgctatccagtacgctgcccccgctgccggcagctttttggccgccgctctcgccgccttcggccttttttgagcatagacccccgttacgcttgacgaaaagaatgtgaatactcgccttcgacgacctaggctgtaatctcggttcaaggttgcatgtcaatactagatagatatccaattgatttgcccgaacccc

SEQ ID NO: 76241 - DNA, 333 bp, Glycine max
  Clone ID: PAT_MRT3847_3985C.1
caactgcgtccgctagcaaaacttctgatcgagatgtctacaatcgaatacttgctacttttgggaggctggaccagcccatatgccctgagggtgccaattgccctgaccctcattgatctagaatatcacgacgaagactagacctaccatactaaacgtgacctgcttgatatgtccaaccctgtgcacacgaaaataccagctgtgtttcatgccgataaagtcacatgacaatgtgcgatcatagttgagcacatacatgacgcttggactaatgttccctacatccttccacaaaatgcttaagatcgcgctaatgctcgatcttgg

SEQ ID NO: 76242 - DNA, 235 bp, Glycine max
  Clone ID: PAT_MRT3847_39860C.1
ccacgcgtccgggcccttccatagcatctggtagccatacatgaagaggaaattgggcggatttagcgactgagccacaaaatagcaagagggcaaccaaagtaagaaaaaaaatattaacttcatttttataaatcaagttatttattatttgaaacaaatcccgaaattccaaccaattcccaaaaaacataaatttgtatcaaattcgaactagtaactaatcccaacattg

SEQ ID NO: 76243 - DNA, 276 bp, Glycine max
  unsure (1)..(276): unsure at all n locations
  Clone ID: PAT_MRT3847_39861C.1
tccaacctcagccactcgtttttccttatctttttcacaccctctnactttgnnacctacaatggcctttcccttcancctttcaagctccaagtttcaanagttttgccaaagtttnagaatttcnaaagcnnccnttccnantccnaagagcctgacccttnaccctcantagaagaaaccacagaaacttctgtccaggnggatgaggaggntganagtngttngcctncangatttggaaggntgantgcnggnattcnagcgagggcgngg

SEQ ID NO: 76244 - DNA, 259 bp, Glycine max
  Clone ID: PAT_MRT3847_39862C.1
ggctcgaggactgtcgtccatggggcatgtttattttctatttcggacctagatgtctgacctggggccgggtggctaaacgtgatgacgcaatggatggcctatcatgcgggttgtatggcaagctattgcctttttggggctaacgtcttcttgactggaactgcctggatttggtgcgcgacgttgtggtctgtccaatccgcctggattacggacacatctgctgcctccgctgatcaggagaggtgcattgcgc

SEQ ID NO: 76245 - DNA, 730 bp, Glycine max
  Clone ID: PAT_MRT3847_39863C.1
ggctcgaggagcaaccaaacgcctcgcctcctcctttgaaagcaatccatcgatcgatgccgttgcaacacccgtcactccaaagccgcgtgtcgttgtagagcgaaacggcgccgttttgagcaagtgggttttattgctgtgcctcctcagctcgattagatcaactcacctgggtgctgcgtgtgaagaaaagaaaagagagaaaaaccgaaacagaaacataaaaagtagctgccaatttcacgttctcattcttccaaattgaaacctcattcctcaatccacgagtttctcgtgacccttctctcatcatcgtcatcttcgtgccctaatcgattatctcgttgcgggtgctgatgattgattgattgggctataaaacgctgccaccgaccatgatcaaccattcataaacaaagagagaaaaaaagcttttttttgctgggtggttttttgtgtgcccaataattttggattgttttgttgtttttttgcattttccgatgacgtattacgagaatgacggtggtggtcggagagaagagtggtgccggacgttactctcaccatccaatccgatgatagcaatggggactatgtgaaattgagggccaacaacaacgacggttctcctccgagtgcggcggcggagccttctccgccgacgataagagccggcgtgtggtattgggtgaaattggaggggttgtttctattcctggggttt

SEQ ID NO: 76246 - DNA, 289 bp, Glycine max
  Clone ID: PAT_MRT3847_39864C.1
taccggtccggaattgccgactcgacccactcatccgtccacacatacactgacaacccttctggctacacaacaaggatactctccacggtgcacgaggctactttgaaggtgcctgcacttcacaattactgaatatatctacctagaacttacaattcaatacacgatgtccaagactcagatgacattacctatagtgtaattttcagatggatcttcttacgtcaatccaggtacccacgcatatattatagtgaatttcctcaattattctgctatttgcaaa

SEQ ID NO: 76247 - DNA, 245 bp, Glycine max
  Clone ID: PAT_MRT3847_39865C.1
ggggttactcacgctaaatgcaaccttcgggttcatatactggttggggcagttggtttaaatgcaatgactgtgggctgttcttagcgaaactctttacaacaggaccataagtggtctggatctattttatctggatgaactttctgctgtggagccactgctgaacggactggctctaaaatggctggatgaacactctcgcctaaagcgaggccctctgtctgactgcgtacacaatcacc

SEQ ID NO: 76248 - DNA, 281 bp, Glycine max
  Clone ID: PAT_MRT3847_39866C.1
ttggttccaatttttcaacccagtagttttccgtcaaagttcatttcatataccagtttatggtcttactaatctcaatacactagaactccaatgataacattctttttaagacgagtaaatcatattctggaaattaagctttcatagtaccattacattctttcatcctaatcaaatatacgagcacaaagtcctaagcaaatatttgatgatggccagggagggttgaatcgaggttagcaaatagcaatgacacattttgagtaatgcaacgcgtg

SEQ ID NO: 76249 - DNA, 569 bp, Glycine max
  Clone ID: PAT_MRT3847_39867C.1
gcactctacgaagctgcacctctagacggtcgacctggacgacttttttttctgattttgaaaatgaccaactcgatactcaccgtatctattaaaagaatcaaatttgggttgctaaaaggtcttggacaatcaaagaatatctcccacttggctggccgttctaaatattcatcattgaatgatcttgacgttctcgggcagcacaagcaatagttcttatctgcaaccgacgtgtaacaaaaagattaatcaggctccatatttttcctgaatacacatttttaaaaacggaactcaataatgatgaataacaggccatatttttctccaatatgaattacggtggctcaatgcccgatggctgcaagcatgtaaaaataatgtcgttggacatctataaacttgattaacaacggacacacacgacttcagttttcgcctctaactgacctgaatttcttgatctagcaaaacccaaaaaaaaaggcagcctttaattcatagccccacatattaagggcaactaaaccaatttttctaatgaaggggaaaccaaaacccaaaac

SEQ ID NO: 76250 - DNA, 416 bp, Glycine max
  Clone ID: PAT_MRT3847_39868C.1
actaactagcctattatactgtagctaattccattcccccttgtaatttcatccaagttcttatttggaaatagctccaggattgagtgttatgtattatttagagtttcaaggatgcctcttaaaccttgcaaggtgagacctaaagtagccacagttggaagtgctaatacaatatttaaggagttttattctattctgctgagacgccctcaccaattgactcttactctatttccaagtatgacggtgttggagatgtcttcttgtttatgacagagcacaactgtattatttgatccatgctgactccacttagagaaaaaatgcttttgttgttaggaggattagctggtcaattagtggttgcttgagtgctccgaacagttcttgtgactcaagcaaggattatatta

SEQ ID NO: 76251 - DNA, 486 bp, Glycine max
  Clone ID: PAT_MRT3847_39869C.1
ggctcgtgcgagaagaggtaagttgctgaagcacagctagccttgcaagttgctcaagatgcagctcaagccaaattggctagagatttaagtaatgagctgtatgaagttgatgtgattttagaagaactacgagagatggttgttaaaagattcagaaaaatgtcaactgaagaaaagagaaagcttggagatgctctcacccggttgtcacctgaagatctaagcaaagcattggaaattgttgctcaaaacaatccaagcttccaagcaactgccgaagaggtggatcttgacatggatgctcagagcgagtctaccttgtggaggttaaagttctttgttaaggaggctttagaagtgcagggcaagaactcaggaagcatgggtggcaatgaaaaccagaacaacatacggaaaagagagttgtgtgatgctattgccaaaacgaagaggaagaccaagaggcttacttgaagatcattc

SEQ ID NO: 76252 - DNA, 162 bp, Glycine max
  Clone ID: PAT_MRT3847_3986C.1
acgtgcgctccgaatatcgggtctggcacttgcttcgtgagaaccagtcaaagacagtacgggagaaaagataccagctcataccttactagttcctactgctgctactacattaggtcagccagtttgcgagtgttggaaccgggtttcagcgtctccgtt

SEQ ID NO: 76253 - DNA, 340 bp, Glycine max
  Clone ID: PAT_MRT3847_39870C.1
tccggaattcccgggtcgacaggcagcctgcctcgttttcgacgacgataccgtagacggccagcattaacgacccggttacggtgatctcgggggggatgtcaatccccgcggggcctgtccgcgcgcgcatttgcagcagcagcgctgcgcacattgcttagaacgcgatgccgatcggcaagttgacgaggaagatccagtgccacaacagctagctcttgaacagccccccaagcagtacgccgatactttcggcgcctgtgcatacgaaaccgtatacgcccatcgggcgcgcccgtttgcccggttttgggaacaagtttatgatcagcgacag

SEQ ID NO: 76254 - DNA, 361 bp, Glycine max
  Clone ID: PAT_MRT3847_39871C.1
aaaggggggaaatgaacaaacattgaatttaaccttgtgggagggcaaaactaaattgttttatagtttttaaaaggccaaaaaattttttgatctatggggctttttcacttaaaaacccaaattcccaatcaaaggatttttaaccttttttttattaatgacatggaatgctttcaaccaaaacccgaggggaaaaaaaaatcaaaagttttaaataagctttttaactggaaaaaaaaaagtttttttaaggataccaaattttttgtttttttttccagttggagccctatctccaaaaaaaaaaaagccttttgtttttccctttgctcaaaaaattttttcccacccaaatttt

SEQ ID NO: 76255 - DNA, 760 bp, Glycine max
  Clone ID: PAT_MRT3847_39872C.1
cgtccttgtgttaatttgtctctcccactttctgactttggatcttcttcttccctaaggttgtttagataaccataagaggaagaaggaggcccaaagtatataaatatatacacatggcacctgttttgcctcccggtttcagattccaccctacagacgaagaacttgttgcttactaccttaaaagaaagattaatggacgaaagattgagttggagatcatacctgaagttgatctctataagtgtgaaccgtgggacttgccagggaaatcattgttgccgggaaaggatttggagtggtatttctttagccctcgagacaggaagtacccaaatggatcaagaacaaaccgtgcaactaaatctggatactggaaggccacagggaaggatagaaaagtaaattcccaggctcgagctgtaggtatgaagaaaaccctagtttattatcgaggaagagcaccccatggctctcgtacaaattgggttatgcatgaatatcgtcttgatgagagagaatgcgaaaccaattcaggcttgcaggatgcatatgctctttgccgtgtggtcaagaagactgcagtgattcctccaaaagttggggggcactatgttaatgttcccaatgcgaacaagattacaagcgatcaatcatcaagcattgaactatactctgaaggaaggcacgaagatttagatagctcaaactatttgatgtccatggatatttgctcaccctgcaacatggggaatga

SEQ ID NO: 76256 - DNA, 395 bp, Glycine max
  unsure (1)..(395): unsure at all n locations
  Clone ID: PAT_MRT3847_39873C.1
tcattcaaaacattctctagatctgcaatgggtttccgtttgcctagtcttcaaaggtgatgtcccaaaaaaaaaaggctatcttgcagtctatgtgggagaaaatgaaaagaagcactttgtgattcctatatcatatttgaaccaaccttcaatccaagaccttttggatttgatcatccaacaggtggccttacaatcccttgcagagaagatgtcttccaagatataacttcttgctttcataggtcatagagaagagtgaaatgtaggtggtcaatgaccaattcaattttgtaggaagacagttgaaaattgtaaatgtgttatctttatttcttgtacttagagaattggaaagataaaangnaaggggaaagggaaagaaaaaaatt

SEQ ID NO: 76257 - DNA, 343 bp, Glycine max
  Clone ID: PAT_MRT3847_39874C.1
tagaattcaccgggaccagacatatgaaccttgaatagaatccgttgcgaagagcattatttgtgtgcgcaggaggagcgagggctcatcagacatgataaaatctttcctctgctcattactttcccatttacagggatgattaatcgcttactcctataaaaggatctttccaagaatggaaacacgcttaccattttggatgtggaggatgagagagttagttgattggatgacaatcagctgctgcatcgtgatgacgaagaatatttaccgacatgctatgctaagggtgagatgagactgtagaatagtcataccaataattctattaaaggttatt

SEQ ID NO: 76258 - DNA, 536 bp, Glycine max
  Clone ID: PAT_MRT3847_39875C.1
tcgatctatcgctagctatgtcccagagtgctgtacaccgtacaggcaacctgaagtaaagtagtgggtagataaacaggtggtggtagtcgtgagcggggttgctagaggtacggggaaccggtaactagtggtggcaaatgtggtgtaactgtcatcccaagggtgtactggggtgtgtcggattgtatttagtaaacggggttgtggtgcccgcggacgggagtccagttcccctaggctaacagggcagtagggtatcaagtagagtaggagtaaatatgtttaggggtgcccgatggaaggcccagcccggcttgtccagggtctatgtgtagggtgacccgggagcgtccggctcgggccgccagattttgggcatgttcaagcactggcattatcaaaacaggccggtggccgcagtctacgcggtaaggtaagaacggtccccaggcaggtggggataaaacgccaagaggcttggggggggggctgtgcacagagagttcggtaagagggtgggggagggtggggtg

SEQ ID NO: 76259 - DNA, 406 bp, Glycine max
  unsure (1)..(406): unsure at all n locations
  Clone ID: PAT_MRT3847_39876C.1
catgancaaaagggaggccatcattttggtgttggacgggcaaaaaatgttagggttgcctttgctcggggttattcctgaggatagtgaggttattagaagccccaatagaggtttccctcttgtgctcaacaagcctcccactttggccggattggcgttcgaacaaaccgcgtggaggctcgtggagcaagatagcatgcaggccgtggtggtggaagaacaacccaaacgtgggtttttctccttttttggtgggtaggatttaaacaaggttatgcgtaatggtgtgtatagttagttggttgggttagagcatgtttggatgagtgttgacaaaattgattttgaattgaattgatttgatttatgtttgaatggtttttattataaaattaagttagtg

SEQ ID NO: 76260 - DNA, 470 bp, Glycine max
  Clone ID: PAT_MRT3847_39877C.1
aaaaaaaacacacacttcacacattattacaacaattaaaagggggggggaaattttcaaatagacagagcatactcaacaaggggggcatgcctaatttcctttattgaattaaacaaccgaacaaacgaaagaaaccccaatttccaaatcatgcagaggattccgcattttaaaaaaatctggcataagcctgtggaacaaaaaaagctggcataagagtattaccagcaatttcaaaatcttgaaaaattcccaagaaaatatcaaaaactggccactgtttgggattgtcaataaggaaactcaagggcccttgaagtttgatttccccactcagaactccacatttcaaaaccattattaggaccacatacctttattgggaaaatcaattcccaggaatgtgggtccgattttgcccacttacatgcattaaaaggctctgtacctgggcgtgactttaaaaa

SEQ ID NO: 76261 - DNA, 538 bp, Glycine max
  Clone ID: PAT_MRT3847_39878C.1
ccggtccggaattcccggggcgacccacgcgtccgcgctatggcaccaacattcaagggctgggggggggggcggctcctcgcgctcttctccgccggctccgctgaagaattatcccccgcctcgtctccgggaccggggcctgaagcaggggccgcagactccgtgccttgcgccgccatcatgagcggggcctcgctcgtgttggggggggggggggggttcaaggtctaggggttcttattttgcgtttcatgagtgagttaatattccaaaataacatatataataaacttgagactttccacgggaccacttcagaggttattttattatttgtgtggggtgttatggggaaataacaggggttttatcctctctacatttttattattaattatgtgatgcgatatattatgtgatggtatatgcgatatggagataacttagatccaggtattttaaaaaaaaaaaaaaaaaaaaaaaaggggggggcggtctagaggggccaagcttacggacgcgggcgtgcgacgtg

SEQ ID NO: 76262 - DNA, 219 bp, Glycine max
  Clone ID: PAT_MRT3847_39879C.1
tgtggtttttttttttttttttttttttttggacaatatcatctctatattgtaaacaaggtacaaaaaatcggacagttaatcacattagttaattgacctgaatgacagcaccaaaaattaacttccctccagctagttgagatttctattcccatgaaacctatacctaacattcaactttggcaagagcattaggaacattcctgggttacgatt

SEQ ID NO: 76263 - DNA, 301 bp, Glycine max
  Clone ID: PAT_MRT3847_3987C.1
aaaacccccaaagggttcttctgcatagaagacgacagattgctacggcggcttaacgactacggaagggactcattctgcttctctattgctggctcatcacgtatcccaattcatatcatgatcagactctgtgtgcacgtgtgtgcatatgagctctcattatatttcgatagatctagattcttgagtgatctcatttacttactgaaacatacttaatatttaccatgctgagataaaatagcaaaattctgtagaaaaatcatctgatgtagcactgacactaagttttttcaca

SEQ ID NO: 76264 - DNA, 398 bp, Glycine max
  Clone ID: PAT_MRT3847_39880C.1
ccccttccttttttctcacccttttgaaattcgaggggtggcactgttgctacgcgatcaacatcatgaacatgaacatgaacatgaacatgaacactaagagcaggatgatcaccctttgggttgagctctatttttgctccatcacaaactcactagctgcttcaaagcagagccataatcctgccatcatcaactttggtgactacaattcagacactggaggactatctgctgcctttggacaagctggtacttctcatggagagtgctacttacatcacactgctggtcgatactgcgatgagacggtcattgctgatgtcttatccaagaagctgaggctgccttatttgagtgcattactcgatccagctgggtcaaagtataagcatgga

SEQ ID NO: 76265 - DNA, 1405 bp, Glycine max
  Clone ID: PAT_MRT3847_39881C.1
tgattcggctcgagctgacacatacactacagtataaccattggcattgacgccaacaccaatcttcatccaccattctctggaacaaccagtcagcgtccatgcctccggcttcaagaaggaaagcaaaacaagccaagaaacttaaaactttgaccattctcaaccaccattctcctccttctgatcaattccaaggggcagctgtttcaccaaaccacggccagaaaatggaaggatcgctcaatgtaacattacaagacagccacaaagtagaaacacaaacttccggtgaagataagaaggtggttgttgaagttgatgaagaagaggcaccacaaagtgtggagaataaggagctggttgagtcaggcaaagttgaagatgtacaagaagatgtttctgaatcagttggtgagacttttgagcctgatactgtgaaagatgctcaagttgagaatacaatggaatcagatactatagagttggaactgaagaaagagaaagggaaaggttttctatctgatctagctgtggataatcatgaggtgaaggaaacagattttcccttttcagagaacaataatgagcttttttcagtttcaggaaatgagggactaagagaaactgaagtggttgtggttgaaacattttttaagtccatgatgtttggtggagaggagaaggatgttttgtcttcagttgtgacagataagttacttagagagagtgaggaaccaaatgaagtctatggtgattcttctttgcctctaactgatgtggcttcagaggaaacaagtgttccaaaatcagatgacagtgaccaggttgctccaaccataattgagaaatcattggatttggagccaactttggacgagaaagttgaggaaccatcaggttgtcaagaagagtcatcctatgaaagtgccaaggaatcttttcaaccatcaccaagtgttcccgatgctgaaagcactgaaaatccgaccattgtccctgtggctcaaagggaaaacacctcttcgaagaggtcctgcggactctttgagattatgtggggtggtgatagataattcaagggcagagcatcttaaaaggttggaccttgagctaaggttattgaggcattgcacaatcataggctgtgagggtgtcctttctaaggagacaaaatctgttctgcatgcattctttgagcctcaaattaaggggcatgttctgctttgctttcctgcttcgtttcagagtaagagtggttaacattatatcttttgaaaaacgacaaaaatgtatggtacattttagttgtggcaaattgtaaacttccatgaactagaatttattatcaaaagttatcttacattcaccacgttatgatatatacgaagtaagttcaggtgtc

SEQ ID NO: 76266 - DNA, 404 bp, Glycine max
  Clone ID: PAT_MRT3847_39882C.1
gggaatgttgggacagctggtgcgcccgcgcgcggccggtcccggaatctgacccacgcgacccactcttcgcgtggggtcccggtacctcccattttccgtcctgtgttgcggacgcgatagcctgacctttgtttaaaaatacaagcgattctgcctttgtcgtgcacgagggacccttatattaactcacctatagcgcctcctgcgcggacctttatatacaaagtaaggctctgtagggtgaggctaagaatggcaatccgggaggcgagagaaagagagagagtgttaggcctatggaagggggaacgtccaaaaacgacgacgcatgtgagaaaaacgaagtgctgattgaacctgacatgaccgcggggcaaaagcattggtgtaccgcggcgaat

SEQ ID NO: 76267 - DNA, 731 bp, Glycine max
  Clone ID: PAT_MRT3847_39883C.1
gggtagaattggggggggatatatatacttcatatttcctgcctcaggccaattatcaacatgatcaacacctttaaatgatgagaaaataatccaagaaaaatcaaattacaaattcccaaaagctacaataatgctgaaagcgcaaaagagcccccaaaccctctttctttcagctctggatacaaggcaatgaatttgcatgtggacaagattacaagaatgatgcccctcaattttgaaccttctaacatgttacagtatttgagtgtacccttttaatacactacagctttacagtggaaaatacaaactcctgtagcaggtttgcctcctgctccaagttgtaaaagaacgagatcattctaaaagagtatatgctgaggcacaatgcgaaagacaatcacttgataatagggttgtgatgattccgttagcaatttttaagccagatagatcatcatatagtttagtcaagcactcttggctattctattgggcttctgaggtctattgaccttttgcaagacttctagatgggccatgcaacagtttgacaaatccaaggaaacttaattttccatcagtgtgccgaatccaatcatggagaacagcgtgaacagggacagatggaccaagcccaagctccgaagctagttcgtctatgactatggccttgtttccatccttttcaaaaaggtcataggcacaacgtgcattttgctcccacc

SEQ ID NO: 76268 - DNA, 271 bp, Glycine max
  Clone ID: PAT_MRT3847_39884C.1
gccgtttttctgcatataaagcagataacggtgtcttctcagctgttttgagaacaatagttttggggcatgccaattccggtgcaaccttccatgcaaacattataagagggaagttccaatgaattatttttccggtaacaccaatttgttcatgtgatggttgccacatattttgtccatcaatttgaaactttagaacatattttttatatttccaaccatcatatttatctgaattatgctaacaatcattggaacttcaattttt

SEQ ID NO: 76269 - DNA, 127 bp, Glycine max
  unsure (1)..(127): unsure at all n locations
  Clone ID: PAT_MRT3847_39885C.1
gtgctangcagaactggcncatttgtgggagcntactgnatgattttncacccctcgtgataccngnanttaccataaccatnccatattnccttnctgttggcataacaagttcacnannccttgg

SEQ ID NO: 76270 - DNA, 402 bp, Glycine max
  Clone ID: PAT_MRT3847_39886C.1
ttcaactcaaagatgatcactgtttctttgtttctgtatatctcaaaaaggaaaccgacaactcaaaggatttgcagaaagtgcagctagttagttccattttgcatcctccctccctccattgaatttcagtcaaaacaaaacctcttttaggtgtgaaattccacaagccaaaatcatctccgagacaccaacaaccgcaaccacatattctttatttattgaagtggatcaatacataaaaaaggttaattagtaaagtcacacgtgctttctaacggtggcgcaccagaggggtttaggttcaggttcggggaagttcttggcggcggaacaaggcggcgatgaggaaacggaagagagtactgtaggttcggttccgagccatgtggtctctgcagc

SEQ ID NO: 76271 - DNA, 131 bp, Glycine max
  Clone ID: PAT_MRT3847_39887C.1
ggcacgcgaccgcgaggctgatgaaatgctttccagggggtgcaatgatcagagctgtgctgcatcccaggtgcttacatctaagattcatggggcagcgcaatgtgcgacagtgcgtgccagtgctctag

SEQ ID NO: 76272 - DNA, 240 bp, Glycine max
  Clone ID: PAT_MRT3847_39888C.1
cgagtactggctaggctaagaacaacgcctttaaggcaggctagctggactaccactgcctctactgatggccttagagaaagaacttaactcatcaatcagtcagtctatagccttccagttttcaggatttgctggtcttaccgttgttcggaggagctcctccttctgagaacacgggttcaagggccttgctactccaacgagggcacccttatttaggcttcttcagtccatcgg

SEQ ID NO: 76273 - DNA, 461 bp, Glycine max
  Clone ID: PAT_MRT3847_39889C.1
gaggctcgcctaggcgagctgatccaactccaatttttctacttcgatagaaaaactcatatctcacattcaagatgttatgttgtaaatcccaacggtcagaatgtggataattttcatagccacctccgacaaaatttgaaaatgatccaatggttaacgaatcagggatgattagtttactaaaataggtttaggtaaaatttgaaatctcataattccaacttagctcatcaaaattcaacataactcaacatttacattaagaaattcacacatgactaattcaagccatacctcaactcattcaagtcaaccatatagtcatattacacagtatatacacttgaacattgattcataattcgtaatattctagggtgttacaatataatatttgggtcaactaatgattctctatgcaaagaattctgtcaagatatgcaacatgtatttgaaat

SEQ ID NO: 76274 - DNA, 1621 bp, Glycine max
  Clone ID: PAT_MRT3847_3988C.1
gccaccgccttctcatcctttataaactcataccttgccttcgtcttccctcgagccgctcgagcccatgaactcgtctccgtcttcttcccagttaccttcatcaagcgctgattttgacaagtttaatagtttgccgcgcttccgcccacttgaatgcttgcaagggaacccggttccggcgttcctgtccaagactttcgaactcgtcgacgatccctcgctggatccgatcatatcctggggctccaccggtgttagcttcgtggtgtgggatcctaccctgtttgcaagacacgtcttgccgaggaatttcaagcataacaatttctccagttttgttcgccagttaaatacctatggattccgcaagattgacactgaaaaatgggagtttttcaatgaagctttccagcgaggaaagagacatcttctgaagaacatccggaggcgcgggccacctcagtcccatcaggttggtggcaatattgtgccttattccgatgcagataaggccgggcttgaatttgagctagaaagtctaaggaaagaaaggagtgtgctaatgcaagaggtggttgagttgcaacaacagcagagaacgacacttcaacgtgcgagacaggtgaatcagaggcttcaatctgcagaactgatacagaaacaaatggtttctttcttggcaaggttatttgaaaagccagcatttttaaccagtctccagcatgcgaaggaacaaagagatttagggtgtcctaaagttagaaggagatttatcaagcagcaccaaggccaaacagaaatatcagattttttaaatgaagggcagattgtaagataccaacctgattggagaaatgtaaccacctcttctgaaatacaagaaatgtatccagtttcacttgaagagtctccaaattacctttctcaggctttggcaaaagaatttagtgaaggcacagagaatctgatatcagatgaagtcatgtcaattgctgacaccatggggtttaagtcatcaagctttggacttgatggtaaccttttcaaagggaaaaatgtcatgagctcaaacgaaggtcttcttgcagaggagtttgtgtctttcccagaggatttgaccaaggagacaggatttccagagttttcacctcttggaactgaaggcatcatcaagcgagaagataaacggaacaccaactttgatgttagtggtgctgattcaagctctgggaatgaacagtggggaaatcctatcaattatgaagtgccagaatttgtagtcacaagtggtatgacagacatgtgggatattaactatttaactcacagcaagtgacagaaagtatcccaactgatgattcaacacttgatgaaaaagaaagataatataaataagaatatggatgcatcgggcttcatctgcttctgcacatattgtgctgtgtttagttcccaggggtccaattattaaataaattgatttgtaactggtgctcattcactaatcaccaggtttcattcttttagattagttgtgtagttgttcatgctagtagttatgaaccaaattcttaatttaaatatgttaagatttaaagaatttgtgaaactttatatc

SEQ ID NO: 76275 - DNA, 908 bp, Glycine max
  Clone ID: PAT_MRT3847_39890C.1
caggtacctcctaggataaggctttttcttcagtacttgctcttggtggaacaaccttgtaacaatggcttcctcagttacttcctcttttcgcatcagcaatttgaagtcggtttttgttggtgagactaataaactcagagtttcaagtgttcctggtgctcatgttggtttcaatagaaagactgtagaatgtaaggaatcacgaattgggaagcaaccaattcctgtgccatccaatgtcacagtcaaattggaaggacaggatatacaagtgaaaggtcctttgggtgaacttgcattaacttatcctcgagaagtgttggttgagagggaagagtcagggactctaagggttaaaaaggcagttgaaaccagaagggccaatcaaatgcatgggctttttaggacacttacagacaacctggtgattggagtatctaaaggttttgacaagaaacttcaacttgttggtgttggttatcgtgctatggtagaaggaaacgaagttgtgctgaatcttggattttctcatcctgttaagatgacaatccctgattggcctcaaagtgaaggtggaggaaaaccaccagaatcacagttagtgggtatgacaaatctgaggttggccagtttgctgcttcaattatgaagtggagacccccagaaccatacaaaggaaagggtgtcaaatatgctgatgaaattgtaaggagaaaggaaggaaaagcagggaagaagaagtaatggggggtttcaattttcctttctcatttatctcctgttgtttttcctcatttgttagtaatggaaatattttaaccgagtaaaagaaattcatattcattgagataagcttgagtcacttatgcttatgatgaaatttaaaagcatagaaatccataact

SEQ ID NO: 76276 - DNA, 322 bp, Glycine max
  Clone ID: PAT_MRT3847_39891C.1
attcggcacgaggtagaatctttggaagtgatcgcgactgattttgatgattattctcctttggagaatcttgttgctccaattacaaaactattaaccgctcttccaactttgagggaagttcgcgtttatgtgcctgaagacagtggtgatgatggaagctcttctcaagaatcaattcttcgaagtcgatttcctggtgctaaaatcaattatattatgtagagctcttattattagataattcaaatttctttcaaattaatatttccgttgagattttctttttttcgtttgttgttctttaataaaaatcttactt

SEQ ID NO: 76277 - DNA, 492 bp, Glycine max
  Clone ID: PAT_MRT3847_39892C.1
ctttgatgctcacttgcttgaagtcaaccctaagaagcggccctctgcatctgaggccctgaagcatccatgggtgtcatacccatatgaaccaatatcatggtgaaatatttagagggttcttaatggtgataatgccacctaccctaagttgggtaaggttcatcgttgcagagtgaaggccccactgatacatcgctgcttttcatgatctattttaaagatgaaatggaaagagttgtgctgtgcccttccacatttatatgcatactgcattggaaggtgctttggttttgtgggaaatgtccgtctccttcccctaaccaaattgtattcttccagtgacaagccatacatacacgatcgaatgatgtaattttacacggacggtgtaatgttaggtttctgctctttgttctgctggacagggaaatcttagaatcttcttgtacatggtgtgtgataattcttttaggctatctagtaatattt

SEQ ID NO: 76278 - DNA, 192 bp, Glycine max
  Clone ID: PAT_MRT3847_39893C.1
gtgttttttttgtcaactttggtacttgaagaataaaaggaagcacttcaggcttcaggacttgagtcaaattggtaggggaggcacaaaaagaaaaaaaaatctgaaaaaagaaataaaaaaaggattttactgaaatttgaacaaaacgggttcaagagaaagagagtgcgtgtgaaatggataggagag

SEQ ID NO: 76279 - DNA, 810 bp, Glycine max
  Clone ID: PAT_MRT3847_39894C.1
cccacgcgtccggagacgtgtgggccttccttttaacttgcaaggtgaactattgcagcctttatgatcaaggttatacttcaattgggagcatatacgacacagttcccaactcattattatgcattagcaattcttccaataaattcaaacctgcgtatttacttgctgacggaagattagagagggcagggagggctaaaaggccatctacttcaactggtggacaacatcctgcagagagcaatggcctgactagccaggattcatataaaaacagcatgctcacagcatcaatcattgctgtgggagatgagattctgtttggcattgttgaggatcagttgggaccttatttgtgtaggaaactgcattgcattggttggtctgtgtttcaacattctgttgtgcacaacaatatagattctgtggccgaagaagttgagagacaaaaatctaaaagtgatatggtatttatatatggaggtgtaggtccactgcattcagatgttagcatagcaggcattgcaaaagcttttggtgttcgtttggctccagatgaagaatttgaagaatatctcaggcatattattggtgatcaatgtactggtgaccggaatgagatggctcaattgcctgagggcataacctaattatggcctccccctccctctcccattatgacaaattggctgtgcccttgatcaagtgtgaaaatgtaataattcttattgcaacaaatgtttcatagctggtaaagcagtggggactgtggattgaattagcaaaatctagtgatctactagcatt

SEQ ID NO: 76280 - DNA, 303 bp, Glycine max
  Clone ID: PAT_MRT3847_39895C.1
gagacgcataggtgcaccaattatatggaatcataacaacaagtcatggatacttacaaaggccactaatagcctgatatacctttacaaataatgctgatacaacataccacatgggccagacctaaaacggatgtttactaaagaagacagtattaccgttcccagcattgcacatttacatactagcatgcttcagctgcactgaccagcctattacgcttccattgcaccatactctgagctatagcctccttcgtgaacacaattgggaggaggagacgcgtacacagaccatgggct

SEQ ID NO: 76281 - DNA, 277 bp, Glycine max
  Clone ID: PAT_MRT3847_39896C.1
aggggttgtgggttttttttttttggcccaagggaaatttagttatttttagtccaaaggaaaaaattctttgagggagacttcctaaaaaaaaattgaaattttttttgatgggccgcctaaaattaaaaagttacactacccctctatttattctttattactcctttcctttccagggaatttacaccagcttttttgctgttatacaaagggataatttccgctttttttttgtgatttttacaaataacaatgaccctgataaattcttccc

SEQ ID NO: 76282 - DNA, 355 bp, Glycine max
  unsure (1)..(355): unsure at all n locations
  Clone ID: PAT_MRT3847_39897C.1
tcctctagatcggcgcgaggggaaagcttttttttttttttttttagccggcaaaacgaagagtgtttaaccgcccaaacaagatttcccccatacatgaaccgcactgctccaaacaaacaaaaacataaacgcatacgcacgcgcagaaccaaaattgaaagcaacctcaaaagaagaggttttagaggcagnaacacaaccggcggaaaagacagcaccacagcaacaggcagggcgaaccccacacagtaactagaactgcagccccaccattaaaaaacggcattctcctcaagaatcattccaccgcctagaagatcttgaagatccagacaagagagagacttctacc

SEQ ID NO: 76283 - DNA, 312 bp, Glycine max
  Clone ID: PAT_MRT3847_39898C.1
ctgttgcaaaaaggggcccttctggttcatggtggcgggatgatttagacaagttacacggcacatcgcacaccagtggcagcatccacagaacaagaagataagtcggaccttacatcatcactactggcaaaaaccaccgaaccgggggtgtacttcagataccaagggatgtggagatcgcaaacaaactacccgccaatgcacacagcgagggcgtgccagcatcaaacactcctgatggctgaatgggaatggaactcgcgccagattctgtctaatcatgcaagggagcatgggatactacccaaa

SEQ ID NO: 76284 - DNA, 327 bp, Glycine max
  Clone ID: PAT_MRT3847_39899C.1
ggagtcaatttacatttcaatcaatcctaattgattccctaatggatgctaagcttacacacactcaatcatcctctcataatgtgtctatgtggattccgggacatgctgcgattgatccactacctgataaacggagcactgagacctgctatcataggttgggtatgccttgttttcagcatcaatgtctttgctgaaagcccccatactgatatgttacatcacagatacgaggatcgtccactacatgaccatgaacttgtccacgataattttcaacaatgcagtcatgtcgatcatctagtgccttctccacagggatta

SEQ ID NO: 76285 - DNA, 429 bp, Glycine max
  Clone ID: PAT_MRT3847_3989C.1
ctcgagccgttttcgatcagatgcgtgtcagggggctgaggccgaatgagaggacttacactactttgattgatgggttctgccagaaagggttgatgaatgaggcttataaggtcttgagtgagatgattgttagtggattttcgccatcggttgtgacttacaacgcccttgtccatggatattgcttcttggggagggtgcaggaggctgtgggaattttgagggggatggttgagagaggtttgcctcctgatgttgttagttatagcactgttatagctggttcttgccgggagcgtgagctgggaaaagcgtttcaaatgaatgacgagatggttgagaagggtgtcttgcctgacacggtcacctatttcgtggctcatacaaggtctttgtctgcttctgaaacttgcaggaagctttttg

SEQ ID NO: 76286 - DNA, 571 bp, Glycine max
  Clone ID: PAT_MRT3847_398C.1
aacttttcagagaaaagaattttttaaaaacaaaataatattttcaaaactatgtgactttgattttctaagaacttaaggatatattactgggagcaataattggagtgtcatgtcaaaaataaattattcaaaaaaatccatttatttaaaaatgatttttcttttaattcttaaggttttataaaatccaagaaaaacagtaaacaaaaaataggaagaaatcaaatttaatgttttgtccaataaaatacattttggtagtgacttctcttattttagttttcaaattgattattctttcttttgattcatcatttcatttcatcgtgatcctagtacaataattttaaaacaagaatctttttttttttttttcgtgcttggccactaatgcatctaataattggtgatgtaggttctaatgcatcaaaagcttcacaacacaaaagaaaaactcaaatgaaatataaagttacgaaggtacaacagccaagtttgaaccatcttacaaatgcattgaaggagggtctacatatcaagaatgcaacatacaatatgttgtaaaagc

SEQ ID NO: 76287 - DNA, 442 bp, Glycine max
  Clone ID: PAT_MRT3847_39900C.1
gtgctacatgtgtgtagtacctccttcttgggggggggggggggggggggggggggggggggggggggggggggggggggggggggggggggggggggtaaaaaagcttgggaaatacctttaaggggggggaaaaaaaaataaaaccccataaacggttaaataatggaaatttttttaaaaaaaaacggttaaataacgcccaatgggagggtggtgaagggcattttaactaataaaggtgggggggggggattggggataaccttaataataactggcggggctaaaaaatttaaatggggttgactaacacccccactgaaaaggggggccctaacccccggggggggggggggttaaaaaaaaaaccaaaaactcaataatattattattgggaagcggccccccgtgggaataacctggcttaataaactagggg

SEQ ID NO: 76288 - DNA, 120 bp, Glycine max
  Clone ID: PAT_MRT3847_39901C.1
gcatgtacacgttggaacaatactccgcacactcaagattgacaagtttttcttatgccagccgtctagttgagataaaatttgccaaaaaactaagcatgcgagaagaggctggggcaa

SEQ ID NO: 76289 - DNA, 969 bp, Glycine max
  unsure (1)..(969): unsure at all n locations
  Clone ID: PAT_MRT3847_39902C.1
ccacgcgtccggcttcacatcccacttcatcctaccaactataccttatataaatagaaccacgcgtccgaacaattcaagacaacaagaaagcaaaatatttgatcagaccttttttttaatttccatttctttttccggaacggaaccttatttgccttcgcctcagtagccgcttttgcttatggtaaatctgtatccgcagctgtctccccagatacttatggtgggtttcaatagatctcttttccacctaggtcaaaggggtatgccgctatatatgctacaccgaagtatgctcctaggtaagcgactgcctttggatccgcctctcgagcacgagggtcgtattcataaaaggctatcgatcgtgaaggtttgcctatggctctgtatctacctctgtctgctggtgcttattttgataagctgcaggatcaatggcttaaactactgcttcttcaacgcttctcctgcgacttgttctcctttcgtccttgctcctgcacgcacctaaaggtaggtacagtatctaaacgctccttctgctcttgggaaagggggcccaaggctcatccttatgctttcggttttcgagtgaaaaacagagttggggagacctgtcaagctttaggatagctcttttcaaaatagattcttgtaatagaagctaagcttttataccgaatcgggtttgttgatggaatcatagccgggccggaactcttgatctatccatagagggtgagaactcaatcaggaaggactgctagtcatcaccgagggtatgaccaaggaactgctgctgagagcgatagactttccaactgagatggagagaatgcgctcctactctctttcaatcgccgatgctaanacaaagagggcgtagacccgaggggaggttgagtcagcagctagttttgccggggaataaacgatgcaattcaatctgttggaggaaggtag

SEQ ID NO: 76290 - DNA, 478 bp, Glycine max
  unsure (1)..(478): unsure at all n locations
  Clone ID: PAT_MRT3847_39903C.1
acgacagaagggtgttcaattcatatcagttttatagaagggtaaaatggaaaaatcacacaattgcttggtgtaccagcaatttgtagggtagacatagcaacgcccatgcaaaagtcatcattagaggtataaacccaacaagtgtttatattagcccaattattctcgtaaaaaaataaaagcccaattgaaaggttaccgcacaaataggaaaattatatagtaggggattccacgaaattgatagaaagttgctattctcacctccaaacttaactattctcgccatccatgtgagtggattttaactgaattaagtatttttgttgtatacattacttgttgtacacatgtacaatggaatctgttacaatatttgaggtgggaaacaaaactatgcaacataaatatgattccattgtataagagaatcatactttcaatcaatgtctttcataagtctctnttaatttaa

SEQ ID NO: 76291 - DNA, 260 bp, Glycine max
  unsure (1)..(260): unsure at all n locations
  Clone ID: PAT_MRT3847_39904C.1
ggaancnaagcaagccctanctncgcangcattcgtgaganaactacanattcntnnntcnaggcactctnnntcgtctcntttcctaatccnaatngatctatngctgncaaatacttctncaacaggtgcntgctnttccgttcntcgctttgntanngagtctgcccctcctgcccttnagggagacgagatgctgaagaaactttttgtggcggtgaanagcaaatttgagnccgccataggaatattgangaagg

SEQ ID NO: 76292 - DNA, 259 bp, Glycine max
  Clone ID: PAT_MRT3847_39905C.1
acagtgtggtaaaagaagtcaacagtgaaagcaatggtatagggaatactggacgttcatgataacatgaacaaacctactgcagataaagaaacggcccctcccttacccacaggcaaaaagaaagtacaagctgataaaagtggttctgttaatggacgttcattagcaagcctttggggccgtgcatctgcaaaacccaagccttgctcctcatcagcagaacataataacaaaatttcaaatcctcttgtatcta

SEQ ID NO: 76293 - DNA, 276 bp, Glycine max
  Clone ID: PAT_MRT3847_39906C.1
acgcgagaagacgacagaagggggacgggagagaatctagaagaagaaggagaaagtataggaataatagaagtacaatcaagttaaagcataaacatcaatggacgaaccgcaacaaccaggacagacatgtgggcccacaatgcctattaccctttctaaccccctttctctctcggacattctctctctctctcatttccatcaacattcccactaaccgtcccgttgatcatactcttcttcttccctcaaaactattcaattcccttcaaa

SEQ ID NO: 76294 - DNA, 321 bp, Glycine max
  Clone ID: PAT_MRT3847_39907C.1
ctctttactaccttaagtcaacaagagccttaaccattctgccctctcttctcttctttggctctctagattgcgtctctcgggtgtcttagaatcacgtacaatctagtcaacatatcagaaatggatgcaattagttgcatggatgagagcaccaccactgagtcactctctataactctttctacaacgtcatcgtcagatacagcgaagacttcttcgatgattacatagtctgagaaagtttctctatccccgactcctgcaaacatactataccgtgttggaagcttctcaagcgcagacgtggatcctgttagc

SEQ ID NO: 76295 - DNA, 510 bp, Glycine max
  Clone ID: PAT_MRT3847_39908C.1
gccgccgacgctcctgcgccggcgaagaaggggaagaagaagaagaaggcggctgatgcgccggcggatgattctgatagctactgctgattctaccgatgatgcttctgatgtgaccgccgatgacagtaacggcgccgttaaaactaacggctggaggtacggcggtggtgttgttgccttggctttaggtttggttttggggttaccgttagtgctgtgatgtgagttaattaattaaaaaagggagttttagggcttagttttttaaggggattcgaagtgatattcctttttttttttttctggttttttaaatattgttacttaatgattgccgtacttgataatgttgtaattttggaggcgagagagcgggaattgatacactgacgtgaatgttttttataatgtaaacaatttgtttaatttcctccaatgagcgtggttagttgttttattcatgataatgtagtagatgttaaatggttattagagatttgtgatggt

SEQ ID NO: 76296 - DNA, 734 bp, Glycine max
  Clone ID: PAT_MRT3847_39909C.1
tacggctgcgagaagactacagaaggggatcaatggaaaacgagaattgcacttttgttgctcagcctattcaaagaaagcgcaaacgttatgccattcgtgatttcccagaaggatgtggctcctatggcaaaagggttgatcctaacaattttcgccaattaaatgacactattttggagttgggactgcaagatttggaagatgaagaattgataagtgccgctgaagttgttgtagcgtgtgactcctccaatgtgtcaaagttttcttctttttcagaaggggttctttgtgatggttcagaattcgcatcatccgaatggcaacagcatagatggttccaatgctggtttgaaggagaaggctgaaactaaaaagtctcctcgaaaagaattaatcagagactttcctcctttatgtggaccacatgcttatgcagatcatgtgtgtagattgcaaggcattgaagatgatgatactgatgcagaagaattgggtaatgatgttcaagatgaatccatgtgcctgaaacaggaggtcagttaagttgattctgaagtgaatggttcaagaaagtgaagaattgtgttgttacatatgtcataaactaaactgcatgttcaatttttcctcttttatcaatggttttccttgactttgttgtttattagcaattccttacatcttcttgtacacactactattctattatgatctctagttcttttgcc

SEQ ID NO: 76297 - DNA, 247 bp, Glycine max
  Clone ID: PAT_MRT3847_3990C.1
gggcgggggggtgggcggggaaattgggaaaagttcccttgggggaaaaagagttttcctaaaagggggtagaaaaaaaattgtacaaaatgcgggcaaaaaaggtttggggggaaaattggtggactgagataatttccaaacatttaccaacctgaaattttttgtgttataaaggggggggcccctgttgggaaattaaaaaaattaaatcgccttgggtaaaatgggggtaatatggggggaa

SEQ ID NO: 76298 - DNA, 491 bp, Glycine max
  Clone ID: PAT_MRT3847_39910C.1
gaagcttgctgaaatgcataaagctggaaaatctagtaaagggtttgttttctatgttgataacaccattgggaggtttaatgcgccttcctcatgaaagttatcattgttgtaatttgtttttgttatcatttatcatgaatctttccattttaacaaggcacgtggtacttgtcaggatatatcagttatcaattatcatcttttgtttgtttgttctaattaattttctaattatgttatgtatattatgctgtagcactccagaaataaacacctgatcatcagattgggttcaatttatggagagcatagattgggttcccattaattaattctagctgtacatcacatttttgtctatcgaatatttagattgaataaaataagcaggtcaataggatttaaaccagagacagattggatacgtgatagagtacattaagttcattgacacagggagaataggaggctattcttttctagtggat

SEQ ID NO: 76299 - DNA, 433 bp, Glycine max
  unsure (1)..(433): unsure at all n locations
  Clone ID: PAT_MRT3847_39911C.1
acggtctatatntccggtcgccccacgcgtccaacagctcctacataacgatgcaaggaggaggcagtggggggaagaactgtaacactatactgtcacactataaccccacagaaagaaaattaaaatggattgtttaagtggatagaatgatccgccaataaggtgcactctcaacggccactctcatcatcaactctaattatctgaactagttaaatcaactggttcagtccgccatcagtggtcgcccgctgtggatgcttagctcgtgtgcggacatcttatgcgtcgacacgaattgtcccttcaccattcactgctagcagagaatgtcggacaaccacatcatgcacctgcagcaactgcacgatgatacctctccaaagttcttcacatatgttgtcaacattcagttccacttctcagaaat

SEQ ID NO: 76300 - DNA, 1005 bp, Glycine max
  unsure (1)..(1005): unsure at all n locations
  Clone ID: PAT_MRT3847_39912C.1
gccggaattcccgggtcgacccacgcgtccgcgtgatctcaggcgctagcttgttatcagttattgtttgtggttgaaggttgttgttcactttcccgtgcagagatcataaggaccctattaccttcctaccttcaaaatctttcatctctgttctcacgggattttcctctcaccctcttatttgtttccaacatttcttgcttcataattcaagtgaggtcataacacaacacaaagtgttgccaacttcgtggttcatattggttggttcagttaagagtgtggagaacaaagaagatacttagattatggctgctcgtaacatcgagaagatggcctcaattgatgctcaactgaggttgctggcgccacgcaaggtgtctgatgatgacaaactcgttgagtatgatgccttgttgttggatcgtttccttgacattcttcaggatttgcatggtgaagatatcagacaaacggtccaagattgttacgagctgtcagctgagtacgaaggagagcataagcctgaaaagttggaggaacttgggaatatgctgacgggtcttgatgctggggattcaattgttattgccaagtcattttctcacatgctcaatttggccaacttggcagaagaagttcaaattgcgtatcgaagaaggatcaagttactgaagaagggtgattttgctgatgagaactctgccattactgagtcagacattgaagagaccttcaagaagcttgtggctcaactgaagaagacaccccaggaaatctttgatgctttgaagaaccaaactgtggatttggttctaactgctcatcctactcagtctgttcgcagatctttgctgcaaaagcatggaaggataaggaattgtttgacacatttatatgcntaggacataacaccangatgatagcaggaacttgatgaggctttacaaagagagattcaagctgcatttcgcacggatgaaattcgaaggactcctccta

SEQ ID NO: 76301 - DNA, 417 bp, Glycine max
  Clone ID: PAT_MRT3847_39913C.1
cccatgcgttcgattgcccctcaacacccagcgatggcggtgctgacgctgctggggaaaatacaagtccaaaagtgatagtcgatgccaagaaaagcatcaaggcgtggaagcatgacacactcaaactaacttctataatggttagaaacatgacacgtgtgatctgcataaagtcaatggggagaagaagaaacgctctcgccgctttatttattggatttttggaccttacagggacacccgtttatgttgtacactaccgctgacttatctacacacagtgtatatgtggcttactggttggatatgtctagctttatatctctctcgcaccgtatgaagcttgattttatcaccactgatgcgtagaactttatttctttttttgacagggttttacttagaacgtgtaaa

SEQ ID NO: 76302 - DNA, 685 bp, Glycine max
  unsure (1)..(685): unsure at all n locations
  Clone ID: PAT_MRT3847_39914C.1
tcctgaaagacaaccacctttaaaacctgncnaagcacatgttacatgnggaaaagnacctggaggccaacccaccactgctaggagtcactctgcaaccaacaatcncaccttttttctcaacaaaaagattcccccacccctggggaaaggggagaaanagcnccnacttaccanactaacccccancccaacacccnnacaggctgctggcncaggcgccaccattgaaacactaacaactaacccacctnnccctatgcccgacgcaacncctnganaactgcaccaaacaccaaaaaccncccgacgaccgaccccaaacaacggaggaacaaacccccccagaccccncccccctaaacaacacnccacagccccgagcaccgncgagccggccacgccggagcccgccaaaaccaaaaaanacagaaacccaaaaccaaacagaccaaaaaaacacaaggaacaaaaaacaaaccgaagccaaaaagcaaaccaaagacaaaccnnaaaaaaaagaaaaaaaacaaagaaaaaaaaaaaaaaaaaaaaaaaaacaaaaaaaaaaaaaaaaagcaaaaaaacaaaaagaagaacaaacaaagcaanaagaaaaaaaaaaaaaccaaaagcaaccaataccaaaaaaaaacaagaaaaaaaagaaaacaacaccccagaa

SEQ ID NO: 76303 - DNA, 474 bp, Glycine max
  Clone ID: PAT_MRT3847_39915C.1
ggccccaaaaggaaacccaaacatttaaatttaaagcattaaaaccgaagccattataaaaaacccacatgaaaaccccctgagggcttccccaacggggggcacaaaaccggggatggagttccaagaaaggggagttccaacattaaaaaaaggcctatgagccaagctgaccaaaccagagcccttgaatctaaacacccttaggacctttaccccccaaatcagtatcaaaaggctgaacactctcgaaccccccaaaacccccaccagcctaaggctgggacttggggacccccaaggggatttccccttgggaagatgaaccccttttattggtccccttggcaaggccctcttctttttcttttccccctgggggcaaggcgccggggtgtggccttcccggtgggggcccccctcccctcgggtcccccggcggggtcccccggggcgcgcggcccggggcccccc

SEQ ID NO: 76304 - DNA, 175 bp, Glycine max
  unsure (1)..(175): unsure at all n locations
  Clone ID: PAT_MRT3847_39916C.1
gaggtatctgaagtcatagggcaagatgttgtctcacttcccgtgaacaagttttgactaattaagatgttgtctcccttcttcactgctccagtcaccccatcaaaattgataggcactatctctgacgcgngtgcttgtccctgatcaggagttagtactagcatgccatttg

SEQ ID NO: 76305 - DNA, 1575 bp, Glycine max
  Clone ID: PAT_MRT3847_39917C.1
ccccttcggctcgagaaagaattaaattacatgttcatggagtcggtgaaggtcctatgctcttttgcgtaatttgaaaacaaaacctaacagtaacaccaagtagagcttgttttccattccatctgcaccgaactgcggtgtagtgtttgttggtgtcttgagcatggcgacgcaactgagcgatgcggaactcataaccagcttgcaagccagggtcaaggaattagaaactgagaatgcaaagttattgtcccaacttgctgattgccgcagtcacgagatggagaaaaaagtatatgtccctgatgagagaggcgggaaatcaaaaaaaggcaacaggaaatctgaagagaagatagagaaaatgccaggctataacacaaggtttatgagtcatcatagcaggagatatgtagctttaaaagtcatgtactttggaaaaaggttttatggttttgcttcagaggcacaaatggaaccaactgttgagtctgaactttttaaagcttttgagaaaacaaggctattggttggcaataagaaggaatcacagtattcaagatgtggtagaacagacaagggggtttcctctgttggacaagtgatagctcttttcctaagatcaaacctcaagatatctgaaacaaataatggaaattctggagttgttttggatgagcaacatggggaaatagattatgttagagtgctaaatcgtgtccttccaaatgacattagaattatgggctggtgtcctgctcctgtggatttccatgcaaggttcagctgtttaagcagggagtataaatatttcttttggaaagaaaacttgaacatccaagccatggagagtgctggaaacaaacttgtaggagaacatgactttagaaacttctgtaaaatggatgcagcaaatgtgcacaactacaggcggcgcatcaagttgtttgagatttctcctacagatgtgaggtacaatgataatcaactttgggtgatcaagataagaggtagtgcctttctatggcatcaggttcgctgcatggttgttgttctattcatggttggcaaaggtcttgaatctccaaatgtgattgatatgctactggacactgctaggatcctaaggaaaccccagtacactatggcttcagaggttccattggttcttcagtcctgtgaatttgacaacattaagtttatgtgttcatcagaggcgggagaagcgttgcatgtacacttggtgaatgaatgccaaatttaccagcttcaagctgcaatctttcatgaagctcttcttaattgtgtgcctctatcaaatggatcaaagcttgctgcattttcaaggatccaagaagaaagtttcccatgtccctcttatgtcacgaccaactgagccatcatatgaagaacgccgagccaaactcaacacagttgcatgaagatttcgttggtcatctccattatataatctgtttgggtcagcatttgtaaacttgattttggatgatcataattttgtaaaattgattttggttaaatcaatatgaattttattgtttttgtctttcc

SEQ ID NO: 76306 - DNA, 349 bp, Glycine max
  unsure (1)..(349): unsure at all n locations
  Clone ID: PAT_MRT3847_39918C.1
aggatctggggtggaggaatttaatgaaaccttatctgatgaatgggttaacaagggcgacgcaccggcattgccagagactcttaaaaattacaacaagctgccgtctctaggcttcaagatagtcttcttgtcaagaagatctcttgacaaaatggccgcnacataagcaaacctaaagaaagctggcttncacacatgggagcagttnattgtcaagggtccacatggcatgactgcaaatgggcttnnatacaaatcagctatgagagagaatttgtagggggatggntccaaaatcgntggaatttttggngaccntggaaggatcacgngggcgncctcttgg

SEQ ID NO: 76307 - DNA, 514 bp, Glycine max
  Clone ID: PAT_MRT3847_39919C.1
agacaaaaacaataaaattcatattgatttaaccaaaatcaattttacaaaattatgatcatccaaaatcaagtttacaaatgctgacccaaacagattatataatggagatgaccaacgaaatcttcatgcaactgtgttgagtttggctcggcgttcttcatatgatggctcagttggtcgtgacataagagggacatgggaaactttcttcttggatccttgaaaatgcagcaagctttgatctggaaaaggaagggttatcagtataatagatcactgtgaataaaagtaagcaaagtaattgggaagtaatttgctaacgcatttgcaacaccatttgatagaggcacacaattaagaagagcttcatgaaagattgcagcttgaagctggaaaatttggcattcattcaccaagtgtacatacaacagctagtaccagctctaaatatgcgatggattgagtaagttgaggggggggaagcttgtgtggggggcgcgggccggggggg

SEQ ID NO: 76308 - DNA, 406 bp, Glycine max
  unsure (1)..(406): unsure at all n locations
  Clone ID: PAT_MRT3847_3991C.1
tacggctgcgagaagacgacagaagggcattgtatttccttcaaacaatgtaagccatactacaatgatggcccaacaaacttgtttagtacccatgaaatgatgcaaataatttaaatttacacactgcaagttaggggaaagagagggagctagctagagagaggtgtttgtaagaggtggcttgggatgagagtttttacagagaaaaatatgcaaagaactggttaagttgatggttggaaagttgttttaatttganttcgaaaggaaccaagaatcttgaacaattgctttttgatttgggtgttatatttttttttttttaatgagattttttgttttttgaatatttatggttactttttgatggtgtgcgtgagttattttctttattattcttttt

SEQ ID NO: 76309 - DNA, 510 bp, Glycine max
  Clone ID: PAT_MRT3847_39920C.1
atatgagacaacactgagcatcgtctagctatctcgatcgaactgtccaaggtcctgtcaccgtagccagacctggtgagtagtcgtggtatttttggtggggatagggtgtatgtcaggtcaagtgctaatgctaacaggtaagggtgtgttcgtaatatcggtgtatgtgtatggcaactcctgtgttgtaagggcggcttactacgtaaagttagtgttgggggttgtggttatgtttgggtgcgtggtggttaattattttaggaaggggttagttggggttgtggtggtacagtttgttatatgtcaagtttaggtgtgtaagtaaagtaaaattcccatgggtttaaaattaaaccgaagaatagtgtccatgtggcgaagatgggtcgtgtgcgtgagcagtggaagttaattaatgagcgtattactagtgggcgtaattgggtaaatgctgcttaacaatgccgccgttcgtgctggtactgctacggccgacaaaatgaa

SEQ ID NO: 76310 - DNA, 246 bp, Glycine max
  Clone ID: PAT_MRT3847_39921C.1
gtcttgtaacttaagcatttattatgtgatgttctctttaaactataccttgataggtatcaaatgcttcacaagtttgcttgttggcagcaatagcataaaataatctaccctaattattaatatgccaaattataacccttttcccatatagaacccgaatttaaagattagaaagaaagaaagaaaaatcccgggtaattaaaaaaaagggggacaattgattcaataggggaataattttaa

SEQ ID NO: 76311 - DNA, 209 bp, Glycine max
  Clone ID: PAT_MRT3847_39922C.1
ggcagcggaggagccgagccgggctgcgctcgctcgccgccccctatactctttcttcttcgccgggtgcactgtcctgggctgtaccctcgcctcttcggcccttgacaaagaggacagaaagtttgctcgggggagcaggccatgtgaggaggggagtgcccggcgcccctacccgcgccccaacagacggacccagggccctaacg

SEQ ID NO: 76312 - DNA, 372 bp, Glycine max
  Clone ID: PAT_MRT3847_39923C.1
tggctgcgagaagacgacagaagggttaccattgtaagcatgtaattattctggcaaattatgtcttcctttgggccgaacacaatttgcatgaataattccatgcaacatccatataaattcaatcaaatcaacttacacaacagaggttattttggcaacatgttgtttcaatcaatttaaccaaaaaatacaagacaatttaatataataaatgagatcttaaaattacacaactttcacatataatttagttatataaaaatatatataatagaacatgcaaatattttacaaaacagactcatcacaagatacctagcacaacattatttcctagagaaattaatttataattagtactctcaacac

SEQ ID NO: 76313 - DNA, 358 bp, Glycine max
  Clone ID: PAT_MRT3847_39924C.1
caaaacttgggggtggaacccttttgccggaaaagttttccctaaaattaaatcaagggcccctcatcttagaaacctttgagtaaaggttccccccgattttggaaagacccccccctacaacaaaaaaaaggttcttttttcgaataaaagggcccccaatttgtgtaggggcccccagccctgggagaaaatccccttggaggggccccttttggccccggaaaaaaaaaaaaaaaaccctcctccccctaaaaatgccataaataaggggtgggccccggggggtcccttggccccccaaacccagggggaaaaccccctgtgtttaaacaaaagccccccttggacttttttt

SEQ ID NO: 76314 - DNA, 569 bp, Glycine max
  Clone ID: PAT_MRT3847_39925C.1
aaatcaaaatttgaaacaccaataatcatactgttttatgtaatctaattcttatcttatacttgtattaattttaattctaagcaaatcccatttgtacccccaacaaataggcattgcattattgcttcatgaggccggcccacacaaatgatacgctcctcatcttcaagtcaatcaatgtgtactatgcattagcattgccctattcacactttatatatggtcaaaatctgaggagtttaccagcagcagttcaagcaaatatcttgcaaagttgttcagttctctaccttgcatgagtgatcttactgaaccacagaaagtcttcgaaaccgcaccagttatacgtgggaatcaatgaaatcttcaaaaaagagtgagaagggtaagagggtattatagaataatgtgatggcaccaacctagatcaagaaccatgagcatggcatttagcatgcatcatggcttgtgtttgaggcatgaatgggatcatatgattcagagaaacttggtagtataacatgagcaatgttcgctgctatttaaccgaatgagtggtgtttaag

SEQ ID NO: 76315 - DNA, 516 bp, Glycine max
  Clone ID: PAT_MRT3847_39926C.1
ccctctttttgttttggggtttttgtttttttctttttttttaaaaaaaaacacacacttcacacattattacgacaattaaaagagggggggaaattttcaaataggcagagcatactcaacaagagggccatgcctaatttcctttattgaattaaacaaacggccaaatgaaagaaaacccaagttccagatcatgcagaggattccccattttcaaaaaatctggcagtagcctggggaacacaaaaagctggcataagagtattaccagcattttcaaaatcttgagaaattcccaaaagaaaggcaaaaactgtaaactgttttgggattgcaataaggaaactcaaatgccaggaagtttggtttgccccctcagaactcccctttttaaaaacctttttgggaccgcctacctttattgggaaaatcaattcccagaatggggggtccattttggccaacttaatgcataaaaaaggctttggactgttggtgtttgtaaaaaacact

SEQ ID NO: 76316 - DNA, 208 bp, Glycine max
  Clone ID: PAT_MRT3847_39927C.1
gtgatcgtcaacattataacttgagttctggtggaaatgatggagataggcatgcagtgggagaatattacaagagaatgggtaacgaaaatcctggggatccattgcttatgaggaattatgacaatttcgggaatcttctgtaacaaccctgggccattccatggtggtgggattcccaagtgccattatcaaaccatcaaggttt

SEQ ID NO: 76317 - DNA, 391 bp, Glycine max
  Clone ID: PAT_MRT3847_39928C.1
atattccttttcctttttctccctaccttctttagggaggaaggctttatagtttatatacagcattagaaaatagatagactttacggatgatgataccatttaacttcactaatttcccaattttaatgtcattcttttttaagattatatgcagcagtaaatcgtgtcattattttgaagaaatggagcactagtctttggtatgaactagcatgagctgttctcagcaaaaaaaaaaaaactagtgtgagctatgtgtttgtttggaagtaaacagtgtaactggaagatatcttgaccatttgtgaggggtaggaaattgtgatcctataattacaaaggttttgacaataatttgcagctgcagattataaggtttataacttta

SEQ ID NO: 76318 - DNA, 894 bp, Glycine max
  unsure (1)..(894): unsure at all n locations
  Clone ID: PAT_MRT3847_39929C.1
ggggccggnattacaggctcgacccacgcgtccgtacggctgtttagaaaaacgacagaagggggagttttttagaaaattgatgttgttttttgacttaaagtaaaacccgaaagcctttcctgtttgtgctcattctcgcaaacccactctacgcactcatcctcgcagcctttcctatgctcctcctaccctgtgtccaccaaaacgcgaacccagtctgctatgacgctcacgctcaccgtcgtgtccaccttctcgtaaacccagtttgctgtgatgctttgccatgtccagggtacccactcatttgctgtacaacatccacagagttttggtgcgctaacaaggaagtaaacattttggttaatgaagaagcgcgcttagcgcgacaaaccaagcttagtgcacatgaggcagcttggaaggcctcgcggcaagcatttggaggctactgggagaagatttgaaagtttagtgtgcacttagcgtaaggtgtgcgcttagccaattgtttcctttgccactagtttgggctaagcatgcatcatgggcttagctcgcaaccacttaaaccagtgttgtttttgtgtatatgcttagcacggataccaggctaatcgcccaagtctttttaagacaatattttgaagcaaaaagttaaaaagaaggataatttattaggattattcatttacaggttgagaacaagacatttttggggatgctcatgtgcttccttgttctccatttttttcctcttcttctccttgtatttccattcttgttttaggtctctcattgatatgaaaggctaactttatcattgttgggggcttgaataccgaaaaaaaaaaaaaaaaaaaaaaaaaaaaaagcggccgcnctagagga

SEQ ID NO: 76319 - DNA, 609 bp, Glycine max
  Clone ID: PAT_MRT3847_3992C.1
gccagagccatatgttgtgtgagaacctatgggtgaaaaagtaacatagaaagcaacccatttagcaaacggagatgtaaaatgctataagaaagcctctgatatagacactgaacacgacagttatcaagatgtgccttcatacctggaataagaccacaaatatcagcacaatcactagggagctcaataaaaaccaatagaagaacacaacggcgaggacatgtgaaggctgaatacatagcatgatgcataggagaaagtggctgaacaagtgggtcagcatgatgcatccattgataggctcaccattaagaatagctactacaaacaacccaaacaacaacctatacagcatcctggtgaggaacatggggcggaacagctggttgactacaatgagaattacaatctatcgtactatgaagtgctcgacaaacctctggccaaactacaaggatagcaacctggataggaagcattgaacgatgctaccaacgatgaagccgaggttgatacgatcatacatacaaagcaactcactgagcgggatgctctgaaggatgtgaaaacagatgtggaaacaaatgaggcagaagccgatcctaa

SEQ ID NO: 76320 - DNA, 353 bp, Glycine max
  Clone ID: PAT_MRT3847_39930C.1
cacaggcaaaagaagggaaagatcataggggtagggaggagaaggatatcattgaagaacctggggcattatgagaggaaatacgaggggggggggggcacagggtttttttggaggacaagagggtagacaaggggaattagacagagagaaaaaattgcccaccccctaaaaacagcgagaacatggccagcctgtcgttgttgatcgggggggaaaataaacaaaggagaggtgacggggtgatgaaaatggcccgggggggcagagacaggccagcagggtggaggtaatggccgataaccagggaatatagcggaaggaaggggggggcacaaaaaggcccattggga

SEQ ID NO: 76321 - DNA, 281 bp, Glycine max
  unsure (1)..(281): unsure at all n locations
  Clone ID: PAT_MRT3847_39931C.1
ggaccggaccggacaaccagggacgacccacgcgaccgatgaatagcaacccgaaaccacacangacacgaggggccgggagagaaccacancacccgaacaaagcacagggcacacaagaagggacggaagacaacgaaagagaacggcgagaagccgcgcacaccaacagacgaacacaacccgcacccgagagaggacgaagacggaaaaaagagagccacagcagcaancacccaagcccgaacagaaaaaggcaaacaacaaaccgcgaaccaagg

SEQ ID NO: 76322 - DNA, 375 bp, Glycine max
  Clone ID: PAT_MRT3847_39932C.1
atatttatgttcgacatatgtagtagacgccgagtcatgagcttgcagatgagggtctcacatcttgcgccggtatcatgcatgcgtcaacactcacattgatacaagaactaaggataaacaccaacacatcattcatgcaatgtcataatttgcttaagcatcaggtgtcctatattcacaagcaaaatacagaattcagcattaaagaccggtcctaaccaaacgggttcaaatgggtgctaatttattccagaaatctaaagcaagtttccaacatcagtgtaatagtttaggcttgaataccaatgataccacaagctactctgccatcaacatttccagtaattttgcgaaactcaagaccacctttcc

SEQ ID NO: 76323 - DNA, 276 bp, Glycine max
  Clone ID: PAT_MRT3847_39933C.1
attcccaatcgaccactcataaccctactcttaccatatatatacaccaatcctttactcacttaccttcatacacataaccagatatatttacacccatgtcatccaatcacccatataattacaaaattcatctataactaacaatcttctttttaacacatttctaatcctattaaacaatcacaactaacaatacaatcttcatcctacacttactcaacatttacaaactcaactaattacatattcaaatactacatcaatacatccaac

SEQ ID NO: 76324 - DNA, 600 bp, Glycine max
  unsure (1)..(600): unsure at all n locations
  Clone ID: PAT_MRT3847_39934C.1
tcctctatagcggncgctcttggtttttcttttttttttttttttttagggaaaatgctgaatattattgatgcactcgaaaagcagaaattacatcatttgcagttatttggtccacttgatttgaaagggagagataaagaaaaatgaatgaagttgggctcccctttaaatatacttcttaggcctaataatttggactactaatggcctgggatgttttaatcagcaaaactctcgaattttgtacagttgaaagaagcagctgaatattgacttatatgcacccaacaaaagcgaagtcatttaatttgttgctgaaaaaagtaatacagtcgcacaaactcttagatatacattatagcattatttactttctaatcacaggctcattgttagttatatttataccttaattatgttacccatgaaacaaatgctaaagggacaagtgtcgtataataagaattttccatgtttggcaccacaagcatcggtcactactaaaccactcgatagactgttagaatccatagtatttgaaatctcagatgagttctatacaaacatcacagtcctcactcccccttctgtcgtctt

SEQ ID NO: 76325 - DNA, 420 bp, Glycine max
  Clone ID: PAT_MRT3847_39935C.1
gaccaccatgaattttttaaccttcgttccttttttacttttaatactaccagcaacctaattttcccagatttgggggaacaaccttttaactaatggaaggatattcctaaaaaaggccaccatttttacctggaccgctgtcatttttgacgggggtggcacaggaccccgtgtgcatgttttccatttggcccagaattgggatctccttcccatgggggttggtctggggcttaataaaaggatcacacccggttttaagggcttacggggttgatcccgggcaagctgcaaaatctttgtttccactttggggggaagcagaaggggtagttcctgaggacttgcttccaaacacacccgtttggttgggggcaactgctggtttaaggtttttgaaggggaatgcttttgaac

SEQ ID NO: 76326 - DNA, 923 bp, Glycine max
  Clone ID: PAT_MRT3847_39936C.1
ggctggagtttggtttgtaagcggagcactcactatttctctagtttctctgcatcgccttcgtcgatcgaagtggagcttccatttcatagccggcggtgaagatagatagttagcagacttggctgaccctgagcaggaggaataagaataagatgcctccttatgattgtatgtttctgtttaagccccatataaggaaggaagctgtcatggatttagttgtgagggtgggaaagcatgtgtgcagaagaaatggggttgtcactgatatcaagagtctcggaaaagttcagttgggctatggtgtgaaaaagctagatggcagatattatcagggcctactgatgcaaatgagcatgatggctacacctgaaatcaacaaagagttgcattacctaaacaaggaagaccggttactgcgttggcttttggttaagcagcgtaatacaaaatttgggcttgactcctatggtgatgaaggtagatatgagctaagcaaattgtcccagatcggtaaacatggtgatgaggatgaggatgaagatgatgaggaatatgaagtgaatgaagaagaaacagtgaactaaaagatagctgagtatcttgttagtttccattgtgagagtacaaaaccattttgcatagtattgttggtgtcaaacatttgcttacttacggtactaggtatcaatcaaacatgaccagtgggctcgaacatgttatttcataaactccgagctgtctcttgctattcgaaaaaaacatctttgtagctttggtgaaataattgtaactcgtggttgtgttagccaggatctacgaacagtttggttcattcaatatacttctaattggtgcgtatagttgaaaaaaaaaaaaatacatataaatattgcttatgttaataatatcttgagaga

SEQ ID NO: 76327 - DNA, 384 bp, Glycine max
  Clone ID: PAT_MRT3847_39937C.1
aaggggggcgactagataagggaaacatcgggggggaaaaaacatggtttcaagggaagggaaaaataccaaaaacccaagcaggcatgccacccggggggtggcaacaaaaaagattaaacaaggtggcaccactaaaggcctttcaaaaaagggatccccccaaaaatagcttaggcaacatccaaagcttggtcataaggcggattgggggaccacaggtttatggggcgatcatgggagacaggaacaaaaaacccgccctcaccaaaaacatccacagaaggaactttagcttcatgcccaaaaaggggggctcacagggttaaaggaacggggctgaccaaaccttaacaggcatgtgataggaggggggaaccaaaa

SEQ ID NO: 76328 - DNA, 236 bp, Glycine max
  unsure (1)..(236): unsure at all n locations
  Clone ID: PAT_MRT3847_39938C.1
gttgnaatctgtcancactaattgatnatatanatagtgactttgatattggtgtttnctggaaancantgaatgacgatggnataacaaaagagcggcttctgngctatnaccgtgccatccattctgaaccaaattnnnggagagatcananggaaggtcttctgcgagatctgggacactacatgnggactttaaaggcagtncattccggtgcagatcttgnaacngcctat

SEQ ID NO: 76329 - DNA, 390 bp, Glycine max
  Clone ID: PAT_MRT3847_39939C.1
gtgagtgtgagtgagtgtatcaatcggccacacagaattgggcagtgctactatgattccagggtcctggttgccttggcggccgcgttatcctttcaagggatcggtgcaaaccttggtcgcaaaaccatggctgaagaagattcatcatgcatgacccttcatttccgtggttaacaaggctgcctatctatcttccgtcgtgacatgcacccagcgtcagcgctaggtttctgctggacactttggggccgcaacctgtttctaggaattgggctaagagaaagggtcgaggaatattcgcatggcaaggggctcgttgtcgttttgggatgagaggtcagaaatctcgatcttgacctggcgttattaaaggtatcgaaggttgtc

SEQ ID NO: 76330 - DNA, 433 bp, Glycine max
  Clone ID: PAT_MRT3847_3993C.1
aatctattaacgtcatccctgtaggcattgagttgaagtagtaccgcacgcaaaccaccaacaattaacacccattgtattcaccaaaagaaaaaaaaaaacacaacaatctttgaattgaagagagaaagacagacagagtagtagtgaacgaaatgcagggcgcaggggtaacctttgtaatggttgtggttcaggtcttgagtgtgggtttgaacactatgatcaaagcatcattgtccaaagggatgagcatttttgtttttgatgcgtatacaaaccttttcgcattctgtgtgctgctcctagccaccacaattcgtcacagaaacagagctctcacaccgatcaataattccatactcttcatgatttttgttcttggctggctcagcgtatccatacatacgctcatttatactgtgcttggtta

SEQ ID NO: 76331 - DNA, 300 bp, Glycine max
  Clone ID: PAT_MRT3847_39940C.1
accagtcaatttttcctttattagtgtgtcagtcaaaaacagtatactagttctaggactaacaaaatgtgaacagagaatatgcatcatggaacactattctgctacatgtgcttggtgtaaatcatacctatgcatcacgggatgcttctttcgcttgacccaagctgaggctcacgttggttcaaggaggggtaaacgtgactattgtatgcactatacattgggattcttgcaacagaggtggaattaagactaccaaggttaagggggtcctgaaactccacaggtgtagtcaca

SEQ ID NO: 76332 - DNA, 133 bp, Glycine max
  unsure (1)..(133): unsure at all n locations
  Clone ID: PAT_MRT3847_39941C.1
tggctccccctgtccctttcnngaacttccgntnttctggtgctttgngagcccgttttcctctctcaccnntgcgacntgttccagattacatccaaagacccgactacgcggaaactggcattcccgtctc

SEQ ID NO: 76333 - DNA, 195 bp, Glycine max
  Clone ID: PAT_MRT3847_39942C.1
tacaactactcgattgtaaattttcattaatcaacttgtcttctactccagggccgggtatatagagaagacggcatagaatctcaactatcactggcgcgagcctttcatgccccatggttcttcttcaacgcatcagcctcacattataacgcgcatgctataaagttcttacttacacccagcctaacagtg

SEQ ID NO: 76334 - DNA, 196 bp, Glycine max
  Clone ID: PAT_MRT3847_39943C.1
attaggatgatcaccagctgtgtattcttatttaatgaatatgtggcatggaaattcatcgacgaatgccgatcggatcaacttcggttacaggggaggactattaagaggacatatcattacagttcatatatgagcatctgtgaatccgtacttattgaaaatgggacattgtaatgaccctcagaatagctac

SEQ ID NO: 76335 - DNA, 349 bp, Glycine max
  Clone ID: PAT_MRT3847_39944C.1
gttagttattgaggtttcattccaggggacgggccctcgtgcttacttgtggaaggctttcaatgggcgcattaagggcatctcacgagaaggctacaagtcacgccatgatggtggaatatgaagagactgggactgctcgcagctcacttagtatgagggcgtgcgggggggtcttgagaatttatgaatcactgagcgcctaccacaggagtgtatgattcattgatagcggacggggggggaagagctcaagttactggacagacagctgatacatacttggaatggttgtgcaccatgggtacttgttcagatggattaccggtggatagtggtagaactgcac

SEQ ID NO: 76336 - DNA, 211 bp, Glycine max
  Clone ID: PAT_MRT3847_39945C.1
caaacagctaacatttatcgccttcttctcaagggcggtcaagaacatattgggaagaagagacaagaacatttatagaattgtacctagagttccgaacacccgaatttgtctggcgatgtggctatccacagaaataaagctggtcgtgatttacttttcttcttacagtgacaccttccaaggattacttttttgtacatattgttgg

SEQ ID NO: 76337 - DNA, 220 bp, Glycine max
  Clone ID: PAT_MRT3847_39946C.1
atttggcaaacatatgcattttaaatgttgtgaggcgcataattccagaatacaagtagctttttccagattatagttgtgtatccattttacttttttgttttttaaatagaatcttactgtaattttcctggattcacatttatcacactaataccttctggatgtagctattaaaaaaaaaaaaaaaaaaattaaaaaaaaaaaaaaaaaaaaaaaa

SEQ ID NO: 76338 - DNA, 191 bp, Glycine max
  Clone ID: PAT_MRT3847_39947C.1
gcttatcattggtggtagggctgttgtttgtgcatatgagggtactcttggagagatggtgcataaagttatgcagaaagatgatgctggtgaccattttacagaaatggactagaacgtaagcggaaatatcctaataagaatcgtaagctagcagactgatattctagaaccatttactgacaatatgt

SEQ ID NO: 76339 - DNA, 493 bp, Glycine max
  Clone ID: PAT_MRT3847_39948C.1
cagtatcccccttacccctacccgtacgatccctattctgtcggagtaccctcttcctcgcctcctcctcagcagcgccttcccgtttccaagcctcccccgcctccgccctctcctcctcgctcctccccttgggactttctcaatttcttcgataacagcgacgacaagtactattcccaaactccttaccctgccaccgccaccgccacccccagccgcgattccagggaggtcagagaggaggaggggatccccgatttggaagacgaggattaccaccatcacgaagtcgtcaagcaggttcatggggatcagaagcttgtccagcctaagcacgaaccccctccctcctcccaccacaagccggacgaggaagacgaagatgatgatgatgatgatgatgatgatgatgatgatgatgatgatgaagatgaggtagaatacgaggtgcacgtagtggataagaaagtagttgatggtgataataatg

SEQ ID NO: 76340 - DNA, 407 bp, Glycine max
  Clone ID: PAT_MRT3847_39949C.1
ggctcgagcggctcgagttgccctaaatcaccaccacatagctcgagccacctagaaccaccacaccatcaacatgccacccaaaaacaccaccaccaaccaaatcaccaaccactgcgccacccatctgcctcatcagctccgacgtcgtttacctgaagggatttctcaatctatgggtaaattacacaacttatggcattctcaggattaataagagctaggaaggtgttgagcaatgttctcttgttattattcccaatatttgatattggattattcatagcataattaaaccctacctattcattgttgtttagttatttgtcggcatgagttactacctagatcaaggttctgatggatggaagaattaaaaaaaattatattaattgtagaattttctc

SEQ ID NO: 76341 - DNA, 1411 bp, Glycine max
  Clone ID: PAT_MRT3847_3994C.1
gcgaattcgagcggccgctttttttttttttttttttttttttttggcaaaaatcacttctattcatcgtctgtccagttttaacaaatatcaaacgcacgccaggagaggaaaacaacacaaaataacagtgtttggactttggtagctcatgtctctgctgaatttctgactagtcattatctgaattcaaataattttgtactcatactgcgcaaacgcttgagcacatttcatatattttccaccaaaaaatacgaggaaaagtgcaccgtggaacacacatgttctctatttggtatccttgttatccctagcaatagacacgttgaaacatgtcaagtattccatactttcattaagaaacaaaatgccatcaaattactaatttccggccagaaatcaaaagaaaataacaatcaccggcgtggataagagtcccccccccccggcgaaaacggggatgacctcttcatcgttccctgccctgctgaatacatactgaaaacacggctgaatataggagcacagttgatggatggatggaattctgatggaagacacaaaagaccgccttaagaaagtctctctactactgattaacttggcatctaatcaaaagcttcaaaaccacccggcgtccataagagttccccacacctcagcgtgagtgagtttgacctctctccctaaatcttcccccaccatgattaccatttttaggtcgctcaaagttgtctgatttgccatcatcatatgagccaacagggtgatactcataatgcaagtttgggccctgcctttcccggtttgtaggttgattataatgtctgttatcttgggttggtggctttgaatctccatgtaattcatgtcctcttcgaaaccgattatggtttacgtttttgccagacccagaagatgggcgttgatcatgcaaaagatctgcacttgttggagcctgctcaactgaggtaacagatacctcatttggggagtggtgatgcctctttgatggagcactttttctctctcttttaccctcttgattcccaaaatggggaacctctccggctttgctcttttcagagactgattgatcatggaaaggttgggagacgtgagaggttcccctttttgggaatcaagaggatagagattccccatcatgagtgggatcctttttgttagctccaacaactacgccgctaacattttgatcacttgatatgtttcctctgtgattattagatgcttgagatttaggttgccattgagacatcaaacgttccccgacagctcgattttctttagaagccaccacaccaacatcaggttgaccgtgctcagaggaggatgaaatacgtgtttcaactttctctgcctccccagaattttttttgttatcaac

SEQ ID NO: 76342 - DNA, 484 bp, Glycine max
  Clone ID: PAT_MRT3847_39950C.1
gccacatgctcaacaatttcatgtaatttatcgatggcaaaatattactgcaggatctgcaaattatttgatgatgaaaggtaatgtagcttaattagtgtctttataaactttaccttagagaaactttcaatcggtggattctgtaaagatacccatcccatagaacatttgtttgttagattttgagaatagtgcgtccaggattgctcactaatatcttatttatggtataaatacaattagttaaagagataattagagccaatcaatattggaaaaaacccaagtcccaaattggttagagataatgtcaaaattgaatatataaatgggagacaaccttcaccctatgaactagcttttgaggttgagttagactcaagcccacattctaagaatcaaggagccaataactaacaaattgacatcaacatacgtaacaatgatattcattggtgaacttgcttaactataagaatga

SEQ ID NO: 76343 - DNA, 459 bp, Glycine max
  Clone ID: PAT_MRT3847_39951C.1
cgttccgggattgccccacccattcacgcgtgcgggcttgtccccacaggctggcgcaggttggagagattcaggaaaaagttgtattgaaattttcacaagaggaatttcttacagctagatcaacttaggtgcgtcctgcaacaactatgttggctgatggttgtccatatttgtctgctatggtgcatgatatgccagagtctacaataccaggtgattttgtcattggggttaagctgacaaccataaacattatgggtgcatatgggctcaatcctggtatgtcaggttctcatcttttgggcaccattactcaatctatattccagcacactgtttggcactaaatggctacagtgagaacaccataggatattgattctagcaagcaaagcttatgccaatttgctattgaccttgtagggggaggaaatttagtggacaaaactggagatt

SEQ ID NO: 76344 - DNA, 164 bp, Glycine max
  Clone ID: PAT_MRT3847_39952C.1
ccacactatttctttgaatcacacaccctccactcccagtgcgtcctattacgtgaagggtcgtaccaattccatcaccgtttttacatttcattacttgctaagatgccacatgattgctgatcatccgtatctctagagtgatattcctgataaaacaatta

SEQ ID NO: 76345 - DNA, 668 bp, Glycine max
  Clone ID: PAT_MRT3847_39953C.1
gggtgaaaaaaaaaatcgtttcctttcatttcctttttccctctaacggtcccaaacagggggggggcttttaatcaaggccggtttctgtttgacttgggcccgaatcccccggcccggggggggttttttttttttttccccccctcaagggggccctttggtctggggtctttttcaatcaactttttccccccttacgggcaactgggttccccccaggggggaagctggcctttggggggccccccctcggaatttggtttcccggtaatccaaggcctaaaaacattaaagggggcccttgggcagggccaacacacccctgcccaaaaggaaaagggggggggcccccttgaaatgggggttggggcctggcgggggggggtcttttttaggggggggggcaccgatggggcaaagccccctttgggggggggggcctagggggggaccccgataatggaaacccgtgggccggggggggcccccccccggggggggggcacccgggattggggtggggggtttgggggggggggaacctcgtgggggtggggagggcgccttggggggggcttgttgggcgggggaacctggtggggtttgcgccaaggggggccaggggggggggggggcgtggaggacctggggcgcggggggggggg

SEQ ID NO: 76346 - DNA, 177 bp, Glycine max
  Clone ID: PAT_MRT3847_39954C.1
ctcggtgagcttcggtgatccggtgtgggggcaacccgctcactgagaaaacactctgtacttgctgagagaccgacatgagggctggttattacacatgaccgactcatggtacataagggctaccgcattacatgtgggggggatcaggatccctggtggacttacatgctccca

SEQ ID NO: 76347 - DNA, 1037 bp, Glycine max
  Clone ID: PAT_MRT3847_39955C.1
ctcctgactggaatgagctaactgcagatgaggttatacacaagtttgatgtggttgaagtacttgaggattttactgtagggcatggtatagatgttattcctctggtcaaagtggctggattcaggacagtgtttcaccaccacttacatccaaaagaaattaggatcattccgagggaagagatgtttcgattctctcatcaaataccttcatatgtactcactggtcaagaagctccagaggctccaaagggttgcagggtgctggatccagctgctactccatttgaacttcttcaggtaatagaagttgtgaagaaggaaaacgtggcagccaatgaggatagtgatgtaaaaaaaccaagtgatgacatgaaaaaagataatgatgaggaaatgatcgatgctatgggaaaacatggggaagaaaaggaggcaaaagtcgaagccatgcaggaagtagacccaagtgataccatgaaaaaaggcaatgaggaaatgcccaatgatcccggaagacttagggaagaaaaggagggaaaggccaaagacatgcaggaggtagaacctttgaaagaggccaaagagagagaagatttgcagtagcttgtaattgcaaagggatgtagcatgctacaagaaatcaacttttggaatctctggctcgtgcaaggaatgaagaatacagagacccaaaattaatttgacaaaataggatccataatgagttgacattgtgattatttattggatggatcagagatttcaatcattttctcttatccaaccatcatattttgtgaagggttaattttgtctatttttttgctagctacaaattgtggggggatttcccttctgttctaacattatgggtcaaggctacatgcccttttctatttacattttagggtcttactcaattttgttttgtaaagcagatttagtgtggcaggtgcttcagtcgctgtccataaatttgtaagatatttagctccgttaaagatcaatacaataaattacaaattgattcca

SEQ ID NO: 76348 - DNA, 314 bp, Glycine max
  Clone ID: PAT_MRT3847_39956C.1
ggctcgagcttaaatagattaagcatttgagttttgtaagcatagaggaacctcaaggactgggggcaaacataaagacgacaagggcatgaagcgggaaggcggatcgactcgcagagtagggatggacttctactcaaaccgaacaggcagcaccggcaacatctacggcgcgctttgcactgtcaagacaggagttagagagacggaagagcccgaccactgcaaagagctactacaaaaccggagaagccggagttaaaagtgtaatggttactatttcaccgaagggcaacagacaggcaaggagtcaa

SEQ ID NO: 76349 - DNA, 140 bp, Glycine max
  Clone ID: PAT_MRT3847_39957C.1
cgacaattcgaagattttgcaatgtttgtcgatacatcttcaatagtattgtaacatagaatgtcatgctaatcatgttgatgcacattgggataaagtctgagttaaattttcatgcgtaaagatatttactatctaaa

SEQ ID NO: 76350 - DNA, 422 bp, Glycine max
  Clone ID: PAT_MRT3847_39958C.1
atgatgttggggatgaagaagttgtggatatcggagatgatgagatgccagtgagaaattacccctcagtggaaattgataaggataatgctagttctggcagtgattcctcatcttctagctccagtggctctgattcggatagctcgtctagtgattctgatggtgaaggggaagcgcagtctccagcagtaggttccagatcatctccatgaaactgagatctttctgatgtagagaagaggataggagatgtatgatttgtaaaaagggagcacagagaaaatgttagaataggttgttgcattagatcagcatggggagatgtgctcagcttatgtgttctagttttggtatggggaaatgtgctcagcttatgtgttttagcttttggttggaatggttgaaagaatgctggtctc

SEQ ID NO: 76351 - DNA, 484 bp, Glycine max
  unsure (1)..(484): unsure at all n locations
  Clone ID: PAT_MRT3847_39959C.1
acggctgcgagaagacgacagaggggccacgttgaccgtgcttgatgtttcgagaaatgcactttccggcgaggttccgccggaggtaggaaaccttatcaagttggaggagttgaagatggctaataattccttcacaggcaccatcccggtggaactcaagaaatgtgggtccctaagtgtcgttgattttgaaggcaacgattttggtggagaagttccttcttttttcggtgatatgattggcctcaatgtgttgtctcttggtggaaaccacttctctggttcggttccggtgagttttggtaacctttcatttcttgaaacattgagtttgagaggtaataggttgaatggaagtatgcctgagatgataatgggattgaataatttgactaccctggaccttagtggaaacaaattcacgggtcaggtttatgcgaatattgggaatntgaacaggttaatggtcctcaatctgagt

SEQ ID NO: 76352 - DNA, 185 bp, Glycine max
  Clone ID: PAT_MRT3847_3995C.1
aggggcacacaatagtctcgtcgcttaatcaagaaagaagggtacgggtgttagaagacgaacgagcgatactgcagcatcaaaaccttcgtagggttctgctgcgcatcatcaatcttcgggttcggctgctaaatcacaatagaagggtatcgctgctcaatgtccacacaggggtaccgctg

SEQ ID NO: 76353 - DNA, 354 bp, Glycine max
  Clone ID: PAT_MRT3847_39960C.1
gactcctttgtttttgtgaagcaaattactgggcaaaggaagtgttccccatacctttgcagcttatctttcctaggaaccatgtggcagatcgtgcgctccctgcttgattcttttatccagaacgtatccaccctgtgtttcctgcgaaggcttcatgctgtgggtcctaacatctgagaatactctgactggggggcaccgtcaccctggctgtggaaccccctcgaacgctggggactgggtgcgcggaggttcccgttctggatgtgtgtttccgccgatgtgcaaccgctttcctttggtgtgcacacctaggtaaacctccgctccttggggggtttcccctccttg

SEQ ID NO: 76354 - DNA, 1791 bp, Glycine max
  Clone ID: PAT_MRT3847_39961C.1
aagggggtggcttgcaacccaaaattcctgaggcaaaagggtcaatcaaagctattcgaagtgtgggctccaagatgcccttgtatgaatacttgcagacatatggtgggatttttaggttgacctttggaccaaagtcctttctaatagtatcagatccctctattgcaaaacacatattccaacacaattcaaaggcttatcccaagggtatcttgttcgaggagagtaccctataaaggggggtgaagatatctttatatctgtatggaacctgcatcgcagtccaaaactatgggatgatgctgacaagtttaaacctgtaggatgggtgatagatggaccaagtcctaatgagacaaatcaaaacttcaaatatctgccgtttggtggcggaccacggaaatgtgtaggtgatttgtttgcttcatacgagacggtagtagcacttgcaatgcttatgagacggttcaactttcaaatagcagtaaatgacactggtatagaggaggctactggaactatacttcaagaaacagaagggctaagtgttgctgtaacacacagctgggaaccccctattgggaaagacttatcaccacgtctaaggaaggttaatgcagctctcaaattaatcaatgatacgcttgatgatctgatagcaatatgcaagagaatggtggatgaagaagagttacagtttcatgaggagtacatgaatgagcaagatccaagtattctacacttcttgttggcgtcaggagatgatgtgtcaagtaagcaacttcgtgatgacttaatgaccatgctcattgctggacatgaaacatcagctgctgttttaacttggaccttttatcttctatccaaggagccaagagtcatgtccaagctccaagaagaggttgactctgtacttggagatcaatatccaactatagaagacatgaagaaactcaaatatacaacccgagtgatcaatgagtcattgaggctttacccacaaccacctgtgttaattcgccgctctcttgaggatgatgttcttggagagtaccctataaagagaaatgaagatatctttatatctgtctgggaacctacatcgcaatccaaaactgtgggatgatgctgataaattcgaacctgaaagatgggcattagatggaccaagtcgcgatgagacaaattaaaacttcaaatatcttccgtttggtggcggaccacggaaatgtgtaggtgatttgtttgcttcctacgagactgtggtagcactcgcaatgcttgttagacgattcaactttcaaatagcagttggagctccaccggttgagatgactactggagctacaattcatacaacacaagggttgaagatgactgtaactcacagaataaaacctcctattgtgccctcattacagatgtcaactttggaagtggatccatccataagcctttctgatcaagatgaagtaagtcagaaaggcgaagtttaccaggctcaggctcagtcctaattgctgctgtataacaaatcataaaccatacaatgagtgcaaggggggaaaaagtagtattctttatattcttttagctgcttgagtgaaatttgtagtatggtgaggcttgatatccccaacaatcccccaaacccagctcctttgcaaggaagagggcaaaacttcaaatccttcacgcctttacaattcttattaaaaagggtggaatacacaaattataaatttataaatacaacctaaaataaatttaaaagaggatgaacaatac

SEQ ID NO: 76355 - DNA, 177 bp, Glycine max
  Clone ID: PAT_MRT3847_39962C.1
acagaaaacatcaccatccatcgctttaaagcttccaatcttacgtacacctacatgcactgtatatctcaaccaaactcaaccactcttaagcacactctccgccaattcacaacttctataccccaattatcatatccatacccaacaaacttaacttctatcacatccatcatt

SEQ ID NO: 76356 - DNA, 390 bp, Glycine max
  unsure (1)..(390): unsure at all n locations
  Clone ID: PAT_MRT3847_39963C.1
tntttttccatgtccattcgttatattctatactagttaacggttactttcattatgcattacaggatacacatgcacttttaaaatttagacttcaaagaaactaggatccactttcataacttgcaatatcagactaccgcgtacgatggaaaagctagccactgcacagttaccatatgcgacatgatcaagtgtctgctatggctacttaaacctacagaccaggtacaggcgcgaaagaggaagtatgcttaaccacatttggggaacaggccaggcgaactattttcctttggaccttaagcttactactgcccgatgggttgggctccatgccagcaggagactctctggttgaagaagcatcagaccttattgaggatgctt

SEQ ID NO: 76357 - DNA, 405 bp, Glycine max
  unsure (1)..(405): unsure at all n locations
  Clone ID: PAT_MRT3847_39964C.1
gcgtccggntgtttttccttgcttgnttcaccaaagattatagcgaaatcatttcctccttccttcttgcttcctgcttgttcttcatggtgctgggcggtttgaaaaggctaaattctaataacaccaacgtcttcatcttgtaagctccgtctcttgacaattcgtacgtcccatttatgcaagccgacggccgcccttttcattccctttttccttcgcactactccctcattctgtgccatgtcttcctctctcggtcttccttccactcccttcttcggccatggaacaagaaccctccctctcactcgatctaggctttccatgaccgtctccgccggatctcaggcttctctcctcgacgctctgttcgccggttacaaggcctccacttcattcctc

SEQ ID NO: 76358 - DNA, 251 bp, Glycine max
  Clone ID: PAT_MRT3847_39965C.1
cctcgagccgattcggctcgagatttactcatgaagttgtgctgtaaccaaattctgttattacctttcctgcatctggaaacttggattacaagttgtgttccaactaaaccggttttgctgtgccaattaatagacaaaaggaaccaggaaatatggaaatgacaagggaaatattataagaaaatgacgatgtaataactacaattcttagttaaactttatgtttaaggtatgtgcataatatgtaa

SEQ ID NO: 76359 - DNA, 482 bp, Glycine max
  Clone ID: PAT_MRT3847_39966C.1
aaatttttaatttttgtgcattatgtcactattgaagaaaaatgattttgacctttttacactggttctacttatatacgatatagcaagtcatttttgtacatccgtgatgcctacaaccaatgtataaaaatctagaaaaattaactttgtacatcaatttattatcaatatgatgataaaatatatataaaaaacaaacttaaaagataaaatttgtgaaatattaaaaggtagatgataaaatttgttaaaaagaaactttgatagtaaattctgcaaaattatgaaagttgaatgataaaatttgtaaaaataaaatttgaatgataaaatttttaaaacaagaaaagttgaatgattaaatttacaattaaacctttaattaacttgtgtttaatcaagtttatgtaatcagtgaataaatgataaacgttacacttgcgcaaggcattatcttgttggcttcatgaagtacatga

SEQ ID NO: 76360 - DNA, 259 bp, Glycine max
  Clone ID: PAT_MRT3847_39967C.1
cttttgaacggaggtccacctaatagttcccatagatgccagagctgcttatgcttgtaggataagtaccaaaaatactttaaccatatatgagtgataacctgggaacctagagttggcgggtgcacgcaaatcaaaccagaggcatgctggaccagggagttcttggaaaagaggatggcctttggcggcaggcaacgattcagcatgatcacacaagaaggaagccaatgattttgctctctgtgaggatacaccc

SEQ ID NO: 76361 - DNA, 904 bp, Glycine max
  Clone ID: PAT_MRT3847_39968C.1
ccacgccgtccgcaataacaaacctctaatcgcagcctctctgaagtgcttccctctcgccgcaatgcgaatcgttctcttcactttccagcgacgcattctagcagctcctccttcgaagtgcgcctccatcaacggagtctccgttccgaacaatccagaagcttctagagattaagactatgctttcgagttcctcgaggggattcagaaatgggtcgggtttctacagttgattctgcccggcgaacagtggtggaatttctccgccgccactgttttgttagatctgagatttgggaatttttggatttttttaatgataataaatataatgacggtaaagaatcgtctttactcgttattaaaagaagcttcttcacaccaacgaaaccatggcttccgtgtacagctgtacggactgcggctccaacctgaatttgaactccgtttatgcgtaccctccggacttctacatcgaagccggcaacaagggctccgtctccttctccgccgtcgacgccaccaagttcaaattcgacaaggaggacaagattcgtcccttcttcgaaaccgtcaactactggggaatccagaggaagaggaccaagatcaagtgcaacaccttttaccgatagtcccggtcagtttcacatgggtcccagccaagtcatccccagagcgccccgatataggttcaagaccaaaaccctcagaatcacttcaacttgacccgtgtttggttcacgtttttttagatatgttttttcatgcctggtatgttattttcagggagtttccaaacatgctgttagaacgcttcttttgatatcttttgtcgtcatacaaacgttattgtacagatcatcatagattgcataatgtttcacatttttccttgaaa

SEQ ID NO: 76362 - DNA, 809 bp, Glycine max
  Clone ID: PAT_MRT3847_39969C.1
gatacctcaggtcaggcggggctacccgctgagtttaagcatatcaataagcggaggaaaagaaactaacaaggattcccttagtaacggcgagcgaaccgggaaaagcccaccatgaaaatcggtcgccctcggcgtccgaattgtagtctggagaagcgtacagcagagaaagaagcttcacaattcacattcccaccaacggaaccatggcctccgtgtacagctgtacggagtgcggatccaacctgaatcttaactccgctcatgcctaccctccagacttctacttcgaagccggcaacaagggctccgtctccttctccgccgtggaccccaccaagttcaagttcgagaaggaggacaagcttcgccccttcttcgaaaccgtcaactactggggaatccagaggaagaggaccaagatcaagtgcaacacctgtgactgtctccttggctacgtctatgacgatggtccacctcttaccaatagtcccggtcaatttcacatgggtcctagccaagttatccccagagcgccaagatataggttcaagaccaaaaccctcagaatcacttcaacttaacgcgtatttggttttttcgatgtcttttttagaagctaactgttattagaaggcttctttcaatatctttttagaatcttttatagtcatacgcatgttattgtacagaccatcgtagtttgtgtaatatttcacgcttctctttaaaataaagtgctttatgagtgaaaaaaaaaaaaaaaaaaaaaaaaaaaaaaaaaaaaaaaaaaaaaaaaaaaaaaa

SEQ ID NO: 76363 - DNA, 1446 bp, Glycine max
  Clone ID: PAT_MRT3847_3996C.1
cctcgtgccggctcggaattcggcccaaacactagtaattaaaagatgagttccaattccagagagagtcaagttcacccagaaatagcaaaggtcgaggatccttacctctctgctgtgttactttgctttagccgggtcctccctgcagtcctaaatgcagctattgatctcaatttgtttgatatcatagcaaaggcacagagttcatgtgactcaagtttctcagcctctgagattgcttctttgcttccaaatcaacacccacaattggctaataggcttgaacgcatattacctttgttggccagttattctcttctaaattgctccattcgcacaaatgaagatggtaagagagaaagagtttatgctctctcacccgttggtgcatactttgcatttgataaggatgaaggaagttctttggctcctctctcttctttaatccatcgcggatttcatgacatgtggaaggatgtaaaggatgcaattgtggaccctaacaacaataaccattttgaaaatgtgcatggaataccaccatatgattatatggagaaaaatgctgagctgaatgacattttttacaaagcagtaattcacgctgccccactagaactgaaaagggcactcaaactatacaaaggatttgagggagtgtcaacacttgttgatgtaggaggtggagctggagagaccctgaaacagattctcccaaaatatccttcaatgaaaggaattaattttgatttgcctctggtgattcaaaaagcaccacctcacccaggtatagagcaaattgcaggagatatgtttgaaagtgttccaactggtgatgccattttagtgaagtttgtatgtcacaattgggctgatgaagattgtataaagtttttaagaaactttcacaaagccttgccacaacatggaaaagtgattgttttcgaatatataataccagaagtcccgaatccaagctatatatctaagcatacttgtactctcgacaatgtcatgtttttagcacatggtggaagggaaagaactcagaaggaatttgagaacttgtgcaagagctctggtttttccaagtttcatgtagcaagtagtgacatctcatctacgttaggagtaatggaattctataagtagaaattgcccatgacaaatagtaatttgaatctatgatagcccacatgttacattgggtgcatccagacccaaaagcctttaaataaattgggcccagttgcataaaatctgatgttggcccggcaaatgttagcccactggtcagcaactgtaagattatttatgttattgcttttgagactatgtaatcatgaataaaaagtttggataaataacttatgtagttccaatattttggaaatcatcaatttggtttataaatgataattgttaagacaagttagtccaaaa

SEQ ID NO: 76364 - DNA, 1406 bp, Glycine max
  Clone ID: PAT_MRT3847_39970C.1
tttttttttttttttttttttttttttttttttttttaagctgcaaacacagacagtagctttgcattaagagggtaataaacaaagtcatctctgcccatcataaaaatgggtataaatgtccattttgaagagggaaaatatttaaggcttaatacaaatacatatgtaacaacttgggcttgtttggatacaagccgaaagttcttttgaaagcttctttactaaaaatatagtattttttttcaatacagaagctttcaaaagcatttctagctctgtatcctacaagctcaaaaacatcaaagttaaaattttttttacagaaatttgcatcacaagtggctgcagtagaattcaagtgactcctaacattttcctttttatgccctgtagatctagccaacaaactaaagcacgtaaaagtagaaaactgaatctctactctctttacaatgatactgctcgaaagacattaacaaggccgagcagcagttgaacaaggttaataatctctgccagtccaagttctttacaattcatccatccctcaaccagtttaacatcaatccctttcttatcttatttactatataatgtttttaatcctttttctttgatcctagtctgtgatgacaagaatttaaaattaaaaaaaaaaaaaaaggaatacagttcctaagctctttctatgtgtcccattgaactcagaagatgtatcaacagaaaaacaagatgagataaatctcactgatggctgcagagttaactgtttaggaattgaatcctgtcaaggtaaagagctaaaactttcgatgggatcagattcttcgagcatggaagctgcttggaagcagtcggcagcatcacttattcggccctcatgtttgtgaagcaatcccaagttataccaagccttgcggtttgtgggttctattcggagtgcatcagacagtaagcttcttgcaatagccaaatgctttgtacccaatttttgaaacaaagcacccatcaagatcttgcatggaacatagtttggttcgagtagtatagcattaatagtagcacaaagagcttcttcattttgcccacgtccttcaaacaaaacaccttcagtgtgcatcaatgctgcagagtattccttcaactccctggccttttgcaaacagatttcagcatccttccaatgagaaagactagcatataaatttgccagaccatgccaaatatcaaattcatttactttatcatactcaacctttgaactaatttggagagacccaaaggatttcttctgggcttgaaccaatgcaagaaggtactgataagtttcaatagcatccatgggtcgtgattgggagatcttcaactttgcctcgagccgaattccgagctaccgtagcgag

SEQ ID NO: 76365 - DNA, 308 bp, Glycine max
  Clone ID: PAT_MRT3847_39971C.1
tgctgggacagggaggaattttttacaaataattttcctttattaccgctctcctgcaaaatggatactgttactggccaatattatcctgagtgggctccaattaattgtcgagttatcgacaaccaattacatcactgaaggaaatttttttagaaagcaagattgtcaacattgaatatgatgcattgtacaattccaaatgattgtggatcattggttgctgccaaggttggaaatcacacacaaacaggtggtttccatgctgctggaagcaaaggaagactgggatttgcttcatttgatac

SEQ ID NO: 76366 - DNA, 383 bp, Glycine max
  Clone ID: PAT_MRT3847_39972C.1
aaggtgcagataagcacatatggggagtccctgaccttaggagaaaaacatgacggtctagaatcgtgccccaactcattaaatctgcccaaacatgactttcttccatgacaccccgtgccccaaagaaaagtggtaatttgaggggaaacaaagggacaaacatcctagaggtgacacacacttccatgtgaaaaaaagaagagaacccaatgcgcttggaaccttcatcagtagcatatgtacccgtctgaactgaaccgtgctattcctcattgggggatcaagaccgagagtcctggtcttaatttgcccagaggaagattcgaataccccactcccaccaacattgggcaactgcctcacttcccagagagggggct

SEQ ID NO: 76367 - DNA, 350 bp, Glycine max
  Clone ID: PAT_MRT3847_39973C.1
caggagtacatggaaccttttctctaccaccatgagcgcgaaatcgacgagttcattacccagagtcatgatcgcgccaagtcagcaggtatagcatacgtcgagatgggtattgagtgggtaaaggtcaacgtgttgggctttgcacccaggaagcccgactcaccgaggcccgatggacagacgtacgcgcaaaacctcatgagcaggttccagatgccgtcagcaaggggcagtaatgatctatacgggctggtcaaccaggcgctcagcggagccagtgcgctttatggtgctgccggtaccgcaggtacaagagacgcgcaagcctcggacctgagccgtggtgc

SEQ ID NO: 76368 - DNA, 1071 bp, Glycine max
  unsure (1)..(1071): unsure at all n locations
  Clone ID: PAT_MRT3847_39974C.1
tttctacatttncccctctttggagaaatcaaaagcttggaacccatgaacattttcccctctttggagaaatcaaaagaggggaacccatgattcctcctccatcttcctttctcttccagttcctcctcctctttcctctcatactctcccattccgattccgattccggtcaccccgtgctcccgcgcccgctgatcgtggagtacccggagttcgacgcggtgctgcggtgcggcgcgtggcgcgtggcgggggaggcgaacaacctaggcgcgtgggcgataattcccgaggaatgcgcggagtacgtgaaggactatatgagcgggaagggctacgcgcttgacctggaaatggtctccaaagaggcggaggagtacgcgaggactgtgccactcggctacgacgggaaggacgcgtggattttcgacatcgacgagactctcctctccaatctcccctattatgccgcacatggatatgggcttgaggtctttgaccacgagaagtttaacaattgggtggagaagggtgtagctccagccattgaacccagtttaaagctctatgaagatgttttgaatctgggattcaaggttattctactgacaggacggagtgaaaggcacaggagtgtcactgttgataatttgatcaatgctgggtttaaggaatgggaccagctcatactaagaaactcagatgatcaagggaaacgagctgtactctacaaatcagagaagaggagtgagatggagaaagatggatacaggattcttggaaattctggtgaccagtggagcgatttattaggttcttcagtatctgttcggtccttcaagcttccaaatcccatgtattacattccttagtaaatgccccattcatttgcatataattgttgtttgaattgtacataagggtagtggctcaattcatatactgaatatcatattgccaatgattcataaactgaatatcactgaaattctaatacatactgactaattaaacttgtgttaaaacttatgtaacatttgccagttctttacatgattgtgcaaaata

SEQ ID NO: 76369 - DNA, 1059 bp, Glycine max
  Clone ID: PAT_MRT3847_39975C.1
ctttttcctttcctcacaatttgcatttcccctctcttcgtttccttttctcctcattttacatttcccctctttcgattctcctaagaggggaacccaacccaacaattcctccatcccttgcattggtcacaccatggttccctctgcctttctgttccatttcctcttcttcttttcactcctcatctcgttttccttctccgattccgattccgattccgattccgattccaattccgtaggccccactttccaccgcgtgttcccgcggccgctgatcgtggagtacccggagttcgaggcggggctgcggtgcggcgcgtggcgcgtggcgggggaggcgaacaacctgggcgcctggaggacgattccggaggaatgcacggagtacgtgaaggagtacatgaccgggaaggggtacgcggtcgacctcgaaatggtctccaaagaggcggaggagttcgcgaggagtgtgcctctcggcggcgacgggaaggacgcgtggattttcgacatcgacgagactctcctctccaatctcccctattatgccgcacacggatacgggcttgaggtctttgaccacgagaagtttaacaattgggtggagaagggtgtagctccagccattgaacccagtttaaagctctatgaagatgttttgaatctgggattcaaggttattctactgacaggacggaatgaaaggcacaggagtgtcactgttgataatttgatcaatgctgggtttaaggaatgggaccagctcatattaaggtaatttctaaaacatatttgctaattttagaatagaaaatgaagtttgtatattaaataaatgctataagattggaatatatgtgcatgttctgtttggcatgactgccccaatttaatgcttttgtaatctggataaattttgttattttgtgtttaaaccacccaaatccattcaaatggcattgtgcgttgtacttgttgctgaaagatttggcatgtttacatgaggaataatctgaaatgataaggttatagccccccctcctttatggttcc

SEQ ID NO: 76370 - DNA, 460 bp, Glycine max
  unsure (1)..(460): unsure at all n locations
  Clone ID: PAT_MRT3847_39976C.1
aaccaccacctggccctcaacctaatgccacacacgcttcacaaaagaaccccaaaaatgacaacgccaaaacacaagaaaaagcaccaaatcccaacnccttttttgaaagatatggaatnacatatcaagaagaagatggaanaggggaaaaacaacaaaacctccttgcaaacccaaaacgacttagaatcccaacggaagaacaaccccaagttgcaaggaatgaagggctccaaaagagcaaacacaccggctcagaatcctaaaccacaaacgacggcccagaaacacaacgatcagcaggtcacgnaacccccatcggacccactatatgcaatagccctcctgtcgctcattaaaagccccaaatctacacaacacacgggcactgaacctcggatgggaacttanaaaccccncanggctgaggagggngactganaagaaaaacctcttg

SEQ ID NO: 76371 - DNA, 529 bp, Glycine max
  Clone ID: PAT_MRT3847_39977C.1
agcaaagcgtgaacgatgtgattcaaaaaaagagttattggcaagaaaggagcgggttctgcaaagattatctgcttgactagttttctcccttaccctggttaagaacataaatcatcatgctagctattaatatcttacaggcctatattcaagcatagaccatgactatgagttggcaatcttcactgacagcttgaagatatagtattgtatttaataaaaatacaactcttaactagccctcatatatgacatcataacaagagttgttagcatgaaacttaagcttggtatgatcgtaactgatgatgcactcactcaagggaaacagatgctatagatgaagcccaaacgcagtgactccttgccttttcttgataagtcctggacttgcacaagcttagcttgttgcaaatcctgctgaatcgatcacctgaagaacgcgccctgtcacttgagctgtgcttacctgctattcacccttttacatgaggaatgctagtaatccatattgctcctacatgag

SEQ ID NO: 76372 - DNA, 615 bp, Glycine max
  unsure (1)..(615): unsure at all n locations
  Clone ID: PAT_MRT3847_39978C.1
cccacgcgtccggcttcacatgcacacccttcggttgctactatggccaaaactcttctttctggggccaacattgtctataacggaaatcccttaaatgacctctctatgactgctttcctggacaaattcatggagaagaaagcgaaacgaagcacatggcatggtggttctcagattgaacctgccaagcagatggatgttaacaaccaattgattggagcagaaattcttttactagctgaggaagatgtacctcctgaggatcttgtcttccacaagttctacacaaacaaaatgagttcctctactaaaccgaagaaaaagaaaaagaagtcagctgatgaggaagcagctgaggagttgtttgatgttgatgatggtgaggttgatggagggggtagattgtcaaaggaagatattgagaagatggttcaagaggctgagaagtacaagtctgaggatgaagagcacaagaagaaggttgaggccaaaaacgctttggaaaactatgcatacaacatgangaacaccgtgaaggatgacaagattggtgagaaacttgacccngctgacaagaagaagattgangatgcaattgagcaagccatccag

SEQ ID NO: 76373 - DNA, 261 bp, Glycine max
  Clone ID: PAT_MRT3847_39979C.1
ggttgcaattttttttatcttttgggagccacctaatcaaaaacttgccattggccgaaccgggggcggggcttgcgggccattggggggaaccttcgcggagccggggggcggcaaaacacgtataccgggcccgcgaagactcgttggccacacctgggtagaatccgcgcccccattcagtcggacccccccacccttctaaagccatgcggggcagcaccctagaccattagggaataaggccaaagccgaggggga

SEQ ID NO: 76374 - DNA, 450 bp, Glycine max
  unsure (1)..(450): unsure at all n locations
  Clone ID: PAT_MRT3847_3997C.1
ctgggggagaaaataatngatgaaggggtggatgagatgattngtgagggtgatgttgatggagatggnnaaataaattangaggagttngttaaggtgatgatggncaagtgagtgatnattatattatggncanaagaanntatatgaaggagtgttgattaaaaggaaatgannaaaaaaaanagaggtaaggggaagggaaagggtttgggttgtataanagtgatgtagtagtnnttgtntttttttnttnntanatttatatttgatggtttttgaatnnaannttaaaatgtnaattagtggnaattnttggtattaatggatgtagtggaantgaanntttttagtttgtntgtaattttttnnaagaaataaagggttgtaatgttnaaaaaaataataaaaanaaattaataaaattgaaatgaaaaaaaaaaaaagaaa

SEQ ID NO: 76375 - DNA, 274 bp, Glycine max
  Clone ID: PAT_MRT3847_39980C.1
cacatcttctagcaaacttcctcactctatttacggttttgccagagggatatccaacaggcaaaggtgcatgtccacgcgcctagacgaaatccatcagaaccatgtactcgactctcagcagaaccgccaactaagtctctcataactacacccacaccatgaaccaacaaaaactcttataacaggcctgagtactacacaattttgacaaaatgtataaatttattattactcaacaacgatatccatctaaactaaccaccattcatat

SEQ ID NO: 76376 - DNA, 259 bp, Glycine max
  Clone ID: PAT_MRT3847_39981C.1
aaaacaaaaaaaaaaattcacaccattgctcacagaattggcatctcatttttgggacctcccatctttctgttttgaaaagtgtacagtagtgcagtgttcctgatgtaactttatggcttacaatgttgacatgtctcaggttcatgtgttgcgattggtgttttccgtctcaggtagattgcaaagtgtaggccccacacattggaaaaaataataataaaacaaggcaaaaacaggaaattatggattttagttg

SEQ ID NO: 76377 - DNA, 287 bp, Glycine max
  unsure (1)..(287): unsure at all n locations
  Clone ID: PAT_MRT3847_39982C.1
gagagagcgagcagtttcagacacagagagaggggtttgggattggagggattgacgctgcgtctcttcctcttctctttncgatccatccctcattcctaatcctccantccaaccaccctcagcctcacacttcacatatacacatatctggaacgcgtatcggccctcctatgggcttcaaagcgcatcctccanggngcttcaaggannttgcagaaagancccaccaacttcttgcagcgctggtcccagtaagctgaggacngttccantgggcaagcaga

SEQ ID NO: 76378 - DNA, 322 bp, Glycine max
  Clone ID: PAT_MRT3847_39983C.1
aggggcccactctcttttgataagaacccgaatccactggaaatgttcacacaaacacagtatcataaaacatcaaaaacatatcttatgctacttggaaccatgctgaacagatatgtgacactactaagattggccgagaaagatcctgaaccatcgaaccgagagtttgaggtttctaataagctatcttttgtaaccacaaaacaccaactcaaatctttacagtagagccatgcactaccactacatgttatccgagcaacgaccattcaaagtattgcctggacagacacaccattcctgactgtcatttggcaga

SEQ ID NO: 76379 - DNA, 375 bp, Glycine max
  Clone ID: PAT_MRT3847_39984C.1
aacttggatcaagctttatgctactggtgctattagcacccgggtgcgttacacttaggaacatgttttagactgttcgtggtagagggacagatgaccggcgggagattccctttatgaggagggcgtcgtagagaattgcaccatgcaggggacgagtatagtgctggataataaacattataagggctacgtttagaggctgccagcacattgcaaaggaatgaatggccttatgccttttaccacttggggggctcgacccattaccatgagaaggcacggttctctgtgccaaggtgttcatatagggtatgtcttgaagaacctgacatgcccacccctcttgagatcaacgttgatggagatcatacg

SEQ ID NO: 76380 - DNA, 254 bp, Glycine max
  Clone ID: PAT_MRT3847_39985C.1
ggcaaagcttcttttgtaaatcctctttttagttcacaggtggaagccttgtacatcgagggggtcttatgatttatgcatgctcccatacatcacaagattcagttcatactttatagagagtaggctctgactgatgagatcaaaggccaaatctggttgtactaattcctatagctctactatagcactagcggctgtgcgcttacatcaataaccggactgttatactctaggtagatattccctaatac

SEQ ID NO: 76381 - DNA, 309 bp, Glycine max
  Clone ID: PAT_MRT3847_39986C.1
ttcactctatcgcccacgcgtccgccaagtttgagcttcgactaataagccaaggctgaatgtcctcctctctgctgattgcatattttgctgcttattgctaaccctctgctgaatgtctttaatccaccaattttccatcattgagatgggtcttttcttcgttcggctttctttgttcgtcctttccccaccgtttggcggtctttgctgcgccaatacaaatgttacctccttttcgacaattgctaatggtgccgttcccacaacacatttgccaggtcccctcacctttgtactggcccgctg

SEQ ID NO: 76382 - DNA, 188 bp, Glycine max
  Clone ID: PAT_MRT3847_39987C.1
cagcatggtgagggtcagtgtgctcaacgatgcgctcaagtccatgtacaacgctgagaagattggcaagaggcaggtcatgatcaggccgtcatccaaggtcatcatcaagtacctgacggtcatgcagcgccatggctacattggagagttcgagtacgttgatgaccaccgatcgggcaagattg

SEQ ID NO: 76383 - DNA, 353 bp, Glycine max
  Clone ID: PAT_MRT3847_39988C.1
ccttcaaggttttaagactgaattggttcttgttctaccttggaaagagaattaagaaaaaaacaccaggaaggaaaaccatacccagaaaaagattccagaaaaattcaaaaaacacacatcttttgtttttttattaaaaaaaaccccccctttagtaatctgcggtgggaagctgctcgagaaagcggctgaaaaaaacaaccctggaaacaaggccagaaataccccccccgaacaaaggcccggcccaaaagatccaggggggggcccaggtacagctcacaacagcaggcccaaatgtaacacccgggttcatggccgctccacagaaggccccacccaacaaaatg

SEQ ID NO: 76384 - DNA, 323 bp, Glycine max
  unsure (1)..(323): unsure at all n locations
  Clone ID: PAT_MRT3847_39989C.1
gtctcatggtggtgacttcacacgccataatggcactggtggcaagtccatctatggggtgagattttaagatgagaacttcatcctaaagcatacgggtcctgttatcttgtccatgagcaatgctggactcaacacaaatgtttcccagtttttcatctgcactgacaaatagnatggttggatggcaagcagtgattttggcaagtgaaagaagcatgatttgtggaggcatggacgctttggtccagaatgtcagaccagcaaagatcacattctgactgggacaatcgataagttgactgtgtgtatctaccacagtc

SEQ ID NO: 76385 - DNA, 347 bp, Glycine max
  unsure (1)..(347): unsure at all n locations
  Clone ID: PAT_MRT3847_3998C.1
cangcacgcgtacgtnagcncgaattcggctcgaggttctagatcgcgagcggccgccgactagtgagctcgtcgacccgggaattaattccggaccggtaccngcangcgtaccagcttnccctatacngagtcgnattagagctacgcgtaatcntggtnatanctgttacccntntnaaattgtnatccgctcacnatncnacacaacanngaaanacnaanaaacaactnanaangaaagncannnacgaccannngganagnnngcagnggagnganacggnacaanagncaggnancagagacnnaaagnancaagaaangaggnnncaacncnnagacat

SEQ ID NO: 76386 - DNA, 3657 bp, Glycine max
  Clone ID: PAT_MRT3847_39990C.1
aaggaaaagagatttgagttggttttagttagcagccataactaccaaaacctagaacaaacattggttgcgttccccagttttctcagacaccatggccgtggcagcaccagccactgtctcctcttccttctacaaaccctcctctcttccttttcagacccactcttactctttccccacaaccctaccgacactccccactccccgtcgcgccgccgttgtcaaaacccctctcatcgtttactccaaaaaccccattttcgacatcgtctcctccaccgagtcacgctccggaggcgcctgggacacagaatttgacaaagaccaccttcgttggtcccaccgagcaactaaccaaacccggaagaaagcattggtctgttacattacttgcttcctctcttcttcttcttcctctcttcttcttcttcttcttcttcttgtcatggctgctgcgtctaatctctccactctctcctcctcttccctctccaaacccccgtcctctttccctttccgcaacacaccaacaaacaacaacgcttcttttctacacaacaaatcccttccaaaccaaaactctctctctcacaaactctcttcccctctgcctctcgcatgcaacccaaaaaaccaaaacacttgtgtcttcttcgacgacgaagaccaaaagccccgtgaagagtgcggcgtggtgggcatctacggcgacccggaagcctcccgtctctgctccctggccctccacgccctccagcaccgcggccaagaaggtgccggcatcgtagccgtccacgacaaccacctccaatccgtcaccggcgtcggcctcgtctccgacgtcttcgacgagtccaagctctcccgcctccccggcacctcggccattggccacgtccgctactccaccgccggccaatccatgctcaaaaacgtccaacccttcctggccgactaccgcttcggctccgtcgccgtcgctcacaacggcaacttcgtcaactaccgctccctccgagccagactcgaacacaacaacggctccatcttcaacaccacctccgacaccgaggttgtcctccacctcatcgccacttcaaagcacaggccattcctcctcagaatcgtggacgcctgcgagcatctccaaggcgcctactccctcgtattcgtcacggaggacaagctcgtcgccgtcagagaccccttcgggttcaaacctttggtgatggggagaatgaccaacggcgctgtagttttggcctccgagacatgcgcgcttgatttaatcgaagccacgtacgagagagaggtgtacccgggtgaagttatcgtggtggaccacactgtagtccaatccctctgcctcgtgtctcatcctgagccaaaacaatgcatcttcgagcacatatacttcgcgcttcctaactctgttgttttcgggaggtccgtgtacgagtctagaaaaaaattcggagaaatactagcctctgagagtcccgttgagtgtgacgttgtgatcgcggttcctgattctggcgttgtggctgcgcttggttatgctgcaaaagctggggtaccctttcagcaggggttgattaggtcccactatgtagggaggactttcatcgagccttcgcagaaaattagggattttggagtgaagcttaaactgtctcgggttcatgctgtgcttgaagggaagagggttgtggttgtggatgattccatcgtgagaggcaccacgtcgtccaagaatgggaggctcgtgaaggaggccggtgccaaggaatttcatagctgattgcatgtcaacctattgatgcttcctgttattatggagtgtacacacccagtttagaggagtttttatccaacctgatgcttgtggaggagataaggaagtttattgggtcggattcgctggcttttcttcccttgtgattagttgaatacattgtttgggtatgaggtttttatcgactgctatgattacttctctgggaagtaccctgttgaactagaagtacttcaaataaaaaggcttggtgttgttcagtacaattgggaagacgacttgcaatgggaattacaaatcgattgatgtggggggttgggttacaaatcaagatgagtttaagattggtagtgtctaagaatgcttttgtacttagataactggccaatcaaaatattgggtaaataaatgtcaaactatccatacaactaattatacaataaaatagttcgcattctatttcggaattcttgttatttagaatttagaacaaaccatggtataagaactttggatgtttttctttactctttttttttaatatactatttctggtttttgcagcataaggcatccctcagtggacaaaaatcaaatgcagttcttcaggtgtttttggtgttgttcttcatttcaattgaagttttcccttaataaatgttataggtcaatataagttctctaagtaaaattctaattctgactcgagaaagtctcttcttaatcttgtccgttaaaaaagcttgatgtgtaccttgatgttcctgatatcatagacatcagtcacatgcgcagcaaaggtcagcagtctggggaagagccattacctgaaggtgttcctgaagaggaagattcaaacaaaatttcggccaacgatgaaattgttgcccagctggtttccatgggctttaaccatctccattgtcagaaagctgctataaatacatccaatgttggagtagaagaggcaatgaattggttgctatctcacatggatgatccagacattgacaatcctatttccaaaggccatggctctgagacaattgttgaccaatcaaaagttgatattctaatttcttttggatttgaagaagaaattgctaggaaggctctgaaggcatcggatggtgacattgagaaagcaacggattggatatttaacaatctcgatgcatcagtctccagtatgaatgcttccccatcaaacgctgcatccactaccaatgatgttaacctacctgatggaggagggaaatatcgacttatggggattttgagccacagtggaacctctttgcagtgtggtcactatgttgctcacattttaaaagatggaagatgggcaattttcaacgacaacaaggtcggggcatccattgatcctccaaaggaaatgggctatctttatttcttcgagaggctttgattggttttaggcgctgaacaaggtgaatatttcaaccattaagaggcgcacgggtcgtttttgaatggccttaacatgccacctacttgtgctgatgtgataatattcatgctacccttttcttggtggcatggtaaacaatcctctagttggccgaatcttcttttcttggttctcagcggtattgaagcattttggaacttcacattgcattcatcttctataaattgcatgtttaggaattcaaattacaatggagcaatggattgtcagttctaggaattcaaataacaatacaacgaatgcagtttagtgaatgtttatacaacttcatttttctgatgtctaaaaccggtttctttgaaaagtttgtatacttttgtttgttcttgccttcacaaaagcataaattctttctttggcagtt

SEQ ID NO: 76387 - DNA, 225 bp, Glycine max
  Clone ID: PAT_MRT3847_39991C.1
atgtatgtgttcttccaagtagatctggttgcaaactcacttccagccttaaatgatgtcactgcaatggagcttcctgatattgtagctgaggctgccaaggttttggcaccacttccaattggctttgttgtgttcatggttcacttggcaaccatcccaataacaggaactggcattaaccctgctaggagtctaggagctactatcatgtacaaccaatag

SEQ ID NO: 76388 - DNA, 282 bp, Glycine max
  Clone ID: PAT_MRT3847_39992C.1
tgcgagaagacgacagaagggggatttgagaattcttatggattcttcgttgatagaatggaaagaattaggggaagaggcatcgccggaacatgaaaacgaatgggaagatcgaaaagttggacgaagaaagaattgtctggtctcgacgctagagttagccaagcattctctccggagaactatagaaccagaatcggtggctttacgtcctttatcagcttttcgtcccgaattcagaccgattattcaaatcgacgggggtcaactcatgacctctga

SEQ ID NO: 76389 - DNA, 1473 bp, Glycine max
  unsure (1)..(1473): unsure at all n locations
  Clone ID: PAT_MRT3847_39993C.1
aattcggctcgagcaataaataagttgtttgcatttccaggcaccggcttgttcttggctgattgcctctccttctgtggctgaacagtccgttggctgctgtcaatctcccctattcttcctcaccagccctctcacgtccccgggcaagcaaacacttcaaattcctttatgatatgccactcccaaaacaatggcttctttcaatctctcttattcttcctcaccagccctctcatgtcctcgggcgagcaaacaattcaaattattcaatgatgtgccttttgtccgaatgaattctaaatttccctcaagtgacaatgctattgggagaattaaagctaagttgatctctggagggggtgatctactttcctatccaaatggcaatggcattgtgataggtaaaaatctggttggtgatgaccctctgcgggttttgcttccattcctgaggcaattgaagacattcgccagggaaagatggtagtggttgtggacgatgaagatcgagaaaatgaaggagacttgataatggcagcacagttggcaacacccgacgcaatggcttttattgtaaagcatggaactggtatagtttgtgtaagcatgaaagaggaagatctggatagattggaacttcctttgatggtgaacagtaagtacaatgatgagaaactctgtacggcattcactgtgacagtggatgctaaatctcttcggccatggtacaaccactggggtgtcagctcacgatagggcaacaacagtcttggcccttgcgtctagagattctactccaggcgatttcaaccggccaggccatattttcccactaaaatacagggaaggtggtgtcttgaagagagctggacatacagaagcttctgctgatcttgctgtacttgctggcttggatccagtggcagttctgtgtgagattgtagatgatgatggttccatggctagactgccaaagcttcgccagtttgcagagcgtgaaaatttaaaaattgtatctattgctgacttaataaggtatgcagttacaattcatggaccatgtaataaaattcattgcatgcatatttatgtttagactctgctttagtgcagatactatacttttttatgtttaagtagtgttaaatatattaaatgagtttgatataggtgtaatttataagcctgaatcctgaatacataatagaactaacttggattctgtggtgctttttgtcgtttgaatcagtcaaacataatgattgttttattaaatattcttttggtgaaccttttactgattatataaatttgtatattattaagaaaatggaaagctnttttatttcgaaaaatcttncatttgataaattctaagtgcttatttaattcttatccattatttttcttcatggtttttgctacttggggtacttgttgcttatttaatatatatagcagggagattac

SEQ ID NO: 76390 - DNA, 268 bp, Glycine max
  Clone ID: PAT_MRT3847_39994C.1
catcgtaacctgcgaactccactcttcttttttatttttacctttctcttctttttgctttttggtctctcaaggggcactgggactaataacctataagacaagttaaaataaaaaaactaaaaccttcgatctttgttgttgaagttgttgtttttaatattgacctccgcgtgcgccaccgagctcggactgtgatgttgtctgctccaccgggtagctataacaacaactgtcgtggtgagaatcttgtgtctcatgattcttg

SEQ ID NO: 76391 - DNA, 709 bp, Glycine max
  Clone ID: PAT_MRT3847_39995C.1
ggctcgagcacgaacaagggtgtgttctgagtcagcttcggcaacggttcctagcggcagcaccaaacaagtcgagtcgacgcaagctgcattgctttctcaatataaataagtttaattcgagacgtcatcttattctcacctgaaaaccattcattcattgatcaaactcccaaaacaatggcttctttcaatctctcttattcttcctcaccagccctctcatgtccccgggcgagcaaacaattcaaattattcaatgatgtgccttttgtccgaatgaattctaaatttccctcaagtgacaatgctattgggagaattaaagctaagttgatctctggagggggtgatctactttcctatccaaatggcaatggcattgtgataggtaaaaatctggttggtgatgaatctgttcgaattgaagtacagccgaatagaacactggcagcagacacagggctaacaagcaatgttttctctattgacaacgatgaatttgatttggacagccccacagcaggttttgcttccatttctgaggcaattgaagacattcgccagggaaagatggtagtggttgtggacgatgaagatcgagaaaatgaaggagacttgataatggcagcacagttggcaacacccgaggcaatggcttttattgaaaacatggaactggatagtttgtgtagcatgaaagagaaga

SEQ ID NO: 76392 - DNA, 1071 bp, Glycine max
  unsure (1)..(1071): unsure at all n locations
  Clone ID: PAT_MRT3847_39996C.1
cacgcgtccggtttattctccctctttggtttttgtctttgggtgtcatgtcactattgttaagttaacctctgttctgttcttatatacaatgcagggcaagcaaacacttcaaattcttcaatgatgtgccttttgtccgaatgaattctaaatttccctcaagtgataatgcttttggtagaatcaaagctatgttgatctctggagggggtgaactactttcccatccaaatggcaatgacattgtgataggtacaaatctggttggagatgaatctgttcaaattgaggtacagcctaatggaacactggcagatgacacagggctaacaagcaatgttttctctatggacaacaatgaatttgattcggacagcccctcagcaggttttgcttccattcctgaggcaattgaagacattcgccagggaaagatggtnagtggttgtggacgatgaaagatcgagaaaatgaaggagacttgataatggcagcacagttggcaacacccgacgcaatggcttttattgtaaagcatggaactggtatagttttgtgtaagcatgaagaaggaagatctggatagattggaacttcctttgatggtgaatagtaaggctaatgatgagaaactccgtacagcattaactgtgacagtggtatgcagcgggcacttttactacttttcttccatgaatcatcacatgtggagttagtgcaatatctttctgaaggtcttccattgttatcaatctgcatatatacaatttgggttctctaggtctagaccaacttttgctataatcaaaggggaccgactatcccctagaaaggtgcaaacacagttttataaagatcaaacatttgtcttgatatttgcaaatcacttatcaccttctataaatagaagaatccaaagtttgagggtaagagacaaggaaataattgtaattctcaaaagagagaaaagaaaaagagatacctctgatgatgaacatagtttgaaagacaactttgtactgttatccaactatatagtggagattatttttttggattaaaaggagg

SEQ ID NO: 76393 - DNA, 640 bp, Glycine max
  Clone ID: PAT_MRT3847_39997C.1
gtaaacaaagggttataaacaaattcatttaatgaggtgataatacatgaatagtgcttgatttgtaatctactaattatgtaatggcgtatatccggataaaaaatatataacaaatactgaaaattgtctgctcagaagacatgaataaaaataaataaattaaagtcatttccatgtacaccaattataatcacgaaaaagtgttgacaaaacaaaagagacattttgtttattcataaacaggcggaatttatcagaatttgaaatcgtaccacatgcagtctaacatgaagcacgaacagtcgtgtccctcaagtggttttagccttcacgatccattaagtttagaagcttaggagggcatgaattatttgctcttagtccttgatgtagttcagcagatgaaattaaaagctttacaggacgaaattcaacagacaaactttgtcctctattgtctgtgaaacatatcaattcacgatgtataaggtgttcaaatgcccttaagcagacatgtcttgcataacgttcagaagtcagggtgcttttatactctttcattacagaattgaagttgcataagttttgctctttaacttccaatctcttcatgcaaaccaaaatttgaagttctaaa

SEQ ID NO: 76394 - DNA, 527 bp, Glycine max
  Clone ID: PAT_MRT3847_39998C.1
aaaactgtgaaaaaccacaaaaagaaagacgggggaacccccggaaaagaagggaagggaaaagaaaaaaaaacagggcaacccccgccagagacccacaccaacccccacggcaaaccccccaaccacaaaaaaagggaaaaaaaaaaaaaaaaccaaaaccgaccaaaaaaagcaaaaccgacccttcccctaaaaagggaaaaaaaacccgagggctgccaggggaaaacaaagaagggaggggccagggataccacaaaaggccccgcctgggaccctggcaaaaaaccccctttgccccccaaaaaaaaccttccctggtctctctaaaactcccccaaccccaacaaaaacgcaacgggcggaaacaaccaaaaaaaagaagggggggcccgccccctagggaggggccgtaaaacaacattagcagcctcccccataaacaaaaagcgcaaccttgcgctttttccacaaattgctaaagggggttattaccacacaaaaaacaccatgctctaaaaagg

SEQ ID NO: 76395 - DNA, 634 bp, Glycine max
  Clone ID: PAT_MRT3847_39999C.1
cccacgcgtccggtaatttgaactagctcatgtatgctcaaatgatgctggcatccatcggctagtaaatcattggttgagaactcatgcatgcatggagccatatattattgctactcgtagacaactaagctcaatgcatccaatttacaagctgctacaccctcatatgcgctacacattagaaattaatgcactagctcggcaaaatctgataaatggaggtggtataattgaggcatctttcagtccaggaaagtatgccatggagcttagttcagcagcttacaagaaattgtggcgatttgacatggagtcactgccagcagatcttattcggaggggcatggcagtagatgacccttcaatgccctgtggtgtaaaacttgtgattgatgactacccttatgctgcagatggactcttgatctggtcagccataaaagaatgggtagaatcttatgtagcacacttctactccgatccaaattcagtcacatctgatgttgagctccaagcatggtggagagaaatcaagttaaagggtcactctgacaaaaaaaatgaaccttggtggcctaaactcgataccaaagaggacctatccggtatacttaccacaatgatatggatt

SEQ ID NO: 76396 - DNA, 1227 bp, Glycine max
  Clone ID: PAT_MRT3847_3999C.1
cgtaactcgaaagcgcgtaatattaataatcgtaacaaacaagagagagaacagaactactactgtttctttttttgcctttgtttctctgcccctttgtgcagcgtctcacacaccaatggaagaaccaagtggttgcaacaagagcgctccaaaaggaaaaaaggatgacctttaccatgtacttcacaaggtcccttatggagatagcccttatgtcagagctaagcatgcccagctggtagaaaaggacccggaagctgcaattgtattattttggaaagcaataaattctggggataaagtggacagtgctctaaaggatatggcagtagtgatgaagcaattggacagatctgatgaagccattgaagccattcgttcatttagaagcctttgctccaaacaatcccaagagtcccttgataatgtactaatagatctttataagaaatgtacggctgcgagaagacgacagaaggggctgaagcgaaagttgaagttgatctaccaaggtgaggccttcaatgggaaactcaccaagacagcaaggtctcatggcaagaagttccaagtttctatcaaacaagaaacttcaagattactgggaaacctgggctgggcctatatgcaaaagatgaactacatgatggctgaggtggtgtatcggaaagcccaaataattgatccggattgtaacaaggcctgtaacttgggcctgtgcctcatcagacaagccagatatgaagaggcacaattggttcttgaagatgtattaaaaggaaatcttcccggctcagatgatagcaaggcaaggaaacgggcccaagatctccgaacagagttgagatccatgctaccgccaccacatttctcagatcttttgggcctagatgatgagttcatcaaaggactggaacaattgatgaatgaatggggcccaattagatcaaagagacttccaatttttgaggagatttcttcatttagagatcaattagcatgttaagttcatactttgtgtatatagctttcatacattgggttgggtaataggtgtttatgaagaactagcttctttttgttttctttttcctatttttgatgaagtggtgggtgttgctttttttgtaagagtgaggaattaaatagagtgaagaacttgatgtaaattaattatgaaaacaaagtaataagcctagtattttataaactccaataaaacac

SEQ ID NO: 76397 - DNA, 107 bp, Glycine max
  Clone ID: PAT_MRT3847_399C.1
gttataacatgatattattttgccattcatacaaaatcgattatatttggaatacataattattttcaaactcaatagtcacttaaatcaaattattgattttttat

SEQ ID NO: 76398 - DNA, 282 bp, Glycine max
  Clone ID: PAT_MRT3847_39C.1
cccacgcgtccgaaaaaaaaaaaaaaaaaaaaaaaaaaaaaaaaaaaaagagaaaattataaaaattaaaaaaaaaaaaaaataaaaaataaaaaatcttccatctaattataatgttccatatttcctttcccttgcttgcatcttcataacttttttatagttaaaccttatttcattaacctgctccttaatttttactacgtcttccctgttaaaaccctgcctttatccattttatttcctcttcatttcttcctactttacccattttccttttta

SEQ ID NO: 76399 - DNA, 782 bp, Glycine max
  Clone ID: PAT_MRT3847_3C.1
agcaatagaaactataaaaaatgaattaccctagtactatagcaactaatcacataatgcagtttcctctggatgggggttattcctgaaacaaaaatttccacccaagaatccgcctcccccaaattagggataaatttgtcttaacccgggctctcctacaacctaaaataaggggctctttaatttcattcagctcaagtttcaaaaacaatttattgcattaggctcaacagggggcaagggattcattctggtaacaggtcggttgtttggctcaggggctaaaaaaatcaaaacaaggccttgatcatttacaccttatgcatgtattcaaaagtctaagaatcatgcagaatcaagaaattaagagcaatcattatctaacggttataaggtcacacatctcaccggacaattatgaagtgctcggcttaccataccatgatttctgttcagacgtgctaacctcttcactcttgtgcttttgattcattcttcatcactcacaataacgcctgctcacacaagaataagaattttcacaatcatctcatcagtacatagtatatctcattcatcaattcatctagaacaagttgaaccaattaccgatttcctacatctctatcatgcaatttttattcaatgactgaaattaaactgcacgaaatcaaaataaaataaagaaaagaaataaaacaactatcctaaaaacacacaatgcaattaactaaaagagagatagggtaagaaatcctgggttgctcccactaagcgtg

SEQ ID NO: 76400 - DNA, 284 bp, Glycine max
  Clone ID: PAT_MRT3847_40000C.1
ctcgcatattgcaataacttgaaacgctgctcctcagggggagatgagaaaaatacacagagggatatttgaactttccagcaactacaccatatgcctatcttatcagttctaatgaagtttcaattcttgacggatacatttgcaaccctaatactctaccatgtctgaatactttgtgaggccaagacacataataggactctcatgtataatttatatatgaaacaactctagaagcatacggcattatttactctgccaacattaccaagattatgctt

SEQ ID NO: 76401 - DNA, 484 bp, Glycine max
  unsure (1)..(484): unsure at all n locations
  Clone ID: PAT_MRT3847_40001C.1
acgagattgcaagagtgttctggctggcagaagattggtgcaattgtgaatcttggatcattttattttgtgggagttccttcttcagtggtgttggcttttgttttacatatgaaaggaaagggcctttggctggggattgtttctgcattcattgtgcaagtgatactctttggtgtcattacaattagaactagctgggacaaagaagcaaataaggcagcaatgagagtgaaagataccaaaatccctcaggagttgccacagagagatccatttaccatcacagaaaatgaattgatgtcatctttacagaattaaaagacatgaggcattaatttaaatcaccatacaaaatgtcatctctctctttctcaacacacacgcacacattacacatatgagagtttcaaaagaacgaatcttaacatataattcaagtagatggttaaaattaaagctaagtaaaataattntgacttct

SEQ ID NO: 76402 - DNA, 393 bp, Glycine max
  Clone ID: PAT_MRT3847_40002C.1
cttacgcgttttttctggagtgcgcccctgcctaatcagacgaatggcgtcacttttacctgcgacagggactcgcatagtacgaagccgcgcaatgtcgagctatgagcagaataagaacgggattcgggctctggtgaggcatctttgtgaggcaatcactcgtgagattacttatatacgagtaacagaacagtggggaggactgtgtgaaggttgggatgacgatcacaagcacaagacgaccgttaaaagcactggtcgtaacaaagtgtaacactgaacagattagcggggtgcgctgcacaacagacattgcagctatgactatgtctcagagcaaacaccagtggcgttcacacaggagactcgatgtgcttgacaattaacatt

SEQ ID NO: 76403 - DNA, 536 bp, Glycine max
  unsure (1)..(536): unsure at all n locations
  Clone ID: PAT_MRT3847_40003C.1
tatgagatacactgagcatcgtctagctatctcgatcgaactgtccaaggtcctgtcaccaataagtatgactactgaggagtcgccccgtgtagcctaggaggcggcgggagcagcgtatggattaacacacgtgggaagaagcggaactacgcctgcaagcaaaggcattcggaggtaacgcaaaagcggaatacgtggtgacggccaaataacgctcagtgtatcctaaagaaacggcgcgttgagcacatagtaaacgtgggcgtacagcaaaggccaaggtttggtagccaaatgancgtgaaaaagcttattaagcggcaatacgtgggtagcattagcatgcgtgcaaaggaaaaatacaaccgtacgttatgtcgcaataacgtcacgttgttaatacggtaaaggtcacgatacttacgcaattacaacgtgccggctgctgtcatggacacacacatcaacgaggcccccgggacaacggagcgcgtgtcgcctagtganatgactggggatagctgggagagtac

SEQ ID NO: 76404 - DNA, 2807 bp, Glycine max
  Clone ID: PAT_MRT3847_40004C.1
ccttcacgcccgaacttattcaccaaagagaaaccaaaaggctcaaaacacaaccatgatcaatcatgctctttgtttcttagtattcctatctgcactccatgcaacacatgcagttgaatacactgtcactaacaacgcactctcaactcctggcggcgtggctttccgtgacaaaataggggctgaatacgccaagcgaacacttgactcggccacccaattcatatggaggatctttcagcaaaacaacccttctgacagaaaaaatgtgcagaaggtaagcttattcgttgatgacatggatggtgttgcatatactagcaacaatcaaatccatctcagtgcaagatacgttggaaacaataaaggggacgtgaaaacagagataacaggtgtgctgtaccatgaaatggtgcacgtttggcagtggagtgggaatggtcgtgctcctggtggattaattgaaggtattgcggactatgttaggctgaaggcaaactatgcacctagtcactgggtgaaagcagggcaaggacagaaatgggaccagggttatgatgttactgcacgcttatttggactattgtgatagtctcaaaagtgggtattgtggcacggctttaactcgagccgaatcggctcgagcactaatcttgctcatgagaacagcagcattaaaactcgtgtcaggaaggaaggcgggattccaccgcttgttcatttgcttgaatttgcggatacaaaggtgcaaagagcagctgctggtgcattgcgaacccttgcttttaaaaatgatgaaaataaaaatcagattgttgaatgcaatgcccttccaactcttattctaatgcttcgctcagaagatgctgctattcattatgaagcggttggtgtcattggaaatctggtccactcttcccctgatataaagaaagaagttcttcttgctggagccttgcaacctgttattggactacttagctcctgttgctctgaaagccagagggaagcagcattgttacttggacagtttgcagcaactgattcagactgcaaggttcacattgttcagagaggtgctgtccgacctctgatagagatgcttcagtcctctgatgttcagctaaaagaaatgtctgcctttgcattggggagattagcccaggacacacataaccaagctggtattgtgcacaatggtggtttgatgccattactgaagcttcttgactccaaaaatggctctttgcaacataatgctgcatttgctctttatggccttgcagataatgaggataatgtgtccgattttattagggtaggtggaattcagagactgcaggatggagagtttattgttcaagcaactaaagattgtgttgcaaagacattgaaaagattagaagagaagattcatggccgagttctgaaccatttgttatatctcatgcgagtttcagaaaaggcttttcaaaggcgagttgctttaactcttgctcacctttgctctgcagatgatcaaagaaaaatatttattgattataacggtttggagttgcttatgggacttcttggctcttataaccccaagcaacaacttgatggagctgtggctttatgcaagttggccaataaagctatgactctgtctcctgtagatgccgcacccccatctccaacaccccaggtgtatttgggagagcagtatgtaaacaatgctaccttgtctgacgttacatttttggttgaaggcaaacgattttatgctcacagaatctgcctgcttgcatcttcagatgcatttcgtgcaatgtttgatggtggttatagggagaaggaggcacgggacatagagattccaaacattagatgggaggtttttgagctgatgatgagatttatatacactggatcagtagatatcactcttgatattgcccaagatctcctccgagcagctgatcaatatcttttagaaggacttaaaagactatgcgagtacacaattgcacaggatatatcactggagaatgtgtcaagtatgtatgaactttcagaggcctttaacgctatatcattgaggcacacatgcatcctttttatattggagcactatgataaattgggtggaaagccaggacactctcaactgattcagcatataatacccgagatccagaattactttgttaaagccattacaaaggccaattccaatatccagccgtaatgtgctgttctactattgacatctaacccgttgcaatgtacataatgtggttgatgttctttttgttgaacctgcgaaggaagtctcctggatcaagtacagcatggcttaaaaaaaatatctaacatcacgtcatgtacgttcatttctgatgcagtgtaagtcccttctagctgtaacgtcattgtcttagatatagcaaatatgaccttcacgaacattgttttttactcgtgcaaatattgtgatggttctggcttgatagttctctttctcaattgatttggcattacaattgttgagtttatgagtagtataggtttcccaagcatctaatgtatatatgacaattagatagttgtttgtgattgctgatgaatgtattgtaaattaaatgcaaatgcatttaaagaattcgtcatttaagccatgctgaattcagttgctgcttataaaaattggctctttgtctatgcagtcaagcggcaacggaatcgaggtttcacgtacaagaattgctatgggtccctaccaacttttagaattcatggaaaaaattattttaccccagttc

SEQ ID NO: 76405 - DNA, 395 bp, Glycine max
  Clone ID: PAT_MRT3847_40005C.1
ttaattatcatactctttatgttacattgctgggaagtataacataacgttttgattgcaaaaaacactaaaatataatcttaatgttggggtctttacttcatatgcgaacgatcgatatttggtaaatattcttagacctcaaatgtgatggattgacttggcgtaacttaatgtgtacattagtaatactcaaaaatgatccatatatctcggtcttattatgatattaatggtacaaatgatgaaattcaatcttatgctttcttgaattaattaaatttcttttcataatcttatatatttctgacgcactaaatactattattcctgttatttcaatatttcattatttttgtcatttaagtaaatccattattttcactattctttta

SEQ ID NO: 76406 - DNA, 128 bp, Glycine max
  Clone ID: PAT_MRT3847_40006C.1
aacccactaatagctttcgttagtttattgttatgactactgacttttttctcggagagcggcacaccccccgaagaaaatgaagatttacatttacagccacagaccaagagttctcatccacactg

SEQ ID NO: 76407 - DNA, 387 bp, Glycine max
  Clone ID: PAT_MRT3847_40007C.1
ctcaagcatatgaaaacttcattagcaaccaaaagcacataatttttcaaattctgaaccaagaagataaataattgagaaattttgtataaaatgcaactcatacactataaaagagagttaccagaataaatcaacagggttaaagtagaaagtgaatcctgaatcatatgacctgcctccacgccttccccgattgtcctcttcacttctactgctagttacaagagcaataatggtagtgtaaacaataacaatggatgcaataagcgcctgcccaaaagaaacccttatcaagtattctcctgcggccttagccttttcaaaaaagggttcagctttaatcctaaatgacttgggcaccaagccttgatcgataatcttttg

SEQ ID NO: 76408 - DNA, 391 bp, Glycine max
  Clone ID: PAT_MRT3847_40008C.1
ggagaattgacttttccacaaggcactttcctaagtgctaagagaatgcctctctctatagggggaggagctggcgcaaacaaagctaatctcataaatatgccaaatgctgctctttcaatgaggagatattccgttggagatctactctttcaagcttctaagatgacttctccctacattaaatgtacagtctctatcttcatagcatttagaaatttgactgatgacaccatcacttttgaggctattccccacaagctggtgcagttttgatagattcaagaacaagttgtattgaaatattcacaagaggaatttcttacagctcggtcaactcaagtgcgtcctgcaacaactctggtggctgatgggcgtccatatttctatg

SEQ ID NO: 76409 - DNA, 356 bp, Glycine max
  Clone ID: PAT_MRT3847_40009C.1
cataacagatccgaagatcctagttacatgacctggcttgcgaccttgatactgtaccaaaaagggagccgacaaacctgccccgggccctcgtttgaaaagagctcaatcggaaaaagcatggggttgacacatgggacggccgagtcccaaatgcacgtcttggaaccaggggaaatcgccctgaggcgaggcccagtcgcgcttaacaaaagggcgactcgccacatgggcgaagggtacccgcccagtcgggaatgtataaacccgcgaggaggggagggtacaaacaccaggtgccggatcatacgccgtacccagagccgcctgccattggatgcccaactctaagctat

SEQ ID NO: 76410 - DNA, 310 bp, Glycine max
  Clone ID: PAT_MRT3847_4000C.1
ggaagaatttaccagctcactagtctactgtccgcctttcgtcctttttttttcttttacaataaaaatcgtgttcatcactatcgcttactggacagttgcatcatattgtctcataaaaatcataaaccttgtatccccttcacaatagaaatcatgccacgtccactgtagagctgttgctggtacaatcatgtagacaacttgttttcaaaaccttcttaataacaccctttttttttgctcgaaggagacacttaatcgctgctggacgtaagaattcctttcaagggcgaagacatgctacttt

SEQ ID NO: 76411 - DNA, 434 bp, Glycine max
  Clone ID: PAT_MRT3847_40010C.1
tttgtgtaccttttgaaatattgtgacagatataaaacgtgttccacctgtccaaaatattgccatgtttatcgatgaatgcgacactttgatttcgaagtccgcttattatatccctaacccgaagtgctacttggagcatgcatcacaagaaatggctcttcttcagatcttagcacttgatgtcctttcggatcaccatggtttccttgatatgatttgacagaggatccgtatgatcacttattccatgaatgggtgatttcatatacatgcttcacggacagggcttactatcgagctgaccgtttacaaggtgacagagtagaagatccatctatctataagctctatgacttgtcatataacttatgcttgatcgaaaggttattatcatctagagttgacgaacgatatgaagcatgggtcattgc

SEQ ID NO: 76412 - DNA, 376 bp, Glycine max
  Clone ID: PAT_MRT3847_40011C.1
gttcttgatttaccccaaaaaaacttgggagttgttgacaacaaaaaagggggcacgcgaaacacggggggggttgaaaaacgataaataacacggcggggaaccgaaaaaaaaggcgcgggggaaaaaaaccccgggggggggggggccccatttttaacagggggagaagggcctgggggaaaaaagggggcccccacacctgggggggggcagtccgggcaaagcaaaggggggggggggtaacaaccccctgcttggagcttgcccccctgttggagaacaaaagggggaccccttgggcgatgaattgagatgccccggtcccgacaaaaagcattgggggggcccccaaagaggcccccacagaaactgg

SEQ ID NO: 76413 - DNA, 416 bp, Glycine max
  Clone ID: PAT_MRT3847_40012C.1
gagctgaacgctataatggattataaaagaaatgcgttacccttatacaaagggtgccctgtttccttgatactacataaggcacatgattcccctcatagctacaatgacgaccaacttatgacaaatactatcaggagaaggatgagagacgccctgatgccagacactcgcgagaaagcattctgttatgtccagcatagaatatgaatagatcatagttgcgttgaccaggaactcaagcactcacgaacacccttaactcgactctatcttctcttgtgatgcgcttatccgagtcaggatatgtaacggcaaattcaccactttccgcattaaaaggaggcctcaatgtatcgtgaattggaggcacgtctaatggcggcatctgcgacaaatgcccagctgtgttcata

SEQ ID NO: 76414 - DNA, 426 bp, Glycine max
  Clone ID: PAT_MRT3847_40013C.1
gggtattaacagcaaaagccagaaggggtttaatttatttccctgatccgattccaaaggccagtaggggaaaatcaaattgcaaaataatttgcctaaaaaaaaaggggagacataataacaaattttgcttatgaggatgggtttaaggaaaacccttgtttttttcagaaaaattagaagacccatattccctcacttccctcgggaacacatcccttataatatcccaaaacccctccggcgaacttttcgggaaggcccggggggccggaacggggttttcggtcaaagggggattaacaataccggggggggcaagagtaaatggggccaacgggtaatcctcgttggggggataattaacattaacgttaaaacccttggttttgcgcttgggcggggagttccagggggttttaacgg

SEQ ID NO: 76415 - DNA, 1025 bp, Glycine max
  Clone ID: PAT_MRT3847_40014C.1
acgggtgtagacgacagaaggggaataatataactctcaagccggttcttccatttgactcttgttctgaacgacttttcaagagaatcaaaccatggcagtgaaagtatacggtccccactgtgcttccaccaagcgggtgctggtttgtctggttgagaaggaagtcgaatttgaggttgtccctgttgatgtcactaagggggagcagaaggatcctgagtacctcaaactacagccatttggagttgttcctgtcatcaaagatggagattataccttatatgaatctcgtgctataatgaggtattatgcagaaaaatacagatctcaaggggttgagttgctgggaaaaacaatagaagagaggggtctagtggagcaatggctagaagttgaagcacacaactttcatccacaagcctacaacttgtgtcttcatggtttgtttggttcactatttggtgtgactccagatcccaaggtgattgaggagagtgaagcaaagctggtacaagtgttgaacatctatgaggagaggctctcaaagactaagtatttggctggggatttcttcagcattgctgatattagccaccttccatttcttgattatgttgtgaacaatatggggaaaaagtatttgttagaggagaggaagcatgtgggtgcctggtgggatgacattagcagtagaccatcatggaacaaggttctccagctctacagagctccaatctagttgctaaatgagtttcagggaaactgctattagtgtatcatctttgaatatgttagtcaagaataaatgtacttttagcagattccaatgaaaggaagaaagtgggtagtgttcaacttaatggaatgtgttgaatttctgctttctttcattttcagttgtttgcttgtgtttaatttggatattccttgtggtcatgctcttaactttcccgttgtttaccctctatttttcttttgctactgaataaaagttatatatatataaaaaaaaaaaaaaaaaa

SEQ ID NO: 76416 - DNA, 389 bp, Glycine max
  Clone ID: PAT_MRT3847_40015C.1
ctttaactccattactggttttgtgtctctgaatagtgttgtgttttccttttaataatatcaaattggtagagcttctaaggcttctctatttcatccctgcagactgcagctctacattaattctttgtgattataactatcactttgtaccactaataatcccaaatcacaatgttgccatcaaatgtgtttgcgaaggattgtgattggagcttcatgagctaacatattcattgctttgctgaatctctctttgctattcctacttcataaacaccctcaaatcaagtatttataatatgaaattcatgatagcaatctgtttaattttcgtgtaccttctgccgattattttgtttactcatttccagcaccctgcaaacaga

SEQ ID NO: 76417 - DNA, 681 bp, Glycine max
  Clone ID: PAT_MRT3847_40016C.1
ccaaaaaagggggcccccctttttgttccaaatcccggtttggcccaaaaaccagggggcccaaaaccccccctcccctcccataaaattgggcccgggggccccccttttttccccgggtcccctttttgggcccccccccccagcttttcccggctgggttgggttgggaaagggggtggccccaaaacccaaccccccttttttcccccctttttttttcaaatttacccccccccggggggggggccctaccccaaaaaattttggttgggccctcggggggccccctctttttgattcccaagccccccccccgggggtttttcggaaacaaaaacgggttcccccaaattgccccggtctttaacccccaaaagagccccccttttgggcccttttgggggggggggaccgggaacccttggccccccttttggggggaaaaaacccgagggcgcgttttttcccccagggtggggagaaacaccgccccccaaggggtttttgtggaaaccttgggcccagtggtcccccccacttttgcgggccccccccgggggggggggaggcggggttttggcccttgggaaaaagcccccccccccggggtttgggaaaaatgttttttttttgggggccaacacccccttgcctttttttagcgcctccggggggggg

SEQ ID NO: 76418 - DNA, 1003 bp, Glycine max
  Clone ID: PAT_MRT3847_40017C.1
agggagagaattttaaatcctctagataattagtttcccgtccaaacacactattacagaaataacatttgacaggccaataatagacattacccaacatattgttttcctcagagaatagctacaacaaaaggacgatccaaatactatggggtaatatactgtattaacatatctttccataacgacaaaagcacaacaaccccaagaagaggcacgtaccccttttgtaatttgtcattctattactgcagaaatgacttcagtgggtcattagggtcaatatcagcaataagtgggagatcaactggtatagattctagattcaagccttcttctctcagctttgtaattacttcctcaaaaacaacttgattgccgctttgcgtgagatgcaaaccatcacggcagcttcatttgtcctttcagtacataccctgtggatttacgtgaatcccataccaacaacgtgcatcctcatatattggaggaggaggtatgaggagaacaagagaagaaggaaacaatggagtgaagattctgcttgtattcatgaagaggtacatgttgaaaagcagaacatctatctggaacacaagcgtcgttggccccaaagaaaacagtcaaagcaattggtgctgttccggttccaccgtcaacgccatgtgacccagggaaaaccctctccaacaccttcaacgcccaccgagtgttgtatccgctgtaacctcttagcaccacatcagccgtgcgagagaaatggtgggcgagagaagcaccccatccaccaaccgagaaagattcttcagtgattgaatcaccgaagagataaatctttggccttgtcatgatggagaagagttttttttttttttttttttggcttagtggaaatggaggggtggctctgaactagactcgctcactgtactctagagtgtggtttggtttggtgggtgcaagtgaagaaatgaatgaatggagaatgcagatttgattgcgt

SEQ ID NO: 76419 - DNA, 788 bp, Glycine max
  Clone ID: PAT_MRT3847_40018C.1
cggtccggaactcccgggtcgacccacgcgtccggcaaatcaatccctcccttatttcttttccggcgaaaccctcaccgtggtttcgttttctctcacttttccggcgatttttttcgttgcatcgagggcgcaatgttcacgccgcagagaaaggcgtggccggccgcggcggcgttcactccccttcggggcggttccgcctccgcgaagggcaaggccgtcgccgagggtcctccgccgccgccgttggggtctctgacggaaaccaccgttgcggtggggcttgacgccgcgggggacgccgaggactggaaacggttcaccaagttagggttgctggacgaggctgtgatgcagcggaaggaccacgaagcgctcgtggagaaggtttctaggctcgaaagagagttgcagttggtcgccaatgttttgaatattgttattgatgtcactatcgatgctgatatggtttagagaaaggaactattttgattgattctactgtgaacttgagagcaagtacatgagtttggatcccccatttccccaaaaatgcagccattatttgttgctgaaattactggcaaatgtggctgtgaaagaagcgttgtagttggtagagtaatgaaggcaaagtattttatgctattgtatctaaatgggtgattcaggggttgaaactataacatggttttgaatttggatgggccaacagtgggtagaagaggaccatataaaagtttccttactgcaataaatttcaaatccttgtcaaaaaaaaaaaa

SEQ ID NO: 76420 - DNA, 377 bp, Glycine max
  Clone ID: PAT_MRT3847_40019C.1
aaacaatcttctatcttttttaaacctatatatattacacatctcgcttatctataaacggcgatttaacttctattaacttccaccaatattcccatttcaacattcatacgatatcatttcatcaaacacacattgtataatcattgtaataaactaaaacttctcttcataaattaatacacaaattaaaattttacaattcacataaataatatcttccatatcctcttccccttttactaaattatacaacaatttttctaaccataccactttctaatctcactttataatcattaattatatacattttacctcttttacattcaccacacaacttattatatccattcatcttcaatcatattttctaa

SEQ ID NO: 76421 - DNA, 372 bp, Glycine max
  Clone ID: PAT_MRT3847_4001C.1
actagtcaaccgactccctttttttttataacggacaatatatagtttttttagcacacgacccaaacctcggggacggggatccatttaaaaattcaaacatcgctaaatctctatacaaatatttctccgaccttgataaaaaacaataaaccaaaccagaattttattgagacagtgacgcttctcacaacaaaccatatctccaaactgcttaaccaaaactttaactccgacacattttactccctataacaactcctttggtcccaaccaaggaaactcatcccagcttccgagcaataccaaaaagaacaccctatatgtggctaaattcaccgaagaaaaagaatccagcaaacctttcctaaa

SEQ ID NO: 76422 - DNA, 392 bp, Glycine max
  Clone ID: PAT_MRT3847_40020C.1
tggaggtagacaattctcttttctcaaagaaaatcaagcgaacatctcaacgcgtgctatttggttgttatgacccttctataaaaaactcaaccgcaacatctctcgtacacttgatccttcttgggtagacaacaatcttgcctctgttcattgtacatgagctgaaaaatcataccttgaaatcgaaagcccctgtttagtttttcttttcgctggagttgtgagagaaatgagccctttaaagttatcttggagttcttcttccgccagagctaggcgggttattttagcgtggaaaacggagcgttctaacccgatcgaggagttgtccgaggattctgccgatgaagataaatcctccaagaaaggagattttgattccaagaaat

SEQ ID NO: 76423 - DNA, 1923 bp, Glycine max
  Clone ID: PAT_MRT3847_40021C.1
cggctcgtgctttcaccaactctctctctctctctctgtcattctctaatagtagtatatatcaattcaacctccctccaccacacaggctccacaaaacatctcatcattcacccaacaaaatggcgctgcttctgataattcccatctcactggtcaccctctggctcggttacaccctataccagcgattaagattcaagctccctccgggtccacggccctggccggtagtcggtaacctctacgacataaaacccgtccgcttccggtgcttcgcggagtgggcgcagtcttacggccccataatatcggtctggttcggttcgaccctaaacgtcatcgtttcgaactcggaggcggagtcttacggccttatcatatcggtctggttcggttcggaccctaaacgtcaccggtcgaaactcggagtcagccgcgacgggaaggatctaatttgggccgattatgggccgcactacgtgaaggtgaggaaggtttgcacgctcgagcttttctcgccgaagcgcctcgaggccctgaggcccattagggaggacgaggtcacctccatggttgactccgtttacaatcactgcaccagcactgaaaatttggggaaaggaatattgtcgaggaagcacttgggggttgtggcattcaacaacataaccaggttggcatttgggaaaagatttgtgaactcagaaagtgtgatggatgagcaaggagtattattcaacgccattggggaaactgggttaaagctaggagcatctctagccatggcagaacacatcccttggcttcgctggatgttcccactggaagaaggagcttttgccaagcatggagcccgccgcgaccgactcaccagagccatcatggcagagcacactgaagcacgcaagaaatctggtggtgccaagcaacattttgttgatgccctcctcacattgcaagacaaatatgaccttagtgaagacaccatcattggtctcctttgggatatgatcacagcagggatggacacaactgcaatttcagttgagtgggccatggctgagttgataagaaacccaagggtgcaacaaaaggtccaagaggagctagacagggtaattgggcttgaaagggtgatgactgaagcagacttctcaaatctcccttacctacaatgtgtgaccaaagaagcaatgaggcttcacccaccaaccccactaatgctcccacaccgtgccaatgccaatgtcaaagttggaggctatgacattcccaaagggtccaatgtgcatgtgaatgtgtgggcggtggcccgcgacccggccgtgtggaaggatccattggagttccgacccgaaaggttccttgaggaggatgtagacatgaagggccatgactttaggctacttccattcgggtcgggtcgacgagtatgcccgggtgcccaacttggtatcaacttggcagcatccatgttgggccacctcttgcaccatttctgttggaccccacctgaaggaatgaagcctgaggaaattgacatgggagagaatccagggctagtcacatacatgaggactccaatacaagctgtggtttctcctaggctcccctcacatttatacaaacgtgtgcctgctgagatctaatctttcttttctttcccttggactactctttgttgcattaagaaaaatgccttgtggcactacttttatctttgtgtttatgtaactacatatgaaatcacaatttaaggaactaaggaaatactcattgcgagggtaacggaatggcattggactaaaaaaaagaaaaaaccatagcgagtttggcttgtcctcttcagattttggattgaaaatcctgtttaagattaattaaataagttacatgaaaagggagtttaccgaaagtaaa

SEQ ID NO: 76424 - DNA, 346 bp, Glycine max
  Clone ID: PAT_MRT3847_40022C.1
aaaacaacaataaaaaaaacaatctcattatttccatggcacattaacatcaggccccttgaacctatttaaaaaaaaaaatagtttaaaaaaaaaaaatatcataatccaaacacaaaagattttttttttagctgaattgggccataaccccaaaatgaaagggggaagaggacaggaaaaaccaataactctataaaaatctatggcatcataacatgaataagggcccaaaaaaacaaaaaaagaggcttgagttaacccatgaatggaaatgaatgacactgttcaaaaaaaaaccccaaggttggtttgggggtggcattagtaggggcccacagccttg

SEQ ID NO: 76425 - DNA, 758 bp, Glycine max
  Clone ID: PAT_MRT3847_40023C.1
gtccaagaagagctagacagggtaattgggcttgaaagggtgatgactgaagctgacttctcaagcctgccttatctacaatgtgtgatcaaggaagcaatgaggcttcacccaccaaccccactaatgctcccacaccgtgccaatgccaatgtcaaagttggaggctatgatattccaaaagggtccaatgtgcatgtgaatgtgtgggccgtggcccgtgacccggcagtgtggaaggatccgttggagttccgacccgagaggttccttgaggaggatgtggacatgaagggccatgactttaggctacttccattcggggcgggtcgccgggtatgcccgggtgcccaacttggtatcaacttggtaacatccatgttgggccacctcttgcaccatttttgttggaccccacctgaaggaatgaagcctgaggaaattgacatgggagagaatccagggttagtcacatacatgaggactccaatacaagctttggcttctcctaggctcccctcacatttgtacaaacgtgtgcctgctgagatctaatctttctttttcttttccttggattactctttgttgcattaagaaaattgccttgtgtctatgtaactacatttgaaatggcaattcaaggaactaaggaaaaacccatagcgagtttggcttctcctcttcagattttggattgaaattcctgtttaagattaattaaataagttacatgagaagggagtttaccgaaagtc

SEQ ID NO: 76426 - DNA, 799 bp, Glycine max
  unsure (1)..(799): unsure at all n locations
  Clone ID: PAT_MRT3847_40024C.1
ggcgtaagctcggaatttggctttatcttccaggaaccaccacaaaacattctcatcattcacccaacaaaatggctctgcttctgatagtacccatttcactggtaaccctctggctcggttacaccctataccagcggctacgcttcaagctccctcctggcccacggccctggccggtagtcggtaacctctacgacataaaacccgtccggttccggtgcttcgctgagtgggcgcagtcttacggccctatcatatcggtctggttcggttcgaccctaaacgtcatcgtttcaaactcggagttggccaaggaggttctgaaggagcacgatcagcagctggcggaccggcaccggagccggtcggcggcgaagttcagccgcgacgggaaggatctcatttgggccgattatgggccgcactacgtgaaggtgaggaaggtttgcacgctcgagcttttcacgccgaagcgcctcgagtccctcaggcccattagggaggacgaggtcaccaccatggttgagtccgtttacaatcactgcaccaccactggaaatttagggaaagcaatattggtgaggaagcacttggggtctgtggcattcaacaacatcaccaggttggcatttggaaaaagatctgtgaactcagaaggtgttatggatgagcaaggagtagaattcaaggccattgtggaaaatgggttaaagctaggagcatctctagccatggcagaacacatnccttggctgcgctggatgttcccactggaagaaagagcttttgccaagca

SEQ ID NO: 76427 - DNA, 396 bp, Glycine max
  Clone ID: PAT_MRT3847_40025C.1
cccccccccatttctgggaaggttttaaaccacattgaccaggttaaacccaatttttttttttcagcccaaaacctggaaaaggggcgttgggacaataagaaggatattatatttgggttggtttcaggcttaaaaaccaaaaaagatcctttttttttaaaaaaaccttttttttttttaaaaatatttttggcccctgttaggtggaacaagttttcttttccttatttcttttgggaaaaaaaaaaaatttttttggcctttcattaaaaaaaaaaggggaacttcctttcttaggaaaaaaaaaaaaatggttttttttgctctttaaaaaaaaacagaaagtccctcgatcccccgttttaatttttccggggggccaaagccaacctt

SEQ ID NO: 76428 - DNA, 392 bp, Glycine max
  Clone ID: PAT_MRT3847_40026C.1
atattcacgagcctgtggtcgtgtgtcagtcgttacgtatccggacaagaggccggacagccgccaaggggtgaagaagccgaggggctcttcggaagtgcggaagtcaaaagaccgaaaggtcggacgacgaagcaaacccggagcgtccagcatctctctcaagagatgccatgtcgaaggtgacttcactctttgcaaccgtgactggcagccggaggcgaaccggcgcaccccgctctcaacgggggacgcgacttaaagcaacgacggatcgggcttttttggtctctaccggcagtccaacgccggcgcgggctactgaaagggcttgtccttcattgccaggtgtgcgggcgggaaattcccaaccaatccacggcagcacaacg

SEQ ID NO: 76429 - DNA, 157 bp, Glycine max
  unsure (1)..(157): unsure at all n locations
  Clone ID: PAT_MRT3847_40027C.1
tctgatttttggtatggtgtggagggttatanatataagcgggtngaagatagagtctccagattatttatagataacattaatatttagaaatgcttgttggtcgaagcctttactattaaaagactaaaccactcttttatctatcgagcctttt

SEQ ID NO: 76430 - DNA, 187 bp, Glycine max
  Clone ID: PAT_MRT3847_40028C.1
gacgactacattgagtgaacaatattttccctccactaaggtcgcaatttttcttaaagcccatgacaccctcactgaggcaactgctgcagcatagaatcgcgatttttccaaaatgtccatgtccaaaagttccacgatgcatcagtacatcaactaccgtatgcgtgtcaccattcaggacggt

SEQ ID NO: 76431 - DNA, 258 bp, Glycine max
  Clone ID: PAT_MRT3847_40029C.1
tagcgagaagacgacagaagggggacaaccaacgaagataaacaaccatagtggttttctctctttttgattgttttcccaacgtggtgaccaggttgttcccttaagttgcaaaaatgtttgttgggcccagtttgtaaaatcccggggcagctacagctaggatcatcaaaagcacccctttccccctatgatgatttcgttcccggaaagggagaactcagatcggattatccaccgatggggattttgcccgtg

SEQ ID NO: 76432 - DNA, 358 bp, Glycine max
  unsure (1)..(358): unsure at all n locations
  Clone ID: PAT_MRT3847_4002C.1
tttacgcaatgcacgctcgtaagctgattcggtcgagcggtcgggccaacacacactctttacaaaatgaggccaccgacgagcggtgtcggaatcggaggccatgaacgggggccaccaccgcccttcgatccatctcgacaagcccctaaccagctaccgaggatgacattctagctcactcgcaaactgtcgcagattcctcaagaaaaagggatgcgtggccttctggaacaaatcgaggcgaccacaggtatttcctgaaagcgctgtggaccttcgacatgatactctctnctctcctccgcatgcaccacgagccatgctaactaacctcaaggaattgagtgaacctctc

SEQ ID NO: 76433 - DNA, 526 bp, Glycine max
  Clone ID: PAT_MRT3847_40030C.1
taaatggttactgactcactgccatttaaatgataagtaatagatttatgtgtataacatggtgcaatctttagttaaaacagaacaaaattatcttacaatataaaaagtaggttaaaaaatattacaacacaaagttgtttggaggaggaaggggagaaaaattcatgcatatttggtaaattcaatctttcgaatatatatacatgacattgtggaattaatacactaaagatgactttgacattccaagctccttggcaacttgctccatggtgggacgagaatgagggctttcagtcaagcaagcaattgctgtctttgcaatcaaagctatctccgtagccatttgctttataggataagggaggcgttggtctaacttacccatcaatgaaggaatatcaagtgttgacaccatggcatttgatgaacatgtcaacaaggaagttataacatctccagggtgctctccaagaagtatttccaatgctaataccccaaagctatacacatcgcatttttg

SEQ ID NO: 76434 - DNA, 335 bp, Glycine max
  unsure (1)..(335): unsure at all n locations
  Clone ID: PAT_MRT3847_40031C.1
tttgtgttattttttttttttttttttttaataaaaaaaaaaaaagttggactgttttagaataaaatatgtatcaacaaaattgaaatgtaaattttacaatagtaacaagtataacaacgacaatttattataacaanccacagaagccgctcccatngggggttgngcaaaanaaacaaaaatttttaagaaaaaaaccccccnnnggggggggtggggggggccaaatttttttggtggcctccaagccaagggaaaaccactgcaaaattcgagagaaccttggccatgtctataaaactgaccagctgctggaaatacccttaaactag

SEQ ID NO: 76435 - DNA, 129 bp, Glycine max
  Clone ID: PAT_MRT3847_40032C.1
ctcttttctccggcagcaccaaaaccagtcaacacttgaaaacaatatccattgttaccagaataagcagagatcagaacaggcttgacgtcattatactcagttccctctttccctatcaaaagcctt

SEQ ID NO: 76436 - DNA, 261 bp, Glycine max
  unsure (1)..(261): unsure at all n locations
  Clone ID: PAT_MRT3847_40033C.1
cgagntggcacgtacgaaggnaaactgctcgtaagtcccacaaggaggaaagggcaccctaaggaagcagctccgcaaaccaagggctgcacgtaagtctgcaaccaactactggtggtgtgaagaaagccacatcgttatcgtcctggtaccgttgctctttcgtgagattaggaaatacccagaagagtaccgagcttttgatcaggaagctccccttccagaggctggttcgtgaattgctcaggacttcaagactgg

SEQ ID NO: 76437 - DNA, 484 bp, Glycine max
  Clone ID: PAT_MRT3847_40034C.1
tgatggggatatgggtgatgctcacatggcaatgcaagctaagttgatgatccatgctcttcggaaatagagccactccttgtcactttcacagagtatattagtttttataaaccaggtgaagtcaaaaatttctactttagggggatatggagggcccactgaatttacttgaggaggtaatgcactgaatttttatgcttctgtgcggctaaatatcaaaataatagggtttgtcaataaaggagaatatactttaagaattcatgttcttgtcaaagttgtgaataacaatcatgcccctgcatttaaaactgcacattttgatattgatttcggcaaaggtgtaattagataatcggatatcatatatttgatcgtaaaatacaaaatcataaataatattgggtcattttttgaatctaatggccggaatttccatggcaaagatgctctaaatatattcctggcggatattgatgga

SEQ ID NO: 76438 - DNA, 324 bp, Glycine max
  Clone ID: PAT_MRT3847_40035C.1
gggtatgaatgaaagaaataaaatagattattggctggccaagtatggtgcctcatccaacgatgcgcccaagacttgacattcttgccgtactcatttttaccaggctcttttaggaactatatgatttgttgatgatgaaaaatgcttccttgatacttaaagctttgttctttgtgattttttttttgtctctgtaaaatgtgttttagggtggtatcttgcctattttgatgtgctcaaatgatatatattgatatgtgttgaaatgatgatgttccattattgttttgaatcaaaagcttcaagctttgaacttgccat

SEQ ID NO: 76439 - DNA, 180 bp, Glycine max
  Clone ID: PAT_MRT3847_40036C.1
attgcttttcttagtcatttgcttttctttaatcttcttcttattgcttttcttagtcatttgcttttcttagtcatttgcttttcttcagcttcttcttattgtttttgttagacatttgcttttgctcattcgcctcactcattatctcccaaaatctcatttccacgatcatcgttt

SEQ ID NO: 76440 - DNA, 250 bp, Glycine max
  Clone ID: PAT_MRT3847_40037C.1
gtaacgtggctccttctctctttctctcagttctgtgaattcttgccttctctatttagtgtactttgtcattgtgcgttttctcagcgatagcatcagcctagtaacaaggattctttgtattctcctaattacttttccgtccggattcctgtgtgtcatctctcaattttccagtgttcaatatgtcgtacattctttcaattcttcctcaacctttctagggtttgggtttcaactcctatctccc

SEQ ID NO: 76441 - DNA, 141 bp, Glycine max
  Clone ID: PAT_MRT3847_40038C.1
gggcacccgaagggcatttcttcaaggcttctgatgggacatctccccgcgtggcatgaacattaataatgacacccccctccactattcacaagtgtcattcaaatacagctctggtgtgggcttgctcctttttaattt

SEQ ID NO: 76442 - DNA, 630 bp, Glycine max
  unsure (1)..(630): unsure at all n locations
  Clone ID: PAT_MRT3847_40039C.1
ctctctctctctctcatttcattcatcattctcttcctcccccgaagaacttgttggcctttcatttaaagccctctctctctctttctctcattctccgcgtccgcttcatctgtctattaattaagtaaataaaacccggtagcttcattttccaaatcccagttattacttactggccaaacaaggcagaagaagaagtactgttttggttcatacgcgcccacacactaacacagtgctcccctgatccaagtaattacttgctcctttattttattcatatatggctgttgaactacacacttcgcttccttctcactttcttcccgatgatgacgaccacgacgacatcgtttcgtcacagcatagccacagaaacgacatccaccacgccttagctttaaacccgctccccgaggtcccgatgaacgacaacgacgacgatttcatctccgagttaactcaccgcatgactcgcttcttacttccagatgacgacacttccgatttctcatccattggctctcactccatggatctagaaaattcggtattattttatttatcaactagtattagtattattacataagttagntatttaatcaatttaatacggtatttaaa

SEQ ID NO: 76443 - DNA, 361 bp, Glycine max
  Clone ID: PAT_MRT3847_4003C.1
tgggtctgtaataatatcccttgaaaataagttcggtttgtgttgaaaaaaaaaaaaaaaaaaaaaaaaaaaaaaaaaaaaaaaaaaaaaaaaaaaaatggctcggctccaaaaaaagaaacaatcctactgagcctaggaaaccgaactacaatgtttcaaaaaatcggactctaaaaatggagtggggggccgttataaaaaaaccgttgtgacatcgaaaacacctggaggtaaccaatttaattggggggcaacaaaaatccatttcgccaagggtaataaaaaaaaaaaagccggaaaaaaccgtggttaccaaaattaaaccaccttgaaagaagaacgggaccccccctggggg

SEQ ID NO: 76444 - DNA, 169 bp, Glycine max
  Clone ID: PAT_MRT3847_40040C.1
ataccagggcttgcattgaaagtaatccatattgatcccaacatcatgattcctactacgaacaccctaagccccacccgaaaacacctatttctcattttttggcctttacttatccagacagttttttgaaaacaaagaaattgcatctcaataataactacacttc

SEQ ID NO: 76445 - DNA, 333 bp, Glycine max
  Clone ID: PAT_MRT3847_40041C.1
tccactcgtgctccaagtcgtgcgacctatgtcccatgcatatgcagatgcaacaaacgcgacaggatctgaagaccactgcggcaccaatctggacctatactcattcttctactcctagttcctccggcgactacacctccgatgcaccatcgaatcaggtagctgaagcacctgacaagctcatacaagacgaacgaatcatcggagacatgctaatacggcgcctaccgcctcatcacagcgctctacgaccacgcagcgcatcctcaccaaggcaacacgtctctccaagtgttactcatgcagactcatgcatgcgatagtatctta

SEQ ID NO: 76446 - DNA, 130 bp, Glycine max
  Clone ID: PAT_MRT3847_40042C.1
cccacgcgtgcggttacgctagaattttttatagggaaagcattgtgatagtcattgatacaactgcatgtatcatcatatatgaataagcggcaaaactcacgattgtaataacagacggttacttgaa

SEQ ID NO: 76447 - DNA, 413 bp, Glycine max
  Clone ID: PAT_MRT3847_40043C.1
ggaaacaaaaggaattgtttttcataaaaagcgggctcctaaaaaaaggggggggttttccccccttttttttatgggtaaaaaaaccccccggacaagaatggctccccccatttaaattcccgatcgtaagttttggcccacaaaccagtttttccactaattaaacaatgggccgtccaaaattttttcggggccccaaaagctttgggggtttgacccccaaggcaaaatttggggctttttttccctaagggtgacccccctgaccaagggctcgttttgtttccgcccaaagcccgaaagaccatttgttccctcctacatccccaacttgccttggggggggccagaccttttattcaaagaacccccccccttctgtaactttcccaaccccaccatggattttt

SEQ ID NO: 76448 - DNA, 310 bp, Glycine max
  Clone ID: PAT_MRT3847_40044C.1
gccttgttttgcggctacacctagatagacccatacggacaggtgtccgatcgaaacaccggatgagaccaaaatgttatgaggttgctgccaaaatggagtctactttgctcaaattgagaccggatgatgtggatactcctagaggttgcatggtggacgttaaaacaaccgaatctacgattgcattggtcgaatacgaaaccggcggtaccaatatgggtaagagtcacttggctaaacactacgcggacatcatgaatggagggagggattagttgcctctcgcggagggtgcttaaagagggat

SEQ ID NO: 76449 - DNA, 173 bp, Glycine max
  Clone ID: PAT_MRT3847_40045C.1
tcctttttttttttttttttttttttttttatgctaaaccacatgtgatgcatgcattacagactgtggtaaatgaaacatgtacaatatgttagtaggttagcccaccaatgtgtggtgtgtgtactgtgtttgttaggggacattgttattggttcctaattattgacaga

SEQ ID NO: 76450 - DNA, 342 bp, Glycine max
  unsure (1)..(342): unsure at all n locations
  Clone ID: PAT_MRT3847_40046C.1
cgcattcattcattcatatgcttcttcaactgtctcctctcttttgcctctaactcaggtcttatccaaagcacttcttattcaagcacttcataatatatttctcttcttattcaagcacttcttatggtgatcactgattcactatcgaattgcctccatgtgaaatataattgtaggcgcattatatctagctagcactcttggtccaaggaaatagagcgaatgttccactgtggaattaacttattctgaggcagattctttcatctcagggagattatagcacagngcctgaatcctttttagtgagttggcatcaatcatgttgggtgggttagg

SEQ ID NO: 76451 - DNA, 288 bp, Glycine max
  unsure (1)..(288): unsure at all n locations
  Clone ID: PAT_MRT3847_40047C.1
agcgtncgccaaatactaatgttaaataccctgccaatactccatcatatcatgctggcgaattgaagttttgatggggttgagatcatgggctcatggctacctgctgagcatttatgaagaaaagtgatgaccgacagacgatatgtggatcctgagaaccgtgcgattgcttggaagtgttgaagctgtgtaatgagataggggcggcagagtggaataggctatcgcattcgcagaaattcagagtctggagacttaatcaaaagaatggggctttacatgatg

SEQ ID NO: 76452 - DNA, 1591 bp, Glycine max
  Clone ID: PAT_MRT3847_40048C.1
cgggggagcactcgacttttgcttttgtttccctatgatatatagcttgttcttccataacttggtgacttccttacgtaaattctcgacgaagcaaccctgaccataaccacactctctcaagtcccaagaaagaaccctctcacctagctagctatcaaactaccgattcatagcactcttctcttcctcacttatgcgaaacgcaaacatggttctcgttctccttttccttatggcaatcttctccgccatgaccactccgtcaacctccgcgatcgacaccttcatcttcggcggctgctcccaggccaagttcacgccgggttccgcctacgaaaacaccgtcaactccctcctaacctcgctggtcaactctgcggccttcgccaactacaacaacttcaccgttccagcctcttccgacaccgtctacggcctcttccagtgccgtggcgacctccccaacgaccagtgctcgcgctgcgtctcgcgtgcggtcacccagctcggcaccctctgctttgcctcctgcggcggtgccttgcagctcgacggctgtttcgtcaagtacgacaacaccaccttcattggggttgaggacaagaccttggtcagcaagaaatgtgggccgtccgttgggttgacctccgatgcgctgagccggagagaagctgtgctggcatatttgcagacgtccgatggggtttacaagacattcagaacgagcggttatggggatttccagggtgtggcgcagtgcaccggggatttgagtcccagccagtgccaggattgtctttctgattccatccaacgcttcaaaaccgattgcgggcccactacctgggctgagatttacttggccaagtgctacgcgcgctactcagaagctgggactcgctcgcgtgctaataataatgatgatagcaatcacaatgatgatgagatcgagaagacactcgctattttaattggactcattgcgggggttgctctgatcatcgttttcctttccttcttgtccaaggtctgcgaaaagcacaaaggtggtaaataaagaatataatatgtgcacagtactgggattgaacttttgcctttgctttttctctggtaaattacttgtctttcggtagctcttttgctactcttagtctcatatgtcctttttgtaatcaatcgatcttattcttatcttttaagtttcccgcatagtcccctttatataaagaacaccagcgaaggtatagatagaaatatattatggaaaaaagttgttccatgaaacaagttacaacaagggttgcaataaggagaaaagcctcaaagattccactctctaatgaccattcgttttcttgtctagtgtccaccgatgtgtacaaatactgaacactttagtgaaaggtgcagcatgcatgctttgttatagcctttgatggttataattaattagagtttttacttactttttatattaaatcacgatgaacaactttactttcgatctgaaaaagtgagattaagaaaagtttgataaaatttctgtcaaatcggtgtcccagtttgttatcatttgggacttatg

SEQ ID NO: 76453 - DNA, 484 bp, Glycine max
  Clone ID: PAT_MRT3847_40049C.1
ggaaaacttgctaagaaacgtgctgagtgctgtaccgcaagatattagcagggatgcttggctggatgctcttcctcatgctctggctgttggtttggtgaagactgacataaagactgagcaaaagggggaaacttctggaacaacagctacatcagcagcggcagatggatggactatcactgttgcaactgcgggagattcccggtgcatattacatactcaaggaggtgctgatgctctcttgacagttgatcacacactggaagacaatgcagaagagaaggcgcgcgatactgacagcggtggtgaaataggaagactcaatgtattaggcggcaatgagggaggccctcttggctgctggccacgcggatggcgcctatctagatctatatgtgacacagacggggaaaaatatattgcgccaataccagatgttaagccagataagactccaaatgctggtggaaagcctattata

SEQ ID NO: 76454 - DNA, 353 bp, Glycine max
  Clone ID: PAT_MRT3847_4004C.1
gacccacgcgtccgggtatttttactgctgccgatcttgtctgggggcgttctcagggttcaccctgcattgaacgagttgagcagggcgtcggtttacttcatcatccatgcaggagtttttctaggatactgttgccatttacggctgggcgcatgacacgagtggtttgaagagaagggtcttttcatgcagcgtgtttcttagggtggcgcatagagatttctgcttatgaacactgtgatgaagaactggacgtgtgcactcacaatgagtgtggccctgtacattgttgatgggctaagacctgattccgtctatgaggctagtgacgcagaatgagttggacgaac

SEQ ID NO: 76455 - DNA, 298 bp, Glycine max
  Clone ID: PAT_MRT3847_40050C.1
gcatatatatgactctgggggtatttttgattttgcaaattaaattacacaatcacagccgtacattacacatgagttgggccttttccaacttaaaagcagaggataacattggcccatgacgcgacacatgccccatcttataatcataattttacatctttaccttccaaataccaagacttttaatttttaaaagaagaaaagagattaaccgatccttttaatgaaatggaacccaaacccaccaaccttggcttgaattttggtggtggtggtggtcccaacttggttaaac

SEQ ID NO: 76456 - DNA, 2147 bp, Glycine max
  Clone ID: PAT_MRT3847_40051C.1
cgtggttctatacttccagtcagataggttcctcactgtggcatgagtgagtgaactttggataatggcaagcatggcaagaggaagagcagatgtgaactccagaaaaaaattggtcacagctgtgttggttttggtgattgttggtggttttttctatttctattctcagaatagtgattcatcttctgttgtgtatggtgataaatctttgagccactttggtttgggaggggacaaagatgatggtgaatcttcctccacagttgttggaggagagggcagtgttgtaccaaagagcattccagtctgtgatgatcgattatccgagctgattccttgtctggacagaaatctcatataccaaacaagattgaagcttgatttatctttgatggagcactatgagagacactgcccaacacctgataggagatacaattgtttaattcctcctcctccagggtacaaggttcctatcaagtggcccaaaagcagagaccaggtgtggaaggcaaatatacctcatacccatctagcaactgaaaaatctgaccagaactggatggttgtgaaaggtgaaacaatagtgtttcctggtggaggaacccacttccattatggtgctggtaaatacattgcttcaattgctaatatgcttaattttccaaacaatgatataaacaatgggggaagagtcaggtctgttcttgatgttggctgtggggttgctagctttggaggatatcttatttcctctaatgtgatagcaatgtcattggcaccaaatgatgttcatcaaaatcaaatccagtttgccttagagaggggaattccagcatatcttggtgtcttggggacccaaagactcccttatccaagtagatcattcgaacttgctcattgctctcgctgtagaatcgattggcttcagagagatggtatacttctgcttgagctggataggttactgaggccaggaggttatttcgcgtactcatctcctgaagcctatgcacaggatgaagaggataggaggatatggcgagaaatgagcactcttgtggagaggatgtgctggaaaatagcttctaagaaggatcagactgttatttgggtcaagcctctcactaatagctgctacttaaagagattgcctggtactaagcctccactctgcaggtctgatgatgatcctgatgctgtttggggagttaaaatgaaagtttgcatctcacgttattcagatcaaatgcacaaagcaaaaggaagtgatttggctccttggcctgctcgattgactactccacctcctcgtctggcagaaattcactattctactgaaatgtttgagaaggacatggaagtttggaaacaacgagttcgtaattactggagcaagctagccagtaagattaagccagacacaattcggaacgtgatggatatgaaggcaaacttgggttcatttgcagcagctttgaaggacaaagatgtttgggttatgaatgtagtgccagaaaatgaacaaaaaactctcaagattatatacgacagaggacttataggaacagttcacaactggtgtgaagctttttcaacctaccctcgaacgtatgatctactccatgcatggactgtgttttctgatattattaagaaagaatgcagtccagaggatttattaattgagatggatagaatcctaaggccaaagggtttcatcattgtccatgataagcgttcagtggtggagtatataaagaaatacttgccagcattacactgggaggctgtgaccatatatgatgtagatgatgatgatacagtgattataattcaaaagaaaatgtggctcacaagtcaaagcatcaaggtctctgaatagtgtcataatattcacttgtataagttaccagtgctactaggtgtataagtgtattatgtagctctattcctaaggcctaagctttcagtgtagctctcttcactatagacgcaagtcacagtgaaagctcacccaaatcgtctttatctttttttgcatttattgaattttgtacgcttcaacatttatatccactctgaagaaatattctaatttaaaaattaacttctacctaaaaaaagctaaaaagaacacaaca

SEQ ID NO: 76457 - DNA, 2176 bp, Glycine max
  Clone ID: PAT_MRT3847_40052C.1
gtttcgtggttctgacttacataggctcctcactggggcatgagtagtgaactttggataagttttttgtgtgaagaatttgtataataatggcaggcatggcaagaggaagagcagatgtgaaatctagaaaaaatttggtcactacaactgtgttggttttggtgactgttggtggttttttctacttctattctcagaatagtgattcatcatcttctgttgagtatggtgctaaatctttgagccacactggtttgggaggggacaaagatgatggtgtatcttcctccacacttgttggaggagaagtcattgctgtaccaaagagcattccagtctgtgatgatcgattatccgagctgattccttgtctggacagaaacctcatataccaaacaagattgaagcttgatttatctttgatggagcactatgagagacactgcccaacacctgataggagattcaactgtttaattcctcctcctccagggtacaaggttccagtcaagtggcccaaaagcagagaccaggtgtggaaggcaaatatacctcatacccatcttgcaactgaaaaatctgaccagaactggatggttgtgaaaggcgaaacaatagtgtttcctggtggaggaacccacttccataatggtgctgataaatacattgcttcaattgctaatatgcttaattttccaaacaacaatataaacaatgggggaagagtcaggtctgttcttgatgttggctgtggggttgctagctttggaggatacctcctttcctccaatgtgatagcaatgtcattggcaccaaatgatgttcatcaaaatcaaatccagtttgccttagagaggggaattccagcatatcttggtgtcttggggacccaaagactcccttatccgagtagatcatttgaacttgctcattgttcgcgctgtagaattgattggctccagagagatggtttacttctccttgagctggataggttactgaggccaggaggttatttcgcgtactcgtctcccgaagcctatgcacaggatgaagaggataggaggatatggagagaaatgagtgctcttgtggagaggatgtgttggaaaatagctgctaagaaggatcagactgttatttgggtcaagcctctcactaatagctgctacttaaagagattgcctggtactaagcctccactctgcagatctgatgatgatcctgatgctgttttgggagttaaaatgaaagcttgcatttcacgttattcagatcaaatgcacaaagcaaaaggaagtggtttggctccttggcctgctcgattgactactccacctcctcgtctggcagaaattcactattctactgaaatgtttgagaaggacatggaagtttggaaacaacgagttcataattactggagcaagctagccagtaagattaagcctgacacaattcgcaacgtgatggatatgaaggcgaatttgggttcatttgcagcagctttgaaggacaaagatgtttgggttatgaatgtggtgccagaaaatgaacaaaaaaatctcaagataatatacgacagaggactgataggaacagttcacaactggtgtgaagcattttcaacctaccctcgaacgtacgatctactccatgcatggactgtgttttctgatattattaagaaagaatgcagtccagaggatttattaattgagattgacagaatcctaaggccaaagggtttcatcatcatccatgataagcgttccatggtggagtacataaagaaatacctgtcagcattacactggaatgctgtgaccatatatgatgtagatcaaggtaaagatgatgatgatgatgaagtagtgcttataattcaaaagaagatgtggctcacaagtgaaagcattaaggtctcagaatagtgccataatattcacttatataagttactaatgcctaggtgtataagtgtattctgtagctctatttctatggcctaagctttcagtgtagctctcttcactatagacgtaagtcacagtgaaagctcacccaaatcatcttatcttttttggatttgttaaattttgtacgcttcaacaattattatatccactccgaagaaatattctgattttaaattaatttctacatgttacct

SEQ ID NO: 76458 - DNA, 283 bp, Glycine max
  unsure (1)..(283): unsure at all n locations
  Clone ID: PAT_MRT3847_40053C.1
tttttatatttaactagagagagagactcatccttccttcgagacatgagatgaggccgatgcaantgccacnggcttccgcttccggggccaancctgcccctgccaccaccaacaacancaacaaggagcagcgtcccnancgncgctgcaagganctcacgctgcngcngccgcagngagagaccancttggcggtgccacttcctctgncgccatngncggngnntgntgnggnggcgagcggcggantnngcnagcagtcggagnnnaggtgntccct

SEQ ID NO: 76459 - DNA, 575 bp, Glycine max
  Clone ID: PAT_MRT3847_40054C.1
cttttctgcttttcttcttatttcaatgacatacattatcggatcatttccccccattccaattatcaaatctcatcatatcattgcttgatttattcttcacaatcttaaccacatctgctagttgcttttatcttctctgctctaattatcaattctacaaaaaattattttaattacacgcgccgagttggatttgtagagttttgttagggcactagcattccaagatgggtcaaagatatgaaaacaatgttttcaagtctcacataagtaatattgaagctgctcccggtatgacccaaacagttcatcttcctcccccacttcaaaccgaccctaccataagaggaaagcaaaatggtaaaccaaaaggttcaagaaatgcaaaatctgcggctcacagaccttatgccgattccactaattcgactgcagttaacaactgccgttctgacagctccttatgactgttaaccaagaaattcgcgagcttaatccacgatgctaaggatggaaccctggatctaaatagaaccgctgaaatcttggaggttcagaaaaagagaatttat

SEQ ID NO: 76460 - DNA, 825 bp, Glycine max
  Clone ID: PAT_MRT3847_40055C.1
tttgagggggaaaaatacaaattttcagtgtatcaaattaacgcatgtgtaatggcaaaatacaatgaactcgtgtttctcccatcttcacttttgtcaaagcatgcctcagaataaaaactaataccttctaaacaaaacttgtcaaatgtgtaccctaccaatttactctaatcctgtgatattagatgggagctaattaatggttgacaaagctgagatagcattttattttttgtataatgtaattttcacttatattttctgttcctaaaaattttcctgtaaacatggtatcatatgatgagccataacccacaataaccagcaatgctacatgatcttcttctgcatgttgtggcatcaactccacaatcttcatcagtcaaacacctgtaatcactacgagcatcggggatgtggcaagcactctcaatatgttgacctgacttcaaattcatagcaggacatacttgcaaagacattgcactgattcgattcactcttggttgcctcttcacgaaagtccaattagttgggatataagcttctggaagctcttcatgccaagtgcttagtactggaaggggatgaccttcggtggtaaatacataattgttctcatggacaaatgaatcgtcaaatagaagatataaatatttgcacgtttcagcaagaaaaaaactatgctgatgatcttccaactgcatagttgtcacatccttaatgcttgcaaacccaccttcaactttggtgtataaattaagagaattgactattgattcaccaacttcaatataccaggggtccggacgcgtgggatat

SEQ ID NO: 76461 - DNA, 175 bp, Glycine max
  Clone ID: PAT_MRT3847_40056C.1
caaacacctcaccatccccaagaccataacttctctttgtcctccaacaccaatgactttttcactttccaggcgtggggaaacaaataatctacccttcatccaaaaccaacttgcatattactcaaagcctatttcattaaactcaaatcacatgctcccagaaccaaacaca

SEQ ID NO: 76462 - DNA, 380 bp, Glycine max
  Clone ID: PAT_MRT3847_40057C.1
ggaaaaaaatcggggggggtattattaaaatgatccgcttctacataaccagataggtaataggcaagtgacaactcggcacaaaatgaacgactacatgcctaccgctctatatatatgatgatggactacatctagagggaataatctcaacgatggatagggaacaaaattttaattaacttaaactcgggttctatattaagtgcacacaagctaagctggggcataaagggtcgaaagcacaaaatgcccacccatagttgggggcaccgaattcaaatgaattttgaatggtatcgcttgattccatgcttgtggttgaaattcgccactgtatcaaaatgaaccgcaggtcctgggttaaattgatcgattgg

SEQ ID NO: 76463 - DNA, 397 bp, Glycine max
  unsure (1)..(397): unsure at all n locations
  Clone ID: PAT_MRT3847_40058C.1
caaatctgattttattcataactttctgagattcatttttttgtcttctttctttccaaagggcaaaaaagaaagggccccaaaaaagaaaacctccaaaagaaaagataggcccccnnagggggccccttttaaaacacaacaccccnacggggggggtcggggggaaaaaaacctaaaaaaaaggttcccctgggcagagccacccccacaaaccaggaattaaaacagattgaccccccaaacccccggtgctgcaactgcgatatagctcccaaacctccgggggccataaaaaaaaaccgccagcaaaacaaaaaaacccaaagggcccgccagacccatgacccccccacccccccccccaaaggaaagggccccaaaaaaccccaaggca

SEQ ID NO: 76464 - DNA, 449 bp, Glycine max
  Clone ID: PAT_MRT3847_40059C.1
tgcttagccaattttatgccttgaaccaaaaaatctttgttcttccaacttttcgatcttctcatttgttttcattgtatggggatcactattctcctaattcttttcattctatcaatgaagaacccataagaattctcaaatccaaatcaactaattgttctcggatagcacatgctccacttgaaatttatctattttaaaatatgtcaaaaccttgggtagtaaaaaaactgtgttatgttgtgctggagttgttgcctaaaggtgctagtggatgtaaatatgttatggtgctagtggatgattccacttgatatacttgggtgtatttcttaaaggagaaaaatgaagctataaagaagtttgttattttctctaacatggtggagaaggagtatgcaaaaatcaaatgcttgaggagtgacaatggaggtgagttcaactta

SEQ ID NO: 76465 - DNA, 522 bp, Glycine max
  Clone ID: PAT_MRT3847_4005C.1
atcgagttcttggtgtcttgagcgatgtccatgcccataggtgatttatacctgataccatggataattccagaacctgaattcaatattgtgcgtgccaaaaaaaaatgatcagcgtcttattctagcagctgatggtttatgggatgcaatgactactgaataagcatgccatgatgcaaataagacaatccttctttgtcacacgaatatggtgacaactgcgcaacaggcacgcatgagaatgaccgggtcctgcaggtcagacacttgcgcatatctaactaagcttgccatccacaggggaagctcggatcacatcattgtaaatggcatagactaaagggctcaaagatatattaacacaaagccataatgtgatagagatctacatcagacatatgtgcataggaagctattgattgattgtgtttcataggcattggcactatgtacccacgacgtgttacaccagggctaagctaaggatgtatgctaatatccgctctctacaaggaacaa

SEQ ID NO: 76466 - DNA, 2537 bp, Glycine max
  Clone ID: PAT_MRT3847_40060C.1
ggaaccatctcttctttttttcactcaccacacccatcttccgtttttctcacacttcaactttatttgcctctgatcgccaaagggcatgtttcaattctcagaattaccctcattcttatcaaagttcatgcctttgtcttgctctattgtttcaattttcagctttggatgggctttatttgcttctgatcgccaaagggcattggaaaaggtgctgaaaatcgaaagctgattctgttgaagaaatgggttgtgcgaattcggagttgaatttgcaaattttcatcttgtcaatgttgattttcactgcaagtttgtgtgttggggacactgacccacttgatgttgcggcaatcaatagtttgtatgtggctcttggctcaccaccccttgaggggtggaaagccataggaggagatccttgtttggaacaatgggaaggtgtgagttgtgtcttctccaacataactgcattacggctgggaggcatgaatttaagcggacagctggggagtaatttggatttcccatccatcatagacatggatcttagcaacaaccagattggagggaccattccatccactttgtcccctactttgaggaacttgtcactgtcagctaatcatttaaatggaagcattccagatgctttgtcctcgttaactcaattgtcagacttgtcattaaaagataaccatctgaatgggcaaatcccaaatgcgtttctacaactcactggtttgatgaatatggatctgtctggcaacaacttgagtggtaagctgccgccctcaatgggaaatttgtcatctcttatcacactaaacttgcagaacaatcaactttctgggaccctttttgttttgcaggacctccctcttcaggatctgaacatagagaacaatatattctctgggccaattcccccagagttgttgagtatccctaatttcagaaaagatggaaatccatttaatactactatcattccatcacctccagctgctttcccagcacctgctgctatggctccttccccagaaaaatcaccttggaaaatggcacataatccctctgataccataaaagcaccaatacctgcaattgctgggagatctttcaaaactacaaaattagtttggattgttggtgcaggctttttgatatttattgcattaggagtctgtcttctaatgctgtggtgctttaagagaagacaggagaacaagaaatataagaaacacaacacgaatgtgtatacaagatctttgcataaacgtacaagcagcgactccccttttgaagcaactactgacaaggagaaaggatggagttccaaacttccacccctgcagccagcaccaccacatcatatcccaatcattccaggagagaatttaataataaatcaagctatatctaccacagcaaccaaaagacaaattgtaacaaattccatcaaagtttatactgttgcatcacttcagcagtacacaaatagtttttcccaagaaaattatataggggaaggcatgcttggccctgtttacagagctgaactccctgatggaaagttactggcagttaggaagctgaatgctactgcttctatggggcaaaatcatgaacagtttcttcaattagctttcagtatctccaaaattcaacatgctaatattgtaaagcttatgggctactgtgctgagtatagtcaacgactacttgtacatgagtattgcagtaatggtaccctacatgatgcattgcatactgatgataaacttcagattaaactttcatgggataatcgcatttgggtgtcacttggagcggcaagagctttagagtatttgcatgagcactgtcagccacctattgtgcaccaaaactttaggtctgctaatgtactcctcaatgacaatttggaagtgcgtgtctctgattgtggattaggttctttactatcttcaggctctgctagtcagttggtgggatgccacctcacagctaatggttacagtgctcctgaatttgagtatggaagttatacactgcaaagtgatgtctttagctttggagtcgtaatgctagaactcctcactggacgaaaatcctatgacagctcactgcctcgtggagaacaatttttggtgagatgggcagtccctcaactccatgacatagatgcattgtcaaaaatggttgacccctccttgaatggagaatatcctaagaaatcattgtcacgttttgcagacattatttcttcatgtatacagcatgaacctgaatttcgaccagtgatgtcagaaattgttcaggacctcttgcgaatgatgtagagggtcgtgtagctgttaatggggtgatgaactgccttagctagtaacagaagcttttggttaccaaattttctggatgttacatattcattctttcatttttatttttgttttcactgacatcaatcgttccgtaatgtgtgattttattgagtttgtatagtgtatgtacacagacacaagcacaac

SEQ ID NO: 76467 - DNA, 300 bp, Glycine max
  unsure (1)..(300): unsure at all n locations
  Clone ID: PAT_MRT3847_40061C.1
acaatcaagaccagcttctaagaatcctatcgagttcctacagtcccacttgaaacctcccaaaaccaattgancccaccatcatggtcgcccaacccatcggcaccaaaaaggccgttgcacgccccaaacccatgggtcccaaagccgtcggcccagcaaagaagccctccgtcggcgccgcccagaccaagacagttccgtacaagaagcccacgcccatcggcacaaagaaggcccctccgcccacaacagcagcaaagaaggtcggtgcgctgcagtcaagaagccagtaggctc

SEQ ID NO: 76468 - DNA, 768 bp, Glycine max
  Clone ID: PAT_MRT3847_40062C.1
agcggctcgagataaacacataagttcctatgtgaatacattttataaaggagttaattttttcaaatcattttgatcatatttaaacgacatgcttcctcactttccacacactttcatcttcattccaagatatggaccttgatgatgataccgacggagcccacgagaagagaaaggaaggtgaaggaatttcgctgccagcatttggtttggccacgtataagatgcaagggagtgtgtgggtctcagggaattgtggtagggaccaagaaagactagtctcactattgagcgtggcagattcatggttgaagcaactaagggtccaacatcatgacttcaattacttcatgggcgctcggcatggctagaacaaattagtgcacactactttgcaaaattgacccctaaaaaatcctttttttttggatatatattttgttgttgtgcccttgcttggaccattaattgcacccctttttgttggcttttgagtgtgatgaggaatgaggatttgtagtactttgtagttgtttaattgaccctttgagagcattttaattaggacacaagcccttgtaagggtatgtaaccgatcaaatgagttgactcctttgtatatagagtggtaggtgaggaggccagagttattataatttactaagatgatgtgagagtgagactacatagaactttgaaacttggattgtgtatgatcacttgctagtattgaccaatgatgatgatgaccattatagttggaaa

SEQ ID NO: 76469 - DNA, 658 bp, Glycine max
  Clone ID: PAT_MRT3847_40063C.1
ctacgtctctctctctctctctctctgtgcatcgctattctatttctctcactccctcactgttcctccccaaatgctgaatctgaaccacacccactgatctacactgtggaagacattcccaagatttcagctttggcggaagaagagcagagcaagcggaaaccctcatgagagaggcaatgtgagggagggagaaggttccttctttttcttctttctcaggtttcggaaatggtggctgccatttcggaagacccattgacctcttctaatggcaccatccccagaagaccaaagggtaggcaagtttcttcaaggtacatgtctcactcaccttctccttcaccttcaccttcttcaaccacaacaacaactacttcaacttcaacatctacaacgacttcttcttctcgtcgattcccttcccctcttctctcgcattcctccaattcctctacgccgttagtcccgaagcgttcccaatcggtggaccgccgccgcccccgcccggcgacaccgcttcccgaggcggcgaagcttctcgtgacttccactcggagcctgtcggtttcctttcaaggagaggccttttcgctgcctgttagcaagaccaaggccgtcgtcgtcaccccgtcggcgtggaaggccgtcacgc

SEQ ID NO: 76470 - DNA, 797 bp, Glycine max
  Clone ID: PAT_MRT3847_40064C.1
gatgcaatccaatattatggaaaaatcgagcaaacattcaatatgagcaatatacatgaatatatgcagcaacgtattgattaaaccaggtacatgcatggacaaaccataatcgaatattattgaagaccaccataaaatgagccgtctcagtgaccagaagcaaaacctgatgaaaaacattcataagctgcaccaccgtaagcaatacaaaccaaatctctcaaaatggcctactgggtttggaagaggatgaggttttagattttgcaaagtcaactagatctttaaaaaggacatcttctgtcttctcttgtttggttggagtagatgaattcagagacaaattctgggtttgtgccaacaagctgtcatctgcggaactgaacccagaacttgaatgaggaacaccttgttgctcaaaaaactgctgtctctgattatagcttgaagggggcggcagaaggaagcctggagattgtgtttccaagggagatagaggaaggctttctgaggatttattgatgggagctggttcatcatacacaggctgtttgcttaaaattcgcgatggagtacttggggaataaggtggagaggaagatagtgttgcagcggttgaggcaggattagtaggactagaatgaaggggcacggcatatgaagttggttcagattgttcatgggatgcttctgttttgtatgcatcaccactgagatagtcaatcataccagcatctgtgaagattggtttctttggtgctggtggtggaggaagaattgggtttactctcacg

SEQ ID NO: 76471 - DNA, 409 bp, Glycine max
  Clone ID: PAT_MRT3847_40065C.1
aaaataaaacattgttttgataaaaatttttgtccgaccaaattaacaaatatgcacagacaggccgaaaagaaaaaccgaaaaaaaagagggaaagggggctgatggcatgaaaccgggtagagctaaaacctaccatttacggggaaacaccaggggccttatataccacttaaaaaaaagggggacttttacagaaacaactaaggatgacacaacatttacacaattcaagaaaacataaagctggccaaacggtataggcagctgcaaaggcttggcttaggtgagatgcccacaggaacaaccttacacttggacatgaatgcaagactacttcctgggcagaattaattaacaatagaatggaggcgccaaaactaccttccaagatagatatctggaaaaa

SEQ ID NO: 76472 - DNA, 485 bp, Glycine max
  Clone ID: PAT_MRT3847_40066C.1
caacacttcattagtccaaatcaaaacctcactctcgttcttctgtgtctctccctcacctacaaccaccaccaaccaagccaccatagcccatgccttcaccgtcatcgtcggagaagagagacgaatgagtgatttgagcgagatctagaagatttggagagagtgactatccagatctaaggattcgacggtcagtggagttctggtgctctgcaccgccgccggtgtgactaaggaaggccttcctcgatcgttgtcacactgccatgcacggtggttgcggagtcatcagaatcccaccgctatggctcggtggaccctggcgtctcagtcgagagagaatggctactagagtggggtcattcagacacagtttcttggagaaaagcaaagagaggctcctctcaataaggactacgaatactttggtggcttcaacggcgatgacaatgcctcccccaagcgttcctttctcgacgcgc

SEQ ID NO: 76473 - DNA, 565 bp, Glycine max
  Clone ID: PAT_MRT3847_40067C.1
ccacgcgtccgttaacattcaagcttggtgggtgttctgaagaagcttaaatgtacccgtctgtgcttgctatgcatacgcatgtgctgacaaatttcgatgatgataattgtcaacactaagcaaagtgtttcttgaacctacaatagataacaatgtggtcaattaaggttctaaatgtatattgtggctggggtgccttgttccctgggatagaccttggtcgaaatttatcagatgtgaaccttcgtactatatggtggtgtactatcattacgtgcttgtgtatgtctctaaattaaaccatcctgttatctgagttctaacataattggaggaaaactttgtgtcttatgaaggatgataggagctatgtgtgtcttatctctagtcaaaataactgcggcacatgatgtaatagcgtatctttttaaggagcattacgatgagtctcttcttttatgattaggcttatgttgttgataaccatgcaatggacgaactctttgaattatatgaggtgactcacgtccttgcattctgttactgtgaccccttgatgaat

SEQ ID NO: 76474 - DNA, 324 bp, Glycine max
  Clone ID: PAT_MRT3847_40068C.1
ggagcgaatttcctttccatggtgggaaaacaagggctatatgggtattagggacattacaagagcatattatgattaaacttatcggaaaaagggaagggggccgtaaaattatctttttttgtaaaccaggggatttaaaaaaaaacatcaaccgacgggattttaaagccacccgcacatcaaagtcttgcaagggcacagtttcaagggaaacaaaaaaacccggatttccctttgaaggcccaacaaagccatagttcccttatgggggcaaaaaactatcacccttggggaaggcaaaatggttttttgtggggggtc

SEQ ID NO: 76475 - DNA, 1067 bp, Glycine max
  Clone ID: PAT_MRT3847_40069C.1
gccgcccacgcgtccgaagaaacgggccacacaaaaatagtggtgcctactttgtttgacataatggctcaactgcagaagcaacaaaacttctgctttgtccttcttctctttgtggcactgggtatagcttatgctagagaagcttttgaagttagcttccaacagaactacaagattgcatggggaaagcatcatatcttctttctacagcatggtagagaagttcaactctcaattgataagacttcaggggctggtttcagatcaaaattggagtatgcttctggattcttccaaatgagaataaagatacccaacaaggactgtagaggagttgtgacagccttttatctgacttcaactgcctataaacatttgggagcaaaacatgacgagattgactttgaattcttgggcaacaatggacagcctcataccttgcagaccaatgtttttacaaatgatgaaggaggaagagagcaaaggcatagcctctggtttgatccaacaattatttttcatacttatggagtcctttggaaccaacatcaaatagtgttttacgtggatgaaataccaattagagtattcaagaactactccaatgtgggagtgagttttccttcacaacaaatgcacgttacggctagcatatggaatggtgaaccttgggcatctaatgggaagagaattgactggaagcaagcacccttcactgctcagtttcaaggtttcaatattcatggttgccaaacccaaaattacaacaaacatgcctgctattctccttatttatggtggaatgacaagaaacattggaaactaaactctcaacaacagagagcatacgaagatgtgaggaagaaacatttgttgtatgactattgttctgatagaggagaattgcacaaggaatgtcaaattaattaggtgattaattgataatacgactagtaattagtaagtcataaattataaataaggaagaaaaaccaagaaatgatacatatcctgaatgtatcagattaattaggacggtatataaaaattctaattagtatttg

SEQ ID NO: 76476 - DNA, 543 bp, Glycine max
  Clone ID: PAT_MRT3847_4006C.1
gctcggaattcggctcgagcatagtttgatgataggcaggacgacgaaggaacaatgttgctttgtagttgtgacttcaatctgaactcaaatgtaaaatttattattattattattattattattattgtggcagcatactcttgatctctcttcaaggtcttgtcgaggatggattgttaaacacaagcttccctaacacataggtgtcttggaaaaatcacacacaaattttgttactcttggtgtgatctatttttactttggaaaagacatacctatttagtcatgatattctatgaaccttgatttatatcttgttttacttatgttagttttgatgaggtcacttcttgtaagaggattctggagacaattttcttaaggcagaagacaaaatttcatctcttccataatgagatggtgccatctttctttagaatttagaagattagcatggtctcttgatggttcatttctacatgtgcttcgagtagaagtagatctttattcaattagaaagagattatgggagcatgcatg

SEQ ID NO: 76477 - DNA, 337 bp, Glycine max
  Clone ID: PAT_MRT3847_40070C.1
ccgcggaaaggttttatccttttttgttttgcccaccaaagggccacctcctagttggttaagaaccttttgccaggaggtcaaaaaaattatttgcaagttggcaaaaaagggtttgaccccttttaaaattgtggcaatcttaaaaaattttcacggatttgtcaagttaatagcctcacttgccggaaaattcctttgattctccaaggttaccgaactttgcccgagaattcacaagagccttaccatattagttagaatggcatttcaatttagaagcatcttttgtgagaccaggaggtccatggcttcaaatttatggttgttctttgtt

SEQ ID NO: 76478 - DNA, 284 bp, Glycine max
  Clone ID: PAT_MRT3847_40071C.1
taatggctgaaaagcctgaaatcctttatttaaagtcagttgccatttactaagtgatcattcatgcttttcttaaaatgaccatccaagtattttactaattcagtaactccaaaatggaggtttgtgtatcttgattgagcatggtatgcaccaaacccagttgtttcagggtacatcatgtcaacaaatatagctgaatgtgcatgcatcattacaacctctttgagaatttagaagaagcctagagtgaccctagaaccacatgttaatggcacctagtt

SEQ ID NO: 76479 - DNA, 272 bp, Glycine max
  Clone ID: PAT_MRT3847_40072C.1
gctctttagaagggcacatgaacataaaagaaagagtagcaacaacttcaataatctccctcccaaaagggaagatatcagtggtaagattaggatggagtgatcttaagtttcttgactattatttgcttcttattagtcatattctagaaatggagaacataatagacttaagacttgttattatgcttattttggtttactaaatgaagagttttaatgcaaatatatttgtcttcattttcaaaacaaaatgctaaagggaaagaggt

SEQ ID NO: 76480 - DNA, 425 bp, Glycine max
  Clone ID: PAT_MRT3847_40073C.1
caagaaattaaaacagattagaaaacggcgttgaagaaaaacagattgattccacattacatttcacaaggaaaggaactggtgtgcattgggcaacattgcaaatgaagcccatattaacaagagggaaccaatttttttcaaaaaaccccaccattaaaaaaaccttttttgacccttcccttctttcaaccaagggtttaatttttcccaaacaaaaaccttctgaagtctgatccggatgaccattttaaggcaaattttacctttaccttggaaaccgttaccattaaccagggttttttttcctggggaaattaaagtccaaccatttaccccaggaaattaaaagggtccttttccggccgatccacctggggccttccggattggcaattttaattctgggtcaacttgaaacctcc

SEQ ID NO: 76481 - DNA, 166 bp, Glycine max
  Clone ID: PAT_MRT3847_40074C.1
acccaaacgtccagttcgcgaaagcggttgcaattgcatagcatagagaaagtgcagagagagcacaacgtaaccactcaatcaaacaatccgttactccttaatttaatttccttccttccttccccggttgcaaaactcgctcccaaacaacaagccttcccca

SEQ ID NO: 76482 - DNA, 1328 bp, Glycine max
  unsure (1)..(1328): unsure at all n locations
  Clone ID: PAT_MRT3847_40075C.1
acggctgcgagaagacgacagaagggggaacataactgctccatatcttgttgggtgtcattcgttttcttattttcttcttagcatacatgaatcagaaggcacataatttttatctggggatggatgtgaagagaatcatggatggtgatagagttgggaacactaattgggtgattaaggaagatggtgtagaagatagcaacgattcatcatccattggattcaactcagaagattctatttgctcttcttcttcatcagagttggccgaggacgcttcatcttcaacatcttctaattcaccaacacattcaaatggacctttgtttgaattatcagacctcatgagccacctccctattaagagagggttatctatgttctatcaagggaaggcccagtctttcacttctttagcaagggtggagagcatagaagatcttcccaagaaaggcacaccttatagtaagagaatgaaatcatgcaaaagttttgggggaggcttggatagtcagagactattgtgcagtccaaagtctacaatatcaaagaaaacttcaagagggtcttttgcatctgtactaagcaaaagaggaagtttcctaggagggtctagatattccattgcagttcaacaaaagaacttttgaaattcaaaatgttaaagagttattgcttatttcatgtacaaaatccggaaaattttgagtcctgcagcttcagcttattgagtcaaagccatatatgatcagttagctacatatttgagattcattattaaatcatgcaacaggtttgggggaggcttggatagtcaaagaatattgtgctgtccaaaggctacaatatcaaagaaaacttcaagagtgtcttttgcatctgtactaagcaaaagaggaagtttcctaggagggtctagatcttccattgcagttcaacacaagaacttctgaaattcagactgttaaaagttattgcttatttcatgtacaaaatccggaaaattttgagtcctgcagcttcagtttattgagtcaaagccatatgatcaattagctacatatttgagattcattattcgtttgttttccatggtggtatgatccttgcctcttacagacttacagtcattactgctctgactcaatgaccccaagttattaccttaattcgtgtgacaccaaatccctttttgatttcaaattttaggttttctcttttctataagatgtatactttttcagttacttgcatatatactttttcataaatttaggggnnaactccagtataaatcacttaactttgaattacgtgtactttgg

SEQ ID NO: 76483 - DNA, 287 bp, Glycine max
  Clone ID: PAT_MRT3847_40076C.1
aaagttgccaaagcttttatttattgcaaagcagagcaacccttattaagaccaaaaactggttcgtttcttacaattttaaataacagttcactttaagaattcatctatctctggttttgcaacaaggtttactaaaaacaatgttcaccctcaaaatgaaaatagaaaaagaggggaaaagaaaacataggttaacttaaaagaattctaagctattgattgcccccgcaaaaatttttggctaacggcgaacttggggtagactttacggggaaataaccttt

SEQ ID NO: 76484 - DNA, 402 bp, Glycine max
  unsure (1)..(402): unsure at all n locations
  Clone ID: PAT_MRT3847_40077C.1
tttttgtgccgaagccaaccaacacaggtaaaactttaacaataaatatatagagagcactttgcaaaagttacaggtaagccaatacatgtgcacaccaaatctcacaaaatgcaacaagcggtaataaatgagtactgctcgtgctgaaagagcacatcctgcgttaaatgtatatatgaactaagaaaacagttaaagtttaagttgactaaaccatcataccaaagaataatgtttttaaagtcatggaacacgcaggtgatgaaggcgatcctaacgagacatccattgcaaggagcgttgaacttaacatcgatcctaagaacgacggttntaaaactggactggaaacacaccttaccaggggaagaatgcctcaaactttaccatgtgatcata

SEQ ID NO: 76485 - DNA, 1020 bp, Glycine max
  Clone ID: PAT_MRT3847_40078C.1
cacgcgtccgctcatacttgaagcagaaaaccaggcctaaaccttctcctcctatctccttctctgcaaacccaatcagagtgacaacaacctagtgcggttccaatcaaacaaagatggttaatgcaaaaaccgaggtaccccataagagtgtccttagtatcaagcaagatgacaagttcttctgcaggcttctttcaaaggaaagctccatggccaacccttctttcagaatagcccttgctgtgccatttgtgtgggaatctgagccaggcaccccaaaacacaggttctctgaggacacactccctcctttaactcctccaccttcttaccattttagcaatatcaatagctacaagaagaaagagaagaagcactcatcaaagtccagtctcttgctcacaatgctaccaaagatgaacctcatcaagaaaatgattctctcatccccatcatcatacccttcttcgtggccctcatcttcttcaagctcctccaaagttgtccctatggccaagtttggcaagaagaagctcttaagctatggatcatgtaatgatttcaagggagattgtgaaggatgtggtggtggtgctaattcaccctcttccaaattgtgctttagcgttccccgtgccacctgcagttaagacagtggattctaaagttcttaaggtaataagacctgttagattgcttggccttggatctggagtggacaatgtgctgcttatatagtatttctttgtaaatttttctagctagctaatactcttcttcatgcttagaggacaatctattttctatgctagaattggtcttgagagttttgtcctctcaaattacaagcttgcttccaaggtcatattttctggtgtgagtgtatcttaaacattttgtgcagtttgaaatgatcatagttccttttttttgtgtgcttagaatgtgccatatgagaactgaggtacattacttttatgtaacctcatattaagcaagaaatgtggtttttattgt

SEQ ID NO: 76486 - DNA, 299 bp, Glycine max
  Clone ID: PAT_MRT3847_40079C.1
ggcaaactcattttgagcttcaaaggtacaaatgcggaagggatttcttttatagctgcatgatcttatactatttcactaaaaggatagtaccagtataatttcaacaaataatgttcaaaattttttttgcaagtattagtttacgatatccaaatatccaatttcctcaccctttccacccaccccaatttacacacttaattctgtatggtgttacatacaacttgctcctatatttaaagaaataattttttaaacgttatgattattactcaagctgcactttacttttttaa

SEQ ID NO: 76487 - DNA, 353 bp, Glycine max
  Clone ID: PAT_MRT3847_4007C.1
gtgggaatcatgtagttttttggtggcaagttattaaatacagccgatcatatgactatgacactgtgggtatggttcatctcagacggctccatctatgactgttctacttaaaacaaaacccgaattcaaagtgatgactctgcatgtgagacatatgctgctgtaaaaagctacgctcctggaatcgttgtgcttaaggagttgtggacgtgtggactgtgaaattaaaaactatgcgttgataattaccaactaagtatgctgattaaagctcttagatcaaacctctacactgctatgagggacatagcatttgcacaaccccaacatttgtatgatgaatttaatgg

SEQ ID NO: 76488 - DNA, 244 bp, Glycine max
  Clone ID: PAT_MRT3847_40080C.1
ttaagatcaaaagaagttgcacattgtagtcagtcttcaattgttcaaatgaatggattggagactcacccttgaagattgatgttattgtgtaggatgactgactctgagtacaattgttattggtgatgaattgcatttatattttcctcttaaaaataagtgcatttttgttgttttttccaattccttttttgccaagtgcttcctggtatggccatatttaagtgcctttttttttgta

SEQ ID NO: 76489 - DNA, 332 bp, Glycine max
  Clone ID: PAT_MRT3847_40081C.1
tttttatatataaacgaaaaaaaaaacgagcaaagagagcagtatttacatataaagcacgtgaaagaaaaggcagatgacaccattaatgttgagcctttcagaggcaagaaggtccattctgggggagacatttgcgaataccatcttgcagattgaaccagacgaagaattaacggtttggttaacgaggcgcgtactgcaacatgattttgtggaaggaaaagatccatctttgggtgaagttgatgatgaaatgtgcagtggctacaatagcaggagatttcgctacagctgcattgatggaatccggtttcgaaaagagacagatg

SEQ ID NO: 76490 - DNA, 232 bp, Glycine max
  unsure (1)..(232): unsure at all n locations
  Clone ID: PAT_MRT3847_40082C.1
acattcggacttccagatgcaagattcaaaagattatcatcagctagaataacttcagtgcnctttataggaagcgcnnttncgcgatgctgacacagcccttctccattcttagctcttttttttttttttacctattataccaatccatttattccttatcgcatttctttttttgtctcactcgccctatttcttatcgtaccttcacgttcacccaactctttttctt

SEQ ID NO: 76491 - DNA, 787 bp, Glycine max
  Clone ID: PAT_MRT3847_40083C.1
cccacgcgtccgcccacgcgtccgggctgcgagaagacgacagaaggggagtgtaggtgtgagcttatcaatggcctgcggcattccattacgtctctccgctttcccaagcaccacaattagggctacacttccccatttacacgcgccttctatctccagccgcccgagtcctctcagctccaactcaatgagtcaacccgccacaacgaatcacgcggatgttgtagtgcagtacgtggtgctccgccgagaccttatcgacacgtggccgctagggagcgtggtcactcaaggttgccacgcttctgtttccgccgtttggttcaacaaagacgatcctttcaccgtcgattattgcagccccgataaaattgattctatgcacaaagttacacttgaagtaaagggggaaccccagatcaaaaacttgtctgagaaacttacagctggtgggattattcacaaactgtggattgaacaacctgaaaacatacctacgtgccttgcaacaaaaccttaccccaagtcaatcgtgtcttcatattttaagaagttgaaactatgtaagtgatttcatttttgatgttgcttttgttatccctcttgctcctatttggtggaaaatgcactgaacatcaagaggaggggaattttttattctttgccttctcccctaaaagtcacattagagcaaatgactgttaagtttattaacaatttaagcccaattttattttgacttgagaatatcaagaggaggggcgggggtacgtttgggccattc

SEQ ID NO: 76492 - DNA, 297 bp, Glycine max
  Clone ID: PAT_MRT3847_40084C.1
tccggttgcaaaagacgacagaagggggtgcattttttttgaaacccaggctcactgtggggtcctatcaaactccagggggcgggcatcctacgctcgccgagcgtaatgatcgctggtccacaggtacccaatcaacatcgtacccgacggaccagtggggtctagccctgctacaccctgagcacctgctacaggccctgtgcctgctagctcacgctggtgtacacgcccgggacgaccattattgtttggttctggcgaactaccgggtggatgtgcaaatcgactatgcat

SEQ ID NO: 76493 - DNA, 361 bp, Glycine max
  Clone ID: PAT_MRT3847_40085C.1
agggaagaaaaaaaaaattcactccatttttttacatgccggtttttttttgtaccgcccaaaaaaaggggaaggggggcgggccttaccattatccatcccccccaacattttaatttattttcttttcactggcccattggggataattccttttttttttttgaaaccaaattttgacccccacatttttttttttttaaaattttgacaaattaacagggggactttttttaattgggggacacaaaaaaggggggggaataaaaagatggacagagacccctggttggttggactagttcttggaaaccaaaaccaaaatgggggtaagattcattgggaacaaattccttggggg

SEQ ID NO: 76494 - DNA, 746 bp, Glycine max
  Clone ID: PAT_MRT3847_40086C.1
ccgggctatcagtgtgattagggttacacttacccatttactcgcgccttctttctccaccgggcgagtcgactcagctccaactcaatgagtcaacccgccgccaccgccgaccccagcgctattgcgacaacgaatgacgcgccgtcgcagcctgaaaacgcggatgttgtggtgcagtacgtggtgctccggcgagacctgatcgacacttggccgctagggagcgtggtcactcaaggttgtcacgcttctgtttcggccgtttggtccaacaaagaagatcctttcaccgttgattattgcatccccgataaaattgattccatgcacaaagtctgattcatttttgctacagctgatgagcatctggtttatgcgttaaatggcagctgaacataaattgtaggttacacttgaagtaaagggagaaccccagatcaaaaacttgtctgagaagcttacagctggtgggattattcacaaactgtggattgaacaacctgaaaacatacctacgtgccttgccacaaaaccttaccccaagtcaagcgtttcttcgtattttaagaagttgaaactctgtaagtgatttcatgtttgatgtttgcttttaatttccctcttgctcctatttggtagaaaatgcatgaactatgactggtaattcgggaattttttcattctttgccttctgccctaaaagtcacattagagcaaatgaatgttaagtttattaactattt

SEQ ID NO: 76495 - DNA, 477 bp, Glycine max
  Clone ID: PAT_MRT3847_40087C.1
gatgaacttttgatcgatgttttattgtttgcaattaatattcaaatgaatgattaataccaaaagtaaccgtatactctacatcttctcagagtaatttgacatgagaatattcaaatattatataaattcttacacgaaatcctaacatattctgcattcaaaatagcaagctaggtatcattcgtaatacatgacgggtttattggaattaaaatcccacatgcctccttccttgagatactcaagataccttgcaaattcaggcctagctgttgttttctttttcctacgaagagccaaaaagcttagaagtgggtgactcttcttgtcactattattattacccttctttgtggggtttctctttagattgatctccccataggtggaaccaagagccatttttcttgaagaattggatccccaagaaggcaaacttgtgctcctcttgaacccctcatgcaaaagtgcagt

SEQ ID NO: 76496 - DNA, 325 bp, Glycine max
  Clone ID: PAT_MRT3847_40088C.1
tccaaaacaaaatgaacaagttcaaaatcctcctcatctctcctctcttctgcatcgcccaaaattgcaacgcctccaaatgggagcaccaacaagatagctgccgcaagcagctccaaggggtgaacctcacgccctgcgagaagcacatcatggagaagatccaaggccgcggcgatgacgatgatgatgatgacgacgacaatcacattcttaggagcattcggggaagaatcaactacatgacgaggaacgaaggacaagacgaacaccaagaacaagaaggacacatgcagaacatcttcacaaaaatgaactaactcac

SEQ ID NO: 76497 - DNA, 785 bp, Glycine max
  unsure (1)..(785): unsure at all n locations
  Clone ID: PAT_MRT3847_40089C.1
agccaacaattagccacgcaactgcataagagagaaaagtcagagataaatgttctctatagatctagcattttacattctgattcattcataattactactactacatccacaatttcattttcattacaactctctctctctctctcagcagcagaaacacaataccttgtgcaattgtgccaaagggcaatgaactatattcagaccaaatgcgtggtcaagcgcaaaggcaaagaaaccggtgaaagtgaaaccttgtgttttacaaagtccaaggataacaacaataacaacatgtgcgaccgccactgcggaaaacgctaccctctgttgtcgttttgggagctgccggaattcatgaaggacaacgaatacattcttcgttattacagagccaattggcctttcaagcaagctctctttagcctctttcgttggcataacgaaaccttaaatgtttggacgcatttaattgggtttttactctttctcggattgaccctcgcgaatttgatgaagcctaaagtggtgaatctcttggaactctttaccaggtctttttcttcaagtgcggaaaaaaatgtttctcataacatcaaagaatttgtttctgggaacaacattactctntgatttaaatcatcaaatacctttgacaatcgaacttgaatccacagcactggttatagcaagatgngccattctttgttttcctaggaaggctctatgttctgcctnctctctagcagcatgtgccacctcctttttgttgtcactcccgc

SEQ ID NO: 76498 - DNA, 529 bp, Glycine max
  Clone ID: PAT_MRT3847_4008C.1
cgatctataaccggtcttttggtttgtcgcttgggtcgaccagaaaatggcggaccgaagcttgctgattccttaattgacattatagcgtttattatataaaattgcggtaatattgggctgaactgtcctttagcgtagggccttatcaaatcataatctgagatttgatgcgggtggcaattttttttaaacgggaaaggagttgtgtttgagtgaacttcctaaaatcaagggaatcaatactcactgatgaataggactaaatccatttttaccctgacaaatgaatccctgattaagtctaatctcatagaaagcgtggatgatcatcgcccctcatccgagggtaatattttacggcctttcaaagcccaaagttggaagagatttacattgtaaaggttcccgaaccgataaccgcagttgcttctatatggttggaatggcaatgcctcctatatgtgggggtccaatggcgaaatattgtatgccctgcctttggtgtgccacgctgctggtaatgaaa

SEQ ID NO: 76499 - DNA, 1157 bp, Glycine max
  Clone ID: PAT_MRT3847_40090C.1
cggacgcgtgggcttctctctctttctatcattcattccttcaatccttccccactttttttactccaaaatcaaggaatgacataaacagaataattaatctccttaccactgcaactcacaaaacaaaagaataaaaagaagacccttttgtcatcataacaactctttgttacattacactgtaacacacgccaacatgggtttggtggttcctgaagaagaactaagcttagatttgagaccctcttttgttccaaaaaccatcactgattttctctgccacctttccaccaccccaaatgcatcccacaaggtgtccttgctcgatgactttgtccacagattggaactcgaattggccaagatccaagcattcaaacgcgaacttcctctctgcatgttcctcttaaatgatgcaatttcagctttgaaggtggaatcagaaaaatgcagggcttgcaagtctgagccagtgtttgaggagttcattcctctgaagaaagagtgtgatcagaggaaggaaattgagaaggagaaggaatgcagggacaagaagaattggatgagttcttttcagctttggaacaatgatgataaagctgataataataacaatgcatatgaatgtgacaaaaaacacaactatagagttgaaaacaagaataatggagaaaaaagaaaatctgtgctcgagccgttgttccaatatggtagaattagaaatggagagaaggggtttgttattcctttttcctcttaccctgcaacaaaggaagaaaaggaagattgtgttgccaatggactttctcttcagacacctggaactgcagtgaaaagcactagggagggatctggttgtagaaccagctcttgcagggtgggttcctccgctccttcaccgctgcatcagccacaaagcagccggaaacaaaggcggtgctggtcaccggagttgcatagccggtttattaaggctttagaggtgcttggaggttctcaagctactccaaagcaaattagggaactcatgagggtagatggcctgaccaatgatgaaaaataccggcttcatacacagcgagttccagttgctacaagctgcaaatttagtcggtctgctgtagatctggaggcttgtggatgcacaatgaatc

SEQ ID NO: 76500 - DNA, 454 bp, Glycine max
  Clone ID: PAT_MRT3847_40091C.1
acggctgcgagaagacgacagaaggggacaactatgctattatgtttattattcagatagtcttttttttttgtattaaaaggggtgaaaaccaaaagaattccaaaatcataatttcaaaagaattccacaagagcaccttgctttcataggtcggaggtttctcaaaaaccaaaaactcatctttcataatataaatttgttatttttgttaaaaatatcatgtgaggattcaaacacacaatttttctcattctcttttctcctttcactcttaagtctacttttccattagatcaattttacatctcttccttaacataagttttcataaatgtgtatgatgtattgttgtatcaactcatctaattcaactcccaatatgtggaagttgatatgatcgaacaagtttgtcaattttcaattccatgactcccaatatggtaaaagatct

SEQ ID NO: 76501 - DNA, 1461 bp, Glycine max
  Clone ID: PAT_MRT3847_40092C.1
taaagggatcgttgggtcaattcacttccctcccaaacccgaaaacataataacattagacgaggaattcccaagaagtacgttgtggccgggcagggatatttgtttctcactctctctcatgttcactcaacaacaacgacgcactcactgacatcaacactagtttcaggtgctatctcatccaccaaatgcagcaaatacactccatgcccggagggaggtttttctccggctccggatccgccgaccggaggctccgaccccaccatcagaaccagcaggccttaaagtgcccccgctgcgactctctcaacaccaagttctgctactacaacaactacaacctctcccagccccgccacttctgcaagaactgccgccgctattggactaaaggcggcgtcctccgcaacgtccccgtcggcggcggttgccgcaaatccaaacgctcctccaagcccaacaaaataacaccctctgaaaccgcttcaccgccaccacccccgcaccccgaccacaacaacaactccaactctcattccagcagcgagagctccagcctcaccgccgccgctgccaccaccaccgaggccgtgtcggcgccggagactttaaactctgattccaacaacaacaacaacatgcaagagtcaaagttgttgatccctgctctggaaactaataattctctggagcagggaacaggggactgcggtggtatcttctctgaaattggtcctttcaccagtttgatcactactactacttccactaatgaacctttagggtcagggttcgggttcggtaactccactctccccgatgcgtcgtcgtttcagtggcactaccagaaggttagcagtaacaacgaagaattgaagttgccggagaactcctttctcgatcacaccgttgatttgtcggggatgcatagtaaaaccagccacgggggaggattcggatcgttggattggcagggcggtgcagatcaaggtttgtttgatcttcctaacaccgttgatcacgcttactggagtcacactcactggtctgaccacgacaattcttcttctctctttcatcttccctgaaaatgttttcacgcctcttctaaatcttatctcacctttttttttatttcttatataaatttaactttaaaagaagaagagtaaaggagattggaaatcaaaaccaaagttttaaaaaaatttgaaagagaagtggaaggacttggtataattaattacgcggtgtatatttttttttgaagttataaatttggggggtgattgagcttgatattaattagtgatgtgcatgcacaactaacttccatgttagtttctacagtatctgatttctttctctcttttttgttttctgagttcaggttttaatatatatgtatgtggaatttgattgattaacagagaaattatagcagggtgttttaat

SEQ ID NO: 76502 - DNA, 465 bp, Glycine max
  Clone ID: PAT_MRT3847_40093C.1
acacacaaaggctggtgtttcaatgcggagaaagatggatgtggacctgaccattagcggatgggagaggacttgaacgtacatatggtgtgcagcatctacattgatacaatctgcaaagctgattgctgacaccatcagattgaggataggacccacattgtgtagccgattgatccgattgaggaaaaagttgtatcgcaatagcaccaaaaagtgcgcgtttcttatcacaaccttttttcgtagcagaagtttttaccggttcgccggggaaatatgttagtctagcagaaacaattagagggtttaaattgattctttctggagaattagatggtcttcctgaacaagccttccatttggtaggtaatatcgatgaagctactgcgaaagctacgaaactagaaatggagagcaatttgaagaaatgactttaaatctttgtgtactgcaccccaatcg

SEQ ID NO: 76503 - DNA, 181 bp, Glycine max
  Clone ID: PAT_MRT3847_40094C.1
tggacgctactggaccatgttgaacctgcctatgtaacggagcactggtgcttctcaggagacgaaagacctaaaagatgctaagactgattacacgatccgcttgatactactgatgggattccacaacgttcctcatgtgctatgcataatcttgatagactacaagcccccatgcttc

SEQ ID NO: 76504 - DNA, 440 bp, Glycine max
  Clone ID: PAT_MRT3847_40095C.1
gagagtcggtctaagaggtaggaacaaaatgaggagtgtagagcgaagatttggcagataaatgagtgaatattgtcattcatggttaatctgatttgcatggtttgaattttgaaaaaatattatttttttttgttcttttcttatcctgaggttcagttatttcgtgtaaatctcagacatgcaagcaatttgaattgaaaaaataatccgggatcttttagattctcttctctctcatcatcttcggtctttgctgaatatatggctggtcttttgggtttgtttcacaatttccatagtcatcagagattcttaggtaatcctagattttgttttcagattagttctggggtttaggtatcaaacactttttctttttacttctctcttaaatattgatgttgggaatctaggtttgggttaaaaatttagtcttg

SEQ ID NO: 76505 - DNA, 518 bp, Glycine max
  Clone ID: PAT_MRT3847_40096C.1
aaccatctttaattacctctgaggttcttgaccctgcctcaatcctcactgttttgtctaccacccaaccggcattttccactaatgtcactagccatactgcatcttcaccattcatttctccagatttttccaacccgcaaccaaccacttcattcattaatcctaatacccagtccctcactaccaatactgaccaacctcaaaccgataaccttccctcacctgacatagttcctgccttagtcagacccacaaatacccatcccctgtgcactcgtgcaaaatctagaattaaccctacctttctccatgtctatcttgaacctaagtccactaaagcagctttgaatgatccctctggctctcagccattcataaaagtgtatgtgcctcttgagtagagagtgccacgcgccctgtgggagatctccctccctatagactgatattggatgtaagtgggtgtatagagtgagggagagaatcctgatggtttagtcaacatgtacaaagct

SEQ ID NO: 76506 - DNA, 234 bp, Glycine max
  unsure (1)..(234): unsure at all n locations
  Clone ID: PAT_MRT3847_40097C.1
gatcctctagagcggccgcgnggntttttttttttttttttttttttccgnttatcacaaaggactttaattcctaatatcgggccttcgttaactatcaaaagtcgatggccaaacaaaaaacttnnaaataatttttatccttaccacttnccaccctccccttttttcccccacttatctcacccttccgcacaaatttatcattttcaccaaccccttctatcatttttt

SEQ ID NO: 76507 - DNA, 731 bp, Glycine max
  Clone ID: PAT_MRT3847_40098C.1
agaactctgttaagaataccccctggccaaaccacaaaggagtgcacgttggtgacactcaggacgagtaaaaaccttttctggttccagaggaggagtaaccctccacgctttcgcctttgtatggctttgtttaatttgaacataactgggccgccgtccccccatcggtgcaacaggtgactatgttcctccagcatgttttacccccctcaaggtttggaggtcttactccttatatatgggtgcgaaaggaaaatgcccctccattttggggccgccatacaaccaccggaaatctggggtggaatctgataaggttttttggccattgtgtgtagggatgaacattgattgaatgttggactgtccaaaagcattggatggcctttcaaattaacagcttgtcgcaatccaagcttagactatggattcaaaggtgctgaaattgcaatggcattcctattgttcagaactccaatacctagccaatcctgttaccactcatgtccagagcgctgagcaacataaccaacatgtgaactctttaggcttaatttcctctagaaagacagctgaagcaatagatgtattaaagctcatgtcatccactttcttagttgcttttgtgccaagccattgatttgaggcatttggaggaaaacttgaagaacactgttaagaataccgttagtcaagtggccaaaagagttctcacagctggcatcaat

SEQ ID NO: 76508 - DNA, 381 bp, Glycine max
  Clone ID: PAT_MRT3847_40099C.1
cctgagattattagatctctttatgaccaggatgtgctggctgaagatccatactatattggttccgatgaggaacagactactagggcaggcataccttagtgaaggcgctataacccttagataatttgctcggaggaggctgaataggaagagtaagtgaggcggatgttcagggctgaagaaatcaccttggctttcagctgttgtaccattgagctaaaatatttggctcaaatcctcttaaattctgctctgacttaaacgactgattatcttttaattatgattcgtgatagagttagactacctactccttcttcatagtgctctaaggacatatttatggagcctgtgtgttttacgcacgcaactttgata

SEQ ID NO: 76509 - DNA, 141 bp, Glycine max
  Clone ID: PAT_MRT3847_4009C.1
ggccgtttcagcatcaggcaagtggctggatggtattcgaaaatggtattacaatgctgcaggattcaataaactggggttaatgcgagatgatacaatatacgaggatgaagatgtaaaagaagccatagaagacttcct

SEQ ID NO: 76510 - DNA, 1074 bp, Glycine max
  Clone ID: PAT_MRT3847_400C.1
ctcccccaggtgattcgggttataccttacagcgctgtccagctttttgcttatgaaatttacaagaaaatattcaagggaaaggatggtgagctctctgttctgggaagacttgcagcaggtgcttttgctggcatgacatcaacttttataacttacccattagatgtcctgagattacgattagctgttgaacctggttatcgaacaatgtcagaggttgcgttgagcatgctaagagaggaaggatttgcatctttctactatggccttgggccttctctgattggaatagctccatatattgcagtgaacttttgtgtttttgatttattaaagaagtcattgccagagaaatatcaaaagagaactgaaacatctctactcactgctgtggtttctgcatcacttgccacacttacatgctatcctctggatacagtgcgaagacagatgcaattgaggggaacaccttataagacagtattagatgccatttcaggtattgtggcacgggatggagttattggcttgtatcggggatttgtgcccaatgctttgaaaaacttaccaaacagcagcatcaggcttactacatatgacattgtcaaacgcctaattgcagctagtgagaaagagtttcaaacaattaccgaggaaaaccgcaacaaacaaaagaaaccccaatagtcaaagacagtgaacctaggattcatattgtttttagccattcttttcccgctggaattttgtggaagtaatgcttcagcaattctgtccagtattagcgggaattgctttttagataagccaaactgtcagcagttatgagtatataccagcaaccaatatttggtatcttggggctataaattttgcaggacacagtgtgctagttaatgtaatgccatattcttttgctgaatgtattttagctgtaattttttgtagggattttgccaaactgaatggctagtttattatattttttattgctattattttaactttttaaattatatattatgctttatttggtttgttattattaaataaataaaatatttatatgtt

SEQ ID NO: 76511 - DNA, 412 bp, Glycine max
  Clone ID: PAT_MRT3847_40100C.1
tctcgagccgaatcggctcgagcggctcgagaattctctcactccacagagaagactctcagaaccaacagcgagcaccgagaaaaaaaaatgcataacaaggacgcttgctctccctcctccaatggcggattcggcggcggcgcctccgccggtcaaattccgtcaaccggcggcctctacagttctctgtactcggcactgtcgaacgagaaccttccatcgctctccgcgagctgcagcaacggaagcggcggcggcgtttcgatgtatccttactcggagtcaattcagaagcaccaggacatggtgaaccgtcaaagcatgtgtctgaatcgcctcgttgaaacttcgaaggaggtggaggctctgagggaagagaatggcctgctccgagctgcgaacaaggagc

SEQ ID NO: 76512 - DNA, 348 bp, Glycine max
  Clone ID: PAT_MRT3847_40101C.1
aactgcaacatcccgcagggaaaaacttaaacggatgccttgtaacccatacatatgtccaaaattcaatttccagccaatttccttaagggaaggcatcacattcacggccacttaggccttttggcctttttcccaatacatgctcctaccagtataaaacctaccttacgtaacatcctcatgtattggattaaaaaaggaatctgacaaccaaaatcaccaaccgcagccaccaatcatttttatctttacgaccaccaactaaggcgcgctgaccacgaatccttcttgccagctgaatatgcccgggcataatggatacacgcttggcgtgaatggcacaca

SEQ ID NO: 76513 - DNA, 390 bp, Glycine max
  Clone ID: PAT_MRT3847_40102C.1
caccccccaaaagggttaaaaaaggggaacattttaaggattcttgtctttcaggaggcaaaagctcttaggtaacttgaccctattttttaaggctgctctaaacagaggacccttcacactaaaataaagctaccgatgggttatctaaggagccatagctgcccctgttattatacttgtcaccctgtaaacacagaaacttgggggaactatgctgaaactggaatcactggcacctatgagaacaagaactccttggctatctttgggagtagggactttatcggatcccagccaattaccaccgatctaaagagggatctatgtagcccgcaacaaaaacgcataatctccgatgtctaaaacatgaaaccgctcaatactttt

SEQ ID NO: 76514 - DNA, 361 bp, Glycine max
  Clone ID: PAT_MRT3847_40103C.1
tcgggttgaaataatgaaagtggtaacttagatgttagtttggacgtgaacgaatttttcaacttctctgaggaatcctttgggtttgattggctgaacaagtacttagaacttgaccagattcctgagagcacagaaagatctgaatgagcattttgtacatcattggctgcaataaagttgcatattctgtgtgaaagtagttgttctgcgttctaactgatcatgtagcagagttgttgttagttgttacattgtctgtgtttctaagcccgtttggttaaaccttacgtaaatttgatgagaaatctgataaaagaatattctttttggaaataaattaatctaaaaatatgctccc

SEQ ID NO: 76515 - DNA, 347 bp, Glycine max
  Clone ID: PAT_MRT3847_40104C.1
gggggatgaggatgattatattatcaaaatattatacttttcttaaggtcattgaataccggttgctgatgagaataatagcaaatattggttgcttgacacaagattgttcaagtgacctaaacttaactcaaaatgtcaagcgtgggaaaggggaaatacagggctattaaagggagaatgggtaccaaccatccctcacccgggtaaggtaaccttagggggtccattgcgccaataaacaaacataaagctttttttggactcttctggggggatatttcttaaccacgtgtccccattggtttttaaccacagaaggggggggtggcctctttaactttaaa

SEQ ID NO: 76516 - DNA, 695 bp, Glycine max
  unsure (1)..(695): unsure at all n locations
  Clone ID: PAT_MRT3847_40105C.1
agatgtaagatagcaacaggagtcttcaattcatacacattttgctaacaacaaactaatccaacagagacctcctcccctaccttaatttctctctctgtcttccctccctcatgagaagcanatcaaataaaatcaatacaccaactaacacaaaacctgaatcaatattctcaactagatatcatggcctcttctatttcctctctttctctccttctcccttctctcacaaccctcattctcctcccnattcaaacatgtgtctcttcatccccnacaccccaacccctcctactacctctcaaancnccnccccccacacctccacgcangcttgcntttgggcncnncgtggcgctaaccatctcgctggccgtgggctgggccccgcggggcgttgccctggtgctgggcgcgggggggggnctctggtggctgcactgggggggctggggggccggtggggggcgcgtggggggctggtgtgttgttgggtgggggcggggtggggggggggggggggggggggggcgggggggggggggggtggctgtgggggggtgggagggggcgggggcgtggggtgggggggtgggggggggtggtgtggtgggtggggggtgtggggggtggggggggtggtgtgggggttggggggggggggggggtgggtggggggtggtggggtgggg

SEQ ID NO: 76517 - DNA, 755 bp, Glycine max
  Clone ID: PAT_MRT3847_40106C.1
ttgttttcaaatcatatagtatacattacaatcattagaccaaattaaacggttcagattgattggccagtaagtcttaacaggtcaactgggctatgcaagaccaagtctaaattgcattacaatgaccctttcgatagtttcaactttcatcatacattgccgtatcagccagctaaatcaaaacacaaaaatatattataaacaaaacttgagagagattccgttgtcatctttatgtgcttttcttatatgccgaatggcacaaagcatcatcaaccaatccaataggcaatagctgtagaaaatagaaatgtcaaattaatatacatatataccaaactagtcttagagtgcaacaaacaaggaggaggaagaaaaaaaaatgcagacccttaatgaggtctcacaaacatgccctcaatgttgttgttgcagctgcacaaccccatttttcaactcaccaacatcacaacaacacaacacagcaccaaaaatcagaaacagttctgccgagtggcgccacagcttcgcggtcacaacaacatcctctatattcccaaacactcaattcacaaaccatgagtctcttccatcgcttcatgaatcattcaatgagttcaccaaagcgtacactcagtattctgagactgaacaagttgaccatgttagagccaaggactattcccacctctcactctccaaccaaacttgccttgattacattggcattggcctcttctcttactctcaac

SEQ ID NO: 76518 - DNA, 376 bp, Glycine max
  Clone ID: PAT_MRT3847_40107C.1
gggtcgagtctcattctcagtctccactttcttttaaaagcgccaaaccctatgttatattgggaggggttaactcgttactactcttcctctaccataatcaacaacctcctccccatccccatggaccccaacgacattcttagactcttttaccaccgctacaacaacatcgactcttacgacctcctcaagctctgcccctgcgaagtacagatgctcatcgagcgcttaacctgcgaccagatcatcgacatcctccaggacgccttggctcaccacctcgacatacttgcctccgtgctcaccaacgaccaccctagacgtctcccatcgcaagctcttcatcctaagtctcggctgggacaccaccacc

SEQ ID NO: 76519 - DNA, 472 bp, Glycine max
  Clone ID: PAT_MRT3847_40108C.1
ggctcgagcaatggacgtggatcctttgcttacacattaacagttgatcaaggcaggacgtactgattcaggatatcaactgtgggacccactacctccatacactttagaatccacgggcataaaatgacaattgctgagggggaagggacccacactgtccaaaacattaatgaatcacttgatgttcatctagggcagactaactctgcgatggttactggtgatcaaccaccccaagactacctcataggtgtcacaacacgattcacctcccaagtgttgaatgctacctgcatctttcgttatagtcactctggtggaggtgttaccggcctatattcttgtgggccaactattcaagttgcatggtctttaaaccaagctcactctcttaagaggaatttgtcagcaagtgggccatgacctaaaccacatggatcagcccattatggcttgataaacacaactc

SEQ ID NO: 76520 - DNA, 210 bp, Glycine max
  Clone ID: PAT_MRT3847_40109C.1
accaacagacttgataatagagagggaaggcaggaaaataatctaccgtgaaagcccgcaaaagaaggaaaacacttgttaacaagacggctgtgcctaagaaaacacctgatcccgacggggatttataccggctatacggtttagatacacccgtaccattgccaccggtatgaacgccctagaatatttctaggtgtgccaaacctt

SEQ ID NO: 76521 - DNA, 704 bp, Glycine max
  unsure (1)..(704): unsure at all n locations
  Clone ID: PAT_MRT3847_4010C.1
aatgagtcaactggtctattacgtttgttttaataactataggttgaatacaatgatcatatttttgtttgctgcacaaggtgatctatctctctctctctctatatatatatatatatttcttgttctctaaaaaagaacaacacaagcacataactcctttctcccaaatatcttctttttcttttcctataaaaacttattttttagagcaaaagcattagtgttcacaagtttcgggattcttttgctgcacacgtcggtcgaaaccaactggttgtcgtatcttaggagagggatcattttgctacacacggtcaaaatcaactagtgcttcaacccaggctaaataattatttttcttatttattttttccttatatttattgtatgatatagtcatgtggtgttaattaaaattattttgctattaatatttttttatttaattcaagactttgcattctcttctcatttatttcttttcttttattttaatttttttcaacattttcttcacaattaaacatgtcagactgaattaaaattttgcacctcatctacaccgtctatctaacattcaatcgcacaacagaatcacgtatgaataggaaaatanatggagataatctagaaatatcattattattattgtctaagagctaattacanaagagaagaaattggccacattaaaataactt

SEQ ID NO: 76522 - DNA, 469 bp, Glycine max
  Clone ID: PAT_MRT3847_40110C.1
ccgggacgaccagctactaatcaggcggacgccctagtctcgcatttgtgtgtattaacaacacctactgtaacctgtcaagacactgccagggggtcaactgtcttatttatgtttgatatttgggctgtttctccgcaaacaaaaaactatttttttttttaaaaaaaaaaaaaaccaaggggcctctttttaacggaaaattttcccagatcaaaagtgggaaaaacaccccccttaaacccctcccccctggcaaaaaaaaaaaagggggggaccccaacaaaaaagggggggcctaaaaacttattcccccccccttttttggggggcggaaaaagaatccccctacgctctcgggagggttgcctttaccgggggggcccctcaggaaactttttggggggcggcccgtcaaagaaaaaaaaattttgttttttgcccccaaaaaccccttttgggggagggg

SEQ ID NO: 76523 - DNA, 483 bp, Glycine max
  Clone ID: PAT_MRT3847_40111C.1
gctgcgaactcggctcgagcttctccctctctctgtttttgtcatgcctgcaacagcagtgaaaacagcaccagcgaaggcggctgccaagaaggcagaaaccacaaaagctcaaaaaactgagaaaaagcctgcacctgccgccaaacaaccagccaaacctgctgctgtaaaaaaaattcccaccaaggttgcgaaaccttccaaggcaatctcaaaatccaataaacaaaaaggaaaagctggactgaaggccaagaagaaacctttgaaattcaccatcgactgtactcatccagttgaagatggattgttggattccagctcttttgaaaaatttttgcatgacagaattaaggtgaacggtaaagctggagttcttggcaatgctgttacaatcacgcgtgacaaaacataaatccacgtgactgcccaacccctttctctaaagatatttgaatatctgacaaagaatatttaaag

SEQ ID NO: 76524 - DNA, 580 bp, Glycine max
  Clone ID: PAT_MRT3847_40112C.1
gcataattgacatttttatgcaagactctattacatctttaaaatattaatttattattcactgataatttactatttagtcatagccttgcgacttgaaacttatggtaaagtattgataacgtatattttgtgtttgcaggatacgagtttcatatccatttcaatggggagcacctacatttgatgcaggtgaagcctttgttatgatgatgacatcctttgttgctcttgtagaggttctctgaaaggcaagagtatgtgatagtgttactatgtagcactagtgggtgtgacaaatctacaatgtctgcattgcttgtaattttgcttgtaacttgacaaaaaaaaataaattgttgtttttcaaatgccaaaaatctagtttttacttattttgtggtaggatatatatgtaagttgaaaatgagtagtatttataccatacagtttgataactatcatttaaatttgtttctagattaatattatgagattgtaagtaatgtgatattgtaatgaaaataatattttaaaatcttttagtttaaaattaatatattttttataaattggttct

SEQ ID NO: 76525 - DNA, 421 bp, Glycine max
  Clone ID: PAT_MRT3847_40113C.1
tattgtgggcaccattacaagtatagtgatggataatcaatcatggtgttacctagcttgcagtcaatgccacaaaaaaaactaacatacagactgtgccattcacatgtgcatgtggcaaatacaatgatcaacttgtactaaggtcattggttgcctgctcaattggtatgcacttcattaaacactcgtttttacgatgttatctacattggcaagtatagaattgaagtgatggttaaccacaaggacgaaaatacaaaattcttactctgggaccatgaatgtgcaaatttgattggccaatcagccgatgaagtcaacaggctcaaaatagcagatggtgatgttgatttgaacgcttctcctcaggcacttgataggctgctgggttgtgtccttgcatttaagtcaaggttca

SEQ ID NO: 76526 - DNA, 240 bp, Glycine max
  Clone ID: PAT_MRT3847_40114C.1
tgggtaagtctgaggcgttctgtgtagagacagtgtgtagatcattgccgagagtgtgtcttgtattaccacacgattacgggatgatatgtataaatagaatagagtgcagggacactgcacttgagacgatggcaccgctaaggacagaaagactctcatattgggagacaggagaggcactgattttggacacaggaaccctgattagatttcatggtattcaactggagctgaaat

SEQ ID NO: 76527 - DNA, 187 bp, Glycine max
  unsure (1)..(187): unsure at all n locations
  Clone ID: PAT_MRT3847_40115C.1
acccacgcgtccggcgagaagactacagaatgggagcacagatacgaacaccgtgattcctctcgccgganatgtgttccattttgctgtgcatgcattgcctacgacttctaattctccgacaaagtccctccttccttcaatcgctcgggttcaaaaaggttcaacccagctttaattgctctcc

SEQ ID NO: 76528 - DNA, 232 bp, Glycine max
  unsure (1)..(232): unsure at all n locations
  Clone ID: PAT_MRT3847_40116C.1
ggaattcggcacgaggaaagataatgatgtgactatcaatcctcagacaaattctgaccataaatctcatactcccatgaagaccgatgatatatggttctccataagatcaatctcaacttcagttctgcccaataatcatcaattaaatcttcccatacaaccgcgtgcacgtgtttgtatgggaagatttaaaatgatgatcagatgtaagattatggtnaaaaaaaaa

SEQ ID NO: 76529 - DNA, 199 bp, Glycine max
  Clone ID: PAT_MRT3847_40117C.1
tttatccaagtttctaaaacgggggacagggcaaacgtgtggaatattcttttgggctattcctatatataaaagcaatcacaattgccaccaacaaaaatcttatggccccaaatgaagattgccctaatgaaaaatgaattttcaacaaaacttatccgccctgccccttttttgttgatgtgcctaaaaatgtttt

SEQ ID NO: 76530 - DNA, 534 bp, Glycine max
  Clone ID: PAT_MRT3847_40118C.1
ctggtcgtgggggttgtcctgggaaaaacggcccgttttcccctgggggggggaacaccacaccgggggggggggggggcccggggatttcggggcgggacctggggggggaccaatttttcctttgggggggggttttaaaggtgggggaaaccggggcgaaaggtggttcccggggggaaatggtttccggtcccaattccccacaaaatacgggccggaagtataaaggggaaagccgggggggccctaggggggggctcactcacatttatgggggggggcccacgggcccgttttcaggggggaaacccgggggggcccctggtttaaagaatgggcccacccccggggggggggggtttgccttttgggcccccgggggggtttttttttctcccggggggggggcgaccgggggggggccttccccgccggggcctgagagggggggagaaagggggccccccgggtttggcccaggaggggaaaattctggtggggggggggaaaggggggaaaaaacaggggggg

SEQ ID NO: 76531 - DNA, 390 bp, Glycine max
  Clone ID: PAT_MRT3847_40119C.1
atggcctacaaaacaacatcaaatactaacaagggacaattggatccaggtccagaaaaaacaatgtttgaggtggaacctactgatacagctcaaagtaaacaagatgccaacatatcacctgaggaagagtgtctagaaggaactcaacttgatgttgaagatgaaacaaatgattacttgttggctcgagataggacaatgagacagatcaaaccaccagaaaaatttggttatgttgatctaatggctttctcccttgtagctgctagtgaagtttgggatgatgagccaaaaagctacaaggctgcaatgaaactagttggtgccaagttagtaagttgtaaatgggtctacaagatgaaagtggggattccaggagttgaatag

SEQ ID NO: 76532 - DNA, 375 bp, Glycine max
  Clone ID: PAT_MRT3847_4011C.1
agctcgagcgctcacacctctaatctcttcacctacttgctcattagtgaaacgacttttccctccattccaatcattttcttttcctccatatataataataatccttcgcttttttttttttttctcttcttcttcgatcgcattgaaaccttgttcgttgtagctatgttcttctccacagcttcaacgaacaacgcttgatggtgaaaaaaccttcaatcgcctattaactgcaatgcaccactcatcatcaactcatccatggctttctccgctttacttcgcccttcctcttctccttctcactctcagttgttttgctctgttaggttcaataggaggcatcgtagtagtagccgggtaggtttcgcg

SEQ ID NO: 76533 - DNA, 158 bp, Glycine max
  Clone ID: PAT_MRT3847_40120C.1
gatgcacaagtttgttgagatatcttccagcaatatgatgacactgtgagtactcgatatgtccctgttttcttccttgctagacttttgggtgcatctgcatgccctacgctcgatattttccctctctcaatgtcaactgtcgctagtgctcctac

SEQ ID NO: 76534 - DNA, 440 bp, Glycine max
  Clone ID: PAT_MRT3847_40121C.1
ccatctctacactgtgtctatgacctcacggtgctcgcttttcacatctaacgaggctattcaatgtacttgaggagaatacaatgcagagatcggacatgggctttggtgctgcagtcattgaaatacattttttaggccaagattctctgttcaacgatgttttcaatctttgtcccctaagaccactgtgaaagaatatgcttcacacggaaggatcatcaaaaaacatcttttaggtttagatttatgcaggcatacttcatctagaaattgtttcaccgttccggacagaaggcctagtttatgcctaaacagtactcatttacgtgcctatagttctgaaagtgttggaagatatgcaagtgaggataatcatgcacatgttaatgatggagttaattttgataaagacggaaacaagacaagtttgggaaaga

SEQ ID NO: 76535 - DNA, 498 bp, Glycine max
  Clone ID: PAT_MRT3847_40122C.1
ttgaacgggaatttttaatttgttatcctattcatcatttgtagcttgttatttcgaaattttgagaacaatggatcacttcgtctgtacgattgattgattagccactagcaactcatcatcctaaccatgcttttgcagttttgcgttcccaattttctttgaatctagtaatttagggattagaatgaagtgaactgaaaacattctgtctgagactgacctttgattttcttgctcctatctttttagtttgtacaaatggaagagtaatttgtttgagaaggtgaaactgaaacctaataatattgttgctctctgcatcatctatgtaatgtattgtccaggtagatatttaggctgttgttccatgtgtgagtgaataaaattgagctacatttcatgcgtttcttcatttgggttcaatgaatagtttaatgtttatattaaggggagtgtaccttgaaaagatggaaccctgataatgacactactatg

SEQ ID NO: 76536 - DNA, 836 bp, Glycine max
  unsure (1)..(836): unsure at all n locations
  Clone ID: PAT_MRT3847_40123C.1
tatattctcgatgagcgtccgcttaatctggatcagattagaaatctacagcggcgcactgatgtgcctaatacaggggtgctttgtgatctcctctgtgccgacccaaagcaaagaggggcaagtctggggaatgaatgacaggggagtttcatatacatttggggctgataagaaagcagagtttcttcaacatggtcttatttgcatcagaaactcccttttgggtaatgggttatgccaattctggggtatatccccatatttaattgctaaaatgagacttatttccaccaatccttatctatctatcataacaattttacttcatactttattctgcacaaatcttaacttctccctttcaatcttattaattctttactttaaacaggtcccgcaaagttataacactctcatcctcaggtttaatcatgtcaattatctgacacaatatgtcctcaaagagcacaggctcttgggccatgcattccatccgatgcaattgctcctcataaaaaaattgcagttcattccttgttagaaatccatttccatccaaatctatgcacttgaaccagtactcaagacttggttcagatgatttatcctcttctgatagtatgaagtaaacaaaatcttcatatcccataagattgtttcaacaaacatttaaggttaaccaaacagaaattgattaaagattgattaaaggtcaagcaaacaagatcaaganaaagataaggccttagaatatttgtaagagaatatcactggttgatcagcttttccttaaacacattgtttccaacaaaacaagagactcggacgcgtgg

SEQ ID NO: 76537 - DNA, 315 bp, Glycine max
  Clone ID: PAT_MRT3847_40124C.1
ggctcgagctcaagcactacctgcatttgttaatattctttttgatacgctacgaaattcctgcgcgcttgggggagacacctggaataataaatgcaggtgctaaaaacatggttctacaaaaagaagatgcgttggtttcaggaaggtctcgggacggaagattcctaagtcaagctcttgccacagaagatgacttcgcatgtgcaggaaacaatgaatcggatatctaatcagagaagcgaggctattctatggagcactttttcatactaaaaccaactgcttcacgcagctccggtactggggtccgtt

SEQ ID NO: 76538 - DNA, 586 bp, Glycine max
  Clone ID: PAT_MRT3847_40125C.1
tggttgtcaacttcagacgttgatcagtttctctgccacaactattttgtgtgtgtgttgttccaatgggtgaggaatccagtttgcttaaagaaagcacatcaatcaatgacaccaatatggtggaagaggttgaagaaagggatccagaaagcaatccattgaatgagccacttctcaagaggaacaggactttgtcttccaatccacttgctcttgttggagcaaaagtttcctacatagaaagcttggactacgagatcaatgagaatgacctgttcaaacaagattggaggagcagatcaagaactcaagtgttgcaatacatattctggaaatggactctggcattccttgttggacttctcactggtgtcatagccactcttatcaatcttgctgttgagaacattgccgggtacaagtttcttgctgttgtcaactttatccaaaaagaaaggtacttgagaggtttcctatatttcacgggcattaatttccttttgacatttgttgcttctattctgagtgtgtgttttgcacccacgcagctgggcctggaatacctgaaatcaaagctatctta

SEQ ID NO: 76539 - DNA, 179 bp, Glycine max
  Clone ID: PAT_MRT3847_40126C.1
aaatccctcccactcttaaacaaagtaagccccttaagaagaatgagacctgccttaggaccatggggcttaaggtcccgggccaaaaccttggtgaatcacaattggcaaaccggacacccacctaatccttggcagaacgtaaattcctaaaaggtaaaaccgggagaagggggggg

SEQ ID NO: 76540 - DNA, 441 bp, Glycine max
  Clone ID: PAT_MRT3847_40127C.1
aggactttcctctccatggagtacctagagatcgggagtagaaatcttagcttctccgaggtcttattctcaataggaacctattggtaaagaagaaaaaattagcttagtagtagattaggtagaccgatcaactagtagatagttgatagtagagagctacgcacacaggaaggtcgagatgattggctatactgccactcagagattcttgtgaagaattgcaagtattttgccgatcggttgtctgagaactggccaacatgtcagatccttgattcacgcaactgagttgatgtctattgccaagagttgaattttgactaccatgtaaatcttatacgccttctctacattgtcatagatagttcagctcactgatttgcgatctggcatcatacactcccccctcccttccccacctccccccccccccctgcc

SEQ ID NO: 76541 - DNA, 268 bp, Glycine max
  Clone ID: PAT_MRT3847_40128C.1
atcacactttaccgccctttaatcaaaacaggggaggcccttgttaacgacgcgggtatccatttctataagtgcaaccgtcagactctccaacccgggttaaaggaattgtggcaaattgcgcccccctaaatggcgaatttttgggcccccataatgcctgacccggtaaggtaaatggcaattcaatggtcggaacctaaatgccgttcttacttagcgcctggtaaaaaggctttacttaattaaagggcccacccccccggaa

SEQ ID NO: 76542 - DNA, 482 bp, Glycine max
  Clone ID: PAT_MRT3847_40129C.1
atcggtctatggatcaacgggtacctcagcgaatgggtcgggtacaagaaaactatgtacattgccttgatcgcctcggttctgatcaacttcattcactttttcgcccagagcatcggtatgattgttgctggttccgtcttgctaggtcttccctggggtatcttccagacgctcaccgtgtcatacgctagcgatataacccccagcacaattaggccatacttgactacatacatcaatctttgttgggtcatgggccagctcatcgcggctggcgtcctcaggggctgccaaaccctaggcaacgattggggctggcgcattccgttcgcggttcaatggacttgggcgccattcattttgatcggaacctacctagccccggaaagcccatgggggctcgtacgcaagtcccgttacaaaacgcacgaaaagcggggcttaagtccacgactgccccacccgacattgagttcgat

SEQ ID NO: 76543 - DNA, 436 bp, Glycine max
  unsure (1)..(436): unsure at all n locations
  Clone ID: PAT_MRT3847_4012C.1
gaagtatgatagtgaggccaagcaattgcccccgcctaaaaggagtggaaaccaggctcttctaaaaaaagttaaggatcaagaaaaatttgcagcagctaaggaaaaaagtaagggcaaggccaccgccaacgccaccaccatgaggccccacgagagggggctgatatttgtattttattatagtgtggagtcccactccccccgccctcctgagctgacacgcccacttctgcccctccaccaccacagctaaagctacccaaaccgggaatatttcnggctctcaaatgttgatgttggcattgatatggggactcgtgttcccattgangccccaaatggacctggaaaatcttcgttgttgaatctgcgggcggggggtggggnccctncggggggagaagnaaaaaggaaaaaaaagntggggattggt

SEQ ID NO: 76544 - DNA, 521 bp, Glycine max
  Clone ID: PAT_MRT3847_40130C.1
ggctcgagtaacaattgaagagtgtttgacgactcagagagcacattgcattggcgacaccgcgagcgacgacggaaattgaattgctcgtgcgcgtcggtgcgtgatcgatcgaaggacgaacgatgtcggagatggcgagcccagatcccgagggactcgacggagtccgcatgacgtggaacgtgtggccccgtacgaaggttgaatcgagcaagtgcgtgatccctctggcggcgacggtggctctgatccgtccccaccctgacatcccccgcctccagtacgcccctctccgctgcaagacctgctcctccgccctcaaccctttctcccgcgtcgacttcaccgccaagatctggatctgccccttctgctaccagcgcaaccacttcccccctcactaccacgccatctccctatctacaattccctgaaccctttacccgtcttactcttcctgctagacacctgcctcatcgacgaggagattcacttcctcaaatgcgtgcttcgtcgtg

SEQ ID NO: 76545 - DNA, 319 bp, Glycine max
  unsure (1)..(319): unsure at all n locations
  Clone ID: PAT_MRT3847_40131C.1
gcggntggaggagaagttcgcgggtctgatttctggcctctccgaggggggggggggcgggtgttaatacgacgagggagtgggcggcccttccttttccttgccgcccgggttttagttcgagaagcttgcgggtggtgggggctgccncctttgtgggggcggcaggggtgttttcggggagaggggggtcgggtngntgggtttggtcggggcnggcggtttgggcttgggggggatttcttcgctggggggccggggggtgttcttatggtggggaactttgttgctcttgttttggggtctttttggggggggt

SEQ ID NO: 76546 - DNA, 1656 bp, Glycine max
  Clone ID: PAT_MRT3847_40133C.1
aattcggctcgagtccttccttcctttgtcaggcatccatgttgtgaagagcagaggatggataacataccagagcacatagtatgggagatattgagtaggataaagaaaacaagtgatagaaatgctgtttctcttgtttgtaaacggctttattatttggacaatgcagaaaggaattgtataagggttgggtgtggaatggatcctgcagatgaagctttgagctgtctatgcataaggtttgagaacttgtccaaagtggagattacatactctggatggatgtccaaattgggaaaacaattggatgaaaagggccttctcattcttaagaaccacggagatcaaatgttggatctcttcttgaggtactgagtattcaacattgtgattggtttcaagtaaacgacttatactacttctctctctcctgtatgcataaggttttattattgggtcactgcatataggatttttttaatggttttgggcgtgtggtaatggttttcctgcagattgataacattgacctgtctatgcactatggtttcagtatcttgtccaaagtggagattacatactctggatggatgtccaaactgggaaaacaattggatgacaagggtcttctcattcttgctaatcactgccctctactctgtgatctctccttgagctactgcacattcatcactgatgttggtctccgttacttggcttcttcttccaagctctcatctctgaggttgaatttcacaccaaggatcactggttgcctgattctgtgcatcatcagtcccgggagagggcttgcttgcgtgttgagtaagtgcaagaacttgcacaacagttcacctagacatgtgtgttggggtgagggactttgacattatttgtttgtcccaaagatcaagtgaacttaaatcgggttcacttagagttccatccgatttttcgctcccctccttggtgaataatccgttgagattgacggatgagagtctcaaggccttggctcaaaactgctccaaacttgaatcagtgaggatatctttttctgatggggagttcccttcatcctcctcattcacattaagtggaatactttgtttgattcaaaggtgcctggttcggcagcttgctcttgatcatgtttattccttcaatgatgttggaatggaagctctttgctccgctgagtatcttgaatcacttgaacttgtgaaatgccaagagattagcgatgaagggctacagcttgtgagtcagtttcccagattgtgcattttacggttaagcaagtgtttggggatctctgatgatggattaaagccgcttgttggatcattgaagttagatttcttggccattgaagattgtcctcaaatttctgaaagaggtgtccaaggagctgcaaagtctgtgtctttcaggcaagacttatcttggatgtactgaacctgttgggttttagggacatgaagtccgttgtttttttttatggccatcttcaatgcttctatatatctatagtgtatcacacacacgtaagattattctgttgtattttttatttttatgtcaaattctgttcttgtatttgttttgtaaatcttttaataaaataaatggcttctctggcaaaacccacac

SEQ ID NO: 76547 - DNA, 213 bp, Glycine max
  Clone ID: PAT_MRT3847_40134C.1
gaagatatatggggaaccttatccagattatattttctgaaatcttcaaactgataaacctttggaattcacaaaacaattacactaaaggcataatattcttaaaaagtctatgttgcctaatagctgaattgatcttatgctgggtttgaacctactctgaactacaaggatggcatggactacccaacaatggtttaccactatcgcaca

SEQ ID NO: 76548 - DNA, 1138 bp, Glycine max
  Clone ID: PAT_MRT3847_40135C.1
actggcggtgccggtgccgggattcccgggtcgacccacgcgtccgctcacagtcacaatggtttcttctaattgctactatcttgcattggtatgctgctgtgttctgctgctgctgaaccccaccgtgggggagcaggacgagcagaacttggtgctccagtaccacaaaggcgcgctcctcaaggggaggatcaccgttaacctgttatggtacggcagcttcaccccaatccaacgctccacaatcgttgacttcataaagtcgttaagctcctccccgggggccccacttccctcggtggcatggtggtggaagacgacggagaagtacaatgggggatccactacgctggtcgtagggaagcaaatcctgcaacaaacttattccctcggaaagtacctcaacggaacacagctactctatctctcctcacgcttcaacgacctcaacgccatcaacgtcgttctcacatcaaacgacgtcggcgtcgacggcttctgcaggagccgctgtgggacccacggatccattaacgggaaggcccgtataccgtacatgtgggttgggaactccgaggcccagtgccctgggcaatgcgcgtggcccttccaccagcccgcttacggcccacagacgccgccgttagttgctcctaacgccgacgttggggttgacgggatgggtataaacataagcccgcttttggcgggaaccgtgacgaacccgttcaacgaggggttctatcagggtcctcccacggcgccgttggaggctgtttcggcctgcacggggattttcgggagcggggcatatccaggttatccgggtcgggttctggtggacaagacgacgggggcgagctacaattcgtacggcgccgggaacgggaggaagtacctcttgccggccatgtgggacccacagacctccgcatgcaagacgcaggtgtaaacaaaagacttgggtcaacgtgtaaattcttgttttctacatagtcaatgttttagcatattgatatcaataaattgtggaaatagaatattattacttttatttataacttttgagaacaagaatgtttgacctgtacatgtattattatttttgattaagagttgttcgttttgagggttt

SEQ ID NO: 76549 - DNA, 1835 bp, Glycine max
  Clone ID: PAT_MRT3847_40136C.1
cgtgtgtcgcgttcccttattgtttcttactatccccatctctggagcctggtctcggacatctccgtctgcaccactcttcgcgctggtcttggcatctccgcagcaccaccacccaccaccctgcttagaccaggtcctctctctctctagagagaaagagtaaaaaatgaaaaaaaaaaatcaactaacattaagcttttaatagtaagacatggctcaacccagtttccaacggggatctgaataataaccagcagcagggtcaggttcagcaacaacagcagcagggtcagtgggcggcggcggcgcaagggcatcagtatcagcagcaatggatggctatgcagtacccggccgaccgccatggccatgatgcagcaacagatgttgatgtaccccttcgtgcatcatactagcccttatactaactttgctcaccccatcatcggttaaatagtgttccaaatgttaccttgcaagaacacactacttggaccttaccaagcctcttcaattctaggatgagacgctgaccctcacctccaacattggttgttacaatatcttctcttaaactgtttaactaccaacggagaagaaaatacggctaaggtcattccggaggaaacaaactggtcagtccgagggatatggattcgtggagttctattcgcgagggacggctgagaaagtcttgcagaactataatggcacgatgatgcccaatacagatcaggcattccgtctgaattgggccacattcagtgccggggaaagacgttcctccgatgctacttcggatctctctatatttgttggggacttggccattgatgttaccgatgctatgctgcaggatacttttgctggccgatattcgtctattaagggagcaaaagttgtcattgattctaatactggccgctcaaaaggctatggttttgttaggtttggtgatgaaaacgagagaacgagggcaatgaccgaaatgaatggcgtttattgttctagtaggcccatgcgaataggtgttgcaactcccaagaaaacttatggcttccaacaacaatattcttctcaagctgtggtattggctgggggacactcagctaatggtgctgtggcccaaggttcccattctgaaggggatataaacaacactactatatttgttggagggcttgattctgataccagtgatgaggatctcagacaaccatttttgcaatttggtgaggttgtctctgtgaaaattccagttggtaaagggtgtggatttgttcaatttgctgacagaaagaatgctgaggaagcaattcagggattgaatgggacagtaattgggaagcagacagtgcgtctttcttggggtcgcagtccaggaaataagcattggagatctgattccaatggaggccattatggtggtcatcagggttatggtggccatggatttgctgtgagacagaatcaggatatagccatgcaacctgctgctgcaattcaaggtgcttcctaacggggcttattagcagaactgtgtgttgaagtaggatggattttattgctctcccctaaactgtagtattatttttaaatttgtagctgggttaaggtatgccaggttcttaagattgtattaaaatgtctgaaattttggattgaacccgaccatataatatatgattcgggtatttttgttttttttttaaaccctcaaaacatattggtagcagacagctaagattatttaaatacttatctttacagtacaatgttactgcttgcaaaaactaaaaagaggcgtgaatctgaaactgattttaattcct

SEQ ID NO: 76550 - DNA, 725 bp, Glycine max
  Clone ID: PAT_MRT3847_40137C.1
cccacgcgtccgctttctctcttcgcctggtcttggcatctccgcagcaccaccacccaccaccctgcttagaccaggtcctctctctctctagagagaaagagaaaaaagagaaaaataaaacaactaacattaagcttttaatagtaagacatggctcaacccagttccaacggggatctgaataataaccagcagcagggtcaggttcagcaacaacagcagcagggtcagtgggcggcggcggcgcagccgcatcagtatcagcagcaatggatggctatgcagtacccggccaccgccatggccatgatgcagcaacagatgttgatgtacccgcagcattatatgccctatgctcaccctcattacccgccgccgccgccgcctcctccctcctcccaccaccaccaccaccacaaacaggccgcggcctcctccgacgagatcaggaccgtctggctcggcgacctccaccattggatggacgagaactacctccacaactgctttgctcacaccggcgaggttgtttcggccaaggtcattcggaataagcaaactggtcagtccgagggatatggattcgtggagttctattcgcgagggacggctgagaaagtcttgcagaactataatggcacgatgatgcccaatacagatcaggcattccgtctgaattgggccacattcaatgccggggaaagacgtttctccgatgctac

SEQ ID NO: 76551 - DNA, 282 bp, Glycine max
  Clone ID: PAT_MRT3847_40138C.1
atttcattctggtatgcgtttggatggcgtacgaggtaatgccggatttcgacctgctcggggaggcaattttggtgttttaaggaatccacgcacacagacacctctgcagtatgctggagggattctttctggtccaatgcaatccatggttaatcagggaggaatgcaaagaaatagccctgatggagaaaggtggcatcgtgctactagcttccagcataggggtttaatttcatctacttctacttctcaaactcctttacagatgatgcacaaagc

SEQ ID NO: 76552 - DNA, 281 bp, Glycine max
  unsure (1)..(281): unsure at all n locations
  Clone ID: PAT_MRT3847_40139C.1
tacgtaagctcggaattcggctcgaggaatcngnaaagcaaagancacacaangagaggaagcaganannnngttnccnnancnnnaanntnngttnnnnntngnggtgccgttnangcanctgcncagcagncncantgcgaagtcggagnnacgtagncaatggnannncnagntancgcangnaanagnatnancctcnnnngacncnngctnggngnganngncacanttatccacnacanngggnttaangtctgcaatgnngnggtccgtanatc

SEQ ID NO: 76553 - DNA, 484 bp, Glycine max
  Clone ID: PAT_MRT3847_4013C.1
ggctgcctcaggctccactgttggagctgacaacggagctccactgagcttggacagctctggagctggagcttcatttcccagttcagccttctttggcaccagcttgaacaaggttattgcctcaaaggtccctaacgccaagatttcttctggaactttcaaaatctttgccgcggagacatatattgttgagaaacaacatacagactatgacagatggaaaggtcttgcctatgatgtttcagacaaccagcaagacatcacaagaaggaatgggttggcttgttccctcctccaaactccaccagatactggaactcactatgctatcttgagctcttatgactaccctaacgctggactctaacagacaaccttggaatacgcacggacagagattacattgctcccgctattatagacaaacctggtggtcacgtcaacaaggaacttggtgaacctgccccacatccaggttccc

SEQ ID NO: 76554 - DNA, 387 bp, Glycine max
  Clone ID: PAT_MRT3847_40140C.1
acgcgtacgacacgcgtccggtttctggttgaggaaccaacttcatatcaatgcatgaggccttcaaaaggtaacactttaagaaaatgtcctgcagttgtcacaaataaaaatgatttgatgaggtacagagtatccataaaataatggattccaagttatcctggcccatataccaaaggataaacttaatccaattaaccttgttaatcccttatgaaaatttaaggttaatttaatcttttagcttgataccctaaacctataccagatgaattgatcccagcctacaaaagatctatatttaacattcatacattactttttccaacttttggaagccaaggaatctattgcattaaagtgcacaaaacacttatttttttt

SEQ ID NO: 76555 - DNA, 131 bp, Glycine max
  Clone ID: PAT_MRT3847_40141C.1
gcaatccatatccaaaattatgtagtacgctattctaatatttagttcttctcaaaacccttccctcaaagggaattttcttattaactatgggaagtatcctcaatccttcatcacaccaattctttact

SEQ ID NO: 76556 - DNA, 720 bp, Glycine max
  unsure (1)..(720): unsure at all n locations
  Clone ID: PAT_MRT3847_40142C.1
gcggcacccaccatgaaagccggcaagttgccaccaccaaacaaagcatcccaaggaccacttaatgtagacaccaccatctgtacattcacatgtgtatacaacataatcaaataattgcataatttttattattctttattcagagtatctgatccagaatcaaagattaatctctcagagatatgaatcacacaaattaaatatacgaggaagtgaattctaacctgtggcaccacaattgcaagattgaggactcccaaagataaaccttggcctgctcctgaagcgctgcagtatattgatgctagagcaaatggaacactgaaagtaatctgaacacaagaacaacaaaaagtgtatattaatttaaggcaactgggtattattcaaggatttcaacttttttccatgcttctcaatgtttataattgtcctgtaaacctcgttttttatgtgactttatcttcacatcaagaataaaggtcatgtctctatttcatattaaaaaaaaagtcatatatctttaatcattttttaaatctctatttgaattatgcaatatcagacataaattangtaatacctgccaaaaaaaattagactgacatgaagtccaaactgaaactccaccagtcaaaagagtctaccttttaagatttttcaagattcttcatacanaactagtaatcaataaaactttgtctttttaaactgcta

SEQ ID NO: 76557 - DNA, 218 bp, Glycine max
  Clone ID: PAT_MRT3847_40143C.1
gtcttgttcacaggttcaagaagtcattagtttcaagaacgctgtgatggggaagcttcagaaatccacataatctgttagggagacaaacagattcataaagatatctatctctctttgttttttgcactgtaaaaactatatatttgtgcccccaagattggcaatttgcagatacataggtgatgggtctgggaatatgaagacaaaatagaagg

SEQ ID NO: 76558 - DNA, 464 bp, Glycine max
  unsure (1)..(464): unsure at all n locations
  Clone ID: PAT_MRT3847_40144C.1
agaccacacaagaataaccaaccaacccaacccttttggccttttttttttaaacacaaacaatagaatggaacctgtaggagccttccctgatggagaatgggattgctttcgccgaatttttgcgagtgatgaggagcatgagcatgatttattcacacctcaatttccacttctgtttgatggtgatgatggattgaacattgtgacacaacacacattttgtgctgctcctgaagccggtgaaaatgcgtgtatgttttattctttagatgctgatcacaactcaaattcttctcagtatatttcacaagaaagtagctatagtaatactagtagcaactgtagtggtgacgacactgtcttcattgccaatccgggtaacgcatactattattntagttaccctgatcatgtgctagcaaacaataatgcatgtgtatattccatggatgagaaaattt

SEQ ID NO: 76559 - DNA, 138 bp, Glycine max
  Clone ID: PAT_MRT3847_40145C.1
aaaaaaaagatgctatgggggatttttttgaggaccgcgccgaaaatgtcacaaaagcgaaatttatatagggacaaccggtcagtgggataacaaaaatttcatgaagtgatactcccaatttaggttgtgaattgg

SEQ ID NO: 76560 - DNA, 481 bp, Glycine max
  Clone ID: PAT_MRT3847_40146C.1
ggggaagctaccggcatcatttttcaggattgaagacacagaagcacaaaggtttattggcaagtgtctaataactgcagcaaagagaccatcagctaaagaattgttgaatgatccatttcttttgtctgatgatgcatcatccatgacaaagatcggaattcagaaaccctttttaaattacaatgaaatggaaaagcttcaattggatgatgtttcacctaggactgaaatgtcaataactgggaagctaaatccagaacatgatactatctttctcaaagtgcaaatttccgacaaggatggttcttgtaggaatgtatactttccttttgacatatacacagacactcccattgatgttgcaatggagatggtgaaggaattggagatcacagatttgaagccttctgatattgcaaatatgattgaaggagagatatctgtgctgctgccaaataagaggaatagtaactgttca

SEQ ID NO: 76561 - DNA, 1027 bp, Glycine max
  Clone ID: PAT_MRT3847_40147C.1
ctgcgagaagacgacagaaggggactcatttttccaatattcacacaatacctctatcttgtgccacttatatagtacgtccatccctgtgaaacaaaccatggcttccgaaacaaaccagtccaagaatgtgtgtgtaattggagctggaccctcggggctattggcagcgagggagctgagaaaagaaggtcacaaggtggttgtgttggagcagaaccatgatattggaggtcaatggctatatgacccaaatgtacaagaggaggatcccttaggaagagacccttggctaaaggtgcatagcagcatctatgagtctttaaggttcatgtctcccagagagatcatggggtcaactgatttcccctttttagtcaagaaaggtagagacacaaggaggtttcctagtcatagagagttccttctctaccttaaggacttttgtgaatggtttaagttgagtgagatgatcaagctcaatacaaaggtgcattatgtgggaccattaaattatggtgtccctagtgaggatttgaaatgggttgttagaagcaaagagaacaagagtgaggaggaagttgaacaagtctttgacgcagtggttgtggccactggccatttctctaatcctagattgccctgcattcaaggaatggacacatggaaaagaaaacaaatgcacagtcacatttacaggtcttcagagccattccgcggggagatagtggtggtggttggaaattttttaagtggacaagaaatatcaatggaacttgtgaaagtagcgaaggaagttcacctcagttcgaaatctactagcatttgtagtggtttatctccagttcagttcaaaaacacttgacatttatgagggtttatctaaagtcatatccaaacacgagaactttcatcttcgtccacaggtagcgccccctatagagacccttcgagaggatgggacggacatttccaacgacggcttcaacattatcgcagacactattttatactgcactgggtacac

SEQ ID NO: 76562 - DNA, 256 bp, Glycine max
  Clone ID: PAT_MRT3847_40148C.1
gggataatgatataaaaagcaccaagcatacattaaaggaaatgataatacattattcttgtctagaactgcctgaagggaaggctgtgatcaaatcagagtccatggctgatctagcgtaagttaatttttccttatcacttgcctccgtgcttgcaatgtatactaggtgttgactatagaacaatataatcaattgtgacatgtttgtatactccaattatttttcagtgactttacactatgcatcatttgt

SEQ ID NO: 76563 - DNA, 364 bp, Glycine max
  Clone ID: PAT_MRT3847_40149C.1
tgatcatctccgctgtgtactaagacagaatagaccaatcccgaagaagctcatgccagaaggagtgccgcctggacatgcaatccattgggactacttgaatagttgatgtaagtttacaagcacggatcagcttgtgaaccatcgtctgaccatggcatgggggacggacaggaagatgactgctttgggaaccgacaactcaagggaacgtttgacgaaggtaactattctctctcacatgatgcagcatggcaggagagatcgtatgggtgtgacgagaaatgggtgattgatcttgacatgaactgagcatgcgcgcgagtgataaagaagcacaggttatccggcatacgttcagaca

SEQ ID NO: 76564 - DNA, 587 bp, Glycine max
  unsure (1)..(587): unsure at all n locations
  Clone ID: PAT_MRT3847_4014C.1
ggctcgaggtacgtattacattattttactgattcgcggagccatgttaatggcacactaaagttcccccatggcagtacgtggcacagcatatgccatccctgggtagcatattatgttaaaattgcttttttaaagttttaacaaattgacccattataacatcctagtgtacacataaacatgaaaaggaagggaggagttattacaaatttttaataataataacattattgatagatcagcaaaagaacaaaaaatattggcatccaatttctaacaatttcatagacaataaaagataaatataaaaattgacggacattgcatgaaattgttctctctcaatttgcagacataaaaatgctaacgcatatctattagttcactatacacaaatttcacgctgctgcatgcgtctctattcgacgtacaatttgtacatttgggctcatgccatgcacataataccattaaaacctttntcttatgtaaacttgacattatgagctagactagctaagttntatactgtgagtcnatanaaattataattataccttttaaatagtatcttacttaacgaa

SEQ ID NO: 76565 - DNA, 282 bp, Glycine max
  Clone ID: PAT_MRT3847_40150C.1
tcttccttgaagccaactacatgaacctacagagatcctacactgtggccattgctggctatgctctggcccagatgggcaggctgaaggggcctcttcttaacaaatttctgaccacagccaaagataagaaccgctgggaggaccctggtaagcagctctacaacgtggaggccacatctatgccctcttggccctaatgcagctaaaagactttgactttgtgcctccgtcgtgcgttgggctcattgacagagttatacggtggtggctatggctcta

SEQ ID NO: 76566 - DNA, 696 bp, Glycine max
  Clone ID: PAT_MRT3847_40151C.1
cgacccccacgcgtccgtacggctgcgaagattccacagaagggggagaaaaactgcataacctaataatccaagtgtatcaaaattgagagcagtggttgaagtgaagcagatcgtcaaataatcatgagtttaatgagtccgagaacagagaagctggtgagaaggctaacctttgtcaccactgttgctgcttcctattttctcttaaccgctgattacggccccaaacccaatgctctcgatcctattaagaagcaaatactttctgcacagagcactgttaaagagtatattgtgggatcaaagaaagaatctcaagaaagccatgtggggagattggacagcaataaagataatccataaatttatgatagtcttgtataggaacatctgagtcaaggttttcttttagcagcttgaactgtagtgtaatggaatggttcaatgaatagaggctgagaacgaataaacagtagattcacttgtcagcattatcattgccattaataagaccattacatcataatcatgtttcggctgctgatctcttcccccacaactcattatcttgttatatatttgcatctgtattgtttatctttcctttgtttttctgttatatggatttgagatacaaatgtgattgagaagggtgttttgcacatcaattaagaagttgctttagacaaaaaa

SEQ ID NO: 76567 - DNA, 217 bp, Glycine max
  Clone ID: PAT_MRT3847_40152C.1
gacaacgtcacagagcgagaagggaaggaaaagtggtgttggtggttgtcctcctcattggtatggcaaccctttcctccatcctctgctcctctcttcctcttgtccatcgctaccctaacgctaacccttcgctctttcgcacgtgcatttctctctcttgtctctcgcactaaaccccgttagcccttgatcggtctcgctgcctcttcccatg

SEQ ID NO: 76568 - DNA, 185 bp, Glycine max
  Clone ID: PAT_MRT3847_40153C.1
gtagattatatattatacccttatgttatatgccatgtcattgtggatagaaaaaaagggaagagagaaagcaaacaagaaaaaagagagacagacaattgggaacggaggagcaaagcctagtctacgtgcaaggactaccatgagccggcgccggtgccgctggatgaccgcgcagtgttcac

SEQ ID NO: 76569 - DNA, 328 bp, Glycine max
  Clone ID: PAT_MRT3847_40154C.1
aatgcctcacacatagaacatcagcagtaaggtgataaacagagaggttcacattgagagacacagataagactccctccctgataagggaacggttgtgatagatagtgagaagaatgacaatgagagagagttagcttctgatacaaccaggtctggaactatacttaacgacgacatcgaggttgacgaaggaagacgaggaatagagagttgtagtggttgtggtgttcagcatgagaggaagtttgcaactaaagttgatgagaacaacggttttggggaaacagctgaactctagggaataacatcagtcgtggtgggaaga

SEQ ID NO: 76570 - DNA, 588 bp, Glycine max
  Clone ID: PAT_MRT3847_40155C.1
gagcgagtgagtgactaatacagaccaaggatgagtttggtagcggggctcgaggagaaattcatctggggcttcaccctccgctcccaatcccaaaccctaacccctctgttttcttatccttcccacctctcctccatcaaatccgtcgccatctccggccccgtcgttgcctccggcggcgaggacgacaccatccagctctacgacctcgccgccgccgcctccctcggctccctccacacccactctgccaccgttaccgccctctccttctacccccctccccacctccccttcccccgcaacctcgtctccgccgacgccgacggcaacgtctccatcttcgacgccgatggcttcgtccacctcacgaccatctccgtccacccgcaacgccgccataaacgaccttgccctccacccctccggccagcgcgccctcaccgacttccgtgacgattgcctcgccgtcgtcaatctcgtcagagggcgccggaactgctgtctgcgcctcggcatggaggcaagtttggtaaagtttggtgccactgggggatcagttctttcatggtggtggaaggagaa

SEQ ID NO: 76571 - DNA, 292 bp, Glycine max
  Clone ID: PAT_MRT3847_40156C.1
ccgaaatttttccagggaagcggatggggaagcatattccttcttaaaatagtgcaggggagaatcatgcagacaaacccctaatgcacagcggaaattctgcttctagtgcaagagactcagactgcaaggcgagaaaaaatagcagcctcaagcactgcaatgcatgggagcatagaaatatatagatagttccaagtcagctgaacatagtgagcaagctctggtgatactatcaaccaaccgaaaccagtcgtaaatttggtgcgccaacaaggcgaaggcccattcg

SEQ ID NO: 76572 - DNA, 2621 bp, Glycine max
  Clone ID: PAT_MRT3847_40157C.1
atgcgttattgtgccacatttgatactcatcgagcttctcttccttatgtggctcgttttcatgcaaagagggtattgaaatttcaagatgcactgttgaaacaagctatgcatcgaaatgaggtcaagtttgctgagcttacattggacatctatagaatgatacaatgtttagaatgggagcctagtggagtattctaccaaaaacatacagttaaacctaaggagaatggtgacataattgatcattcaggagcttccgggataatagacatgaatcttactgcagatatgaccgatccaactgtacctcctaatcctagaaaggcttccctgtaccgtccatctgtgacacatgtgatagcagtgagttttcaagcctattggaaagttttggctactatttgtgaggagctgccaccagactgtgttgtgctagtatatctttcagcctcagggaaggctggtcttaataatgtctctcaggtggagaattctagcggttcatccaaatattcaagacacaaagtcctttctcagacttcccaaggacagaattctggaccttctgaaactcaaagtaatggcaagagagaactgagctattatgacaattatctgtggtttggttccaagggaaatagtggtttaaataatctctacactggcgatcttatcccctttactaggaaacctctattcttaataattgacagtgattacagccatgcattcaaggcagcattttgctaattgtgtggtctcacctgcaatgaggctgataaagatgtctacaatgaagcaaagaacattatcgctaatgttttcacggagtgggagataattatttctaaatctttgactgagtggttagtaatgctttgctcatcaactgccatggatctagtatgggcgcaggttataagtgatccatctctaacgcggcttattctaagattcatattctgccgatccgtgatatcttctttctgcccacctgaggaaagtgaactgtacctgccactttgttaacccccgaacctcgacatcgtcgccctctcacgcgccgggaaagtcgacgccgcacgcaaactgttcgacgaaatggcaacaaaagacgtcgtcacgtggaactccatgctctccgcctactggcaaaacggccttctccaacgctccaaagcactcatgcaggctttgccagttaacaacgtccagatcaaaggaacccaaatcgattatttgagtcaaacttacaacctccaggacgcgattcgctacgatggggcatgggctgtctggtggaaaaagagattgtttgcctctgcttgttgtgttgctttattcgaccccacctgcttcattgatctatatgctgtatttggtggtttgctctgtaatgttaaggttaggtcatgatgggtgcatggtgacttttcatgtgtttggtcgtggcaagataattttgtttttgtaacgtggcaagatagttgttagtttaaatatttgttcatacttcatagctttgaaaagggaaaaaaaaaaggaattcattgtcaattttacctttttttagcagaattggacggtattgaatcaacattgattgaggaggatgtattctgggaagaactaattccgtcaaaacccaaaagtaaattacttaccctgtatattcaattcttggaatataattatgacgggttatgcacaaaatgggagaggggaagaggcactgaatttgttttcacaaatgatcaggactggtatgcaaccagatgacttgacttttgtttcagttttcattgcctgtgcaagtcttgcatcactcgaagaaggaagcaaggcgcatgctcttttaattaagcatggctttgattcagatttgtcagtatgtaatgccctgattactgtgcacagcaaatgtggtggaattgttgattctgagttagtttttggacaaatttcccatccggaccttgtttcatggaacactatcattgctgcatttgcacagcatggtctgtatgacaaagcacgctcctactttgaccagatggtgacagtcagtgttcaacctgatggcataacttttctgagtttactatctgcgtgttgtcgtgctgggaaggttaatgagagcatgaatctatttagtttgatggttgataattatggtattccaccaaggtctgagcactatgcttgcttagttgacgtgatgagtcgagcaggtcagttgcagagagcttgcaaaataatcaatgagatgccattcaaggcagattccagcatctggggtgctgtgcttgcagcctgtagtgttcatttaaacgtggaattaggggaactggcagctagaagaattttgaatttggatccttttaattctggtgcctatgttatgctgtctaatatatatgctgctgctggcaaatggaaggatgtccatagaatcagggttctgatgaaagagcaaggagttaagaaacaaacagcttatagttggttgcagattggaaacaaaacccattatttcgttggaggggatccatcacatcctaatattaatgatattcatgttgctttaaggagaataacattacatatgaaggtaaaag

SEQ ID NO: 76573 - DNA, 156 bp, Glycine max
  Clone ID: PAT_MRT3847_40158C.1
ggctcgagctcaaattcttatatcccagatcacaggtctgaccataagtgctgagctgccacgaagtacaaagcactgcagaacgcctcagaacagcagaactatcgagctcaaccaagaggaccgatgccacattacggacctgaacaccgggat

SEQ ID NO: 76574 - DNA, 1666 bp, Glycine max
  Clone ID: PAT_MRT3847_40159C.1
tgcatcttgaaatgaggtcaagtttgctgagcttacattggacatctatagaatgatacaatgtttagaatgggagcctagtggagtattctaccaaaaacatacagttaaacctaaggagaatggtgacataattgatcattcaggagcttccgggataatagacatgaatcttactgcagatatgaccgatccaactgtacctcctagttctagatcgcgggcggccgcttccctgtaccgtccatctgtgacacatgtgatagcagttttggctactatttgtgaggagctgccaccagactgtgttgtgctagtatatctttcagcctcagggaaggctggtcttaataatgtctctcaggtggagaattttagcggttcatccaaatattcaagacacaaagtcctttcccagacttcccaaggacagaattctgaaccttccgaaactcaaaataatggcaagagagaactgagctattatgacaattatctgtggtttggtcccaagggaaatagtggttcaaataatctctaccctggtgatcttatccccttcactaggaaacctcttttcctaattattgacagtgataacagccatgcattcaaggttttacatggggctgaaaggggtgaaacggctgctctatttctttcacctttaagaccgattttcaagaatccatctgatgtaaattcaaatagtggaagccaatttacctattttttgactgctcctttgtcagcattttgccaaatgattggtctcacccccaatgaggctgatacagatgtctacaatgaagcagagaacattatcgctaatgctttcacggagtgggaaataattctttgctcatcaactaccatggatttagtatgggcgcaggttataagtgatccatttctaaggcggcttattctaagatttattttctgccgatccgtgatatctttttttctgcccacctgaggaaagtgaactgtacctgccactttgtttaccccatctaccgtcttctgttgcaccaacgtctgaagctgtgcgttctgctgttgtgcaacttgccatgcactttgacgttgctgactcctttcactttactgaaacataagattttgggaccttaaaaagtaacaagtaaaaatgttaggcttacatgcaggctttggaagctaaggattctcagatcaaaggaatacaaaacattatatgagttgacctttcgggcgacaggacaagagtatttactgtggggcatgggctgtctggtggaaaaagaaattgttgggaatggttgcctctgcctgttgtgttgcttaattccactccacatgcttcattgatctatatgctgcatttggtggtttgctctgtaatgttaaggttaggtcatgatgggtgcctggtgacttttcatgtgtttggtcgtggcaagataattttgtatttgtaacgtggcaagatagttgttagtttaaatatttgttcatacttcatagctttgaaaagggaaaaaaaaaaggaattcattgtcaattttacctttttttagcagaattggacggtattgaatcaacattgattgaggaggatgtattctgggaagaactaattccgtcaaaacccaaaagtaaattacttaccctgtatattcaa

SEQ ID NO: 76575 - DNA, 165 bp, Glycine max
  Clone ID: PAT_MRT3847_4015C.1
attttacttcccttcatcgaagaagtaaattctctgttgtcttaaaattcttaagggcgttaatgaaacatgggcaagggttttgcagaaatagggagccttcctcctcccctttcactagaaagatatctcttcccaacctattgaagcactacatttcagcct

SEQ ID NO: 76576 - DNA, 408 bp, Glycine max
  unsure (1)..(408): unsure at all n locations
  Clone ID: PAT_MRT3847_40160C.1
nttgtcgcnngcntacgtnanctcgnnnttcngctcgcnncncgngcnncaatacggctctggnngagantagngannnangcgatgacaagnagnnnatggttacgnatgcttgaaaagcatnagtngcacgccatnggngtagnntgngnaagggtgggtagtgtcntacgttnangggtgaggattnnntttnanntgnganagtggntgntcgtgatgtncntctgcnanntacgattgatngggtgtntgcancagtattgggnagnnattncgggngtnnagttnatggtnaagttctgtgngcanngtnanatgtcatgntgatcgcctagncatntcttngtcttcggtntgtgtggtgtgncganagnngcgngnnntanaggtngcttnctagcaant

SEQ ID NO: 76577 - DNA, 405 bp, Glycine max
  Clone ID: PAT_MRT3847_40161C.1
cccaaaaaaaaacatttgggggctaaaaatggggaaaaacaatctttaggcccaaaaaaggcccctaaaaacaaaacccccgacctacccatttaaaaataccttaaacaaagggaccccccggccggggggtaaacctccctctcccgggaaacaacccggaaccccggtttgggtttaaccccccaaagcctaaaaccacctggcaaggggggggaaaagttaacgggtccaacaaaggtttaaaatttcccacaaaaaacccaaaaccaacagcttttggggggggggtttctctacttttggggtggaaaccacaggggtttcctaaaaaaaagcccaggcccaaacaaggggctaaggcctaaaaaagggcaattcatccccgggaaaagcaccccaaac

SEQ ID NO: 76578 - DNA, 425 bp, Glycine max
  Clone ID: PAT_MRT3847_40162C.1
gtctactgtcattttttattttaaataccgcgactaatcacataaaatttgtgtttgttctttttatatttatattatttatatttttattttttgtacaatttattactagtatagtaatcgatcgcggataactatggccccctacgtctcacagcacggatcccacccatttcattactcagctcctcttctgctggcgctactccgggaagctacgtgggacatcgccagggagggctttcgcaggcaggcccgggacccctgggggaagagcttggaaaatttggggagttttcggccgccggtcacatgtccttggctgggcaccttctggtgccaaatctgccaaagaaacccaccgggaatgtgactcatccctgatgctgaagccataggtccatctacccacttcccaccacctg

SEQ ID NO: 76579 - DNA, 1065 bp, Glycine max
  Clone ID: PAT_MRT3847_40163C.1
gtcaaatagcctaagaaggcatactttaagataatttccatataaaacgatccctcggattgttatctcaaattatccttaactaaaaggatgattcaatcctaattgactacaataaaattctgacttaaattcaaattgagttatttatattcccactttgggtaggatgttacaattacaaatcaattaacaacaaatgcctaaaacatttgcagacaaaaataacataaaaagtctaaactactcccacctgtacatctagacacctgagtttcatagttttcattttcagcattgtacttccttccccaaatgatgaatagtagtagacaggcaacggcatcttaagccaaggcaccaagcagatcaaagagtgcttcatagaagacatcattggagagaaaaatttccagacaatcatctaattaaaagtgataatctgtacgaacatgatgcttcaatatatgaagtgaaccaaatggaggtgaaataacagtttagacacataatgaaaatagaacaaggaatccctcaaggaatttatttgtttcccaccttcgagttcttcactttactccaattgtttgagttcagacatccctcttgttacattaatctgattttctatttttccttttcctttttgtttcttatcacagcaaaagacgcttccacaacaacaccgaaatgctttaataggatggtcgtgatcatcaaaatcaataccataatcccatgtcaactcctcatttgcactcactgtcctgttggtgaagaaggcaagatgataataatgatgatcaggactctctatttcgacaggaatgtctatgagatttgcatcatagcatctatgattgatgaaccttccgacatttccattctttgttgcatctaaacatagtgcctcctcgtcctttaacccctgttctgagccccagtccgcatcaagagttacaggatatgtatgttttttcgtgccagtatcctgcataatccttttatataactccataattggtaatatttctcctacatattcacatacaaaagtttcttttg

SEQ ID NO: 76580 - DNA, 283 bp, Glycine max
  Clone ID: PAT_MRT3847_40164C.1
tttttggcgagccaacaaattgataattcactttaagcagcatacccgattattaaaacctcaggcctacagagtgtacatacacgactgacacggctcagcactcaaccatgtggacaaaaaccaatccgtcacgacaggtgctattctatgcattccaaaacggtggaggctctagaccttggctcgagctctaagtgctagaccgacgaatctgacgacggccaatgcttgcatctggtggctcacaaatgcttactgctggtgtcagaggagcacaaac

SEQ ID NO: 76581 - DNA, 715 bp, Glycine max
  Clone ID: PAT_MRT3847_40165C.1
gcaggtttaaccaaaagcatgagaaagagagggagccatgaatatgatggtgattctggaaacaccaacagcaagaggcacttgttgttatggatcttagctgcggttatcctcattgctctttggtccatgtttgctggctccgtcaccctcaaatggtccttgagcaacaacgatgacttggattctaccattcttgaagacctcgatgtgctggaagtggaagagagagagaaggtggtgaggcacatgtgggatttgtacagtcacacgaacacgaagtccgttggattacccaagttttggtgggaagcttttgaagctgcttaccagcaattggtgagtgatgtccctgccgtccgagacgccgccgtttcagaaattgccaagatgtctctgcgatctcttcctattcaaattcaatcacactcgagcatcacggcttcaagaaaaataaagcaagcaaagagtaggacaggacagtgaccaataactagaatctttcgttttgcttgtatactgttgggctagctgctttcacagtgaagcaagcattccaaatagtaattgccttataatcttacctcccaaatgaataataaatatcttcataggtttcaggattgaaagcaaagtacttgcgtaattctttaccagtgctttaaggggcagctattgatcatatttttgtgtatatcgcattagtgttgtcatg

SEQ ID NO: 76582 - DNA, 403 bp, Glycine max
  Clone ID: PAT_MRT3847_40166C.1
gccaacagcacgggacttggattaattgaatctaaccatgaaatgggagaaagagagatcaccaaaaatcaacctggcttccccataaaaataatgaaccaaatacagcagctacaaaacgaaatctggctagttaaactctagaaattcgaacaaaaaatcaagtgcacccctacagaaaagcgcatggtgttggtgagcaacttctactcaaccaaacagaaaaagaacaaagagtgaaaagagaagcacaaacgaattatcatgagccaagttgctccaccgatgacttctgtaaccacaccatattatttccaattgaatgaccaagctggaatcaacatattacagcaaacagcttgactaacagaaacttgagaccaagcaagtgcataattgatat

SEQ ID NO: 76583 - DNA, 282 bp, Glycine max
  Clone ID: PAT_MRT3847_40167C.1
atcgtcgtaacattattctattaccaatggcgcatatgtctaacatgaacataatcatgtgcatgccgccgatcaactctgaaacctctattgctgcaccacgcagtaagagtggcatgaggaccatagctgacggaaggacgactgctactggtgcacagagacagctggaacgaacgacgacgagagagggccagacaaggacgatgccgtcggatacgcgcgtcccgatggtacagacacgcgctgaaatcctggcgactactgagaagctgagaacag

SEQ ID NO: 76584 - DNA, 185 bp, Glycine max
  Clone ID: PAT_MRT3847_40168C.1
tcttcgacttccatattccatctgtcgactaacatttcttatcttcccaatccttctaactcgtaaccatttatacccatgcctgctcatgcattaattcctaaactaccgaaataccatacttctgcatccttcactaacggtagcacttcctaaatttccagtgcatcttccatgtcatacac

SEQ ID NO: 76585 - DNA, 440 bp, Glycine max
  unsure (1)..(440): unsure at all n locations
  Clone ID: PAT_MRT3847_40169C.1
ggaagctcggaatgcggctcgagggaaattcctgcacaccaagcttctcgtggggattnggtggtgatagtattatatgtacatattttccatatgtaggtggttttgtaatgatatattgtgataggtcctcgcgaaacatgtgtgtgtcagcttcaagcgactagatcttgagagagatagtaacttttttccacttgacttatgatatgtgtgtgttttaaaagatatgattcattcactctagactgaacaaaatgaccaaccacactaagattcaaacgactggaatagagtggtctggcggtggtggcgtaattaacgtgaggattgagccggtgcaatgtcgacttaaacacaacctgtctatgagagaagattatactacccagtggattcagggagctacagactcattgaggacatcgaatgcactaacc

SEQ ID NO: 76586 - DNA, 1045 bp, Glycine max
  Clone ID: PAT_MRT3847_4016C.1
cttgcttccccctcccttacaccatgcccaaatcgcgtgactgtcgcgtaaccgtggtcaacctcgtcacctccttagcccgccgttgcatctcatttatctacaatgacgctctaactctctgtacccctctaagaactgccaccctcggccgcggaagagctcgcacttctcccggctccaaaaacataccgcaatcaactgcgcgatgtggtagaggacgcattctgttatgctccatgcttcttgcgtggtaccctatgatccgattcttcttcttttttcttcgtcacagatagcttgactttagcatttgactcgtgaagtaatataatccaaacaagcttcaacaacattctttatgctcaacaagtcttcacagtttcaaccaatgaccttcacctttctctctgcgtcctctccctttaattcagccaagagatgatggaaaaggatctttagcactaatcactttacaggaagaattttcaggctttatgtttgttcttaagcaaaatgaaaatacttggttcaagtacaatgtaaatgacttttatatccctctctcaagttctagtagctttcttaatagtgattgagacaagtattgtggaaccttatgcataaactattgtgatacctgagacttctgtgcgatcaaagacatagtccttattggatccaaaaatatgctcaggaataggcacacggtatgaactattatgccaaggttttaactaggaatctcataaatctggaagatggaacatagagcttaaggaaatggcttcaaaactagcatcacttggtttcactatggtttggttgccaacacctactgaatttgtttcaccagaagggtacatgccaaaggatttatataatttaaattcctggtactagattagaagcattccaattcttctatagttatttatttcaatcttatctgaatactttgatttgatagaaggttcaatgttaggcaaattacttatgttctacagtgcttacacattcagcagcatatgctaaatggactttc

SEQ ID NO: 76587 - DNA, 415 bp, Glycine max
  Clone ID: PAT_MRT3847_40170C.1
ggctcgagctcatttccaatctcattttctatcggctcaaacactctcatggcatcagacaggatgattaggatcgggatcaacggattcggaaggattggccggttggtggccagagttgctcttgagaggaatgacgttgaactcgttgctgtcaacgatccttttatcaccactgatttcatgacatacatgttcaagtacgacaccagtgatggacaaggcaagcatttccatgtgaacctgagggactctaagaccctcttcttctgtgagaagccctgcaccgttttaggagtcatgaactctgaggaaaggccatggtgggaggctggtgcagattatgatgatgagctaacgggagttttcactgacaaggacaagggtcatgttcaattgaagggaggtgccaaaa

SEQ ID NO: 76588 - DNA, 610 bp, Glycine max
  unsure (1)..(610): unsure at all n locations
  Clone ID: PAT_MRT3847_40171C.1
cggtttcgtgggcggacgcgtgggtgaatatataaagaagcacaaatgtgttcccttggaagatcttgctgcagaatttaaattgcgtacacaggtattctatttctttcctattttattcctttatctgaatcagcgtatctatttcttccattaccatttcatttttcttatattggctgttgctacaagttttatgggagaaacagttaactaacaatatattatgctttgctagtatgttttatggtctatgtgcaacatctattgtatctattttatttttgtaacatatatttggactagggttttgtagagttgaaagaaaacaagaaagagttagggaaaacaaagatttgacgagagagaatttggtactccaccaattacttagattggttctataaacaagtcataagctgatcccacgtccctgtttctactaatacatgtatgattagtactatactaatatataaatcacccatcacttgagttgctctccaccaacaatctaatttctgttcccaaaagaaaaataataaggtgaaagaaagatgactaagccttaccctgaggtgactggttnttattttttattttcaatgct

SEQ ID NO: 76589 - DNA, 141 bp, Glycine max
  Clone ID: PAT_MRT3847_40172C.1
cggctgcgagaagacgacaaaagggagaggttggtgagcgaagtggaggcgtagagcgagaccgcgagaggaaggatatggtaatttctaaaattaaaatggtttcaaattgaaacgatgtagtttcaactataacctccg

SEQ ID NO: 76590 - DNA, 514 bp, Glycine max
  Clone ID: PAT_MRT3847_40173C.1
ctttttcgtccgcccacgcgtccgggaagaagaaggttcttccagaagttattttgcaaatgattttttaaaatgcaatatttttttaataatttcatttctaataaataaattacggtataaaataaataatattattatacataaattattagtaaacataattatgactaatatttgtaattccttttttacgtgcatgtaaatttaaataataaattatgtgacaatttagtataatttgaatcataaaaattaattaatttgtatattttataaaaaaatataaaatatttattatgataacatttaatttgtattacaaaacttaatatataataaaaatagttttaattttataacaacgtcaaaaataaatttaattttataataataactaaaaataaaataaaatttaatacatacttaatgacgattttgttcctgtgttggtttctttaattttactgcgctgctttttcgttttacacctatttggtttcaccttcatctc

SEQ ID NO: 76591 - DNA, 484 bp, Glycine max
  Clone ID: PAT_MRT3847_40174C.1
cacttcatcctaaagaaattaagctacaaagctagctagctagatatacatgggaaactgttgtgccagtgccacggaatcatcatctatggattggggtggtgatgattggggttctttttcatcatccaagagaaggaggagttcaaggaagaataaggtgtttgatgaagttcatggggagagtttagggaacgtggagaaggagaagctcttgggtgctttgagagcttcttctgatgccaatgggaaagtgaagataaagatctcaaagaaggagctagaaaagttgttgggagggaaagagaataatagtaataagcaaggtgatcatggacacgcttctgcggaacaagttttggctcggttgatattcgcttgagatcatgcgagtaacgaataccgtgatgttcatcataggtcatgggggcccgtgcttcagatgttacctgaggtttatttaatgggatcaaaggtggtggtg

SEQ ID NO: 76592 - DNA, 342 bp, Glycine max
  Clone ID: PAT_MRT3847_40175C.1
gtgatgatgactccaatggatgcttgttggaatggtcctttgccgttgaccctgtcaaagggttggtgcttgaggatctggttaggaagtaccacgtggggcttcagcttatggccctgaaaatggaggacgaaattgtaagtttggctagtgctatgtagcatatgaaataagattgtctcaaatactagtttgttctcttgtattagagtttcttatttacatcaaattaatttttctctgttggtttatcacattaattgatgaacttaatggcatatgacaatgacttgtaaattagaattgataccattagtttaaaaaatcaaaaaaaaaaaaaaa

SEQ ID NO: 76593 - DNA, 284 bp, Glycine max
  unsure (1)..(284): unsure at all n locations
  Clone ID: PAT_MRT3847_40176C.1
aggaattcggcacgagncncacttgntcgatcctgaaattcaattnntnttatntcatcacgngacttagacatnnatntacataagttctgtgaatgcanaacagttanntaataattatggtctagcttgccngagtttgactgccannagaaatgtaatggatgnnacagagttctggntggttgatgcaaaggtaggggatgtgttgtccaagncaagcaagtngacacctcggttcgctntnatcctgtnttaatgcaanatattagtcaatngtcgca

SEQ ID NO: 76594 - DNA, 896 bp, Glycine max
  Clone ID: PAT_MRT3847_40177C.1
cactctcgaattcatattctaattctagagaaataaaacaagagcacaataatgtcactctgttatattgcaagtaacaaatcctatgctaagatagaaacgcagatccagcaagttgcttcttcactctctgctcaatcccctgatctcagacaccactccctctgccattccaactgtccctcatcattatcatctccgacgtcagatacagcaggtccgaagcctgcaagtcgctccaccgctgctcgagcccacacggacctgggcctgggcctgggcccgggccctggcccggggagacaataatccggtgctccaacctccgttccacgcttgccctctccgtctcttgcgtcaacaacatcccgtcttttctgggacgcacaaaacaaccaaccccaacgctctcgttcttctttctcgatgtggcgctacggccgcccggtgaccttctaaacgacgtcgtccacctccgactctgctgctgctcctccgttgtttctccttcccccaccccaagcggacgaatgcctccgtcgagactccactatctcctgcttctccaggtccaaattcaaacgcacgcgttcctcttccttgttccgttgttgttgatgactctggcggaaaggctttgcgtcctccaccaggagaatgtcctccggatccacgcggtagcggcagagaggacacgtggaatgcgcgtccagccacgtgtccacgcactccacgtggaacgcgtgcttgcatttcggcaacagccggagaacctccgcggcctcgaacttgttcaggcacaccgcgcaatcgagtccttccttttgcccccgcagcgctccgaatctgaagaccggcaacgattccaccacggaccggtcaatgccggagttttt

SEQ ID NO: 76595 - DNA, 385 bp, Glycine max
  Clone ID: PAT_MRT3847_40178C.1
ggggaaagaaaaggcccaaaattgcctgggggggttacatccacaaatttacagacccaggggaaaaaaaaaaacattgcgggtggaggggcaaccaaaagggggggggttcagctacttggggaggggccaaagaacaaacaaattggggggccaacccccaaaaaaaaaaggaaggcaaagggaaatgtccatatcccgcccccccataatagaccaaaagcaacggccccagcaaaacctttggcatcctttttattaaacctttcccatacaaaaaataaaacggttccaacaaacatattaactgcaaaggaagccccaatgaaaaaaggaactgcccttgccattgggaaggggatgcactgggggaaatttttagggg

SEQ ID NO: 76596 - DNA, 167 bp, Glycine max
  Clone ID: PAT_MRT3847_40179C.1
gggggggtggttgtgtttttttttttttttggcccttttccaattaatattccttattctgtgtataattgtctactggaatttacaaatttttgggacatcatttggtaaattgccaacccaatacatttgtagttgttcaaaactttttttgttaacaaggtaat

SEQ ID NO: 76597 - DNA, 539 bp, Glycine max
  unsure (1)..(539): unsure at all n locations
  Clone ID: PAT_MRT3847_4017C.1
tattgaatctgtgattttaggataggaacatgctattattgaagtttggggcattgttgagtttaatgaatctgaattatgtctgtcttctgctaattgctctttgtttatcatttcatgtaagaatgggaatttatgatgccatgaatttatacaaggccgatgtgtcaactgtttaccttgggcttactacatccatagatacatttatccttacttgtagtacaaaangcaataagtattatataccaaattcaagagttataattcatcaaccacttagaacagctaataaaaaaactacagaaataatcattctcataacaaaaataacatatcacaagattaaaataaacaagatactatcactaattacgaataaacctgaagagcatatataattagacactaatcattataatgttatgaatgcttacaaaaccaaaaaatatgatgtagttaatantattattaataatagaaaaccgagattagttacaccaattagaaattcatcaccaccaccagaaactcgtata

SEQ ID NO: 76598 - DNA, 274 bp, Glycine max
  Clone ID: PAT_MRT3847_40180C.1
ttgtaactataccaattttacatatttttacctttctcttgaatcctgtaataatatgcactttttcaccaactggactcacaactgaaatcaaatctgtggaaatccaccatgaatcttttacccagccacatcctgatgacaattttgaatacaatgttaaaaatgtttctgtcaaagatttaaaccctggtaatttttcctaaaactcaaaggataaccctccaaaagaggctcttaactttacaccccaagtaatcatcataaaccaccc

SEQ ID NO: 76599 - DNA, 203 bp, Glycine max
  Clone ID: PAT_MRT3847_40181C.1
ggggaaaacagataagtttttttttataattaaagaaaatacggtataatgaagctccactagagagcggaaacaaaataataatatttgctttctcacatccactttgaaaaaggacatggaatatttcttcatcgtctcaagcattccatgagtgcacatcttgaccctctacatatattgctgaagtcggctccttttac

SEQ ID NO: 76600 - DNA, 221 bp, Glycine max
  Clone ID: PAT_MRT3847_40182C.1
gtcacgcttgcgagtactccaacaatgaacctacctatgctagatcttaacgagacatgggccattagctgctgctcatgcagaatatcttaaattcaaagggccagagacgtactgacttgcatccgtcatgccaatgacatgaaactcttccactgtcaacgacgcagccataatctacatgacagctaacacttacgacctcaatgaatgacctagta

SEQ ID NO: 76601 - DNA, 341 bp, Glycine max
  Clone ID: PAT_MRT3847_40183C.1
tcggttaatgaaaacaaactgtctccagttggcgggcttgagctgtacctacacttggcggtgcgctccggctgccattccgagggtataccctgaagcaaggggaggcatgcttgctgaaagcaatgtgattgggagactctctaccaagtctcaaaacagaacactggcaagtggggggtgtcttctgtatacacgcgaagttcgtatgcacatcaccaggatttatctcatacatgacggataggacggcacgattatacagggaatcgagtggctgtgaaatagggatggtatatgctcaggacttagggggttttgcaatggcgatggatcgagct

SEQ ID NO: 76602 - DNA, 166 bp, Glycine max
  Clone ID: PAT_MRT3847_40184C.1
gatttgaatcatgtggggcaccattgctaattttaaggaaaatctcaacaagatcgccctcgatgttcatgacgacgacgacgacgacgaaattttccgagcgtatggcgccggaagccctgccaacggcgacaactccgttgtctccgatcgccggagttcccgc

SEQ ID NO: 76603 - DNA, 1038 bp, Glycine max
  Clone ID: PAT_MRT3847_40185C.1
gtttagaacccggacgcgtgggcctcaatctccaccttcacaccttccaccatgacggatcgtgaccgtgatcgagaccgagaccgaactcgcgacagagaaagagaacgaagaagagataaggacgaccgtgatcgcgaccgtgaccgagcacgcagcaagagatctcgttcgcgttcgcctgaccgtggccgctcccgccacctgcgctctccctctcccagcgaacgctcccaccgccggcggcaccaccggacgccgtcccctgacccgccgcggaagcgccaccggagagactcgacggaggaggagcacaaggagacgaagaaagcggtatcggacttcgtggacggcatcgtgaaggagcagcagcagaagcagcagaaggataacggagacggaggaggagaagctgagggggaacgaggcccagttggagaataataaagatgtttgggattccccccggatttgactccaccaaggggaaaccggttcccggtgctgacgtcagcggcgtcagagccgtcaccaagcgccaaccgcgccagtatatgaatcgccgcggcggatttaatcgcccattgcctgctgagaagaatcgctagggttttcttttattcagacgagtaatatcctttggtggttgtttaatcatgtggatattggagccagaaacccttggtgggacccaaaatgaaagcttgcaagcgttccaccagttacttgtgtcgttcatttaatataccgtgctaccttcagctcaatatatcctgtgtaattggtgttaggcatgtttcattttttacccatctaattatctagttacattcatagaatttgccaaattttcatgcggtatgtacatttatctgcatgccttacgccttgggatgcacatgctttatgtaatcaagtgattctggatttcaatatcatgcatggccaatatccgtgcgagtttgttaactctctgccctaaactattagtagttttaatgcttctatctatgctgatacacatttgatggcaaagca

SEQ ID NO: 76604 - DNA, 1144 bp, Glycine max
  Clone ID: PAT_MRT3847_40186C.1
ggctcgagatttgaagattaaagaataatgggttgttacagagttcagcttgtggcaataatctcgttcatgcttttgctttcaaatacccacggttggggagatgatgggcatgccattgtttgtaagatagctcaggctcgcctcagcactgcagctgcaaaggctgtgaagaaattgttgcccaaatctgccaataatgacttggcgagcaagtgctcttgggcagatagtctgagggttgtcttcccttggtcttctgctttgcactttgctaatactcctgactccgtttgcaattacaaggacacaagggattgtgtagataaaaaaactggaattaagggacgatgcgttgtggcagcaattaccaattacaccaaccagctcctcgagtatggcagtgacactaaatccaaatataatctcactcaatcacttctattcctttcacattttttgggagacgtccatcagcccctacattgtggctttttctcagacaagggtggcaatgaaatcaatgttcgctggtacagaagaaagcaaaatcttcaccacgtttgggatgcaagcataattgagactgaagttgaaagattctatgatgacatagaagacttcgttgatgcaattcaaaggaatattacgaaagtgtgggccgatgaagtggaagaatgggagagttgcagtaacgatgacatatcatgcccaactatatatgcaacccgaaagtgccaaaaatgcctgtaaatgggcgtataaagatgccactgaaggttcagtactcgaggatgaatacttcttgtctcgttaacccgatagtcaatttgcggttagctcaaggaggagttcgattggctgcaactcttaatcgtatttttgacacacagtttgcagtgtcaatgtaatttattgaaagagagaatatgtcaacaatttccatgttattaaaagaataaagtgtcaactaatttgtagctcaatttcaactcctagaagtcattgggaggggacatgtgatgaggaattttacatcatatattagagatcagagatccatgtttttcattattaatgcattattgtaccaaataggagtgatcctgcattgagttctcgtgcaaacacaaattgtaacatc

SEQ ID NO: 76605 - DNA, 398 bp, Glycine max
  Clone ID: PAT_MRT3847_40187C.1
gggggggcctctcaaaggaagaacccctttgttttttcccttctcctgaaaataggtgaaaaacttccctgggggccatcccttctttggcttgggggccccttaatgagaaagaggggccccttgcctttttgggacttgcccgtttgcttggctgtacccaaagtttttttgcttatggagaatgctttttttctttatgcccctcatagagagaactatgttcccccatgtgtcaaacccttttgggggttttggttagagaagcccatttcttaagcttaagcaaacttttggggggggggtgtgaagggggaaaacccttttacacaattcttcatgctttttttaaaagccctgggtgggtttttgccaacaaagtttcacccaccctttcc

SEQ ID NO: 76606 - DNA, 112 bp, Glycine max
  unsure (1)..(112): unsure at all n locations
  Clone ID: PAT_MRT3847_40188C.1
ccataataaatagcatcatcgtgctggtgcctcctctctgctatattcattcttctgcttcttgtaatttgttgccaacaacaaacacttcaacttctggtttttnntnttt

SEQ ID NO: 76607 - DNA, 276 bp, Glycine max
  Clone ID: PAT_MRT3847_40189C.1
attgaggtttttaacaaacatcaacattgcagagcatttcgatgcatgtgggtgggcaaaattataaccacattcctgggaattgatcttcccaatagaggtatgtggtcctaataatggatttgaaatgaggagttctgagtgggcaaatcaaacttcatggtatttgagtttccttattgacaatccaaaacagtctacagattttagatattttctagggaacctctcaacattttgaaaatcctggttatactcttattacacctatttttg

SEQ ID NO: 76608 - DNA, 283 bp, Glycine max
  Clone ID: PAT_MRT3847_4018C.1
ggcttccttaagctccttagagctgctccttgcagttctaattctatcccctcaagctcttgccaactctgagaacccccccctgtgcggggcacccagtgagaagggaggaggtaaaaaggcgccggcacgacaccccccgcggtcgcgacctcccggagaaaacacgcaaaatagaggggcaccagcacacaagaacacaaagaacacaccccaagcggagaaaccccccggcgaccgaagcacaccccgagaaacaccccccgcgcacgcgcccgcggtc

SEQ ID NO: 76609 - DNA, 382 bp, Glycine max
  Clone ID: PAT_MRT3847_40190C.1
ttgacgcgcgggccgtgaacacaggtagccgctccttggaagcgttaccatacgcattcggtacatgagtccaagaagctagaaatgtcggacggctactttgcgtacgatatcttatgggactgtaaatcgctctctgtgctggtcacagacgcacagaatgattgtggtatacactcttagtttgatagctgaacactctgctaacagatataagatgacgtgccagataaagactaccacgggatacccaacaagactgtggccaatttgaggcacaagctggtgacatcatgcattgaggctcccactctgatagaaacaataggacttcagagggcgactgatgatagttgaactcctaaaggactcatgttggatc

SEQ ID NO: 76610 - DNA, 347 bp, Glycine max
  unsure (1)..(347): unsure at all n locations
  Clone ID: PAT_MRT3847_40191C.1
acaagagaagaccatgtgctgggcagaaacgacgngagaaaccctaattcgcaaacttgaaaccactaggttgggcagtgcgctgatggagaggtgactggaagacgaggctagagctaaacgcgtgcgtttcgacgacgatgatcgagagccagaacatggcgacggaggcggaaaatatttgcatgcaaaacatttcgatggtggacgacgaagaagggccaacttcgcgaggcgcatgagctctgtgactacgttaaggtcgccgaggctgatcgcacctctaacggggtttcagttgaaagacacgtacgggtttgttcagaatcggtttccaccgaaacgac

SEQ ID NO: 76611 - DNA, 250 bp, Glycine max
  Clone ID: PAT_MRT3847_40192C.1
gatacggtgactataaaccgcggaaactttggtgaaaggtgtgagcgtcattagtgaatgaagaaacaatgctggcttcttcactctccttcctccattcttgcacataccacctatgcctcttgcttattggcaattgtacctcctaaccccaaaccctttcactcatctaccattcgacgtctgaagccaaagacacgacaccaacgtacgacaggaccgttcgccacactctcatcgaaaagaaggt

SEQ ID NO: 76612 - DNA, 701 bp, Glycine max
  Clone ID: PAT_MRT3847_40193C.1
cccgcgtccgaagcctccaaaacattaatgttttttgaaggttgtccacggcgattgggttgcacggtcttgctgaagggcacatgccgtgaagaactaaagaaaattaaacatgttgtgcaatatgcagtttttgcagcctatcacttatctcttgagacctcattccttgccgatgagggtgctaccctacctaaagtgatagttaaaaactctactgacatgccagagagtgcaactgctgacactgatatttctatcatacctatctccttttctacaaccatgtgccaatcagaggctgacaatgcttttagagtggaggactttgttggccttgatttaaagcttgaaaatttgggatcagtgccagagcatcttgatgaccttagttgtcattcagttacaggcaccatggcagattatagagctgagagtgtactctctgattcattctataataatttaacttctaatttgactgtagaatcagattatttacatcagggcaatgaatcagatggagacactatatttagtacaagagaccttttgcaatcagaattgcaacaaaccacggttcaagaggagagggagtatggtgaagttgctgacttaacaaaagacaagacaaatgaagatgagctttctggtgaatacttttctgccactgatggtcatcagagcatattggtgtactt

SEQ ID NO: 76613 - DNA, 1276 bp, Glycine max
  Clone ID: PAT_MRT3847_40194C.1
tattcggcgccacgtcgtttccaaattccaaattccaaatgtggtcgcttgcagttactctctagttatagcttcccttccaaattccatttgattccgtcggagagcttgcgatggacgcttcttccttcaagattatattgggctcatcctccgtcgcgcgccgcaagatattatccgaaatgggatacctattcacgataatgactgcagatattgatgaaaagagcatccgaaaggaaactccagaagacttagttatggctctcgccgaagccaaggcagaagccatcttacaaaggctccctgttgatgactacttaaaggaagctgagccaacattattaattacctctgaccaagtggtggtgtacgaaggtgtgattagggaaaaaccaacaagcaaagaagaagctcgacaattcttgaaagattattctggaaggcatgctgcaactgtgggatctgtactagttactaacctcaaaacaggattgagaaaaggagattcggatcgtgtggagatatatttcaatgaaataccggatgagatcattgagaaactggttgatgagggaattactctcaatgttgctggggggctgataatagaacatcctttagtattgccatttgtcaaagaagtggtagggacaaccgacagtgtgatgggactccccaaagctctgactgaaaaactgttgaaggaggccctgtagcttgagctaccgttccaccttgtaggactgctaagtgttaagtattggcttaatctgtgaatcagaatcttaacctttgttctcaacatttttcgaaactcattgctgtcttttctggtcatagttatgtgtaggctggcatgtaccgtgtggcagttacacctgaactattattgggtattctgatcctagttaatcaattgggccatattttattagtaacataagactgtattgcgactattaatcggtctattagaataagaattgcatgttgacatctccagtcatgggaaatgaatttattcagattcagatacatattgaaaaatggaggctgggtggtttgaaatgctttcatactgtaattacggatgtcatcgaagatattgttgtaattttttcttcttggacacttttggccgcggaggagttagtcagatatgtcatcgactgtgaaaaggcaaagcatgattgaattatagaaaatcaaagaataaattatgtattaaaaaaatcctcttacggcatatggtgggtaacccaaatcttgattt

SEQ ID NO: 76614 - DNA, 329 bp, Glycine max
  Clone ID: PAT_MRT3847_40195C.1
cccacgcgtccgcccacgcgtccggaaaggagaggagattgcaaagagaatcaaagagatgatgaacaatgaatctctgagggtcggtaagagctgcagaaatggaggcagctaggaaggcggctggtggtgttggggggagttgccgaggatattattaacaggcaaattgagcactcgaactggtattctcaagcaccttagatatcgagaccgtgtattcatcagtgtgcacacgctaatgggcaacaagttgcaatggagtccaaagccatatactaaaatgcttacttctatgacggagacctagaagtgcatcccaaggacac

SEQ ID NO: 76615 - DNA, 599 bp, Glycine max
  Clone ID: PAT_MRT3847_40196C.1
ctacactctcgccgtcgctgattgggactgttgcagagagaagatagaaagcgatggagatcgttcgtcctcagaatcgcagaaacttgttgtcctcctccaacgaagccgtttctgctcccaccattcccctctatcgctctgctcccccacttgaagtcaggctcgaggatttcgagtccttcgccatcgatcgcctccgagttctcaaggggatttctgatggtatgtcacgggggaaaaaagcggaagaaatggagaatttggtaaaggacctgtggaaagtgaatatgagacatcaagaggcaactcaggttctgaacaaggatattatatctcattttgttctacgtctggtgtattgcagaacggaggacttgaggaaatggtttctttccatggaaactgcactctttcgctaccgttttcgtcttctgaatgctgaagctcagaggacagtcatggaagaatttgaccttccttacagggccgttagcaatgtggaatttgagagcataaaagagaaattgggacaagttgcacgttctatgggtcagccttcacctactgctgatgctatcttctacaaggtaccggtt

SEQ ID NO: 76616 - DNA, 316 bp, Glycine max
  Clone ID: PAT_MRT3847_40197C.1
atggttataacatgttttatttaatttgaggcatatgtcaataaatgtctaaacactgacaagggaccaggaaacaaaagaacggaaaaacacccaacacacaaaaaagacggacataagaccgaggcgtagggaaaaaaagccgaacgcgggagcagggaaagaaagaaaaggaccactcgagaaacaggcaaaacacaaacaagaaagggccaaaccccccaccaaccaaagggaagggggccgggacacgacacggacaagaaagccccaggcacggggccagaaagccacaagacgccccggagcaaaaagc

SEQ ID NO: 76617 - DNA, 513 bp, Glycine max
  Clone ID: PAT_MRT3847_40198C.1
ccaaattccaaatgtggtcgcttgcagttactctctagttatagcttcccttccaaattccatttgattccgtcggagagcttgcgatggacgcttcttccttcaagattatattgggctcatcctccgtcgcgcgccgcaagatattatccgaaatgggatacctattcacgataatgactgcagatattgatgaaaagagcatccgaaaggaaactccagaagacttagttatggctctcgccgaagccaaggccaatgccattatatctaaacttcagaccaccactaatcaacagagggttgatgaacccactattttaattgcagctgacacagtggtggtgtacgaaggtgtgattagggaaaaaccaacaagcaaagaagaagctcgacaattcttgaaagattattctggaaggcatgctgcaactgtgggatctgtactagttactaacctcaaaacaggattgagaaaaggagattcggatcgtgtggagatatatttcaatg

SEQ ID NO: 76618 - DNA, 280 bp, Glycine max
  Clone ID: PAT_MRT3847_40199C.1
cgtatgctcgccatctgggtcgagaattcggttagagctatgcctttgcattaagcttttctatgacaccaccttttacagggatctctttgggtatgttatcaccttggtttacatgaccttagaactgaccttggtactcgctgggacatcgctagcgatgacctagtctctaagatggtcttatacgggggcttttacgctggaggggcaaccttaccatcactcagggctaccacagccaatgtcacacatccacggacacgtacagccgaatgtg

SEQ ID NO: 76619 - DNA, 430 bp, Glycine max
  Clone ID: PAT_MRT3847_4019C.1
tagcataagaagcaggaggaggaggaggaggaggaggaggaggaggagaaggaggaacccaccaacccacctcgtaattctttccattttccttgatccttccttcctcctcgtaatttctcttcacttccctctctctaaaacctctgcaatttgtcaatgatcttgagtcctcgctttcccattcgtttttgaattattcctcttttccgtactctcctctttggtctttaccttaacacgcgcacacacacacacacacgaaaaaaaaaaatacaaaacaaaattgttgtagtagttttgtaccttgtgaattactattagatcacgcacttcgcaccaaaaaccacacctatttccttcaatttagcctcgattcttccgccctttgttcaaaggagaatattctatttatttatttatttatttt

SEQ ID NO: 76620 - DNA, 380 bp, Glycine max
  Clone ID: PAT_MRT3847_401C.1
ttgtgtctgaagaagttaaccttgatgatgccaagtgcaaggtattggagtaagttgagcatcactatcctgaaatatcacaaggagtcactggcaacctcaccaagcgaccaataaaaataagaactggcgatacaggtcacatgtttgactacgccacaaatgaaacaccagaacttatgcctctcaaccatgtccttgcaaccaaacttggcatgcagctcattgaattgcacaagaacgaaatctgaccttggttaagacctgatcgaaaaactcaagtcactgaccgagtatgctaaagatcatggtacaatggtcacagtgcgcatccatactgctctcatatgcactaaacattattaaacctttaccaatga

SEQ ID NO: 76621 - DNA, 565 bp, Glycine max
  Clone ID: PAT_MRT3847_40200C.1
tgtggagtgccgccgtgcttgggggggggggggggggggggggggggggggggggggggttatggggtaggaatcaactaaatgtatgttgataactaataaaggcccataacaaggatacgcggggtcaaatatagaaaagagttgcggatattaaaactattgaaatattcagggataatatgaaaggaaagagccaaaagaaaaaacgaagtgaactgggtggaccacagggccgacttggccagccacagggaccggttggccaactttgtgtacgtggtggacctaataaaatacccggcagcgggccaactatcttattagcgctaaggcgtatgttactaactaagggttttaatgtggtagtcggttgaatgcttaaaactatcgcgtgcccaagaagttgcggtggtggcggcgtatcgctcctaggtttacttaatgtaactattgtcctactgaccgaggtcacaatgctacttaaggagatcccactattgcgattcatatctgcactcgattggttgggtggtaaagaatccttaaggtggttcatccccaa

SEQ ID NO: 76622 - DNA, 324 bp, Glycine max
  unsure (1)..(324): unsure at all n locations
  Clone ID: PAT_MRT3847_40201C.1
cggaagacccgggncgacccacgcgnccggacgggagaagacaaacgacgggaggcggaaggagggagggaaccaagcagcaggaggggggggcggcgaaggaagagggaagggaccaanagaagacacaggcagggaggaggcacanaggaaaacagacacgaacgagggacanggcgcaagacacaaaggccaggagccaaanacaggcaaggaggaccgacccanagccagggcgaccgaaacaaaagagggggagaaggacacaggaggaaaccagagcagaaaaggagaacgaagacgaccacgcaagcgacaccagag

SEQ ID NO: 76623 - DNA, 1407 bp, Glycine max
  Clone ID: PAT_MRT3847_40202C.1
gcgggacccaagaggcactactcaacaataatccatggcctatggcaaaggaacagattaacacttcacgggcaacaacataaatggcttcttcaagcataacctgcacctttcactgtaacctccatccttcaatatcccttccaacctcagccactcgtttttccttatctttttcccaccctctactttgcacctacaatggcctttcccttcacccttcaagctccagcttcagagtttttgccaagtttgagaaattccaaagccaaccttcccaatcccaagagcctgacccttcaccctcactagaagaaaccacagaaacttctgtccaggatgatgaggaagatgacagttgcttgccttcagacttggagggtgcagtgcggcaatcaagcgaggacgaggggacatttgtatcttcaggagggatgagagccttagtggaacttttaatcccacaactgcaatttttagatgaagaagtatcgtaaggggaactctgggaattatcacggatttttttggatacactcataggaaaaactgaatccgacctagtcaaagtcctttttagagatgcaggtgtttaatcgcttctacaatatctaatgacagatgctctatttagtatagccagcttaagtgaccggaagcctgtagacagtgacgatgagatggggaatgttattgttcctaattatcagatgttagattatctatagagaattgcatgcaatctcaaagatgttcctgaaattactcccgtatttctgctgttagagtatgtaaatagaaaggattccaatctctcatatattccagaacctacgcccctcatcatgtggaatccacgcctaattagtgaggttgttggagttggatctattggcggaaagttaagacgtgtctttctaatctcttttacatttgtctatttcatgcgacctatgccaagatatttgcttgtcaaggaattcgagagccgtcctgatgctgatgacatcgagcttctatttgctgatgaagatcagaagtcagagcaagggcaaggtttgcttgacaaagcagcaggcatattctcttcaattagccggatgatgaagtctatatgatgattgatgatgatctttcatacttgttctcatcattagtgcatcctgcccccattcatgtcaattatatgtttgctccttcaaaattaattttagaaaccttacagttataggcttacagcttttatcgtatactacaattcgtgtatacatattatgatgtatttggatatgtgccagattgtcacttttgttagtcaagtgttgatccctactttctattgaaaaatgtttttgttttgccaaaaatgttaaaaaaaaagaaaaaaggaaaaaaaagaaaaaaaga

SEQ ID NO: 76624 - DNA, 257 bp, Glycine max
  Clone ID: PAT_MRT3847_40203C.1
tccagaaattgcttcttgctttgatcgattccttcggtgatcggtgatcggtgatcagtggtttggtgttgttgatagaaaaatgcattccagccctttgcttcttgaggaacccattaggatggcatccattcttgagccatccaagcctgtcagcatttccttctctcactctttcttgttcgtttctattttcatgtgtgacgtgttctaacttgtaagcactgtgatcatgagaaagcaatcaacttttggtg

SEQ ID NO: 76625 - DNA, 220 bp, Glycine max
  Clone ID: PAT_MRT3847_40204C.1
atcaaatgggacaaaataacttaaaaaaaagaaatggagattattcattattcagcagcgtctagtagttgcgtgccatcgctgcaccgctcttcaccttctcgctcagattctaacacccagaatctttttcttacgagacgccactccaaacctcatgctggtctaggtgaggtgccaacctgcaagctcggagggcttcggcgaacccaacatacac

SEQ ID NO: 76626 - DNA, 215 bp, Glycine max
  Clone ID: PAT_MRT3847_40205C.1
actacaaccgatgcgtatgacgcacacagggtggtatatatagctgggagggtcaccagattgatgagaaaagatagtgtggaacgggaggatgtgattactaataacttcaatatatacacgctacaggctaatgccagtgttttctttttgaaatcaacttatgagttcacttccatgctttctgctaaatcaccaatgtgtccatcttttaa

SEQ ID NO: 76627 - DNA, 699 bp, Glycine max
  unsure (1)..(699): unsure at all n locations
  Clone ID: PAT_MRT3847_40206C.1
cacgcgtccgctaacatgtcccatccagcatggacaaagcacatgcctgttttatcttgtgctaaaatgcaacttttgctagaataacggggaaagcaagaataaatcctgaatactttattcaaggaggtttgaggatcaattatctcaaaatattaagctattagggaagtttagtttagtatctctgataggaatctatactttaatgaatgtgtgtaaatcatcctttaatatgattacatttcttagtccgagggtggggtttttatgtaataggtttaaatacctcttgtattcccattcccatatgatagactgagggaagtaaatagaggtatagaactgccaagggcatatgggagtgctacagaagggatgatttacacacattcagaatgcttggngtgntgcaatatatatagccaaggtagcatttgcttgtgctaactgttccttattttaagtctagagcgggaacatgcctggttggggtagaacaaggacanactagtgcaggtagtgaatgaatacaaaaaattgaattaatgcagaaacattagctttgaagtttcccgtggagggtgggtactaccaaatttatagtatctatttttaaggaaatttcttcatttcttggccacgggttgcttgtgattttgtctcttggtgaagcatttactaatgtttgagtaattg

SEQ ID NO: 76628 - DNA, 345 bp, Glycine max
  Clone ID: PAT_MRT3847_40207C.1
aacaaaaggccccgggccttaattcatgggaaaaaaaacagggttcattcttaaaagggaagggggggggtttcaacccccctttttggggagggggcaaaaattcaaaaaaaaaaaaatgggggcaaccatttaaagggtcaggcaatttataaggtaaaaaaagggcccaaacttggggggggggaaattaaaaaatttggggaaaaaaaaagctttttagctcccttccaacaagggggggcccactatccagggcttttattcaggaaaaggatccagtttaacggccccatacttaaaaaaaacagggtttggaggggccggcctaatttggctcccccc

SEQ ID NO: 76629 - DNA, 410 bp, Glycine max
  Clone ID: PAT_MRT3847_40208C.1
tatttttgggtttttggcataattctagatacgctttgccccggtccaccactacgattgaatgttctatattacttcctgataggctgggaccactatatagtgatgtcaattttataaatattatgaacattacatgggaatttactctctaattccttccacaccactttaaaggaccacttttagtggcatctgggtattgtcactgttattattggcatactttgtgcatcttacaatgagttgtgttttcttatgctgcctagttgttctaattcaattatcttctactagtttaggtgggatatattatgttttggttgggtagtggccattgtcatatataatatacctgctaaaaaagatttaaggagaggtcactcttttgggcatattgaggggtacca

SEQ ID NO: 76630 - DNA, 1489 bp, Glycine max
  Clone ID: PAT_MRT3847_40209C.1
cccacgcgtccggacgacagaaggggataacgttatccattaacaaggtcactgatttgtgcaaatgatgtctttgcagaggaccaagttgtttccttttttcattgtccttgtttccttcacatgtagtctctcccttgctatgtccagtaaccagttggagcagtttgcttcggaggaagaagtgtttcaactattccaagcgtggcagaaggagcataagcgtgaatatggcaaccaagaggagaaggcaaagaggttccagatattccaaagtaatttgaggtacatcaacgagatgaatgcgaagaggaagtcacctacgacgcaacatcgtttgggtctgaacaagtttgctgatatgagtcctgaggagtttatgaaaacctacttgaaagaaatagagatgccctactccaacttggagagtaggaagaagctgcagaagggtgatgatgctgactgtgataatcttcctcattctgtagattggagggacaagggagctgtcactgaagttagagaccaaggaaaatgccaaagccattgggctttcagtgtcacgggggccatagaaggaataaacaaaatagttactgggaatcttgtttccctatctgtacaacaagtcgtggattgtgaccctgctagccatggttgtgctggaggcttttacttcaatgcgtttggttacgttatagaaaatggtggcattgacacagaagctcattatccttacacagcccaaaacggtacttgcaaggcgaatgcaaacaaggttgttagtattgataatcttctagttgtggttggaccagaagaagctctcttgtgccgtgttagcaaacaacctgttagcgtgagcatagatgcaactggccttcaattttatgcgggtggagtctatggtggtgagaactgctcaaagaattcaacaaaagcgactcttgtttgtttaatcgtgggttatggttcggtgggtggcgaagactattggattgtgaagaactcgtggggaaaagactggggagaagaaggttacctcttaatcaaaaggaatgttagcgacgagtggccttatggtgtttgtgccatcaatgctgcacctggttttccaataatcaaagaggttgcatcgtcttcagctatatagtggactagagcatggagtactatccatccttttgaaacctataacctgtaacagcattttgtagtgttatcttgtatctgggcatattactacttaagtacttgccctttctccaacaataataacgtttatgaactacaagtgcgtttggtaattcgggttaaggtgctttaataaaataatggatggtggtggtagttctacctgttggctttggaataaagaaattttaatatatattctaacagaaaaaacagagtagtataagcttaggtttgttgatattttggccttataatataagaaccaaaatgtagcagttgaatgcacaagcta

SEQ ID NO: 76631 - DNA, 832 bp, Glycine max
  Clone ID: PAT_MRT3847_4020C.1
gaatttcaacgttctggtaatgaccatttctgtttctctcatatgttgttttctacttttacttttgatcatacacatttcaagccctgctgatatatttaaataaaacaaagagcaaaaaacaaaattttcagttagaatggattgtgggttttctcctttctttttttttttttttgttttcattttgagaagtggggttgttgttttataatgtcttgttttatcagaaaaaagttttagttcttcttctgatcaacttttttttccctggttagtttgctccttattcttatgatttgaactatttgggttcttttttacatgcatgtcaaatttgatcaaaagggttttcccttttttgaaggaggggctgtttgatcctcattctgtgatgattaagtttgatgctttgtttttcgtgtcattgagaaacatgtgatgggtatttctggaaattgcagaattcttcgtccaataagattagacccttgtgttttacttaatatacagtttcatcacaaatatgatcatgattattgttaatcaccatctttctcggtaatggttggcaaggagagtttgagaactcatgaggtcttgaactttagctttgagaagcttatgatggttgactgtggtggaaatagtgggaaaggagtgaactttaaagcgggggtgatcacagaatggaaggatattccagttgagcttttgatgcagattttgtcacttgtggatgatcaaacggttatgatagcttctgaagtttggccttggttggaaagaggcaatttgctttggcctgactcggttatcactctcatggtgt

SEQ ID NO: 76632 - DNA, 297 bp, Glycine max
  Clone ID: PAT_MRT3847_40210C.1
aaaaaaaactgggtttgaaccggtttcccttttggccatctgactaaagataaccggggcccccttttacaattttttggaccaaaaataaagaggtgttccattgccttttctccaaaactgggttgtttaaaaaaaccccttcctttttttttttttttccaacaatttttgggggaagggttgggcccaatttcgagctttcctacccctgcgtggaaagtaataattttttttttggggcccccaaatttaattccctggcccgggttttacaacctgggggctgggaaaacc

SEQ ID NO: 76633 - DNA, 268 bp, Glycine max
  Clone ID: PAT_MRT3847_40211C.1
ggtccagacaacggccaccgacaccttcactcgggttcgtggaaaacaacttttgaaaacgagatgttaacgaggagacagaggagatgagttcagtaccaatcaatcgtttgaaatcttttacttttccatttttgttcgttcacctaaatttgttaagtgggtatcattcggatagacttattgaatctggatcttgtttccgaggatgaaggtgaagatttggatgaagatatatctatcgaggagggttagtctatggatgagg

SEQ ID NO: 76634 - DNA, 284 bp, Glycine max
  unsure (1)..(284): unsure at all n locations
  Clone ID: PAT_MRT3847_40212C.1
ccaagactgatcccccgaatccggatctctttctggatcctcctccacaacacactccatctcccaaagtcctaagccctttccacgcagagtgctggntnaacaagtcgttgcaatttcactatcaaaaccaaaacttacacaattttccattacttttcctctaaatcttattattgtcattattattttgtcacattccaagttcagatcctcaactcaattctctctgtgaatcattggagccttcaaacatcaccacatttcgcccctcatnactccat

SEQ ID NO: 76635 - DNA, 628 bp, Glycine max
  Clone ID: PAT_MRT3847_40213C.1
tttttttttttttttttttttttttttttttttttttttttttttttttttttttttttaaatttgttgagtaatgatcaattccacaaattaaaaggcgtatgtatggaacactctacacttaatttagcatcacaaataacaaacgtattcacacgtcccacaactttgttttcgacgaatacacacatcaactaattagaatattataaccgtaagatattatttgcagaagcctattgtctagttacaacaacctttttacacttcaatcatttgaaactgctgtaagagatacttccccttttgctccttcttccaccttattccactgcttgtcaacatccacagaacttttcttgctctcgaacacttttgccgtgtcataagaagcatgtaaccccaatagcacatagtataccaagagaaaccctgtccagaccccaaacctgataaatgaatctttatcaatagagccaagaaggaatatgttaatagcaatagataaagaaggtagccatggaaccaaaggcaccccccaaagtttcggttgctttgcctgtggaacaaaaagccaaagacccccagtccctaaaatccacaacggcacagaaactgcatacccaac

SEQ ID NO: 76636 - DNA, 1274 bp, Glycine max
  Clone ID: PAT_MRT3847_40214C.1
aaataaaacatctgtggagacaaaatctttgtgaaagcaaatatgggaggcaactggttatgaggactgatgattttgaaaagcctgctcaaacaaatgtcctctgtagcaattggaaggaatggaagcaacctatcatatggtttcaaggaactacagatgctgtggcagctcaatttttcttgaaaaatatacactctcagatgaggattgctgcttttgatttatttggtgatccacaagttctgggatctcagccgaatgtatttggagagctcttgagagttctcatatctccttcaaaagatgttgaagcagctgtcaattgggttattggtggtgaggagaatcctgacatctcattgcatatgcggatgcttatgaataggtccataagagctgtacaggctgcattgcattgcatcaaaaaagtcatagagagtcagcacctaacttctagaccaaaggtggttgtggtgtcagatacaccttctcttgttaaaagtatcatgcccaacataagcgaatttgcacaggttctttattttgattatgaaaagttcaaaggaaatatctttgaaggtttgcccaagttagattttagagtgaaggattggggtccagcacccagatgggttgcttttgtggatttttttcttgcatctcgagctaaatatgctgttgtctctggagctcatcggcgcgttggaactaccctatgctcaactaatcgctgcactggctgcaacacgcaatctgggagacaactcgtctagttcaagtttttcatttttgagcagtttccagagtactatgttgactgaaggtttaaagaatcaagttggttggggccatgtgtggaacagatatgccggaccattgagttgtcataaccagaccaaccaatgcgctttcacaccacttctccctcctggctggtgggatggcttatggcagtcacctattccaaaggatatcagccgtcttgctgcctatggcatcaaactgtctggtcttggcacagttgattatgattcccttcaaaattactgtagtacaaggaaaaatgttgagagaaccgtcacattcaatttgtagcgtttggaagacacatttcattgtattctttatggtataaacataatttattagtatagaatttgttaagtcattcttttcactatttgagttttctttttagtacatctgtcaatttaaatgtaaccaaacaagttatatatagctttaaaaatgaaattttgagtgttgaagtt

SEQ ID NO: 76637 - DNA, 386 bp, Glycine max
  Clone ID: PAT_MRT3847_40215C.1
gcacgaggatcgtcctccgcgtcagggacgccttgcgaatcaccgcttttacaatcgcactccccacagtctacttcactgcctcaaatcccttcatgccctcctcatcgatgcagaggaaaatgcgattgcgaaagtttctttcccgttagtttggtgggacgcgagaaagaggattatttgaaaggactgtggtaaccacaacaatggcggctacaaggtgtcatcggcgacgattccagtcgaatagagatcgaagactgatttttttcctttttcctttttttttaagttgctaggggaatctttggcattgcgaaattgcctgtaattactgattacctttgtttttgtattgggaattaaagagaaaggggaagaagata

SEQ ID NO: 76638 - DNA, 371 bp, Glycine max
  Clone ID: PAT_MRT3847_40216C.1
acgagcaagcacaatgacaaacaattttccaaatgaaaaggttgagtcaagacacacatttcatcatctccctaacacaagccatcaccagcaccaacagcattcctctggctttgcagatactcattatgtaacaaagtatgaagccgatgcaatgaaatctgaaccacaacctatgaagctagtacgcactggttacattcagtacaaccagttgattttgcacttaaagaaacaagtccctatcttggtgggggaagagttgttagcggccgtgttgttcataaagacaagactgctagtacatatgatcttgtggaaaggatgtactttctgtatgtcaggggtagtcaaggcttcgtgagctttcc

SEQ ID NO: 76639 - DNA, 559 bp, Glycine max
  Clone ID: PAT_MRT3847_40217C.1
aaagacggggggttttttttttaaaacccataagggaaaggggcagcttgggtctttgtcaaatcaatctttggggaggggagtaactgtttgaaagcacacattgccccatacaaattaactgatcaaaccaaaactttttgggggggaacacaataaacatccctggggaagcagccccttgggacatttaatttaaaattcctttcctttttcctccccctggccttccaaaaaatccacaccaacctcctaaaaatccttttttaggggagccatgtcctcacgggccttaaaaaactcaccctttttcatgcccttccccacataccagggcacaaaggcccgcttgggatacattaaataaaacttgggatctaggggagcccaggcctcaaaaaggggtgggggggtgctcaacatgcacacagttttttggaccttggccaggtcaccaccgggtaccacagggggggggggggtgttaatgccaaccttgaagccgggggggccccagtccaaaactggatgggccccttggtctttgaggggggaatgg

SEQ ID NO: 76640 - DNA, 346 bp, Glycine max
  Clone ID: PAT_MRT3847_40218C.1
atggaaattgtggagaagagctcagttttattttcttcttttcttttccttctcctttactatggagctctcacttctatttaaatatataaaagcagaaaattaagcttgggccttgcatgaaaatatacagaagacacttccgacatataaggcccatgctattcgcacctcgttaacttgcattgatttttaagggaaaaattgttgagatggactacgaaattgaatccaaaatttaaattaccttaatatgttgggttgcgtaaaataaaatgggattatttgattcccttttctcttcattttcgcgggttctttttatgaccatgataggtaattaaaa

SEQ ID NO: 76641 - DNA, 498 bp, Glycine max
  Clone ID: PAT_MRT3847_40219C.1
tagcatcaaatcacctatcctcttttgccgctcccttctgatccacagccgtccttcaaattccggccggccaatctgcaattccgattttccttcgatctcttgcgaatcccctttctgcaccttcctagggtttcattgacaacatgactcttttttatgacgaagacgagaatctagctcaatttctggaatcagaagtcctctcggaggtctctgacaaggaagaggaaaatgtggaggaaccgaaagcaaagagaaagcgcgtggaggaggatgagattactaagcaaaaacaaagttctgattcatcatctgcgcccaagaacattgttgtcagtaatggggtggtgctgagaaggattgagactggttatttcagtcaaatcccacctgagcttttcaatcatatccttaaatttttgtcctccgaggaccttgtttcttgttccttagtttgtaggtttttgaattatgctgcatcggatgaggcattat

SEQ ID NO: 76642 - DNA, 219 bp, Glycine max
  Clone ID: PAT_MRT3847_4021C.1
ttcggctcgagctcattaattgctagactggcacttcgttgcttggtgatgtctctttctgttgtcttcactcttggtcttgcgagagaaagccatgccagagaagaagatttttcgcatgctgtatggctaaatactctcattccatgttcattgcgagaccttctatagcctggctctgtcagtgatgacatcgatgttcaccctatgctacttgct

SEQ ID NO: 76643 - DNA, 255 bp, Glycine max
  Clone ID: PAT_MRT3847_40220C.1
cttacgcgttttcgaacctaaacaacgatggggggggatgggtgctacggatagtagggtacaagaaggagcaacagcaggtgcttttacaggggctaagaaggattaatatatgagcgcactatagatgtataccgaataacagatgaatcttcatatcaaatggtgtagacactaacttgccacgacattgaatgctaacttcaacactctggtgaacttaaaactggactttaactcataaagcacaagtgt

SEQ ID NO: 76644 - DNA, 800 bp, Glycine max
  Clone ID: PAT_MRT3847_40221C.1
tttggtgcgttcaggtgtgttaccctaattgaggtcatgtttggcttgttcttgaacttgtggaggctgcaattgacttcttgttgcaattgatggcaagtactgaatggtatccattgcaattataattgttgctgaagagagttaaataaagaccaggaatttcactgccagaaacgttcaatattatggagattgaagccgacgcaagagatagttctctcgttctgctcaagcaaggagctgaagctagggtttttgagtcttcttttgtgggaaggaaatctgttgtcaaggaacgcttctcaaagaagtacaggcatccaactttggattcaaaattgaccctcaagcgcttaaatgcggaggcaaggtgcatgaccaaagcaaggcgacttggggtttgtactcctgtgctgtatgctgtggatcctgctttgcacacgttaacatttgaatatgttgagggcccttctgtcaaagatgtgtttcttgaattcaggtcacatgttgtcaataaagagtggctggatgatattgcatcccaaattggtgatgcaattggaaagctacatgatggtggtcttattcatggtgatttaacaacatcaaatatgttactgaagagtgatacaaagcagttggttcttatcgattttggtttgagcttcacttcaactctaccagaagataaggctgttgatttgtatgttctggaaagagctcttatttcaatgcattcgtcatgtgggaatgtggctgaggtttactcaactaccccagagatcaatgccatctaa

SEQ ID NO: 76645 - DNA, 307 bp, Glycine max
  unsure (1)..(307): unsure at all n locations
  Clone ID: PAT_MRT3847_40222C.1
aaaggggcggcaacggaacaagagcccacgaaaagaacaccggaaaggaaaggcaaacacaagnccagcccgaaccaaanagacgcaacacaagcaggacacaaaggagggaaggagacagaaaccttttttttcatcagagnctgcagctggcccttccttctttggcggcgccttggccgcagcaggagcaccagacccagcagcaggagcagcaacagcagcgacagcaaatggactgggacccttcagataccccctgaccttggccgcctcagggaaagaagaaccgggctcaacccgcaca

SEQ ID NO: 76646 - DNA, 1393 bp, Glycine max
  Clone ID: PAT_MRT3847_40223C.1
ccttccttaggctgggatttcggctcgagcttgaattcgggtcacatggtgtcaataaagagaggctggatgatattgcattccaaattggtgatacaattggaaagctacatgatggtggtcttattcatggtgatttaacaacatcaaacatgttactaaagagtgatacaaagcacgtggttcttattgatcttggtttgagcttcacttcaactctacctgataacaaggctgttgatttgtatgttctagaatggagattgaagccgacgcaagagatagttctctcgttctgctcaagcaaggagctgaagctcaattgattgctaccctttgtgtattcaagggatgtaaactcaccgacaacatcccaaaaagttactgtctttatttttccatcgaaccaaatatatctgtggcttcaatgaccttatcatcaaacttcactagctttgtcaatattggagcaaggcctaactgtgaaattgtatccaagccatcaaggttttcagaatttccagtgaagggttcatttttcatgtcaatgatgatgtcatcggtggatgagctaactctacaactgcattcagaggctagcccattaagcaagctactttgttcttcatggcatgagagggtttttgagtcttcttttgtgggaaggaaatctgttgtcaaggaacgcttctcaaagaagtacaggcatccaactttggattcaaaattgaccctcaagcgcttaaatgcggaggcaaggtgcatgaccaaagcaaggcgacttggggtttgtactcctgtgctgtatgctgtggatcctgctttgcacacgttaacatttgaatatgttgagggcccttctgtcaaagatgtgtttcttgaattcaggtcacatgttgtcaataaagagtggctggatgatattgcatcccaaattggtgatgcaattggaaagctacatgatggtggtcttattcatggtgatttaacaacatcaaatatgttactgaagagtgatacaaagcagttggttcttatcgattttggtttgagcttcacttcaactctaccagaagataaggctgttgatttgtatgttctggaaagagctcttatttcaatgcattcgtcatgtgggaatgtgatggatcagatacttgctgcatacaggaagtcatcaaagcaatggtcatccacattgaacaaacttgcacaaggttataccctccctcttatacttggcgacaaagaggacggaagaggaccatggttggatgaatctttatcaaatttcatttcattattgagatataaaagagatggcaactatggatgttatgtaatttatttttacattgtctctttattgcatatttgtagtctgcttttctaa

SEQ ID NO: 76647 - DNA, 541 bp, Glycine max
  unsure (1)..(541): unsure at all n locations
  Clone ID: PAT_MRT3847_40224C.1
gcacgaggtctgctcaacctcggctgtgccactggccacccgtcgttcgtcatgtccaactcgttcacgaaccagacgctcgcccagatcgagctctggacccagaaggactcgggcaagtacgtcaacggtaaggtgtacgtgctcccgaagcacctcgacgagaaggtcgcgcgtctccacctcggcaacctcggtgccgagctcaccgtgctctcgaaggagcaggctgactacatcggcgtgtcggtggagggtccgttcaagccggagacctaccgctactaagcggatccccaggtctccgtccccaatgcatttcccgtggcgaccgcccaacgcggccttcttaccgcccgaagccgccgctctcagtgttggaaccttgctgtgaaaaagcatcnagcgagtcccattgagagcgaagctagtatcnacgaaanacntggcantgctgactgcgaaacacncngtctccccttcagtggctccgcgtgcnttcgcatcaccactttaattgantgttacctccctcttttcc

SEQ ID NO: 76648 - DNA, 297 bp, Glycine max
  Clone ID: PAT_MRT3847_40225C.1
ggcggcaatgcgccgaggcttcaatgtctgggaggacagtgaaattcgtacacatgatcagcagcttctatgaaagataagtgacagagcggcctataccactgacatatacatgtggaaggagagaagaaccaatttggggaacaacgttacggaaactgttcgccttagtaagggacactggtgatgccggagcttatggaccaaaagtggggatcatgaacacaccaccaagggcgtaggtggttaagactgcaacgtcgaacatgaaagaagtaggataacccagacaaagcc

SEQ ID NO: 76649 - DNA, 371 bp, Glycine max
  Clone ID: PAT_MRT3847_40226C.1
tgaatcagcaccacattcacctgagctttttgggaagattccaaagcatgggtttccttgcagcattcactggtggtggtttccttggcatgtcagaaatgcttggaaaccccattaaccttaatggtggcacaagggccacttcatttggctctaacccttggctctttaagactggggctcttttcttccaaaagaaaggctgaacttcaaaaaaaagctgcaactgcttgctcctgccaatgatgagcttgccaagtggtatggtccctgacagaggatcttcttgcctgagggtctcttggaccgatctgagatcccagagtacttgaccggagaagtccccggagactatggttatgacccatttg

SEQ ID NO: 76650 - DNA, 460 bp, Glycine max
  Clone ID: PAT_MRT3847_40227C.1
tctttttcgcgtgtgctgacgcgggggccgggtgattattgtcggattttgggagtagcaagaagagaagctgaaactgacaatcaacacaataattaattgtaccacttaccatccgatcttgatatgccaacagagagttcctgaaaattgacaagcgcccttttcaggatcaaggtagagaattacgatccaccaatgggagtagttctttgttgcagttgtttgcaactggagcaccatgaagacggtcagaaagctggtggaggagtggcttgcgttgatcatatctgtgttcgagctctgtccttgggacaacctcggtacagacagaatgcttgggccaagacttcaccgtaaacaaggtttttttcttttgccgtgatctccctgacctatcctggtacctccactggaactttaaccagagcgcatggaagttggacattgtattcagaca

SEQ ID NO: 76651 - DNA, 1303 bp, Glycine max
  unsure (1)..(1303): unsure at all n locations
  Clone ID: PAT_MRT3847_40228C.1
gacacatagaggttggttttatatctattggtttggcaaggatgataaaaaacaaacaaataagaacttctgagaaaatatcttgatgagttcttgatcaatcgctcattgtaaaaggatgagtaggaatgtgtagtagcttaccttctgaatttcttacatgtgcaacaaattaacnnnnnnnnctcgagccgcatcccactaaagggaaaggagggacggtgtatgatgtggatcttgttcagaggctgttagagcattttattattcaggaacagactgaaagttcaagtccaagcagacagtccttttctgataaacagcatatgggaatgggatgcatcctaaatgccaaggcaagagtggcaaggcttgttgacagttatcttacagaggtgtccagagataggaacctttccctcaccaagtttcaggtacttgcagaggctttgcctgagtcagctaggacctgcgatgatggactatacagagcaattgattcctatcttaaggcacaccctacactttctgagcatgaaaggaagcgactatgccgtgtaatggattgtcagaaactgtccattgatgcctgcctgcatgctgctcaaaatgaaagacttccattaagggttgttgtgcaagttctattcgcggaacaggtaaagataagcaatgcactagccagcagttctgtgaaagatgttgaatctgagagtcatgcaatggttacaaaccggaaaacacttctcgaagggacaccacaatcattccaagaaggatggacagctgctaaaaaggacatcaacacactaaagtttgagcttgagagtgtgaaagccaagtacatggagcttcaaaatgatatggctagcttgcagaaacaatttgataagatgctaaagcagaagcatacttctgcatggagcagtgggtggaagaaactcagcaaacttggaaggacaacacatctagtagaaaatcaggatgattctcctgagattcaagattcacttgaacaaaacagaaagactactagaaggtggagaaactcaatatcctgattcctgaaatatgagaattcactatttctttgaaagtgtttctccttccctcttatagcaatttctacaagattctagctaaattgtaatttgtcaccaaagctagtcatatttttcaagtgtgaattctactggcactccaatcacgactaaatcctccttttcttatgctgttttttcattaaaaaaaatgttatgcgtgtatatttaaaaatctatagttaagtttcgttacgccggag

SEQ ID NO: 76652 - DNA, 259 bp, Glycine max
  unsure (1)..(259): unsure at all n locations
  Clone ID: PAT_MRT3847_40229C.1
ccttgggaaagaaattccccctaagaacccaaaaatatttcactttgggaagaaaagatgtgaccagaggagaggcaaaaaggggtacaaaggtcaaaccaacacaacagttattttttggggctgtagggggncaaaaaacccaactttaaaaaaagggggggaaagggggggggggggggggggttatgggggggggaacaccacttanncccaaaaaaaatcgagccacccacacagcccgcagcaaagagggagc

SEQ ID NO: 76653 - DNA, 232 bp, Glycine max
  Clone ID: PAT_MRT3847_4022C.1
gtaaaacaaacattaacgcccttatataaagcttgcataaaacaaggggggaataattgacctttaagactggtgggggccaaaacaaaagggcgttgcattaacccctcccgcccaaattatattagtttgttaaagcccccaaaaaatttaaaccctattccgtaataaactatttgccctttgacccaattttttttaattgcgcgtccatttgaggaaacttttttgg

SEQ ID NO: 76654 - DNA, 507 bp, Glycine max
  Clone ID: PAT_MRT3847_40230C.1
tacggctgcgagaagacgacagaaggggaaggtcacggcgagacgagccgtttctaattaatgataggtgtcaagtggaagtgcagtgatgtatgcagctgaggcatcctaacagaccagtagaattcacacttggaaaaatatgactagctttgtttacaatttagctagaagcaactgctataagatatgaagagggaagaagaatcaatttcaaagaaatagagaattctcatatttcaggtatcaggatattgagtttctccaccttctagtagtctttctgttttgttcaagtgaatctggaatcttaggagaatcatcctgattttccactaaatgtgttgtccttccaagtttgctgagtttcttccacccactgctccacgcagaaatatgcttctgctttagcatcttatcaaattgtttctgcaaactaaccagatcattttgaagcttcatgtacttggctttcacactctcaagctcaaactttagtgtgttgat

SEQ ID NO: 76655 - DNA, 491 bp, Glycine max
  Clone ID: PAT_MRT3847_40231C.1
gctgacaatgtctcttagaaagtcaaaaacactataactttgtacacaatgtttcaaatgcaatgaattcatggtctttgctcctctctgaagggttacttcataagtgcggtcacaaagatcttgcaaaaataactccagagctttagaaactaaaacaggaactgccaacgctatctttccgacatcctcatctgcttgcattatcttctttatccgagcagcggggaaacgggtatcgagcttcttccgcatggtatcgaattagggatcaatcaggcacagaggaacgaaaaccctcgaaaagaagtagaattagaagaaggaggaggagaattggaagctgagaataggaaatgacgaagcggaagacaaaatcaaaggaagcgtgcgtgcgtgcgtggcgatctctcagatccgaaggtggctctggctgtctcagaaaccaacgaggttctattactattgattcagccggacgcgtaggcagt

SEQ ID NO: 76656 - DNA, 814 bp, Glycine max
  unsure (1)..(814): unsure at all n locations
  Clone ID: PAT_MRT3847_40232C.1
gtacaacctcgcggttccggtccggattcccgggtcgaccccgcgtccgttttcggcgaccgcaggattcaattccgatgcgattccgagcttgttagatccacgacaaggtttcgtttcccagattcttttgtaaaaaaaaattcttcctctgcccaacaggttagattatcgttatttctctcgcaattttcacttcgccgacgtgtctctgtgtcgattcgttcgtattgatatcgtctcgttttaattgtattttattgtgtgaaggaatttgagttgtagtttggtggaaatagttggttgtgttttgcagatacggaccgcgaatagagacgtagggtcttttttcccctcacatgccatggcgatgtttttattgaattttcattcaatttaatgaaactttcagtgatgagagtcaatagtagggtgtttgaattttgctcatattgtatgattggtgtgtattactgtcccggctatggcctctgtacttgtttgttcctaataattgaggcttttaaatgcttttggcatttgttgtcctgtttctctttttatgtttatgaagtttttggtcaaagttttttgttgttagccaataggtaggtgatgtgaggttcaatattttcataatttcttgaaattntgttgttaaatgtttcaatttttgttgtgatggttagttttgaggtaaaaggtttttatgttagtcaatataattcatattcttttctggaaatatagataaagatgtggngactnttattgtattattattgtctgggaggttagtggtttatgcataact

SEQ ID NO: 76657 - DNA, 117 bp, Glycine max
  Clone ID: PAT_MRT3847_40233C.1
cggtaccgctgctacaagaccaccgaagggtcctgctgcgataatactacttatagggtacatcatagtacatctttcaaaatgataatatccagccgttcttaataatccaacctt

SEQ ID NO: 76658 - DNA, 464 bp, Glycine max
  Clone ID: PAT_MRT3847_40234C.1
atagttagcgccatttaacatgaaattggggccgcagtaactcaacaagacccacgttgcccaacagatatggttaaataaggctattctgaagcaaaaagactttcatagccgggctatagacgtacgcatagagtgggtgattatggggaaggacttatcgcacaaaagggtggcgaaggaattcttggctccatttgtcgagtataggatatctctaactgctgaataactgcgaccgtgctgtttcctgaaaaatggggatccagaatgctatgaacacagaacctctactataccgccccaaacaactgtcctgcaagaaacttcttgtcctctagctcattctaaataggctgaagagccgcctatgactatacatcagtctccgcacgctctttatcaacaaccgtgaaaacagatttctaaacaggacccacaatgtgagcatatatgaatttgga

SEQ ID NO: 76659 - DNA, 291 bp, Glycine max
  unsure (1)..(291): unsure at all n locations
  Clone ID: PAT_MRT3847_40235C.1
ngnatgnatngnacgnaagctcgnaattcggctcgagctaaancntcgcnntgtnagtnaannngagnnatagacntttntnctcntgaaaangcnnngncngtctttggntacataanactctnaaatnattccatgtggggaaactggaatcggattactgttnantcatcggggntttnaacctnanggaaatgtcgcnggacattttaanggtggnggccaaanggnantaantctnnnccccagtaaagatgcncccatnnttgctgntngggttaanaancanna

SEQ ID NO: 76660 - DNA, 338 bp, Glycine max
  unsure (1)..(338): unsure at all n locations
  Clone ID: PAT_MRT3847_40236C.1
ggttggtaaccccccaggacaaggccagacnaggggcggaacaatataagggaaccggcaaaaacccccaaaagcaagaagccaacaccgcaaacaccggaaaagagtaccaagaccaggcgacgcgcagcccagaagaagccacccaacggagaaggaaaagcaccagccaacacagaagggcacaaaaaagacgacgagcgcaccagagcacacaaagaagagcgccaagcgaggcaaaggacgaagaacgccccagacacaaaagaaaagaatgagcgacagatgagcaacgatccgacggagaaacaaggagcaggaaaagccagcccaaacaa

SEQ ID NO: 76661 - DNA, 351 bp, Glycine max
  Clone ID: PAT_MRT3847_40237C.1
gatcacaggccagggaacttctaacacatacactactctctctctctattttattgtatggccggcaattccagaatccgaagcatcaccttcttatggaaacaagtccccaaccgtatctggacttacaacgctcctcctctcacttcaatgacgggagcatacattagcggctgcatgtacgacaagaaccctgacgatgagatccactcgtgcgcacgtgcccgacgatgtgatccaggcagatacacagtccggctaatactgggccacacatccacagactgaggtatctgagccctccggatgatgtgaacaaactgcttgcgacattcactcttgtgcgctata

SEQ ID NO: 76662 - DNA, 241 bp, Glycine max
  Clone ID: PAT_MRT3847_40238C.1
aactattgaagcaacaccttgatacaagttgaggatcaggtgcacgttggaaaatgagaacaccttttacactctcccattttctgctactgcttattttctctgccggattagcctctgattttgtagtgcaagggcgtgctcacggggtgaagatcccagaacattggtgccacaagatgatccatttaagcaattgtgagttgcagaaatgctttcaagagtgctctaaacagccata

SEQ ID NO: 76663 - DNA, 547 bp, Glycine max
  Clone ID: PAT_MRT3847_40239C.1
gatatatcccaatgaaaaatccagccccgttcacattgggggcggggggagattgtgcggagacaacgacatctacattgcccgacctatagtcaaaatcgctcgcaggtggggctgcgatgacgtccatttcaatctgaacatgctggaacgtctgatagggagatcctttatgaaatgcttggagaaccaattaagagtccgttgcaccacactcaacatacctgacactgctggtataaccatgcccatggaataacagaaactgactgttgatattaaagtctgtggcctaggaatgagaaatgatactatgagcacccgctgacatagtgatctgagacttactactgccaacacaatatatggtgcgcgtgccagtgcaacgcaactgaacatgaccatttatggtattggcgaaacggcggcttacgcacatactgcatacgatgtaatggtctatgcatgctgttcacatgtgactggacctctatacggtggaactagaactaagagcatatatgtgacgagtacgcatgtagccgac

SEQ ID NO: 76664 - DNA, 220 bp, Glycine max
  Clone ID: PAT_MRT3847_4023C.1
atcacacgtccgcagaaactgatgcaattttacaagcaacgagagcaggcgaataattgagctatacaccatgtgaagctagagaacgtgaaatatctaaggcagtgcatccagatgactatgacagtcataactagtacgcatctgcaatgcaatcaagcaactacattgacgaatcttcttacataactctatagatccttaaaattcttccactaat

SEQ ID NO: 76665 - DNA, 284 bp, Glycine max
  Clone ID: PAT_MRT3847_40240C.1
tttttatatgcacggtggaatcactctcattcggatcatattctactaggactgtcgaggtcatcattaattgttcccaccatatacaccatgtttcttgctgaccagagggaaaaaaagaggaataacgaaataatagaagggtcttgctgacaaatttctatattttcatctttacacaaaaagggaagagaatagactgcaatgaaaagaacagagcttactttttctttttctttttaactcacaaattccaagaccatctgcatgcctgttttagctat

SEQ ID NO: 76666 - DNA, 391 bp, Glycine max
  Clone ID: PAT_MRT3847_40241C.1
gtaggtcaaagaggaggagtgccaagagggaagttagtgattccgatgattcaggtgaagaaaggaggaggaggaagagaaggtgggaacccaggaggaagagggacaattcttcagatgaagacgatgagtataggcccaggcatagaaagagtaggaaggagaaaaggagaaggagaagccggctatcagattctgattcctctgaagattccataagaaggcacaagcgaaagaacaagagggcctcatcatcatctgacactgattcaaggaggaagggtaggaatgtcagtaaatcagaaaagagaaggagccgtcacaatgcgaatgatgaatgattagtgctgtagtcaattttatgccccttgatgtttctaaattttcatgc

SEQ ID NO: 76667 - DNA, 419 bp, Glycine max
  Clone ID: PAT_MRT3847_40242C.1
ggggatcaaaaccccatattttggggcaaaaaggaaaccggaaacaacaaaagcccccaagggaaaactaaaatcaggtttaaaactgggcccacaggaaaaaggggccaaaagggggcccaacaacctatttccctaacattaggggcaaaaattaaccagagaaaaaccagggggcaaaataaaccctacctgaaaccccgccaaaaaagaaacctttgggccaaataaacctggccaaaaccccggggggccaagtaaattggctggttggaaaaaccgaaaccccaagcccttggggggtgggacccctgggaaccccatctccaggaaattttggaagtgcctggtccccaccccggggggcaaattgccccaaagggccaaaccgggaggggggaaacccttgacggccaaaa

SEQ ID NO: 76668 - DNA, 195 bp, Glycine max
  unsure (1)..(195): unsure at all n locations
  Clone ID: PAT_MRT3847_40243C.1
agtgtctaaaggcccccnaccacaggaaaagagtgcatttttacaatgaacaaaggccccggccgaacaatccacacaacaaaagggtaattgcccaaaccccgaacaagacgacaaactaccaaaatcaaaaacactcccccaagcactataaccgagggcccccaaagaaaaactcactgacacacacttgaa

SEQ ID NO: 76669 - DNA, 219 bp, Glycine max
  Clone ID: PAT_MRT3847_40244C.1
ctcacatcatcaccatttcacctattttgctctctctctatctctctctatcgcatcacaatttgctcaaaaccttttaaggcttcataattttccttctttctatctttgtgaacacacacaaagtccaaaccatggctcagaataccgagaacgacgaaaccgacttcaacgctcccgaaacgattacgctttgcgttaacctctgcggcatcaccg

SEQ ID NO: 76670 - DNA, 622 bp, Glycine max
  Clone ID: PAT_MRT3847_40245C.1
tacggctgcgagaaacgacagaaggggagtgtggtgaacctggtcattttgctcgtgaatgccgcatgcgtggtggttcaggaagacgccgtagccgtagtccacccagattccgtaggagcccaagttatgggcgaaggagttacagtcctcgtgggcggtcccctaggcgccgtagtttgtcacctcgtggacgtagctacagcaggtcacctccttatcgtgggcgtgaggaggtcccatatgctaatggaaatggccttagggaacgacgcagaagcagaagttgattttgagacttggtatctgtgattgttaagagaatagtgagattttgttaatctatagtggtgcttagactgaagtatgagtctattttgttgggcaaggccctgagtttctactcttggattgtattcgttagtttctttatgtcaaagcttgtgtttaatttatttgcagaatacttgtagtttcattgcaggtaatgatcttgttaaggttgttgctactagtatgttaaatagagttccagatctttgcagaatacttgtagtttcattgcagactgaagtatatgcttttcttctcttttgagatttcaagaaaaaaaaaaaaacta

SEQ ID NO: 76671 - DNA, 542 bp, Glycine max
  Clone ID: PAT_MRT3847_40246C.1
ttaacacccccatgaacctttttttccttccttttttttattcaataattaacggtgtgagctacacagtatatgaatagcaattttctttctttctgtaaatctcctacccagttttctcctaatgaaaattaatcttgacttagaaattgaagtatatttagtattcaatcatttaacttctcttaatctttgaccttcttctttggaaggagctagtaccatgcatggttgtctactttgtcttctattatttctctttgaatttctgtcttggaaagctaattgtgacccatgcatgctattaagtttgtgaccaagaaagtaatcaaaggtttttttttttattgaaataatgatcatgataggatatgctttttaattaaagagattagacgttactttgactacgtcatatataattaagcaagaaaagttgtccaaaaaccaactttcctgtccatatcaaatagaaattattaaattaattaaaacatttcaagtagaaaagcaaaatatttatgcataaaattataatatta

SEQ ID NO: 76672 - DNA, 569 bp, Glycine max
  Clone ID: PAT_MRT3847_40247C.1
agacaagccgttgagaactaagaaggagaagcaaatggcttcctcaacgatctcttccccaactgttaccactgtcaaccgagccggcgccggcatggatgctccattcactggcctcaaggccatggctggcttccttaccacaaagaccaacaatgacattacctccattgctagcaccggtggaagatgcattgcatgcaggtgtggccaccacccggcaacaagaacattgagactctttcctacctgccacaccttgatgacgcacaactggccaaggaaggacaacaccttcttaagaaaggatggattccttgcttggaattacagtaggagcacagttgtcggtaccgcgagcacaacaggtcaccaagatactacgatggacgctactgcaccatgtagaatctgcctatgtttggttgcactgatgcttatcacgcgttgaatgagcttcgagatgctgatactgcataccccaacggcttcatccgtatcatcagatgcaacatcgttgaacaagtgcagtgcatcaacttcatcgcctacaagcccccagacttcta

SEQ ID NO: 76673 - DNA, 394 bp, Glycine max
  Clone ID: PAT_MRT3847_40248C.1
gtcctagctaccttaggatcatatgtatgtaagtcacctggtttggacctagtcatacataacttagtggtaacataaataacaaaaagaatactctaccaggacattattcactatattgagtgaaatggtacagaaaatggaaaattgtcccaaatttattttttaaaaaaatcaggaacatcatagcaaatatctaaaaatcattttttattttttgtaatttttggcgacttttaaaaatcatgaaaatagaaaaaaattgaaaaagtggtttaaatcatcgaattttgttgtattaattttttcccacattttgaccaattttcaggccatttgagctagttgtaggtgaaatgaccaaaatatccctgcatctaaaactcctacttat

SEQ ID NO: 76674 - DNA, 379 bp, Glycine max
  Clone ID: PAT_MRT3847_4024C.1
gaccaaggcctcgatggtctggaaaatatgataaaaagggggtcagccatgtaggtggtagagggcatatgctaaaacaattgtcagacatggatactggaaagaacagcattagagacaatggcgagatatccgagaaagaagagcaccaacaccataccagtaagacggagcatcgacgaggaggcatcagaaccttacccttcatccttgcaaatgaattgtgtgatagatttgcgagctctggttttcatgcaaacatgataagctacctcactcagcagctgaacatgccattggtatctgcctcagtcacgctcaccaactttaatggaacttctagcttcactcctctctttggagctctcattgctgactc

SEQ ID NO: 76675 - DNA, 737 bp, Glycine max
  Clone ID: PAT_MRT3847_40250C.1
cccacgcgtccgcttagagttcacatgtaatactatctttggttttgtggatatttttgtttaaataatttttcgtacacaaactcttttttcaccaaactgtgaaaactagtgatatgattgcatatgaatatgacgcaaagaagtttgagaaagaacatttggacatagatatagtctcaataacagtttgagaaaagagattgtggtttgtcagtagcattactctatgattttggtagacactatttgttgctgtttcttctgagtgattcttattttcattgtgttgtgtaaattcaattcaatcatttcttttatcaggctctcacatgttgaacatgttatatgatagtttaattacttgcaatttttcacttaggtttataagcattttatgttagaagttttgagaaatttgtcatggagttcttttttgaaaaatctagtgtaaatcacctttaccttaagggagaaggaaataaactactcctatcttgttggatgaaaactaaatactatgagtgaaggtcatattctctagtgctcattgctgaagggtcattcaagcatttgaaagttacacttgaaaactgctatgctatattgtggttataacttacaaaagacttcaataatattagaagaaaatgatactgaaattctccatgctttgattctaaatctctgattatgcatccctacaaggtttctcttcaccccattttgctcattct

SEQ ID NO: 76676 - DNA, 231 bp, Glycine max
  Clone ID: PAT_MRT3847_40251C.1
gcggttgaaaggggtcgttcgggcgtgaaactaaaaagagaaaagcgaaggtcaactcgtccgctgtgaacgatcctatcgttcgtacgcaatcatacgacgaaagaattattgaattgacttactctacataaaaaacactcagccgtgcaattacaaatgaatgcactggcaaatcactcttgattccatctaaatcaccttgcacaacatccccgtttcctcaactgg

SEQ ID NO: 76677 - DNA, 481 bp, Glycine max
  Clone ID: PAT_MRT3847_40252C.1
gatggcttcaacaatggtgaaaagaaagtttgcaccttctccccctgtcctacctatgattggctcgaactctcctttgccaccctctctgcccgccattggtactccaccaaccacctccttcctaatgactgccaaatcatcataggtagttgagacaattcaactacgaattctttcccaaaacccacaccacgccaaaaatattttctctcttcccttcgtcgttcaaaccaacgaccctcatgaagaaaacaacttataccccttcgtcttcctcaacatggagtccaccttattcatcttcgccaacatcaaagtcattctctttgactacaccaaaaatgttatcattcaaaccttccctattgttccacatggcgacccaagttgacacgagaaggtgatgcacgatggcacggaggtgcaaatgcgacacacggtggcctgacagcttgatggtacaagtttgagttttgag

SEQ ID NO: 76678 - DNA, 335 bp, Glycine max
  Clone ID: PAT_MRT3847_40253C.1
cggggctgggttttttaagaacatttgccttgtcaacacaacccacttaatacaatgccaacaatccacgattaggaaaccccaaaacgccccaatatagttggaccgcaccacaatttaaacttacaccagtcgctccgagccaaccatgctccagaaaaaaatcatacttgacacccaggaggggcggccttaaacgaaaaaatttccttcctcttgcaacaccttatactatgccacgataccggtggagccctgggactgctgatcctcaacaactagaaccttcatgttaccctgggccgcggcgaagttcatattattccgaaccgcac

SEQ ID NO: 76679 - DNA, 560 bp, Glycine max
  Clone ID: PAT_MRT3847_40254C.1
caaagccattgctttcgtggtaagatccgatgcatggcattttagagcaatctctacgacatccacaacatctgactcggacacagttactggatcttctacatcaagcattccagcattattgattaagatgtcaccatactctccgatgcaccaaactgcaacgcgaacaagagtttcctgttcagctgacatcttaaatgccttgtataatgctcttactgtatatccatgaagctcagaagcattgcttatcacaacaattaaggcatgccatacttcatcttttacaaagttcccagcctcagacagaaccttcagcatttgatcaatgtaccagatcttctctggggaaaacctttagacattccagaattgttgcacgatgcctctgcactgcctgagcatcaacagttacagccttcatcagcatgttcaatcccacatatctgatattgttgtctttgtgcgacaagaatcttcctaggatattgattgcaagcacgcgtaagccaccattatcttcaacactcattattgtttgaacacactcatataag

SEQ ID NO: 76680 - DNA, 1847 bp, Glycine max
  Clone ID: PAT_MRT3847_40256C.1
cccacgcgttcgcccacgcgtccgcccacgcgtccgcccacgcgtccgaaataacataacaatacgacagtgaagtggtttgctatataagagaagtagagaactcttgtaccataaagagagcatcatatacagcattcacgaattgtgagcagataaacatcaatagtgtatactctatagtctatagtctgtcaccaacagtttgtttccatggcaaaaacaactcacatagctattgtttcaagtcctggttacacccacctggtcccaataattgagttcagcaagcgacttatcaaacatcaccaaaattttcatgtcacttgcatagttccctcacttgggccacctccagaatcctccaaagcctaccttaaaactcttccttcaaacatagacaccatctttctccctccaattagcaaagaacaagtaccccaaggagtacacgctgcaatcctaattcaactcactattactctttctctgccatcaatacatgatgctcttaaatccttgtgctccaaagcacctttaaccgcgttggtggtagatgtttttgcatttcaggctttggaatatgcaaaggagttcaatgccttgtcctacttttactttcctagttcagctatgatattgtcactgcttatgcacgcgccgaaacttgatgaggaagtttcaggtgagtacaaggacttaactgaacctataaggttaccaggttgtgtaccggtcatgggggttgatcttccggatccggcccaagatcgatcgagcgaaatatacaattattttcttgaacgtgccaaagcaatggttacagctgatggaatcttgatcaacaccttcttagaaatggaaccaggcgctataagagcgttgcaagagtttgaaaatgggaagatcagattgtacccagttggacccattacacaaaaaggagcaagcaatgaggttgatgagtctgataagtgtttaagatggttggacaagcagccaccttgttcagtgttgtatgtttcttttggaagtggtggaacactctctcagaaccaaatcaatgagttagcttcgggtttggaattgagtggtcaaaggttcttgtgggttttgagagcaccaaataattcagctagtgctgcttaccttgaggctgaaaaggaggaccctttgaaatttttaccaagtgggtttttagaaaggacaaaggagaaaggtttggttgtgccatcatgggcacctcaggttcaggttcttagtcacaattcagttggagggttcctgagccattgtggttggaactcgacattggagagtgtgcaagagggagtgcctataatagcatggccactctttgctgagcagagaatgaatgctgttatgttaaccgatggacttaaagtggcgttgaggacaaaatttaatgaagatggcatagtggaaaaggaggaaattgcaaaggtgataaagtgtctgatggatggagaagaaggtataggaatgcgtgaaagaatggggaatttaaaagattctgctgctagtgcactgaaggatggtttttcatcacagaccctgtctcagttggctagccaatgggaatgttttagtgggaattgttaggaaaatagttttatatccttggtcttggttttggtttggaaatttctgtctagctgtgttgcgtgtgccttgttttcttcgtgggagtgaagtggtagttgtgtgatttctgagatgtattgcatgtttgacacatgacatagacatgttagttggttttcaagttgaatttcactttcgtcagtgagccatgttaacttataattataggtgtggttaaaccc

SEQ ID NO: 76681 - DNA, 216 bp, Glycine max
  Clone ID: PAT_MRT3847_40257C.1
gcaaaaattatttctacactcattttatgctttgtaagaagataaaacatttttcataaattgggtcaattcctacctcttctacttctcatgtcactgctctagttcaatttacaatcttagcccgtgccgtgaccataatcaaacaaaccacgcggacctatcctatgtcaaccgtcaacgcgttcttctaattgcttatgtgcattatgaaac

SEQ ID NO: 76682 - DNA, 362 bp, Glycine max
  Clone ID: PAT_MRT3847_40258C.1
ggaaagtatagtcaaagcttgtgcttgttttggtcaaaaaaaaaaaaaaaaaaaaaaaaaaaaaaaaaaaaaaaaaaaaaaaaaaaaaaaaaaaaaaaaaaaaaaaaaaaaaaaacaaaaaaaaaaaaaaaaaaaaaaaaaaaaaaaaaaaaaaaaaaagggggggccccccataaataaccccgccaacccggaaattaattccggcccggtacttgcaggggtacaagttttcccaaaaggaatcctaataaaaccttggggcaaacagggcaaaaccggttccctgtggaaaattgttacccgcacaaatttcaacacaacataagacccggaaccaaaaattttaaaccctgggggcc

SEQ ID NO: 76683 - DNA, 179 bp, Glycine max
  Clone ID: PAT_MRT3847_40259C.1
taccatttgctttggataccattctattggagttgtgcattccatacaatatgatagatatacattctatgcaagatactgtacactcatagatttcttgatccacaactatgacgaggagcgagtccaccatattatggacccttaggtcgctggccaccatttctctcttccaatca

SEQ ID NO: 76684 - DNA, 802 bp, Glycine max
  Clone ID: PAT_MRT3847_4025C.1
ttcgggataaagaacctagggtttgtgttcgtgtggttgcgcctctgcttgcaagagtgaaaaccttctcttacccttctctcaagtttcaagagatttcatcatggctccaaagaaggacaaggctccaccaccttcctccaagcccgccaaatctggcggtggcaagcagaagaagaagaagtggagcaagggaaagcaaaaggagaaggtgaacaatatggtgctgtttgatcagggcacctatgacaagctcctttctgaagctcccaaatacaagctcatcactccttccattctctctgatcgtttgaggattaatggatcacttgcaaggaaggctataagagaattgatggcaagaggttctatcaggatggtgtctgcccatgcaagtcagcaaatttataccagggcaacaaacacctaggtggtgaactgatcttagtttacggagtattggtaggaatagtgaagtattgttcttttgaagtttgagatgcatctcatatagcttctatcagatctagattgttgctgaatccgaggctgagattgtatttttggtttccttcaatgttttatctttttggatattatggcagttgtcttatacttgttttgtttacttgaatgaattgttaatgtggcggagattctttttgaaagccaaacctaattggaatatattcgtgtggtgttttgttatttgtgattttaccaggtgggtatagtagttagtacacgagttcagatgattttatttgaataaattctttaatctttattcgaacattgatat

SEQ ID NO: 76685 - DNA, 272 bp, Glycine max
  Clone ID: PAT_MRT3847_40260C.1
ggctcgagagaaccctgaacacactacacatacagaccgcgacagccgaacatggcaaccattggccacagatatgtctgtgctgtccaagagcttatcgatacagatcgtcatgatcacaccacacgttcagccgaagacgagacactggacgaggctactaccgaagaagccagaaaggctgccgttaagaacgtgagcgatcatgagccgcgcaaagcatgggatcaggcgaccgatagctaagactagactgcacaggctgatacggc

SEQ ID NO: 76686 - DNA, 359 bp, Glycine max
  Clone ID: PAT_MRT3847_40261C.1
tttagttgcaccaaaggatacaagggcggcctacaaaggcagcaggaactgaggtgcatacgatgagcactagctagctgcaaaagacgacgccctaggagaggagcgaaacagtatatcaacggccaggggggccgcaagaccccacggggactaaaacagggacgccgcagacggggcacaagtccatgctgcacaacaccgagcgctgaggcgggcagcacgaggaagaacaggaaatcgcggtcctgcgacaaacgttggaccgtgcatgaccacagctgctgagggctcaatggtaagggacaagaccggtgagatcacacaagggaatgcgcgcaacaacacgggagcaagac

SEQ ID NO: 76687 - DNA, 316 bp, Glycine max
  Clone ID: PAT_MRT3847_40262C.1
agttgctcatattggggaggttgtttatatggtgtatatgtcctactgcctacaaaaactaatgtggtggaaactaccacggaatggcaactggatctacgtcgtgacaaatttgctagtggattgtctacaagtgatgagagataggtaggcacagaacatgagggatattgatccttttcttggtggaattcaaaaatatgccacttccatgatgcccgtagatgaagaaattctttctaaggatgtacaagatatggttgaggaatggtttgaatgtgttgatgaggaggattcttttgtggtaattcttttt

SEQ ID NO: 76688 - DNA, 360 bp, Glycine max
  Clone ID: PAT_MRT3847_40263C.1
gggggggggaccgaatttcccccttgaacccccaaaagcccaaaaaataaaacagggaactttgagggaccctttgtaaaggaaccaaaggccccttaacaaacccacacggggacaaatttttaaaaaaacattgaaaaaaaaactacttcagctaattactgggccaactgaaaaacggaattactgggggggttacaaaaaaaaacaggcatttgggttctcggccctaaaaatcccgggggcaaaaacaaaaccaaaggagtttttggaaggccaaaattcacttcggtggatttaaagtttggtatcttccccccccttggtttcttcttaaccccttttctcttcttctttccc

SEQ ID NO: 76689 - DNA, 325 bp, Glycine max
  Clone ID: PAT_MRT3847_40264C.1
gatgtttcacactcagcatcttcagagcatgtctatgccacgtggctccttacggaatgcttttgatggcacattcattgcactgtgttcccttgcttcacagaattctacacaccctatactgggtgcttccaccagatgtaactttctcattaggctcaataattcccctgctgggttattcaccactttcgcaattgcgtatgcaatgagagatgtggtacgttttacgggctgtgatgtctcaaatggtccttctactacatcctcaagtgggttgcaatgcaggtattttgacctctaccatctacgccatcctcttgct

SEQ ID NO: 76690 - DNA, 310 bp, Glycine max
  Clone ID: PAT_MRT3847_40265C.1
aacaaacggacgcatacattgtgttgcctggtggaagggcatcgtatagggagcgagagcccagcactggtaatatcaaccaaagtcaatgcggcagcgagttatctatatatatattgcacacaaatgaccctttaacatgcagtcagagcttttacacaggctgtgctaccaccagttaatgctgctccaaagacagtctcatgtgaaaaatctgaagtgagcatctccaaagtatcctaacagacgccactcatggtcataacatctgcaccatcttatctaacattgttacgctgatatgcaataa

SEQ ID NO: 76691 - DNA, 448 bp, Glycine max
  Clone ID: PAT_MRT3847_40266C.1
ccggcttcgcgatcaacaccaagcatgtgaagacgcaggtgctggtggagaacggcggcaccgtggtgatcggcggcatcttccagatcgacgagaccgagtcggtcaacaaggtgccggtgctgggcgacattccgtacgtgggcgcgctgttccgcaacaagacgcggtcatcgaacaagaccgagctgctggtcttcctgacgcccaaggtcatcaccgaccgcaacgcgccggcacgctgagcccgcccgcgaggggagggcggccacaagacgaacatcgaccgacaggcaggggattgatttcatgacgacgacgatcacggcactgcgtgccagtgcgctggccctggcggcagcggccttgctggctggctgcggcgggggcggcagcgatgcaggctgcagcgccttctcgacgagctgcaccaccgagggatcgacct

SEQ ID NO: 76692 - DNA, 1620 bp, Glycine max
  Clone ID: PAT_MRT3847_40267C.1
gcccatttcatttttaaattttttatctccaaaaacggggtcgttctattgaattttgttcttccttacaccctaaatccctaatctccttcagcggtgtttatagtttaacccaaaaaatcaccgaattctgatcggatcaccgcagtgccccactctccaccaccgcgccatcgcaaaccctagatggacctactgaagcaagagcttctcaagaagcgccaatccctggcgcaagacaccggcggcaagaaattcttcaagcgctccgagatccagcagaaggaaatccagaaactccgggagcaagagaagcgcgaattggaagccaagtcacagaagcgcctcgcaacgtcctccgacaacgctgccaccgctccgtcctcctcatccaccgcctccgcctcggcctcttccacaatcgcatcctcctccgccgcctccctcaccaacgagcaaaacatcgacaacctcgtcctcccaaagcccgaagtcatccgccgcctccgcttcctcaagcagccggtcacgctcttcggcgaagacgacgacgccaggctggaccgcctgaagtatgtcctcaaggccggcgtcttcgaggttgacagcgacatgacggaggggcagaccaacgatttcctgcgcgacatcgcggagctcaggaagcgccagaagaccgggattctcggcgagaggaagcgccagaaggccgacgacggcgccgctgaggaccgcgagggcggcgccggagatgatgacttgagtgactgcgtcggcaccgatggagccgatgcggacaaggacttgaagcggatgaaggcgaatttcgaggagctttgcgatgaggataagattctggtgttctttaagaagctgttgaatgagtggaagcaggagttgcgcgagatgcctgaggcggagaagcgcacggccaaggggaagtccatggttgccactttcaagcagtgtgcgcgttacttgaacccgctgtttaagttttgcaggaagaaggttcttccggatgacattcgacaggcgttattgttgatggttgaatgctgtatgaggcgagattatctggctgcaatggaccattatatcaagctggctatcgggaatgcaccctggcctattggtgtcactatggttggtattcacgaaagatctgcccgtgaaaagatctacaccaacagtgttgctcacatcatgaatgatgagaccactcgcaaatacttgcaatctgtgaagagattaatgacattttgccaacgccgttatccgacattgccttctaaagccgttgagttcaatagtttggcaaatggcagtgatttgcattcacttctagcagaagagagatttagtgggggcaatcaggcggcatctgaagagaggcttaggataatgcctgctccaagagacagctagtcatttatgttttgctggaatgacatcatcgtatgatgcatactatatatatgtttaattgctagatacaatctgtttgtgtttcttactgattgtataaaagaaaatgcatcttttaaaatggcaaaacatgaaaaattctgatgttgtgtacgtcgccaatatttttgttccagccagcagctgcccctt

SEQ ID NO: 76693 - DNA, 266 bp, Glycine max
  unsure (1)..(266): unsure at all n locations
  Clone ID: PAT_MRT3847_40268C.1
catgaacagcatggggaggttcggggaangactttgnntccatgaacatggantagttgctgaagaacatctggaccgcggaggaggttcagacaatggcgtcggcgggagtngncgccgatgacggcngngccggcgttagcatttgcagcggcaggggtcgctgangttnccgcggacnctaaagccataagaccgttgatgaggtttngnaagncatttcgaaanaccacggtgggccnaatttgggcccaaaangcagaagg

SEQ ID NO: 76694 - DNA, 598 bp, Glycine max
  unsure (1)..(598): unsure at all n locations
  Clone ID: PAT_MRT3847_40269C.1
gggtgtgaatcttttggtgctgctcaagagcactgcaaagtttgatataatggagtttttcttcaccgtgttaattattctgagtgtgattacacccggattgagcagcacaacaactagtttcaatgtgttgcagtatggagcagttggaaatggacaaaccaatgattccccagcctttctaaaggcgtggaaagccgcatgccagagcaactcacatatatctcgcctcatcataccagcaaaacggacattcttgctgaagcctactaccttcagtggtccatgcaagtctaattatacctacattcagctttcagggaacattattgcacctaaaacaaaatcggaatattctggattccacacgaacacatggcttggcttctcattcgtcaatggtttagctatcagtggaaaagggaccattgatggtcgaggctctgcctggtggcaacagccttgcgtaggaaatccactacccggagcaacgtgccgtccaccaacagcagtaacattcaatagatgcaatcgtcttcaacttaaaggatatacaagtattaatcccgncagaagccacatgactctaaacagctgc

SEQ ID NO: 76695 - DNA, 351 bp, Glycine max
  Clone ID: PAT_MRT3847_4026C.1
gacgacagaaggattttatgtaaaacggtgtaatataagatacaattcaagagtcttcttaaccccttatcacgctgggtcaagacaatattgaacgtggaattatccacatatcacatgggtcattttattttaacaaatctgatgatggatactataaaggagaacaacacatgaaactaagaaggaaggactaactgttaatatcatcctatagaggtcatcaatggcataactatcgaggaggaatctctttttgataaaactaactgaggaatgcagatatcacaaattctcctctcattgacaataaaagcttgctgacatactacatgccaatgaactagccag

SEQ ID NO: 76696 - DNA, 255 bp, Glycine max
  Clone ID: PAT_MRT3847_40270C.1
ggtgatgagatgcatacacgccaagacagttattcacaggcaatttatattgtcagaggactacaggattatcagttagcatggggtgcattgcagggttattgttagaatgttggatccccaacaacggtgatcccacggaccttagggttgttagcagggtggggttccgaaaacaatactggattgatgattcacttgcccctagcaagatatttaaatctctgtggattgcaagacgaattttacaactta

SEQ ID NO: 76697 - DNA, 630 bp, Glycine max
  Clone ID: PAT_MRT3847_40271C.1
cagtgctagcagcagagtctcgccgtagagcattccagagggtgcatgtttatccttaaagaggggaaaaagaatcttacaggttccaagaactgtggtgcatatttaatattcttctggcacaccctctctttgggggttggatgccataggtagaaacagaattggccaaagaaagaaactggattctaatcagagaaatactgtggagacatttgaaagaaagaaagaatgaatgcagcatctcaaaccttcatcttaaatctaactccacaggtggccacatgtaagcagagagtacatgagtttattgtgcctagcctgaattgtagacatttcggtctttcatggaagcttagacatggtgcaagaaatattttaagaagggaatacattaaatgccttcctactgctgatgtattatcagatgcccaaatttcttctgatcagtttgaggacttctctgtctctgttgctgacaacaatgattctagtgaactaaagataagcgtagaagtatctggaaacaaaactcaaaggatatttgatgacgtctttaagaaaatggttgcagctgcacaacctatcccaggatttcgaagagtaaaaggaggaaaaacgccggatata

SEQ ID NO: 76698 - DNA, 1330 bp, Glycine max
  Clone ID: PAT_MRT3847_40272C.1
ttagtgatgaggttggggttctggagtgggaattggaagaacttcaccgaacccgcccacccacataatccctccggcttcttcccgcacggcgcagcgggcgtctttaatggcgccgccttggtttacttgagttgcattggttatgttgcggtttcgaccatggcagtggaagtgccggacccagtcaacgagttaccggtccccgtttccggtgctatcgttctggtcacggccctccctcttcctgtggccacgtccaagcccccaccttacgatatcattgggtttcaagcactatctcctttgtcgtccattttcagtggcaatagtcctggttggtgatctggatttccagctctaggtgccggttctaggttcttgactttgccgtttacgtggttgcagatgccgggtcctattcacgttatgtgcctccacggacaacaaatccttggcccacattgtcctgcctctgctcattctccatacccgcactcaggctcccccttagttggaaatttgtacccacaggaggggcgaaggcagggatgctcagtgtcagtggtgttattgcgattgcaatattacaacttttccattgcatggtccctcaagtgagaaagcctgaattctggggtgtcccattcatgccgtggataccctctatatcaatctttcttaatgtgtttctgttgggatcactggatgggccatcctatgttcgttttggattcttttcggctgttgcggtgcttttctatgtcttctacagtgttcatgctagctttgatgctgcaggagatggttctttgactgcaattaaaatggagaaccacgtggaatcaaaagaaattgaggaccaaattagtttaaagtgtagatagaatacattgtcctttttatttatgttgtttttttaatttaagtcacctcaacctttttggacgtgggggagggagaattatgtggatgttcatgcaagctttgatgctgtaggagttggttctttgactgcaattaagaatggagaaatccacgtggaatcaaaagaaattgaggaccaaattagtttcaaagtgtagatagaatacattgtcctttttatttatgttgtttttttaatttaagtcacctcaacctttttggacgtgggggagggagaattatgtggattacatgtcaaattagaataggttgcaacttttgtagaagtggcgaattgtatagttagactggcttaggttgtgatctcttttgtaaattctctggcttatatccccaaatcaaaaatgaaataataaaaaaaactcagtttttgtagcctatc

SEQ ID NO: 76699 - DNA, 408 bp, Glycine max
  Clone ID: PAT_MRT3847_40273C.1
tttgtttattattcttttttcggtgcttccatggacgaagaaaaggtgcacaagatcttgagcaagatcttcaagaacggcgacaggaacatctactgcgcggtgttgaacgagatgatggcggagctgatatccaaaatgacatccgacgaggtgaagcgcatgatggcggacctggaccggaacgtcgaccgctacattgacttgaacgatttctgggaggtccactgcgacgtccattgcgacgggagggagctccggaaggcgctccagctggacgatctggacaagaaccggctgatcatcgggatggagctggactacgagatgcacttgttgatggagaagtgctccctcaattactgcctgaggatgagcggaaacatgaatgccaacggcgacggccac

SEQ ID NO: 76700 - DNA, 706 bp, Glycine max
  Clone ID: PAT_MRT3847_40274C.1
attgtccttcctctgctcattttccataaccgcaatcatgttcacccttatttggaaatttgtacccacaggaggggcgaaggcagggatgctcagtgaattcggctcgagtgcgattgcaatattacaacttttccattgcatggtccctcaagttcgaaagccagaattctggggtgtcccattcatgccgtggataccctctatatcaatctttctgaatgtgtttctgttgggatcactggatgggccatcctatgttcgatttggattcttttcggctgttgcggtgcttttctatgtcttctacagtgttcatgccagctttgatgctgaaggagatgattctttgactgcaaataagaatggggaaatccacgtggaatcaaaagaaattgaagaccaaagtttcgaagtgtagatagtcctttatttgtgttctttttctataaaaaaaaaaattaagttaggatcacctcaacctttttggatggttgaggatcacttggaacaagggaacaaggatgtgggggagggagaattatgtggattacatattaaattagaataggttgcaactttagtagaagtggcgaattgtatagttagacaggcttaggttgtgatctcttttgtaaattctctggcttatatccccaaatcaaaaatgaaattataaaaaaaaactcagtttatctaccctatg

SEQ ID NO: 76701 - DNA, 589 bp, Glycine max
  Clone ID: PAT_MRT3847_40275C.1
acataattggatgcagtacgttcaaccgttcggaaatggaactctttgggcttcagaaatgggggccaaacataaactttaagtttgaaaaagaaacaaacctgacacctaagaaaaattgaattgaatctgtttcaccccacgataaagagcgcttacaaaaaaaaaaatgggggtgaaaataagaaagtttttcccaagcaaaacccctttttggccaagcccccccccaggggaaaccccaagccataaaaaaagggaaccaaatttggccttttgcctttggaggacccctggggcccgttaaaaccagaaccccaaaacgggtttttggttcgggggttttaaaagggtttcacttaaagagagcccgcctgttgtgcaaatatgcttaaaaggggacttttgggggccccccccccactgtaaaactttttcgcatttttaaaaaaaaaaaatggcggaaccctgttaaatttccaacccgcgaaaacgctccggggctaaatttggttaacctataaaaaaaccactttgggggcctttacagacaagcttgtttaaaaaggggaaaaaaaaccacaggggc

SEQ ID NO: 76702 - DNA, 524 bp, Glycine max
  Clone ID: PAT_MRT3847_40276C.1
ctatgcatgtatgtctgcaatacatgtggaagcggtatgataagagcatgacacgcgcatccgcaaatctctccccctacaggtcatggaatccgctctagcagaccatgaccgacgctcgtctatgtcccgctgccttagaacgaccgcatctagacaacagggccgagctgaggaatcgctccatccgaagtcgcaggcaacgtggcattctcgagaggcttgacgctctcagtctgatgctttggcaaccgctcttccagcgccagagtgaccttggcgtatacctcgtcgacggaaggagacgagtcgacttcgacgactttgccttctttgcggtacatgtcgacgacgggcatggaagtctcgacgaatgttcggaaacgcttaacgatggactccttgttgtcgtccgcccttccggaagtcttgccccgctcgagcaatcgaccgagcatgacttcttctgtggtcgagaagaagagaacgaaggacgacttgcagaccgactcgtcaaacttgag

SEQ ID NO: 76703 - DNA, 1190 bp, Glycine max
  Clone ID: PAT_MRT3847_40277C.1
gaattcggcaccaggacacctgttcgggtaagaaatcttatatcctattggccctgcagctttctattatatagagcaatgaccctttgtagtgggctcgagaacacaaagctttggtttttattctacctaacaccacatggatacgttgccggaggattgtgtttccaaaattctgtcttacacatctccaccagacgcatgtagattctctatggtctcttcaaccctacgctcttccgctgactctgaccttctctggcgaactttctttccttctgattactctgacattgtctcaagggctctcaaccccctctcccttaattcctcttcttcatacaaacaccttttctatgctctttgtcatccactcctcctagatggaggcaacatgagcttcaaattagacaagtcttcgggtaagaaatcttatatcctatctgcaaggcagctttctataacgtggagcaatgaccctttgtattggagctggagaccagttcctgaatcaaggttcaaagaggtggccgagctgagaacggtgagctggttagaaatccaaggcaaaattgggacgaggattctaacgccaaacacgtcatatgtggtttatctgataatgaagacatcccaccgagaatacgggcttgattcggtggcgtgtgaggtatcaattgcggtggacaacaaagtgaagcagagtgggagggtatatttgtgtcagaatgagaaagatgagaacaatttgaagaaggagagtattggaattccaatgagaagagaagatgggtggatggaaattgagatgggtgagttcttctgtggtgaagctgatgaagaggttctgatgagtttgatggaggtgggttatcagttgaagggagggcttatcgttgaaggcgttgaaatcagaccaaaaattattgtttgactaaaaacagggacaactaaactgtcataattgacaaatatacctcgtctacacgccaatgccacgggttgcatgcacaacttcagtccattttgttctgtttcttttttaaatttctctatgtattttttttttttacaaatcctcaatgaatattttctgaccaacttttattgctccaagagtataaaaaaatacaaataagctgttggtccaaataatactaaatttatctctttcttagattttgaaaaaa

SEQ ID NO: 76704 - DNA, 346 bp, Glycine max
  Clone ID: PAT_MRT3847_40278C.1
cccacgcgtccgctagaaacagtgcgatgaaaatgactgcccttgatttcttcgtcgctacaactctggtagcatggtaatgccatgcgtacgatatgtgccctcatagaatgaacactgtctatggtgcacgtactccggatgtgaaatgcgcaagatggaggctggctaaggaagctcacaacatctatggctatgcgaccattcctgatgagtgcgtcgatgtaacacaggaatacatacatggcctacaatatataacagactacctaacagttaatcaactagcttactttcatgccatagacctcgaagtccatactaaagacaaatttgagaacactat

SEQ ID NO: 76705 - DNA, 326 bp, Glycine max
  Clone ID: PAT_MRT3847_40279C.1
cccacgctgcaggaattgccatctattggggtcaaaacggaaacgaaggctccttggcagacgcatgcaacactggcaactaccaatttgtgaacatagcattcttgtccacatttggcaatggccaaaccccccaactaaacctcgctggccactgtgaacccagcaccaacggctgcaccaaattcagcgacgtattcaaggcgtgccagggcaaaggcatcaaagtgctactctccctcggaggagccagtgggagctactccctcggctcagccgaggaagcaacacagcttgcaacctttctttggaacacttccttcgga

SEQ ID NO: 76706 - DNA, 173 bp, Glycine max
  Clone ID: PAT_MRT3847_4027C.1
gagtttggtaatacatgtcttccttgaaaatccagtgattaatttgccatgcagggtattgctgcgaccgtgtcaaaacgacgtattaataattcattaatgattacatccacccacgttatatgtgatttggattggaaaacacgtggttctctactctcttgacatgttgg

SEQ ID NO: 76707 - DNA, 373 bp, Glycine max
  Clone ID: PAT_MRT3847_40280C.1
ttatttttaggtttctgtttacacatcaacactatactgaggtggagttacattacttattggggaaaagtacttctctcttgtgaatcactagatatgctttaaccaaaataactatcaaaataagtggaatctgtgaatgatgtttggccagagactatatcatcatcatcatgttcatattgctgaatccaatcaaaagaagggcttcctaaaaaatacaggttttaagcttactgtggaggatttgcactacccgacccattgtagggacctcactgtgggttaactgcatacaccaaagggtcaccaggaacatcttcttagataaaaagatgaccttttgataaacatcgctcaaggtaatatcgtt

SEQ ID NO: 76708 - DNA, 913 bp, Glycine max
  Clone ID: PAT_MRT3847_40281C.1
caccttttctatcttctctctgcctatgtggtccatcccaacccagtgaagcccttgatcaggccatataagacagatcaattttgccggctgcaagaaacgacagaaggggagacagggaactggagacagatatggattggcatcacggcacaaagccacttgttcctcggccagagaccttaagcttcttctacaactataactacaacagtccatatccaggagtggaagtgaaacaagcagcattgatggagacaggagaagggtcagttccagcattaatggacagcagaaacaaagagaagaagaagcgattaacaaataaccagatagagttattggagaggagttttcaggaggagataaagttggaccctgaaaggaagatgaagctttccagggagctaggccttcagcctcgccaaatcgctgtttggttccaaaatagacgaacaaggtggaagaccaagcagcttgagcacttgtacgatgtgcttaaacaccaatatgatgtcgtctccaacgaaaagcaaaagcttcaagaagaggttatgaagttgaaggcaatgctaagtaaagagcaaggttttgggaagcaaacatttggctgttatacagaaatatcaggggaagaaacagtagaaagcacgtcagagggtctaactctaagaggaaagagtaacattgagcacgttgcagatcaaggctactgttctttcactgtggaggattataacaccactgttttactgcctcctcactgtcactggcctgctgtgccttattagttattaattaatattatccctgattaatcttccacaactttgaacttgaactctgtgagtactcagcttaattaatattatagtgttctagcccaaataaagagggaaaaggagaaggaaat

SEQ ID NO: 76709 - DNA, 282 bp, Glycine max
  Clone ID: PAT_MRT3847_40282C.1
gtatattcaaaaaaagaaataatagataaagagatggagatccataattagaatgctgtatgatatttacgtttacggcgagtgataaaaagatcctatatagaactcagggagattcccgtgtcagttacattcaatttaacgattgaccaacagagaatttaaattataacatttatatcactcaaattccaatatttctacgacacaataatgaaatctaacgaatacatttcgattgattgtatccatatggggtaataccaaatgggggaggagagc

SEQ ID NO: 76710 - DNA, 449 bp, Glycine max
  Clone ID: PAT_MRT3847_40283C.1
ggactagatctttccatggagtagcgcgttttctttgcatcaaccgctactatttttgaacttgtcataactagtctctatttataagtattactcgaatgcactcacacacctttaaacgtagcgtggggactatatggttccacactactaatgccttgactcttatttttctaccgatcgcaccccgtgcacgttgaacacaagcaccctgacttaaacaccctacaagaacttccttagtcttacactccggacacatcatggccatgaagatcacactaaaggccctgcttacaacgagagagtacccggtattgacctcaaagacccaaatgcttcagaggcgatacaccatgcacagccaacttcctgagcgaaccaagtgtctaaccatggcgtacgcacgagcctccttcaaaacattctcagaattggggagaccctat

SEQ ID NO: 76711 - DNA, 217 bp, Glycine max
  unsure (1)..(217): unsure at all n locations
  Clone ID: PAT_MRT3847_40284C.1
cggaaagcanctcgaggacggccgtaccctcaccgactacaacatgcagaaggantcaaccctgtacctgntncttcgtctgcagggtggcatgcanatctgtcacaaaacttgtagtggcaaaagcatgactgtggatgnnnaaagctctgacgccgtcggctacgtcgaggcgaagatccaagagagtgagntaattcctccnnancatcgacgg

SEQ ID NO: 76712 - DNA, 594 bp, Glycine max
  Clone ID: PAT_MRT3847_40285C.1
agaaatccatggggtaacccaaaaccagattatttggaaaagagaggctttgttgaagctgatgttgccgatgggctcttggaagtatttggtttaaaccaaggatggcatgcatcatttgttatggttgaactgatctctgctaagcacttagttcaggcatcagctattcgattggaagtcagaggtggacagtggaaaaatgcatatatgcaaatggatggagaaccttggaaacagccattgagcaaggacttctccacatacgtggaaataaagagggagcctttccagtcacttgttatcagtgggaagtaatttataggtggttggctgtgttccatagctgggattcatgaaaggcttgtgtattatatgtattctcttaggtattggctctccattacatggaaagtttgatgttgtaaagaattaatcttcttttgttttattgagaaaatcttgttatgattagtgagtgtaattctttgatggtttccatgcctggtgttagtcatggaatgcatgtgtattctatgtaaacttgggcattgaagctccattatatttatatggaaaaatcggacgcgtggg

SEQ ID NO: 76713 - DNA, 339 bp, Glycine max
  Clone ID: PAT_MRT3847_40286C.1
cgtaactgcctgcactctctctctttcttttacaagaatacatctattcagggggggcgatcatcacgggggggggaaacaaaaacttctccaacctgaacaacaatccacgcaatgcacaccaggttcacttcctctgactccggaagctcccctgcggcccatatgcctccgagatcctcgaccctggaaagaataccctcgtgtgtctcatcaccttctacaccgccgaggatgccgtctcatcctactacgttttcacccttaaactttcgtaggccccaaagccataaccaactttcccttccttctctacaacaacacctacgtttactctta

SEQ ID NO: 76714 - DNA, 856 bp, Glycine max
  Clone ID: PAT_MRT3847_40287C.1
taagattatatactcgggttacagttgcacacagggctggtttttcacaccttgcgtaagtgatccaggtctaaggggactcaaaaacattttgcggatgcatatcaaaagggccaatagctcagagtgggagcagattgcaattcctacaagtgtaagggcaatagttgctttgaatcttcatagctatggaagtggaagaaatccatggggtaaaccaaaaccagaatatttggaaaagagaggctttgttgaagctgatgttgccgatgggctcttggaagtatttggtttaaaacaaggatggcacgcatcgtttgtcatggtggaactgatctctgctaagcacttagctcaggcatcagctattcgattggaagtcagaggtggacagtggaaaaacgcctatatgcaaatggatggagaaccctggaaacagccattgagcaaggacttctccacgtacgtggaaataaagagggagcctttccagtcgcttgttatcagtggaaagtaacttataggtggttgactggttggctgttccatagctgagattcatgaaaggcttgtgtattatatgtattcttaggtattggctctccattacatgtaaagtttgatgttgtaaagaattaatcttcttttgttttatcgagaaaatcttgttctgattagtgagtgtaattctttgatggtggatgcctggtggtagtcaaggaaggcatgtgtattctatgtaaacttgggcattgaagctccattatatttatatggaaaaattgttgtgaaaaaaaaatcgtttttttttttcctaataaaatccagtttacactttaaaaaaaaagaaaaaaaa

SEQ ID NO: 76715 - DNA, 229 bp, Glycine max
  Clone ID: PAT_MRT3847_40288C.1
tatgcatcatcgatattaattggttaagaataggtctatttctggaaatttatactatggttctcacatactgctgcttggtgatgcacggtttagcaatgttgctttctttctttatgcgggtacagatccttctaatgatgatagacatttggcggtctatttcttcttctggtcactttctcaaccattcatcttgcggaacgctgacctgatccttttcagggat

SEQ ID NO: 76716 - DNA, 277 bp, Glycine max
  Clone ID: PAT_MRT3847_40289C.1
acgaccaccgcgcggcaacaagcgagatagccgtttctagtatcagggactggagggagcatggcttgattcacaccgtgatccgtgatctcctgattggtcactcgaatgtcttaagcaggccttgatttgcgattgccagggctgtagcaagggctacactgccaactactgatgatgcttacttcattcatgatgatgcataatgagctttcaagatggcttagggccaatctgcatgtgctacaatacaaatcagttcgatgctggacctgac

SEQ ID NO: 76717 - DNA, 903 bp, Glycine max
  Clone ID: PAT_MRT3847_4028C.1
ctcgagccgaatcggctcgaggggtttctgagtttatgtggttgcgcctctgcctgtaagagtgaaaaaaccttctcttttccttctctcaagtctcaagagatttcatcatggctccaaagaaggacaaggctccaccaccttcctccaagcccgccaaatctggcggtggcaagcagaagaagaagaagtggagcaagggaaagcaaaaggagaaggtgaataacatggtgctgtttgatcagggcacctatgataagctcctttctgaagctcccaaattcaagctcatcactccttccattctttctgatcgtttgaggattaatggatcacttgcaaggaaggctataagagaattgatggctaggggttcaatcaggatggtgtctgcccatgcaagccagcaaatttacaccagggcaacaaacacctaggtgtggaactgatcttagcttacggagtattggtaggaatagtaatgaagtattgttcttttgcactttgggaagcatctcatatggttctatcagttctagattgtcgctgaatccgatgctcagattgtatttttggtttccttcaatgttttatcttcttcaatattctggcagttgtcttatacttgttttgtttacttgaattgttaatgtggcagagattctttttggaaaccaaaaatacaatctgagcactgagtcgcaaattcagggtatctggcatccccatgcttgtggccattgcatcaagtggtcagacattgacaacaaaagctcgagatctggtttcactctatggagcagatgcatatcctttcaccgaggagagaataaaagaaatagagacagaacaagaagagactgccaagggggtggccggagaaactgaagcatgaattacatg

SEQ ID NO: 76718 - DNA, 122 bp, Glycine max
  Clone ID: PAT_MRT3847_40290C.1
caccacacccacaaggcttaatacttggatcgatttttacttcacataattccactcacaccttacatcaaaccacaaaatcttctatctaacacaacaacatcaatgcatataaaataata

SEQ ID NO: 76719 - DNA, 313 bp, Glycine max
  Clone ID: PAT_MRT3847_40291C.1
acggctgcgagaagacgacagaaggggacagatctcagaaccactagcaccatatctattaacaaaccatcgccacgcctcctttgctgtgttttctttcctacttacggctctgtaccaattgggcccatgagttgttgacaaaccacactctatgtttgacgcttatacttcctctaattcccatccttaatttactcaatctcacacatgggtcatcatttggagtacttcttttgagggctctaacacattccatttcttgagtctattctggatatgccaaacttttatcctcatatcagatatcctt

SEQ ID NO: 76720 - DNA, 246 bp, Glycine max
  Clone ID: PAT_MRT3847_40292C.1
aaggttccttcctcctccccttgaccacaccaaaaaatttaatttttttttaaatgccacagctcacatctgggagaaatattataggagctctgtacgggcctattaaaagcttttaaaccttattctgtccatttttttcccgcgcccataattaatattcaaactctctcccaaagttcttcccggctcttgtttctaaaaccctcccccttttttcccccaaaatacacctctattaaccct

SEQ ID NO: 76721 - DNA, 1666 bp, Glycine max
  Clone ID: PAT_MRT3847_40293C.1
gtgcaatatacaggctttaaggattggcataagcttattagaaagaaagtcaaaaagctccggctcgagcccaccctacccggagcttcgttctggacattattctctcttctcttctcttctgtgctgtgcttaatttccagtttttgttttcagcaatggatgacgtcaaagacaaggtgaagggcttcatgaagaaagtcaacaaccctttctcttcttcctcatctgccaaattcaagggccaaggtagagtccttggttcttcttcttctacacccgctaattccaatcctacccctcgcccctaccctaattcgcagaaaccctcctcctcttcagctgtaaccaatcccaaaccctcgccccagaaaacggagcaaaataaaaccaccgataagcctcgcaaagatgatggctttgacccctttgattctttggtcactaattccaatagatcgcaaaatgggtattcgctgaacgtgttcgaatgccccatttgtaaacaaccctttagatccgaagaagaggtgtctgcacacgttgacggttgtttgaataaccctgttgagcgtggaagtgatgatggaaatggggtctcagagagtgatggtgggtctaatgatactaatactgaattggaggtttgtgttgggacttacatatcagggaagccatctgagggatcggttgatgtgatcctcaaactgttgaggaatattggtagggaacctatgaaggttccgacagaggagcaaataatgatcattaagaaagcaatagtgttgctggatgatgttgttgtagggcgtggacctcctgagagagatgatttcgccgtctgcgactgctgctgagatgggtccgaaggctgaaccaaagctggtcgacagacaggtgaaggtcttctttgctgtccctgaaagggttgcagctaaaattgagctaccagattccttctatagcctttcagccgaagaggtcaactgagaagctgaattatggagaaaaaagattgcagattctcagcttttaatcgaaagtttacttagagaaaaacaagcaaaagcttccaggaagagagctgccaaagctattatcaggattcagtttccagatggtgtggtacttcaaggtgtatttgctccatgggaatccactgccgcagctttcaagtccctctgctctgcattaaaagcaagcggcttggtatttgaagagatgcatccggtctattttcaggattctgtgatccccctggagttgaacttcaaggaaaatttgctccatgtgaaacaactgttgctctctatgagtgctttaattaagttcaagcccctggaggttggtaattttgtttaatgcagcctgtgaaatgaattgcttgaaataagtgaacttcttgtaaatggttaagcaattaattttgtatgaactatatcggttcgtactttccagagtgttttttaattgatgtggatatagatatatttttttctactcattttctaccgaatgaattgcttgaaatcagtgaaccacttgtaaatggttaagccaaatattttgtatgaattatatctgttctactttccagagttttttttaattggtgtggatatagatatccttttttctactcatttttaactgatatttatatatg

SEQ ID NO: 76722 - DNA, 700 bp, Glycine max
  Clone ID: PAT_MRT3847_40294C.1
cggatcccacgcgtacgaaagagtctcacgcagcctcctcaaacatcagaccgagaagaggagtcagacacataacgtagcagaaagaaagagaaaaaagagggtctcactcgcgctccggagttattgagttttctataacaaaacaggctgtagaggtagggattctgttagctgccactgccagattacttgcttctgagttttatgactctgttgggttttcattatgagtggtgcacctaagagatctcatgaagagtctgttcattcatcttcaaagcacccgaatgaagatttgggtacatattccaagttggtttcatcgtcagtttcaaatgagtaccatatgcctcatgatataactcaggactcccgggtggcaaaagtgcctcgaactgaatttcatgatgcagatagaagatctcctcttaatcctgtgtatcggatgtcgtcaccgttgaatgattctcgtacagatcatcctattggccctgagaacaggattgaatcaagggattccaaggacaatagagatctccggtttgagaaccgcgatgcaaagacagagaagaaggagttgcatggtgaagcaagaagggatcctccaagtgctaagagtgaaaaggatgtgcgtgttgaaggttgaggagatgacaacaaggatgtcaggcatgatcgggatagtcataatgatccg

SEQ ID NO: 76723 - DNA, 234 bp, Glycine max
  Clone ID: PAT_MRT3847_40295C.1
tccacgcgtccgaccacgcgtacgggagaagtattaaggtgagatggcatgaaacatcaaacataccacgttctgagagagactcacaatggaggatagagcctgtttttgctcctcttgctctgaatcctttaccaatgcccagccctaaaaggcctagatctaatgtggctacatcattcccagattcctcgggtcttactcgtgaagtttctcaagcaagcatatattctt

SEQ ID NO: 76724 - DNA, 777 bp, Glycine max
  unsure (1)..(777): unsure at all n locations
  Clone ID: PAT_MRT3847_40296C.1
acgagaaagcgcaccacatgaatcccattggtttctctcttctctccctggtttctctagcacttgtctcaattgtcacagcccaagaaagagcccctcatgggcttgtttacgagaaccctgaagcctgacacaaataaaaggagacaaaacaaactaaacatgaatcccattggtttctctcttctcagcctcgcttctctagcacttgtctcgattgtcatagcccaagaaagagcccctcacgggcttgtttacgagaacccagaagccttttcaccatcagcatataacttctttcaccccaatgaacgaaagcccgagacaaaagacccttgtgctgcatcaaaatgctcaccaatgcctttagcagcacaagtggaagctactgaaattcatgaaagcaaggcctcaacccctcaaggaagtaagaaacaattgggagctggtagcgtagctggcattatctttggtggtgcttttgttgtgcttttagcattgggggtctaccatgtgagggtcactcgccgagccatcatgagtaaagccaaagccaatggtgctgttcaaccagatgctattgcttgatgtgccttgcctttaattctataatgattacttcaaaatctcaccctagatttagaacaaggcagtgtaatgtaatacccctgaacttttattcctctaatatcttactagtagactattagttatgtgcttttatcttcaatttgtttttnnnnagtcaatgtatctgttgttgtgannnnngannna

SEQ ID NO: 76725 - DNA, 893 bp, Glycine max
  Clone ID: PAT_MRT3847_40297C.1
ggtgtcaagaggggattgactgaggcgccagtacctttcaactctatctctttacctcgcatctactacaagcagccaaccaacgtgcgtttgtttgtcgaaaagatgttctttctttttcacctatccaaccacggcttatggaatctcctcatagttctttcagctgcctataccctcgctctttgcctctcacacactaaaagaagccatgaaggttcggtcatctgtgaagaagatgtgtgaattttgtcagatagttaagcgccggggacgaatctatgtgatttgctctgggaaccctaagcacaagcaacgacagggcatggcaactattgctagaggggtgggatctgacccagtttctgcctatgaagtaggaaacataattatgttacctcctgcactaagtgtactaagtgcgaagagattgataatcaacgcttatggattgaggccttaagttttatggatggatggtgggaattggcctctattgtgtctataaagtagcaaaaataattagtaaccttgaacattacaagtaataagtgtgaagagattgataatcaacggttctggattaaagtctccatcatgctctctcctttctttgtattggtggatgaagttgtctcaaacttaattttgttctcactgggggattttgtttctccgttaagaatatggtcaacagattgtaacctcgtagtatatttggtgttcactgttaagggaatcagcggagcacaattgatagcgctctcctccttatcacttgagccaaagacgagaattttttgcaacgtattgtcatctatatctatatgttacatagtttttgccatcaaaaaaaaaaaaaaaaaaaaacaagaggccgattctctctctcc

SEQ ID NO: 76726 - DNA, 384 bp, Glycine max
  Clone ID: PAT_MRT3847_40298C.1
gctcgaggctcaaggagatcaagcgcttctacgtgcagaacggcaagacgatccccaactcggtgtcgaccatctccggcgtgcccggcaactcggtcaccgactccttctgcaccgcccagaagtccgtcttcggcgacaacaacattttccagaagaggggtggcctggccggcatgtcccaggccctcaacgccggcatggtcctcgtgctctccatctgggacgaccaccacagcaacatgctctggctcgacagcaactttcccaccgacaccgacccggccaagcccggtattgcccgtggaacctgccccaccaccagtggtgaccccgattactttaattctttcgccgccaacgcctacgttttctactccaaca

SEQ ID NO: 76727 - DNA, 500 bp, Glycine max
  unsure (1)..(500): unsure at all n locations
  Clone ID: PAT_MRT3847_40299C.1
tgtctccaataaacatcatcctcttcccacgaagtcaatatgcctctttgatatgccttctccatcaacttattcctgaacatgccaaatccgaggaaaccttggattcactcactgtctttacagctaagggtaactgataggattgtgagaaaaggttcaatcaatacgcatggtcgtcattggaaagacgctgatattgttgtatttaacacttacctttggtggataactggctctaagatgaagatcttgcttggatcttttaacgatgaagtaaaggagattattgagatgtcaacagaggacgcttatcgtatggctatcaaaagtatgcttagatgggtgaggctgaacatggactccaacaagacaagagtcttctttatcagcatgtcaccatctcatgcaaaaagcatagagtggggaggtgaagcaggagggaactgctacaatgaaacaacaccaattgatgatcccacatatntggggttctgatt

SEQ ID NO: 76728 - DNA, 193 bp, Glycine max
  unsure (1)..(193): unsure at all n locations
  Clone ID: PAT_MRT3847_4029C.1
gggcagttgtgatattagaacttgttcttgcnantcttcttcattccnttgattgggaattgccacaagggntgatanaggangacattgatgntcaagtatngncaggnctcanncaacacgagnagaacganctttgtctnngtgccaagactaggagccntacntnactantggatggacttanngatna

SEQ ID NO: 76729 - DNA, 323 bp, Glycine max
  Clone ID: PAT_MRT3847_402C.1
aaatcttcagggcatcctcaataaagatttgttcaaaaatatttaggataactgataaaatccataaaagttaatccatcagttcaagatggttcaaaagtttgctgcattacattggaacatgaaagtcttcctttataaaagaaaaaaatacatataaaatgttattctattttaaaatttctattagtctcaaatctgcagagtgtcctgtaaatcaaatattaaacaggcattcaagtcattttatgccaatgcatcaactgtgtacacaacatttcatcaacaattacttgtaggaagagtatacatgctttctaaaa

SEQ ID NO: 76730 - DNA, 1967 bp, Glycine max
  Clone ID: PAT_MRT3847_40300C.1
tttcaacttcccacaccactgaccctcaaaggctcaaaaacatttcaaccttggaaatatactacttcttaataataaaaataataatactaataaaactgcaaagacaaatattattttcatcattaatttttttcttcttcctctctgtcattcggttaattagggtacacaaacaatgatggcttcaacaacgcaccagttttagcttttaattttaatttaaaatcagaattgtagtaggttgctagaagaatgaaagactaagtttggggtccatgcatgcaaaaaatgatgaagccaccttcaaactcttccttcccttcctttctcagagtgaagcctcgtctctcttcttacctcttcaccctcttagctttcattctcttcgctgccatcctctatggccatgacttcgtcttcatatttcgtccacacctctactccaacgagcacacagcacaaacactcttcttctccacacccgtcgatgtgagatctccaccaaccgaagaaaacaagacggtgttgacgaaaacgaaaagggaggaagaagaacaagagtgtgacgtgttcagcggaaggtgggtacgcgacgagttgactcggccactgtacgaggaatcggagtgtccgtacatacagccacaattaacatgtcaagaacacggtcggcccgaaaaggagtatcagcggtggcgatggcagcctcacggttgcaatcttcccacattcaatgccagattaatgttggaaaagcttcgtgggaagagaatgatatttattggagactccctcaaccgaagtcaatatgtctctttgatatgccttctccatcaaatcattcctgaaaatgccaaatccatggaaacctttgattcactcactgtctttacagcaaaggaatacaatgctaccattgagttctattgggcaccttttcttcttgaatcaaactccgataatgctgtcatccatagggtaactgatagaattgtgagaaaaggttcaatcaatacgcatggtcgtcattggaaaggcgctgacattgttgtatttaacacttacctttggtggataactggctctaagatgaagatcttgcttggatcttttaacgataaagtaaaggagataattgatatgccaacagaggatgcttatcgtatggctatgaagagtatgcttagatgggtgaggctgaacatggactccaacaagacaagagtcttctttaccagcatgtcaccgtctcatgcaaaaagcatagagtggggaggtgaagcgggagggaactgctacaatgaaacaacaacaattgatgatcccacatattggggttctgattctaaaaaaagtataatgcaagtaatcggagaagtgtttagaaaatccaaagtacctataacttttctcaacattacacaactatccaactaccgtaaagatgcacacacatcaatttacaagaagcaatggaacccattgactccagagcaattagctaaccctgctagctatgctgattgtacgcattggtgtttgcctggacttccagatacttggaatgagcttttgtttgccaagttattttatccttgaaagtgaatcaaaataaaagatccttgttaactcggttccttgtgtggcatgacatgaaaaattgtaaatgggaggctacaacctacgagctttagaaatggtaaaagagaaagaatgaatgcaaagaggatttgtgtagaataatattacattaacattgatgaaggaggagattgtatatataaaattgagttttttcttcttaaagtaattggattgacaaattccaatttttgctagttaattgtgtcccctagcattggtgctatgctaacacatatatagatgaattgaattgctatggaacatttgttttaacattagtacttatgaaatcaaacattaaaattatttgtttctctttc

SEQ ID NO: 76731 - DNA, 321 bp, Glycine max
  Clone ID: PAT_MRT3847_40301C.1
ctactcgtacctttcagagttaacagtgttggtataacactttacacaaatcaacgtgcgtggaacaaagaggcccacgtgattatcctagtctctgcagcaggagttggttattcatattcaaacactgcttctgactacactaaaactgctgacaagagcacagttatcgactattacacttttcttcataaactggctcgagagattttcacagaacaaaactcgagactcggtcattactggagaaagctatgcttgacattatgtccctcagattgctgacactattcttacttataataagcttacaaatcacac

SEQ ID NO: 76732 - DNA, 332 bp, Glycine max
  Clone ID: PAT_MRT3847_40302C.1
gtaaattccgtccaaggctaaatactggcgagagaccgatagcgaacaagaaccgcaagaatttgacatggaaaaaaaaaaagaaaaaaaaaaaaaaaaaaaaaaaaaaaaaaaaaaaaaaaaaaaaaaaaaaaaaaaaaaaaaaaaaaaaaaaaaaaaaaaaaaaggggggttggttttgggggatccaagttaacaaacccgtgtttgcgaggctataaattttttaaggggtacctaaaataaaataaattggccaatgttttaaaccttttttaaatagaaaaactttggaaaaaccaattttaatccctttggagaaatttcacttt

SEQ ID NO: 76733 - DNA, 409 bp, Glycine max
  Clone ID: PAT_MRT3847_40303C.1
tgttttgcagcaagagaaaaagaatgtgccggaaatcacctatcctgtggttggcagaatgaaggagaggttatggtcaaagcaagcaaggtcgaagaagaaaaaggaggaacaatatataactgcagaggatttgttggccagcaagcaacaacaagagttggaggttgttcagaaggtttatgatatgaggggtgcacaggttgtggttttaacatattactttgatttaaatgccgaggagaaagcaaaagatgatggtttcccgattcaagcacgtcactatgaagctacttgattatgctttttgattaaatttgatacacacgatacagataaaggttgtacaggtgaggatgttcgtgcttattttcattacataaaggagtaaattttgttttttttttga

SEQ ID NO: 76734 - DNA, 362 bp, Glycine max
  Clone ID: PAT_MRT3847_40304C.1
cgcccgcgagaaccgcgccggaacccacgcgacgatccacccccccttagaaagaaaacacaaaaggcaaacaacgagggagaaggaccaaagaccgccgcgacacaccgaggagaggcagaagaaagcaccgcgagcaccgagaggcaccagagagggagggaccgagagagagagccgaaggcacatacggagcacgggggagccgccaacgaagaggaaacaccaaacatggaggcagatgaccagggcaggaaaagcaggcgcgaagaacagggacgagaggaaggaagcacaggagagacgcaagagaaagatcacagccaccccagcagggaagcaaacgaacccagcccagaaag

SEQ ID NO: 76735 - DNA, 147 bp, Glycine max
  unsure (1)..(147): unsure at all n locations
  Clone ID: PAT_MRT3847_40305C.1
ggatgaaattgatagagttcttgaagcagggcnccaagtgactnacnccagacatccaaaagctgccntaccttcaancagttgtganggaaatnntcggcttcgaatggcaaatccctcnccatgtnccacacnccanacgangng

SEQ ID NO: 76736 - DNA, 478 bp, Glycine max
  unsure (1)..(478): unsure at all n locations
  Clone ID: PAT_MRT3847_40306C.1
caaaatgagacggataccccatncggaannccnnnnnnnnnnnnnnnnnnnnnnnnnnnnnnnnnnnnnnnnnnnnnnnnnnnnnnnnnnnnnntttnnntttttnnnnnnnnnntntttnttttttttgggtgttttttnttttttttttttttttttttttttttttttttttttgttttttgtttttttttttggtgacccgagaataattccatttttaaggcactaatctttccatacagcaataaccccctttccttccaaacttttttcaacccaaaaaataatttccctttcaaggaactttttttcatcaaccaaaaatttctcaacggcccttcctctctacttataccatcacaaaaaaaaccccttttgaccaataaggtttcctctgggaaaaaacccccaaaattaatatgggttacctttcttcaaaaactaaccttccaacttattttcctttaaaaccaac

SEQ ID NO: 76737 - DNA, 309 bp, Glycine max
  Clone ID: PAT_MRT3847_40307C.1
ttccaggaaggtttcccgtcatcactgtatgacgtcctccttctttggggggggggggggggggggggggggggggggggggggggcatacccaacatagagtactcgcaaagatggcacacaaagtagccgcaatagcggaatttggaaaagagatactacggcaaagaagaaaagatataaacggtggggcataataaaggccccaaaaaacatggtgtactttggggtgcaaaacgaggcaaagtaagtaaaacgtagtttatagttgggtacgcatgggtaaaagcggtagagctaacccaaaaa

SEQ ID NO: 76738 - DNA, 334 bp, Glycine max
  Clone ID: PAT_MRT3847_40308C.1
tttttccactcaaatacttggatatatagacaatgaaatgttcaacagaccgggcgaggggagggcaatcaggaggggggggactcaacatttacaaataggatcccacatataaaatggacaaatatgtgatggggggggtaattaaaactaagaccacaggatagggtaccccaatttcaacgcggaagaacacgacaaggaaacccatcttgcacaaggagattaaccggattcgtggacttataataggcctcaaccttgggggacacctggcgaggaatgcgtgcatacgcaataacagaagcatcttccaaaccacgaaaataaattg

SEQ ID NO: 76739 - DNA, 423 bp, Glycine max
  Clone ID: PAT_MRT3847_40309C.1
taggccggcggtcgccctttttttttaaatttttaaatttttttatacttattaactttattctgagcatctcgggccgctcgagggataaaggacttgaactgaacttagaagcatgaggaaacacacgcaatcaactgaatagtatgcatagaaacaagatgacgtaactatatatattagaacgaaaattcctaaccattttcaaaaggaaaaacatgaaattctaaggctccactgttgtgacctgctgccattccccatcaactgctgccttccacaatgtgacattgacggttccatcatccacagacaatatgattcctgttaatgaccatgagaccctccaaacacgggtgttgaaatcattcaaaacctttggttaccactgatcccactgtttcaccagggagcatattatca

SEQ ID NO: 76740 - DNA, 281 bp, Glycine max
  unsure (1)..(281): unsure at all n locations
  Clone ID: PAT_MRT3847_4030C.1
gattgancatcnnanaacganggtcacactnctatctatgnttgacgacgtggacnggagatacnaccantactgtganaanatncncatggtagngaactcatttgacntnatgatgngatttggggcggcagtgccatacacagacactggcgcagaaagcaatgttctcggnatttaccggtgtctggaaggaggcgataacagcgcactgatagcaaagttgtgnagtactggngacaaagatggggctgnaagttcaggaggtttgancaanggtt

SEQ ID NO: 76741 - DNA, 112 bp, Glycine max
  Clone ID: PAT_MRT3847_40310C.1
gaagcccaactgcatcactcacaagagaaatattgctaacaccaactctgagcctcacactttcactaaaggttagtttgggggcctttaaacttacatatgcaattcctga

SEQ ID NO: 76742 - DNA, 1237 bp, Glycine max
  unsure (1)..(1237): unsure at all n locations
  Clone ID: PAT_MRT3847_40311C.1
cggctcgagaaagtttccaaattgtagagaaaaaaacagaatgagagggaagacttnaatcangattcangaggaggcgagggcanatgccgccgaattgaggaaggtttttggggagaaagagtctagggttgagtctctggaaaatgaattggcaggattgaagaaggtgaaggctgaaagtgacgttagggttagggatttggagaggaaaattggagttttggagactaaggaaattgaggaaaggaacaagaggattaggtttgaggaggagactagggataagattgatgaaaaggagagggaaattaagggttacagacagaaggttgaggaattggagaaggttgctgcagagaaaaaaactgaattggatgagttggttaagcagaaattaaggttggaggagtcacttagagaatctgaggagaaagtgactggtctggagtccagtattcttcaattgcgtgaggaagcaaaggaagccgagagggtgatcatatcgctgaatgaaaaggcggtggagacggttgagacaatcgacagaggtttgaatggtgtacatggtgaagggaagaagggattgaagttgcagtggccagtggtggcagcagggtctacaggagctgttgttgcagctgctgctgtaatctacgtgtgctatgggaaacggaggtgattttctgtgtcggagactgatcaagaacaaaggaacaaggggaattccaatggaaggaggaaggtgtagaggttagacataccaggtctttagtagtcatagatttgctgctgcagttttgtttgtcacaaaacaatgctgcttctctggcttttgtttttgaagcctgtgaattttttgctcatcgaagttggcatactacttgtttggttgttagttgcttgttatgaggatcaaaccactgtgtgttggatttaataaataggttgcataattgagattacaagtttctttgtgtttagtttagcccttattagcttggaggataacaatggcactgctgaacccttagtttaaggtggcacttggtagttggtatcacctttgacaagttgttcagtttctgaagttgacttctgcaattattagtctttttcatgttgattttctcagaatgtctttgaatgtagaaccacagaaccaattatatgatgtttcaggactagctgatgtcactgattttttcttttgttattgttataaactttttgtcaa

SEQ ID NO: 76743 - DNA, 1740 bp, Glycine max
  unsure (1)..(1740): unsure at all n locations
  Clone ID: PAT_MRT3847_40312C.1
gcaaaaggtgaaaacgaaaatggtaaatgacgcataccactcaaaaccctagtcacacccatttcataaaacaaagctcttcctttgtcactttcctggaaaatttatcttccgttttctcgctgacaccaccgcacactctcactctaatcaaccatggcggacgaaggtgttgccaacggcggcggcgtcgacgatcagtacggcgaggaatcggcgactaagatcgcggcgttgcaacgcgagcgcgacgagttggtgagcgaaaacgtggcgaggaaggaggagatcaagaagctgacggcggagctcgacggattgaggagcgacggtgcagataagagcgagaagatcgaagagctgcagagagaagtggagcagtcgcgcgatgctgcgaaagcgacggaggttatcgccgcaagggcggcggacctggagacggaggtggctaggctgcaccacgatatggtatcagaaatgactgcggcggaggaggcgagggcagatgccgccgaattgaggaaggtttttggggagaaagagtctagggttgagtctctggaaaatgaattggcaggattgaagaaggtgaaggctgagagtgacgttagggttagggatttggagaggaaaattggagttttggagactaaggaaattgaggaaaggaacaagaggattaggtttgaggaggagactagggataagattgatgaaaaggagagggaaattaagggttacagacagaaggttgaggaattggagaaggttgctgcagagaaaaaaactgaattggatgagttggttaagcagaaattaaggttggaggaggcacttagagaatctgaggagaaagtgactggtctggaatcgagtattcttcaattgcgcaaggaagcaaaggaagctgagagggtgatcatatcgctgaatgagaaggcggtggagaccgttgagtcaatcgatagaggtttaaatggtgtacacagtgaagggaagggattgaagttgcagtggccagtggtggcagcagggtctacaggagctgttgttgcagctgctgctgtaatctacgtgtgctatgggaaacggaggtgattttctgtctcaccggagagtgatgaaggagtgaggggaatttgaactggaggaagttctagaggttagacataccaggtctttagtagtcatagatatgctgctgcaattttgtttgtcacaaaataatgctccttgtctggcttttgtttttgaagcctgttaattttttgctcatgtcgaagttggcatactacttgtttggttgttagttgcttattacgagtatcaaatcattgtgtgttggatttaataaataggctgcaaaattgagattacttgtttctttgtgtttagtttgatccttgttagcctggaggataaacaatgtcactgatgttagtttaaggcggcacttggtatcacttcttgtcaatctattcaatttttaaaattgatttttggaacccttagtttaaggtggcacttggtagttggtatcncctttgacaagttgttcagtttctgaagttgacttctgcaattattagtctttttcatgttgattttctcagaatgtctttgaatgtaganccacagaaccaattatatgatgtttcaggactagctgatgtcactgattttttcttttgttattgttataaacttttnttcttgcttggtgccatttttgttctattt

SEQ ID NO: 76744 - DNA, 941 bp, Glycine max
  unsure (1)..(941): unsure at all n locations
  Clone ID: PAT_MRT3847_40313C.1
ataaaaactagctttttcttcctttgccactttcccggaaaatcctcctcattttttctggaaaatttatcttccgttttctcgctgacaccaccgcacactcttcacgccttctctcactctgtactgtccttaccttagtcttgctctttgcttttgcttcataagaatgtaccccaacaattattgattcattntttttactcncaattgnttacttcattgtatagtttgattcacgattcgttattctgttacttggagcttataattaaattcattttcattttacgcggtgcagtttcgatttagatttcgatttctggcttaattaaccgttttcggtgtttgcgtttttttcgttgtttggcagaatctattatggcggatgaaggtgttgccaacggcggcgtcgatgatcagtacggcgaagaatcggcgactaagatcgcggcgttgcaacgcgagcgcgacgaattggtgagcgaaaacgcggcgaggaaggaggagatcaagaagctgacggcggagctcgacggattgaggagcgacggtgcagataggagcgagaagattgaagagctgcagagagaagtagcgcagtcgcgtgatgctgccaaagcgacggaggttatcgccgcgagggcggcggacctggagacggaggtggcgaggcttcaccacgatatggtagcggagatgactgcggcagaggaggcgagggcggatgccgctgaattgaggaaggttttgggagagacagagtctagggttgagtctctggaaagggaattggcagggttgaagaaggtgaaggctgagagtgaggttagggttagggatttggagaggaagattggagttctggagactaaggaaattgaggaaaagaacaagagaatttaggtttgaggaggagactagggataagattgatgaaa

SEQ ID NO: 76745 - DNA, 235 bp, Glycine max
  Clone ID: PAT_MRT3847_40314C.1
gaatcatttcatgcacactcattctctgaggccacacttgaccagtccgaagaagagcctacacttagtacttcctgtacacagttagattctgaaaaatcatatggggacatttcaacatccttgttaaaagcagagtatcataatgcttttgggagtgaggctgggagcaagataccaaatgaatcgttcgtttcgtcatcttaacaaaagatgacattttggatctttgtct

SEQ ID NO: 76746 - DNA, 610 bp, Glycine max
  unsure (1)..(610): unsure at all n locations
  Clone ID: PAT_MRT3847_40315C.1
aaaaaacgtcccttcaacgctcacacctcacacctcctcgtcgtcgcttgcccaaatcgctttcgcgcttcttcaacacccaaacgcttcttctttctcgccccatccccgtccatgcgattcaagaatgacattgcctgtaatgaagtttagtggtcaaatttcttaatagcaggacttttgatgctgtagagaaagctgcaacaaagctcttacaaattctccaagaaaaaacgaccgacatgatgcaaactgcaattggatttgacattgagtggaaacccaccttcagaaaaggtcagttcagcttcttctccttctttttcaatagctgattatggcataccacttacctgatagtgtttggcctattacaatttctgcatttaggttatacggtaacaatattgatacgtatttgatagagtaatgataaatgcccaccccattttgaggcaaattggggtggaaaggagaaagataagaagaagaaaaggtaggaagataaagtgatagatgtgattagtgatgaaatggaaaaggaggagagaggtaggaagaaaatggngggtggaaatgagatggaagagaaagtgatcagggctgattg

SEQ ID NO: 76747 - DNA, 116 bp, Glycine max
  unsure (1)..(116): unsure at all n locations
  Clone ID: PAT_MRT3847_40316C.1
ctagncgacagagcgcagagcatccctcagaggggccgccgtcagctgtggcggtagccgtggcatccccaagggtttcggctccgtgaacatggacgagctgcttcagagcatct

SEQ ID NO: 76748 - DNA, 208 bp, Glycine max
  Clone ID: PAT_MRT3847_40317C.1
gtagttgcacgaaaaaacacaagggcggccaaagcaggcagaagaaaacgaggcgcaaacgagaagaacaagcgagcagaaaaagacgacgccagagcacaggagccaaaaagaccaacaaccggcgaggggggccccaagaccccgaggggacgaaaacaggaacgccgaagaagagaaaccagaccaggcggaacaacccggagcg

SEQ ID NO: 76749 - DNA, 187 bp, Glycine max
  unsure (1)..(187): unsure at all n locations
  Clone ID: PAT_MRT3847_40318C.1
aactcgtcaaaggcagatgcgatagttagaaagctcgagatggatggacgtaaacgtagagagatgtggtagatttgctgatgatacatctaactgcggacngggngccgtgctattgggtcggggaatgtcaaggttgggtgaaggatatttgatagtcggctatcacggagttgggggaaccaat

SEQ ID NO: 76750 - DNA, 853 bp, Glycine max
  unsure (1)..(853): unsure at all n locations
  Clone ID: PAT_MRT3847_40319C.1
nnnnnnnnnnnnnnnnnnnnnnnctttgtgttttttttacggaatgtagagatttcatcaaggtcaattaccaatgtaaatgtttgacctaattcgataggaagacagttttatgcaatgtatagatgctcaacaagaataagggaaacgacatgcaaaattgttaatgcgcaaagatctacaacacaataaaacgatgagacacaggtgaatgcaactttaggcagctgtaacggcatgacacttgtgcccagcaaatgcttgaagaagttctttataaccactcctatagtgctcaattgaaaagcatagttgtcggattgcctccctcttctcctcagccctgtctgagatcatagcattcttcagaatcacctctttttcgagcccatcggcttttagtttcaactcctttacaagtctcagtgtagctgcagatcctgtgctcagctctgcctcttgtccacgtagcaggattatatctctctccagatttgcaatgtaattgtttcggtctcttgtctcagccataaggttatgaatcttagcattggcctcatctttttcagtcatgagcacatcacacttctgcttgtgcctgtcaaattccttattcacagcttcaacatcatgtcttctctgatcaagttcttccttcaaacaactgatttcaccttgcaaatccatttgttgggtagcaagcagctcttctagtttcagtttttccgcttaaagttgccttgatttggtttcaattatgttgcttctagactcatattcctcaagtctagagcccagctgtttnnnctcttctgacaacgagcatatcagaangcaaagatctttctcatga

SEQ ID NO: 76751 - DNA, 1150 bp, Glycine max
  Clone ID: PAT_MRT3847_4031C.1
aattcggctcgagtttcactccaaaccttccttccttccttgtttgctccaaaaaatgggagataacaatgtcaacctcccacccgggtttcgcttctaccccacagatgaagagcttgttgttcatttccttcaaagaaaggcaaatcttcttccttgccatccagatgtcatccctgatcttgaactctacccttatgatccttgggaacttcatggtagagctttggcagagggaaagcaatggtactactacagcagaaggacacaaaatagggtcactagcaatggctattggatgccaatgggaatggaagagccagtgatttcaaactctagcaacaagagagttggcatgaagaaatattatgtgttccatttgggagaagcccctgatggcaacacaaccaattggataatgcaagagtatcgtctattagattctgcttcctctagcatatcatccagaagaagatcacaacctaaaccggaccataataaatgggtgatatgtcgagtttatgaacaggataacgatgatgatggtgatggtacagagctctcttgtttggatgaagttttcttgtcattggatgatcttgaagaaataagtttgccaaattagatgattatgcaagtgatctagttagctgcattttatatccaaataggatattagtttaagctaattgttgttatcattattattaatattgttatttactggttgtagttaaatgcattagcagtttttagctgccattgtaatcagtgaagtcgctatagctagatttctatatagcagcctttcaagtggggcactaaatgaaattcgtggccaaacaatatgcagtgtgacgttatgctttcaaagatcccattcactactacaagcaaaggtcaatcttggaaaattctacgctctttagtcctttttccaacacgtggatattcccatatctagtatctattttcagccattaatataggagttttctttcccccaattcaagataaaatatgcaaaaggtcaatttcttgtttcttaatttaatttcccaggaatcaccaatttagcaaataatccctttacaactggtgcataaaagttttgtgcacttaaaaatattttcatagaagatcagccccc

SEQ ID NO: 76752 - DNA, 155 bp, Glycine max
  Clone ID: PAT_MRT3847_40320C.1
ggcttattgtggatacctaggcacttagattcaaggaagggcttaataagcgacggggtgcttcttcaagttaaaaaggggcgtatatacagccattccctaaatcggtccacctttctaactgttggtgaatccactggcattcaagagacaac

SEQ ID NO: 76753 - DNA, 196 bp, Glycine max
  Clone ID: PAT_MRT3847_40321C.1
gggtgtttttttttaccctgttgtttctttttttcaagacggaacaaatgttgggaccccatttagattgcacactattaaaacaaaaggtccctaattctatctatcaaacatttccatccattttacaaattgttagttatttcaattctacgaaaaaattgtgaacgaaaaaaaccatgattttatctgccaa

SEQ ID NO: 76754 - DNA, 431 bp, Glycine max
  Clone ID: PAT_MRT3847_40322C.1
ggcctacggagagtctggacttcgagtcagtgatttgaatgccggccaaaatgaagggtatgcttggtctcagacaacaacgaggaatggtcggcgtgagagctccaacacggccttcttagaacaacagcgaaaaagtcgttgcaatctacacgttgtgacaagtgctcaagttaccaaggtggaaatttactgcaaaacaaagacggcgacaggtgttatctttacggatgtagatggcattaccagaaccgtgaaggcccgcaaagaggtggtactcagtgctggaacatacttctcacctcagttgctcatgctatctggggtaggtcctgcgaaagtcctacgagaagcgggcatctctgtattggctgatatccccggtgtaggaagtaatctacaggaccacctggtagtaaaaactatgccaa

SEQ ID NO: 76755 - DNA, 315 bp, Glycine max
  Clone ID: PAT_MRT3847_40323C.1
tagacatatgcttcaagaccacataagggtattggataattccaagcttgaacggaggagtggtaaggggggggctaagtggattgaaccttttgatgtgtactaaagtgtatcccaatggtatagatgagaccaaaagcgattccacatacaagagcttcaaggtcaatggacaccttctcaagttatttcctcacaaaccctactttatatggtcaaagtggaagaagagacttatttaatgtaccctagtcttcctccaacatgactaaaggaaagttttctatgtctacgtccttgtttacatttattaca

SEQ ID NO: 76756 - DNA, 249 bp, Glycine max
  Clone ID: PAT_MRT3847_40324C.1
cagaatataaaatatgatttcaaaagatgaacggagctcggaccttgcacgcagcttgcaagaaaaagtaaaggggagtggaagagtgaacataggacacaagagagaaaaaagtgaacactgatataataggctggtggttggttttggccttagagctagctcggagttacaactatctgctttatggggtatggggcgtgaccggcaccggcctgcttgacaaactcaaaaggggggaggagactg

SEQ ID NO: 76757 - DNA, 336 bp, Glycine max
  Clone ID: PAT_MRT3847_40325C.1
ctgcaaaccatagttttattaaccaagaaaaggaaaaaatgtttattgaaacatggaggaggctaactaacggggggctgtttatgaaagcgcacaccaaataatcccttaaattggtcctaggattaattaaaaggaacattccaatgaaattaagtccctcacggggaataacaaatttccgctatcctggacctaaaaaaaatttgaaacggaaggatcaatcttttattatggccaccgcttgacactttttgaaggtaaccaaccaggaccatgatttcactaaagcttgagccttttcaccccactggatctgcatccggatgattgccc

SEQ ID NO: 76758 - DNA, 493 bp, Glycine max
  Clone ID: PAT_MRT3847_40326C.1
tgtgaagagacttaaatatcccttgttcacactacttgtttttgattcaagacaacatgcacttcctgtcgcatgggtcattacacgtagctttacaaagcccgatgtgtctaagtggttgaaagctttaattgatcgagctcgtagtgttgagcctggatggaaagtcagtggatttttaattgatgacgctgcagctgaaattgatcttttgagagatatattttgctgtcctgtcctattttcactatggcgtgttcgtagatcatggcttaggaatattgttaagaaatgtagtaacattgagattcagcgggagatttttaagcgtcttgggagaatagtgtacaacatttggggaggtattaatgcatcgcttgccttggaacaattcttgctggattttgttgaccaaactgctttcatggaatatttcaaagtcatgtgggttgcccaaagcgttgaaatgtgtggggccctttcaacgatgaga

SEQ ID NO: 76759 - DNA, 273 bp, Glycine max
  Clone ID: PAT_MRT3847_40327C.1
ccctttctctctctctttctccccattctagttttcaaattttcattcatggatgcccaactaataatccctcttctccaagaggctagaggcatctctctttcccttccttctcctccctccaatcaaaatctcaacttttttagacccatttgatctctttcttccatctatttgatctttgcatgtgtcagcactctccacacgagtttcagaacgatggtgaatggagcacagaaaacatagttggatttctttcagcatctccatcat

SEQ ID NO: 76760 - DNA, 457 bp, Glycine max
  Clone ID: PAT_MRT3847_40328C.1
ttttttttttttttttttttttttttttttttttttttttttttttttttttttttttttgggctttacaaaatccttgcattaatgggcaaaataaaaccgaatttcaaaatagctaactttagctgaaaaaaaaaaaatcttttcccactaattttccggtttttttaaaaaaatcctccccccattaagggtggcccccagaaaaaaaaattttacccatgacccttcattttggaaccccccagcccaatttacccccgtaatcctatggggggaaaaacaaactgggccaatccccccgtttggaaaccccttataacccggggggaatgggtcaatttgatttggcctaaccttcaaaaaccttcggttcgaagctttccttttgaaaccctatgggggcccccgggaacgggatcttttgccaaaaaaacaccccctcaaaggtccttat

SEQ ID NO: 76761 - DNA, 976 bp, Glycine max
  Clone ID: PAT_MRT3847_40329C.1
gggaggcggcccttaattcagcttgcacgactcccccctgggaactgccggcagacggcaaggcccctcaacaccaccgccggccgatcctcccccacattgatcggcttcggctcggaccctaacagtaaattttttggtgtttaatatacttgtaaatattttacatcaactatactaggagctttgctttcctactttcttcaacctgtatatctttcttcaattactgttggtctgccccttgacattcttgagaattttcgtttggaggacagcttgaaaagagctttgtatgaacgtatgctgcccctatcgaatgaactgacatctccatttctagtgaaccagcctatatttcacgctgcaccagtacccccaaaggactttcagcaatctgagagtgctgctaacactttaacatgcggatattcaatatgttggaatgaatgtggcttgcatgacgtcatcatgggaactaccggaagaaagcaaggcacctctgcaaaaggggcactctacccatcaacacagtcatctttatgcaaaaagaggctgttggaggttttcttgtcactgggaccagaaaatttgattggttctctacccaatgggattacttatcgagaacttaaggatggagctgaagaatatcatttggcttccaaatttttaaaaggaaggcatcttttaacaagtggttcttgaaacccttggattgtgaggcattccccatttcagaataatgctttttaattatctgtctaaggcccatctttggttatgtaaattgaattggatgcaagaatccaacttctgtcaattggcacacgctcctagtctgtaagttaagacctggttgcacctccaaagacaaggatggagatcacccgcatttttctttcaggtttatttacattaatataaagatattttgtcacctctagaataaataaaaataatacatttgtttttc

SEQ ID NO: 76762 - DNA, 388 bp, Glycine max
  Clone ID: PAT_MRT3847_4032C.1
ggctcgagctgcgactgcaactatttcgactggagggactccctcatcggcgccgccggcaccactgatttccccttgcgcccgtgcgaattcaaccgggtcggtcttcaacccactcaacgtcatcgttggagtgtacagcgcgagttcgccgtggacttggattgcgggtggtccgaacttcaactactacaaggcctggccgagtgtgcatcactgcatgggattgccccgattcaggccggagttgaggtgattcgagagcaaaacttgctttcagggggcggagaccaaactgaaagagggtcatgagtcgtttggtagggctttttcagctgcgctgaaagggggcatgctcggcgcttgtgaggaggagctgacacttgct

SEQ ID NO: 76763 - DNA, 189 bp, Glycine max
  Clone ID: PAT_MRT3847_40330C.1
ctttgttttctctttttttttttttttttttttaccccaaagaggggaatccttttatatctaccacccggagcgagttcaacgaccaccttccgcggaacagagtccatgcccactcatgatgtctatgagacgccgggggggaaacgtaattcacccctttttcgaggcctacaacccccctggcac

SEQ ID NO: 76764 - DNA, 413 bp, Glycine max
  Clone ID: PAT_MRT3847_40331C.1
aaagcatggaaaatacaacttaaatttattatgcggcggggttatcaagcttatcactctaatgccagatttggcccaacaaattatttatttggcccaaccagatacctgactactggaaaaatttccggtaagcacccatcctgttttattaggctaggttacagcataacacagagtcagccctttaattactttggaaactgagccagacagaggatgattgtgttcgtgccaaacaccaaaaggggtgttaactggaccaacgatgggaacgacagaacacacactcggagctttatttaaagatgtgcagatccccctacttataataatcggattcaggggaagccatttgtggggtatttcaagcgtctatggcgtctttgaagccatcatttgggtgatgacca

SEQ ID NO: 76765 - DNA, 1230 bp, Glycine max
  Clone ID: PAT_MRT3847_40332C.1
gtgagtcttgtgaggtctaaggatgaagcagttcaggtgagttctgctgagttgattcagaacattgcctctggtgatgagttggttaggcagatggtgattaaagaaggagggattcgcgttcttttgcgtgttttggatcctaagtggtcttgttcgtcaaaaacaagagaggttgtgatgagggttattgataatttgtgtttttcttcacgtagttgtgttagcgttttgctgacttatggctttgtggatcaattgatgtattatgtgagaaatggtgagtcttgtgaggtctaaggatgaagcagttcaggcgagttctgttgagttgattggcgtttagattctgcgaaacatcggaggaggctaagaaggcgttgggcgatgccggcttcatggctgagcttgtgaagtttctgaatgccaaatcatttgaagttagagaaatggcagcagaggcactctctggaatggttatggtggcaaaaaataggaagaggtttgtgcaggatgaccaaaacattgctcttcttctgcaattgctggatccaggggagggcaattcaggtaacaaaaagttgttgatctctatcttgatgtcactaacaagttgcaacagtgggaggaaaaaaattgtgagttccgggtatgccaaaaacatagagaggcttgcagaagctgaggtttcttctgatgccaagaggcttgtgaggaagctatccacaaaccggttccgcagtatgttgaatggaatctggcactcttgaatgtaattgtatttttttttcaccttttaactgtatatttttacataattgttttccaagttttgctaatttgatttcctcatctcaatttgttttcagttttactatttcatttgccttcatgacaagagtagctcagcctttttattgagattgtaacaagaaaaatagtgataacatgaaagatttgttgtagattttcttggggacactatggcattgtttttaggcttttagctttgactgttcagttgtgaggaagaaaaggatgatattattattattattattattagaactgtattatatatcataaaataatgtaattaatccctggctcaatttgttttagttttatttcatttgccttgcccatgacatgagtagctcagcatttttattgagattgtaacaagaaaaatagtgataacatgaaagatttgttgtagaaaaaaaaaaa

SEQ ID NO: 76766 - DNA, 185 bp, Glycine max
  Clone ID: PAT_MRT3847_40333C.1
cttcttttttttttttttttttatacagaacaacacaatgtggaatatatctgagcagggtcatagtggagatttcatggggctttggatactcaccacctcatattcgcggataaggggaaggactttctagaatagcccaataccttcataatcgatactgtaagaacagaatggcccactat

SEQ ID NO: 76767 - DNA, 1480 bp, Glycine max
  unsure (1)..(1480): unsure at all n locations
  Clone ID: PAT_MRT3847_40334C.1
acgagtaagcacacacattccgcaaagtcggccccacgcgtcgtattgattcaggctttgtgcaagacctgcacggcttagaagttgaaaccccttcccggaaaagagttcattcagaaaccccgacgaactaaattttcaaattttgtttccgatctctgaagaagagagtgatggcggaaccttggagaaacatcgacgtggagaagctgatctcgtacagcgacgacctcgtcaaggtgttgtcggagggtccgcgcgacctcaacaacctctctcactctctccaacaaacacgcgccctttcttcctcctgcgactccgacctcaatgaagctcgctccttcctccatgactatcagaacaaagtagatgcatgcaagcagaaaatagaggaagctagatccgagactgctgctgatggagacctggatcttctacaaagagaactggaggaagaacttgagaaagaacgctggttgaaagaggagtttagaggcatcggcgatgaatttaatgatctagaacagcaatggatttctgttcaagagcaaaagaagaccttacagaaaattgagaaaaataagcagaggacacagatggtactttcaatgtatgcttctgtcacaaatattgtgcctaacttggatgaacagtccaaaatttcaggctatattgtggaaaaggataaaaatgctgttgagaagtttgaatatgacacctcaaatatgactgcccttgatatatgtaatggtatttggaaaataataagtgagtgatgcatgtcaactagataagttgatacatgcaacaatgtattatttctcagttttgagtggcaaattagcgatcctgcaattcagttacatattggtgtaagaattcaatgtcttaatttattgtgaatgaaaatcttgcaatgttgatattgactactaagagggggcaatatagcttgcaatcagtttcatcgagtgttttttcatcagtaatcacacactagtttgaatcttttcggagttggccacttgttctatcacctagtatgcagtacacttgagcatatataagaaattcagctgtttcaagcctgcagaggtccctgtgaatatnntagtgctggagcagtattttctcttgcgatcacaaggcaaagactctacccatccaaaatgatgaatatatatatatatatatatatatatatatatatatatatatatatatatatccagttgcttcagttttcacgtagcacatttcgtgggttagttgaaactttattaatatacttttatctgttggactttgtacattacctatactttccaaggttggtttcagaaaatatgtaatacttgtaaatggtaggatatggtaatgtatggcgtgatattgatatagggtggatctgcaatatgtgagtgaaaatacattaccgtatgtctactatagactacgtgccagaaaaannaatcaa

SEQ ID NO: 76768 - DNA, 731 bp, Glycine max
  Clone ID: PAT_MRT3847_40336C.1
tttttaaaggtactaaagcaattcaattattaaagggaatagttgtcattgttatcggccagcaaatcagtaaaattcttaacttaacagcaacatctaaattgtttgatattgtaattcaatggggtgttttagcactcattgtgatatttcaacctgaaataagaagagccttagaacaattaggtagaggaagttttttaaaacgatatacgaatacttatagtcgcgatgaagaaaagttgattcaatctgtgtctaaagctgttcaatatatggctaagcgacgcattggtgcgcttattgtttttgaaaaagagacaggtttgcaggattatatagaaactggaataccgatgaattcagacatatctcaagagctactaactaatgtatttatccctaatacgccattacacgatggtgcaatgataattcaaggaagtaagattgccgttgctgcaagttatttaccattatcagatagtgttaaaatatcaaaaagtttaggaactagacatagagcggcagttggaatttcagaagtttctgatgcttttactgttgttgtatcagaagaaactggtgatatatcagtcacttttgatggaaaattaagaagagatatttcaaaagatgtttttgaagaattgcttgctgaacattggtttggtgcacactttcaaaaaaagggtggaattcataaatgcttgaaagtaaatggggattaa

SEQ ID NO: 76769 - DNA, 692 bp, Glycine max
  unsure (1)..(692): unsure at all n locations
  Clone ID: PAT_MRT3847_40337C.1
acgctctgactagggctcgagattaccacttcccaatcgcactctgcttccgttctcactttctctcacacctgaaaagtgaaaactcatcatcatgttctctctccaacaattccttccacacacttcctctaaactgcttgaccattctctttccttaaagcgccacggccaccgccgcttccaccgccactgccccaccactctcagcagttcccaccaatccggaccctcgctttgtgattccaaaactcaagtgtctcgtgttccgcttttgacttccactcaggcctatgaaaagctaaaaacatttagagaaaatataaagggcaagcaacaattccttgccatgtattctagtatttttggtgggataacaacagacccagctgctatggttattcctatggatgaccacatggtccacagaggccacggtgtctttgatactgcagcaataatggatggatacctatatgagctagatcaacaccttgatcgctttttaaggtcagcatccatgtctaaaatagatcccccatttgatcgaggaagcataagaagaatactcatacaaactgtaagtgcttccaagtgtagaaaaggatcactaagatattggctctcggcaggacctggcgactttcagttatctccctcttgntgcaccgatcaagtctgtatgcgatagt

SEQ ID NO: 76770 - DNA, 285 bp, Glycine max
  unsure (1)..(285): unsure at all n locations
  Clone ID: PAT_MRT3847_40338C.1
tttnnncccnnttaatatttttctactcccggggaaaaacaaagggcaatcattactcacaaggggcggatgtcatattcttaaatgtttttaataagagactccatttactcaatgaccgaacccagatgatactgtttcttttaaaagggacggaaggacctagggggggggggtttaggtttggctcgctggccccccaaaacccctaaactccctggcctagaaagaacaaaggcaatacggaccccccaaagaaacacgcctatccaaagcaaacccccc

SEQ ID NO: 76771 - DNA, 452 bp, Glycine max
  unsure (1)..(452): unsure at all n locations
  Clone ID: PAT_MRT3847_40339C.1
ggctcgagttgctgtacttaatttgctgaaattgaaagaaagaagaagaagaaaaaaattaaattatagcacaattgtaggaaaatggctacaacgcaatcctacgaagatttggaagcgaaatatgaaacagaggaaacgtctgaatcagtcatcttggttgttcacatgcctgatggttttgcaagagagcatattggagctaaaattgagtacgattttggaagggtgagagttcacggtgaaagatcacttggaaacaatagaagggcacgtttcaatgcattatatcaagttccagaatattgtgacatcaacaaaattaaggggaagtttgatggcaaaactgtcatcattacaattccaacgattccagggaaagtacctaagaaagaaacacaaccaactgaacaagaaccacccaaagaaccatcacnagaagcagaatcaaa

SEQ ID NO: 76772 - DNA, 324 bp, Glycine max
  Clone ID: PAT_MRT3847_4033C.1
gccttgcttcaagaagacgttcttcctgaagggcaactactccgagggcttcggtaagctcaagcctcagcagcagtgggccatgtccatgggcctcggctcctctgcgggcggagacggcgatgaggactcgcagttcaagctgtctgatgcggagaaggcggaggccaacgcgctcgttgccaagactgccgacgagctcaaggctatttacgaggagcttctgaaccaggagaaggagcttgacgccaagcttgccgccgcatagacgcgttgcctgtattaaaaccccaatcgttctgcaccaaaaaaaaaaaaaaaaaa

SEQ ID NO: 76773 - DNA, 242 bp, Glycine max
  Clone ID: PAT_MRT3847_40340C.1
acgagattgagtttaggtataaaatttacaacctatgacatggacatgtataattttttattgaaggatgtaagtttgtactctttggtttacctttataagtctccaaaggtcacacaagttcaaaattcaaaccaactttaattcatatgtcatatctattttttataacataataataatttaatattaaaaagtgatattatattaagcattaatataaaatttacaacctataacat

SEQ ID NO: 76774 - DNA, 925 bp, Glycine max
  unsure (1)..(925): unsure at all n locations
  Clone ID: PAT_MRT3847_40341C.1
agccgaaaccctctgcttcttccgcgtcttcttcttctcttctcttttcgaagcttctcgaactccaccaatggccgaaaccatcgtgatccaaacggagcctccgaatccgccggatccttcttcgtccactactactaccgccgctcctcctttgctgtcgagaaaaatcgtgtttcttcctgtcaagaagcccttcaagggtttctccaaccatttccacgtcgaaaccctaaacccttcctcctcctccgaacctcgcccctccggttccgtcgctaagaaacacgacgcttccgaattctccgagtacggcttggatccggagttcagcttcggaattaccttccgcagaataggagctggattgcgaaatctaggaaacacttgttttctcaattcagtattgcagtgtttgacgtatacagaacctctagctgcgtatctgcaaagtgggaagcataaaacttcatgccacggtgggaagcttaaaacttcatgccacgttgctggattttgtgctctgtgtgcaatacagaatcatgttagccgtgcactgcaatcgactgggagaatattagcccctgaggatttggtcgggaatctgcgatgcatatcacgaaatttccgaaatgcaaggaatttacttgagtgtatgcataaatgttgcctgccttctggcataccaagcgaatcacctggtgcttatgagaaaagttttgttcataaaatttttggtggtcgtctcaggagtcaggtgaaatgccaccagtgttcttattgctccaacaaatttgatcctttcttagatntaagtcttgaaatattcaaggcagactcattgcaaaaagcactttcaaatttcacggctgcagaatgggtggatggaggggagaaggaagtccattggcagcggtgcaaacag

SEQ ID NO: 76775 - DNA, 1012 bp, Glycine max
  Clone ID: PAT_MRT3847_40342C.1
ccatgcaagtacgacatcttacatttaagaaacttaatgagtcaatttacaatccaatcaaaccttctttggtttacaaacagaaatttaaaacacaatcacactcaatagaaaaaaatatataaaggactaaataagagagattcttatgcttttttgtaaaatatagttatatgtaactggaagatgttaatggcaatggtatcctccgtatttgagttaaataaatgaggtattcaagtgaaggtgcaaggctctttagcaaatcctacctgagagagtttggcatcatataacaccctttggttcctctgctgatagtttccaatgatccccatttcatactcatcagaaagactagcaagcgccaaacaaacccgcgaagcatcctctttaactaaatagaatatgccagttgcatccacattcagctcagcattgccctcaaaatacatgctgatggtaggtatgtttacttggtcatatccagtgagattaaagcaggtatccaaaattgaaaagcccggtgctgaagggaaaccagaaaactgttccaagaactttgccttcagagccttgtacacagatggagccagtcttgagattactgtcccggaatcaagtattaccccaccatttccaaaacttgaagcttgcacatgcagactcacaccacccacatctatgccagtgagattcagtatataaaagttggacagctgaagattaggaagcatcctggtgtaggcaatgggagtaacatttttgaatactccagactgattacccataaccaacgagcctgaagctccagcttgatcagttgaaggtaagcagtaagaaaaaactcctccaaatgtagcattggtttgagagatcattgagagctcacttcttcccaaccccataagccctgaggctcctccaaagagacctttgttgttccttccacaaccaaacacaaaattactcactgaaatgcctccaaaacccagcttctcaatccccagct

SEQ ID NO: 76776 - DNA, 767 bp, Glycine max
  Clone ID: PAT_MRT3847_40343C.1
acacaacagacagacaaattaaccaacattttctcagcttctggcatgagctcatatgttcatgggattttcatgcggggaggatcattttgacgaaaaagagagcgagtttcccttgatagatgagaccagtgcaacacaagaacaaaacagtatcatcatggaagtgcatcatcatcttcaaggcgttgctgataaaagcactgatttctgcccagttgaacaccctatggagccaccagatgaagatcgtcccgtgaaatgcccaatgcccgagtcttcagttatcaatgatgaaaggatgcatgaaaagaggtttgcagaaagctcaaagaaaagagtagagacaaccagggtcgtggtgaatggagaaagaacgaccaccatggacgcagagcctccagctcgaggagtaagaaagcggcatcacaccctcacacacgaaggaggagaccttgtgatgactccattaatgagaatgccacctcttcctcccctaccatcccaaaatatcaccatctttcaggtgcttcagcagttggacaagtttgagtcttaacaaagaaataaattccatcacaacattccatgtacgtaacgaaggatgcactttggttataagctgagtaagcttcaatagagcaagacaaaaagcattggagcagcaagatcccaagtattcatcatgtgtgggtcgtcaaaaaatgtacctcatgttttctactaaatccagatatttctataaaaaaaaaaaaaaaaaagggccc

SEQ ID NO: 76777 - DNA, 496 bp, Glycine max
  Clone ID: PAT_MRT3847_40344C.1
gatcactcacagagccttctgtgatgccttagcacaggaaagtagtagagtagtgaaccctcaccctcttctatcaactcaatttcgtagtcatggccttcagcttcaagcaccatcacttctgaaaagagaacatgatcacttcaacttattaacctcagaaattccatcatggttaacttctccaacagtggtagaagaagcaatattgctaaacaatcaaaccataagaaccacctcagattacttctccacaccacagttattcccaacagcacatgtcaacaataaccactccttactccatgatcaaaaccctaaccctaatactactacaacaaccacttttctttcttctttgagttccttccctaattattccacttcttcttcttcttctcctcacatgtcagcggctttgttgcaaaaagcctcacaaataggcgaaacagtgagcagtgcaccttcacaagcgatgctggttagaccccacttg

SEQ ID NO: 76778 - DNA, 566 bp, Glycine max
  Clone ID: PAT_MRT3847_40345C.1
attcggctcgagaataatcacaactcaaaccctctctctctctctctctctctctctcatataacaatatttccacgtacaattaagacacgatcactattgcatctacaatggaattagcaccctcaaactccaaccaacaacatgagaacaacaacagcaacaaggttcaggggctccattgctctgtgaagaactatgagtggggcaaaccgtgccgtgactccctcgttgccaagctattttccatgaattctgggtcgttacaatcatcacagcttgatgaggatcagccatatgcggagctttggatgggcagccacgtgtctggaccctctttcattgtttttgatggctcacaacaaagagtgaccctcaagtcttggctcttggagaatcctaacgtgcttggaccaaaggttgtggagaaagtgggtggtgacctccctttcttgttcaaggtgctgtccgtggacaaggccttgtctatacaggctcatcctgataaggagctggccagaaccttgcataagttgcatcctgatgtttataaggatgggaatcac

SEQ ID NO: 76779 - DNA, 250 bp, Glycine max
  Clone ID: PAT_MRT3847_40346C.1
ttttgctctgtgtttctatcgcattatctctcacctgaaaatatctcgctgcaatgccaactctgattgcagaaactcctgcaagttcggcaacacctgcagaaactgcaagatgtacccaaacttcaactacactgattcaaccaccacctacaccttgatcatgggagatgcaccatgtaaagctcaatttcatggtacctaaatgggtacacccgctgagaactatggctgcaaatgctgaccaaac

SEQ ID NO: 76780 - DNA, 344 bp, Glycine max
  unsure (1)..(344): unsure at all n locations
  Clone ID: PAT_MRT3847_40347C.1
attgaagttattaaacccagggttggcttccttttcaattggcaggtttattccccttccttagcctctcctttttttcctcatctctattccaaaaaaatcattcatacccaagggccaggattccagccttttaaggtccacatccctacccttttccaaaggtgggttgcaaaaataacgtattacatatttgtcatgcttaacaatatgtgctatatttccagtcggggatgggggatgcaggatcctgggatatataagctttgaaagatcttcaagatctggctcccgtttctttgtttataatgacaaattcangaatcttatgattctcctctttt

SEQ ID NO: 76781 - DNA, 375 bp, Glycine max
  Clone ID: PAT_MRT3847_40348C.1
cgtgtctgcagaggtgcattcaacactaatcaaagacccttaggcctggctctatcagattttacttctgcccagaggtctagtgcgaaaatgcagctagtatcacactgtatataaacagtgtcttcatttttttacaatactatctcatactgacgctgcagcactgtctgctaaaacctactcttgccgttattgaatcatttactttccttcgataactagatcttatggcatattcaacattcttgtgatgtaagaaatgaattacttgaaccatgatttgcacaccaagtgctgtgtttatttagcctttatgactgtagacttcataacaagccaaaaaacatcacctaactatcttcccatcctctt

SEQ ID NO: 76782 - DNA, 397 bp, Glycine max
  Clone ID: PAT_MRT3847_40349C.1
tgtcttcctttttctctttcgctgttctttgttatttatctaaaggatcgacctcgaataaaaacaacccaacttcaatcttcatctccataaccaacacaatacattcaaatgctacccaatatttagtggaccccacagaggcgcgtttgaaaccatgaccatcgaatttatgctttttatattgtgggcaccgggcctctgcaacaatcccaaaatcgtggctttggcttcaggaaacccatactcagaaagctttcggtgagcctcagcgttatctgcgaagtatgggtgttcattcgatgcatatttctcaacaagatggcggaacacaagagtggacttaagggccttgtcagaaggtaactgaaagaagccttctttctcaccactcaac

SEQ ID NO: 76783 - DNA, 415 bp, Glycine max
  Clone ID: PAT_MRT3847_4034C.1
tgtcgtcctttttttttttggacttgccaatgttaaagagctgatattgaactggtattacaacgatattactgccactcacccgttagaccgctatccaacttttcaactgtattaaaccttcatcacactctacaatattgcactgaccaaatgatcaggaccattactcatacggaatccatgcatgaacagccaaccggcatctgacttggaaccactaattcatggtgcacaggcccgcccatctacagaagaacctacagtctgcacaccgagaactaccaagggccttaggagacggagttgacacacttctgacaccgatttaagcgagctttgggaaaaggcaagacaccatcggtacgcactattcgagaaagcctcccatgctttatggacactgaactcatga

SEQ ID NO: 76784 - DNA, 278 bp, Glycine max
  unsure (1)..(278): unsure at all n locations
  Clone ID: PAT_MRT3847_40350C.1
gaccgtgatanananaaagntagatcaanttttgtagacaactgggatcgtgactgttctgaaccattttctgacatctttcctggaaggatagagagagacactttacggtgttctcattcaatggtttccaggaaacagaatgagattttgacccacagagttgcagtagataccaaatctggtggcaatagctaccagaaaagcggtaatgacttactttctggcagtagtattggtagtagtgttcagaaagctgtttttaataaggnttttcc

SEQ ID NO: 76785 - DNA, 667 bp, Glycine max
  unsure (1)..(667): unsure at all n locations
  Clone ID: PAT_MRT3847_40351C.1
cggaattcccgggtcgacccacgcgtccgcggacgcgtgggggaccttataagaatctgcagaggagtgcagatgtgaatcactgcataaagttcttgagaaagaactgattcatcaaaagtatgcagattataaggcactgggtgatgtagataactctcagaaacggtatatcttacaaggtctatcccttccccaagaagataggcttcctgcggccttgcatcgaatccttctgaccgccctttcaaattcaacccgccaaagtggtcaagaagatgaaattgataagttggtaactaggatgggtgccatgcagatggcgaaatctctggatgatctcgctgatgtttgtgtaagagttgatagaaaaattttccgctgtcaccaagttattctggcatctaggtcagaatatttcaaagcaagattatcacatatgaaggacttccatgaagacatagatgagttatctgttgacatccttccttgccttgaagaacatgacttgagcatggaagctnttgagaaaatgattgagtatatgtacactggatcgtttgcaggatataaatccagatcaggctgaggaaatgttggatgttgcttctagatacttattgtttcctctcagcgggcggtggctgatgtcttgttgccacacttg

SEQ ID NO: 76786 - DNA, 727 bp, Glycine max
  Clone ID: PAT_MRT3847_40352C.1
ggtaccctccgggttctgccggggcaagaaacggaaattccgaaaagatcgcgtacgcgtgggtggggaattcagttacgcagtgtccggggtccggcgcgtggccgttccaccaaccattatacggtccccaaacgccgccgttagtggcgcctaacggcgatgttggggttgacggaatggtgataaatttagcgacggttttggctggggctgttacgaatccgtttgaggacggttactaccaggggccggcgagtgcgccgcttgaggcggtgtcggcgtgcaccgggattttcgggaagggggcgtatccaggctacgccggggacgttctggcggagaacgcgacgggggtgagctacaacgcggtggggatgcgcggccggaagttccttctgccggcgatgtgggacccactcacctccacctgcaagacactcgtgtgagatgaatgtaaagtgtaaaaaattaaaaaaaaagtgacgatagaatgtgggtttgtgtgcgtgtgagagaagagagaaatttgcaagttgtgtctaagagagagatttgcaagtttgcctcggacagtcattttttttgtattttattgtaatgttagtttatgtgtggtaataagtaataaataataatagataatttggatactcttttttggaaaaaaaatatgtatgaataataagagattaattctcataatctcattataaagtttttttat

SEQ ID NO: 76787 - DNA, 141 bp, Glycine max
  Clone ID: PAT_MRT3847_40353C.1
gaagaaagacacagtgatgtgtgttgtggtccgccaaggtaaccacactacactaatgctcaacacgctactccatagtgtcaaatgtgctttcttcttcccgcgcgtgcctctcacgcttactaccaccttttcttctct

SEQ ID NO: 76788 - DNA, 180 bp, Glycine max
  Clone ID: PAT_MRT3847_40354C.1
gaaaacattaagcacaagcatcatccaaatattgatcatgttttgtggataatgaatttctttgctaacattaacttgttttttttctttagatttacagctttctgtgtgtcatttgtgtttctctaaattggtgtgttgtttgattcaaattccaaattcattatgtctatatgtgtg

SEQ ID NO: 76789 - DNA, 418 bp, Glycine max
  Clone ID: PAT_MRT3847_40355C.1
ctatcttctgttcaacatcttttccatcctcgacttcttcattctccgagctctgctcaagctgagatatcatattttctatcacaccaaaaacactattaacagccacttgggtggaatcatccatccctgccaaggcatccaatgcttgagaaacactgaaggcaggggcattagaagccaaattgttagagtgggtctggtgtgaaacatgctgcatattcttattatcttttttctcactatcattaccttccctttctattgtttggtgctcagaggacatagaaggcgaagagggttcttcttttgcatcagttgaagtatttttactatgatcgctagagaaatcctgactattctgctcgtccttcagatagtgttttcctcctttgggtctgcttgagctattccactg

SEQ ID NO: 76790 - DNA, 319 bp, Glycine max
  Clone ID: PAT_MRT3847_40356C.1
tgcttgtattctgatgaaaaaaaacggtcaatatcaatattggttggacctttgttttagtaatttagctctgagaaatgttgctaaataatagtagcaattgtttctctaacactattagctgaaatttattaaaattcattcattttagtaagttttatttttccatatgactacggatggttgtaggttcagactttattttgataattgatatttcgatttgagtttgagagcgtgagagattacgatggcatggcgttcttttcaagaaattttgcgagattcgtattttgtcatgctgattcgattagatatg

SEQ ID NO: 76791 - DNA, 1251 bp, Glycine max
  Clone ID: PAT_MRT3847_40357C.1
cccgcgtccggaaatgggcatcctcggtttgtaattttatgaaatgtagtgtaacaagcactgtcctttcttctgtacctgttttgtttgtggtgtcgctccctgttaaagcgtggattttcacttgtgctgtgtgtgctttaactggaaggttgtttaactaaagtgccttgaagtgtgtgtagccttctactttttctcttctggctctgggcgacacaaaagaagaaccttggtttccgaggctgtttgttgtcactgctcattgctgcaaagttgtaatattttggctgattcagatggcttttgcggttgcaagttgagaatttgagatgagcagccaaaagggtcgtcatgagcatgaagaagagatgggtacctcagaaagcaccggtaaagtggttgtggttgcagtgaaagcttctagagatatttcaaggactgctttggtgtgggctttgactcatgttgttcagccaggggattgcattaagctgttggttctcattccgactctttcctcaaacaagagggtatggggactttcaagatttactactgattgtgcctcgagtcattggagatccagtttaggaaccatttcagatcagaaagaagttattacaaattcctgttctcaattagtacttcaactccatgatttttatgatccagagaagataaaaatcagagtgaagattctttctggttctttatgcggagctgtttctgctgaagccaagagagtccagtcaagctgggttatattggacaaaaaattgaagcatgaaaagaaatactgcatggaacagctgcattgcaatattgtaattatgaagcggtctactgcgcttgaattgaacagttcgtctaagatggaactaaacatggcttgtccattgacacttacaaagcattttcaacaactctccgagtcatttagctaactgagaaagcaagcaagcaattgcgattttttgggggttttcatcacttcccatccgacttttttccccttgctcagtgtgatgaaccaatttttttaaccaatttttacatgaattttgccttgtaatatttgtaaaggagatacaaaaacaattgtgagagaaagagagagagagagagagttttgtattatttttttataaacatattattctagtaatgtcagcaagcgatgatagttactttccatttcttggttgaattcataggtttcaaattcaataatattaatgatttggagcc

SEQ ID NO: 76792 - DNA, 377 bp, Glycine max
  Clone ID: PAT_MRT3847_40358C.1
ggcccgggaatcaccttgtatttcatgaaaaaagaaagacctggcccaaattttaattaaaataaatttaaaaggggtctatgccttatgaaaattcaataatatcatagtgctgcagctcaaaggaaagggattcaaaggcaggggccccgctggaagggtaaaaaatagacccaaaaatggggaggttaaaatgttaggctgcaaaggctgaaaaaaaaatcccacaggctggggaactccaattgggggatgttgaactggactgaatgacaatgacaacgaagtctctgctgagttaagaattccatttggaccaggagataataagggccaaaatactgactgggctgaatgatcattgaaatttgagcctg

SEQ ID NO: 76793 - DNA, 1469 bp, Glycine max
  Clone ID: PAT_MRT3847_40359C.1
ggttcttacacatgctagaaactttttcttttcacattcatcctgaaataaaaaaaaaaattattagatttatattctcttagctcagaacaagacttaagagttaagagggtcacctgttttacaagttttctgatgattaaacagtattgattggctatattattatggtttattgataacactggttattcactagaaatgaaaaagaaaaagaataaaatgatcagtagtttaatactttttatactttgcaattttgaaggaaaggagcaggtgtttgtctatcccatagtacagctatacacgtttgaattggcttgttgcttatttttaagcattgaagactctgaccatatatcaaagctttccttaaaatttgatgaatttctgaaagggatgattggcttcccccttaacattcctggaacaaggtttcatcgggcaatgaaagctgcagatgcaataaggaaagaaattagaatgattctaaagaaaaggaaagtggatttggaggagaagagggcatcagctactcaggaccttctatcacacatgcttgtcacatctgaccccagtggaaggtttacgactgaaatggagattattgataacatacttcttctactttttgccggtcacgatacttctagatcagtgttatcattggtcatgaagtatcttggacaattgcctcatgtttttgaacatgtcttgaaagaacaacttgaaattagtcaagggaaagaggcagggcagttgttgcaattggaagatgttcagaaaatgaaatactcttggaatgttgcatctgaagtcatgaggctatccccacctgtgagtggtgcttacagagaagctaaagaggatttcacctatgctgattataacatccctaaagggtggaagctgcattggaacaccggttcatcacacaaggatccagcactcttctcgaatcccgaaacttttgatgcttcaaggtttgaaggagcagggcctacaccattttcatatgttccatttggtggtggcccccgaatgtgtttgggtcaagagtttgctagactagagatacttgtgttcatgcataatatcgtgaaacggttcaagtgggatttggtgattcctgatgagaagtttaagtatgaccccatgctagaaccagtagaaggacttgcaattcgactccatccttcccatttctagtttaataccatcattatacgcataatacattgattagaagcttcctaagtagaaatcttatattgatgtattattattttaataaaactttttgctacatcggttagcagcttttttgtaactgctttcatgagttttatgatgtattcatttcaataaaactttgattattctgttatgtacaacataaaaaaaaaaaaaaaaaaaaaaaaaaaaaagaaaaaaagggcggccgctctagcaataccaagcttccgtac

SEQ ID NO: 76794 - DNA, 133 bp, Glycine max
  Clone ID: PAT_MRT3847_4035C.1
tgttctttcatgtggagatattttgctggagatcctcgtctttgaagttccttagatgacttcatcctacttttgaatgccccagctctagcttaatagattttcgtaataatgatgtgacacacaccattaa

SEQ ID NO: 76795 - DNA, 678 bp, Glycine max
  Clone ID: PAT_MRT3847_40360C.1
cccacttctcaaccaacaatggcaatggcaacccaagcctctctcttcaccccacccctctccggtctcaaacccagcgaccgagccaccgcgccatggaaacaatcctccaccctctccttctccacctcgaagcccctcaagttctcgcgaacaatcagagcagcaccggcgggctcctgcgcaaggcccaagtggaggagttttatgtcatcacatgggactccccgaaagaacagatctttgaaatgcccactggcggcgctgccatcatgagggagggtcccaaccttctcaagttggcgaggaaggagcagtgcttggctcttgggactaggctcaggtcaaagtacaagatcaagtaccagttttacagggtcttccccaatggggaggttcagtatttgcaccccaaggatggtgtgcaccctgagaaggtcaacgccggacgccaaggggttggtcagaacttcaggtctattggtaagaatgttagtcctattgaggtcaagttcactggcaagcaaccctatgatttgtgagcaactctatcatcattcccccatgcttcttccattcgtttatatgctatattgtcatctcatgtcatgccaggaatgctataactctttaccttaattttacacttctttttcgctagctatttggtgattgttt

SEQ ID NO: 76796 - DNA, 255 bp, Glycine max
  Clone ID: PAT_MRT3847_40361C.1
taatgctgatgttttattacaagtggagactgtggcaggctctagcgataggaagacatagcctcactaatctcaggccacagctagcgcacactcttggactgctggtattaaaggcttacaaatctcagagcctttgctttacttgggtactgaatgcaccatgcctgactgtgcttttccatctgatgggaccggacatgtgtactctgaccctggttcttgtgctctgttataaaactaacagggcttctg

SEQ ID NO: 76797 - DNA, 386 bp, Glycine max
  Clone ID: PAT_MRT3847_40362C.1
acccacaattggaaccaggggggtcactattttcacacttttttctcaatcaacaacttccataaacatccacaaagcaatcatagaaaaatatgattaaattgttaaaaaacacatcccacaaaagaaaataagaaattaaagggccaagagggaaaattaaacctccttgacttttagctcctaaggggccacaacttccactcttaaatctctctaacattcttaacccctttttcacccccaactccatgtcttcttaatctagttataccattctccctgggaaacaaaaattcttaaaacacctctttcatgtttctaccatagtaatctatgaatcaatcaatccaaggttttaaaaaaccggccccctccatgatttc

SEQ ID NO: 76798 - DNA, 727 bp, Glycine max
  Clone ID: PAT_MRT3847_40363C.1
ctcgagccgtgagtgggtggttagaacttgagactaataatggatggtatagttcagctggagaggcaacttgttgattatactgcttctctatttcatgagggctttctagatgaccaatttaaccagcttcagcaacttcaagatgaaagtaacccagattttgtggttgaagtggtgactctcttttttgaagacgcggataggcttcttaatgagctcacaaaagcactaggccagccaagcattgattttaaaaggttggatgctcatgttcaccagttgaagggtagcagctccagcattggagctcagagaattcacagggtctgcatttccttccgaaacacttgcgaggagcaaaacgttgaaggctgccttaaaaacttgcaacaagtgaaacacgagtattccttggtgaaaagcaagcttgaaactctcttcaggatggagcaacagattttggccgcaggtggatcggtttctaggtagtgtgatacgaggcagagatgttttgctgccattgtaatttggaaacaacactcagaacaaatcatgtccaatctgcaaacaaaacaaccccacttctatcttgtatttttcactttgtgtatgattttgtccagtggatcaggtcgtgaaattggatctatcatttaagccagagttggcccatatttagtccaaaagcaatgtgaataacccatgatctctcagctgtttagat

SEQ ID NO: 76799 - DNA, 946 bp, Glycine max
  Clone ID: PAT_MRT3847_40364C.1
atccacaccatccatccaaaatctcctccagcctactactttactctgtttccttttgtttcttattgatctctgacaaccccaacacttccgaaccttgcattgtatctacccacttctcaaccaacaatggcaatggcaacccaagcctctctcttcaccccacccctctccggtctcaaacccagcgaccgagccaccgcgccatggaaacaatcctccaccctctccttctccacctcgaagcccctcaagttctcgcgaacaatcagagcagcagccaccgaccagaccacagaggcaccggttgggttcaccccaccggaactggacccaaacaccccttccccgatcttcggaggcagcaccggcgggctcctgcgcaaggcccaagtggaggagttttatgtcatcacatgggactccccgaaagaacagatctttgaaatgcccactggcggcgctgccatcatgagggagggtcccaaccttctcaagttggcgaggaaggagcagtgcttggctcttgggactaggctcaggtcaaagtacaagatcaagtaccagttttacagggtcttccccaatggggaggttcagtatttgcaccccaaggatggtgtgtaccctgagaaggtcaacgccggacgccaaggggttggtcagaacttcaggtctattggtaagaatgttagtcctattgaggtcaagttcactggcaagcaaccctatgatttgtgagcaactctatcatcattcccccatgcttcttccattcgtttatatgctatattgtcatctcatgtcatgccaggaatgctataactctttaccttaattttacacttctttttcgctagctatttggtgattgtttattatttgcgccaactgcatgttttggatcaatattcatttcctgaaattaatccatccaacttatgct

SEQ ID NO: 76800 - DNA, 1745 bp, Glycine max
  Clone ID: PAT_MRT3847_40365C.1
gggcaatgggcaacccaagcctctctcttaaccccacccctctccggtctcaaagccagcgaccgcgcctccgtgccatgggaagcaaaaactccagcctctccttctccagcccgaagcccctcaagttctccagaacaatcagagcagcagccgccgacgagaccacagaggcaccagcaaaagtagaggctgcaccggttcgggttcaacccaagcctctctcttaaccccacccctctccggtctcaaagccagcgaccgcgcctccgtgccatggaagcaaaactccagcctctccttctccagcccgaagcccctcaagttctccagaacaatcagagcagcagccgccgacgagaccacagaggcaccagcaaaagtagaggctgcaccggtcgggttcaccccaccagaacttgacccaaacaccccttccccgatcttcgggggcagcaccggcgggctcctgcgcaaggcacaggtggaggagttttatgtcattacgtgggactcacccaaagaacagatctttgaaatgcccactggcggcgccgctatcatgagggagggtcctaaccttctcaagttggccaggaaggagcagtgcttggctcttgggactaggctcaggtccaagtacaagatcaagtaccagttctacagggtcttccctaatggggaggttcagtatttgcaccctaaggatggtgtttaccctgagaaggtcaacgccggacgccaaggggtgggtcaaaacttcaggtctattggtaagaatgttagtcctattgaggtcaagttcactggcaagcagccctatgatttgtgagcacacaactctatcttcatcatcatcatcccccgtgcttcctttatatgctatatattctcatgtgatatcatgtacctattgtcaattttattatgccacaaatattgcttaaactctgtaccttaattttacacttctttttcgctattttggtgattaaaaaaaaaaaaaaaaaaaaatattgagtggctggttagaacttgagactaataatggatggtatagttcaactgcagaggcaacttgttgattactactgcttccctatttcatgagggttttctagatgaccaatttaaccagcttcagcaacttcaagatgaaagcaacccagattttgtggttgaagtggtgactctcttttttgaagatgcggagaggcttcttaatgagctcacaaaaacactaggccagccaagcattgattttaaaaggttggatgctcatgttcaccagttgaagggtagcagctccagcattggagcacagagaattcacagagtctgcatttccttccgaaactcttgtgaggagcaaaacgttgaagggtgtcttaaaaacttgcaacaggtgaaacaggagtattccttggtgaaaagcaagcttgaaactctcttcaggatggagcaacagattttggctgcaggtgggtagtgtgatacgaggcagagatattttgcagccattgcaatttgaaaacaacactccgaacaaatcatgtccaatctgcaaacaaagcaaccccacttctatgttgtattttaactttgtgtatgattttgtccagtggatcatggttgtgaaattggatttatcatttaagccagagttggcccatatttagtccaaaagcaatgtgaaaacccatgatctcttagctgttcaaatattaactatcttaatttttgcc

SEQ ID NO: 76801 - DNA, 380 bp, Glycine max
  Clone ID: PAT_MRT3847_40366C.1
tttcctgcacgtttaaacgtttatatgagaacgaatttgattgacttttgttgattatcgctaatgcctagtctagaatgggatggttcataacccatgtaacttggttcatatttgagcaacagtttcctactctagaatgggtcttacccgtaccagaaaatttgtaggcttgtgctgaagttcaaatggattgtgatgaaatgaataccttcgtcttgatagcaacgcagtcgttagtgaactttgaaagatttgcacaagtaaggcaaagctgattgatagagaacccaaaacaaaggcccagttttcccattctcttcttagaatcacaaacttgttcttctttcatcaatggcttcctatccctctctctcccc

SEQ ID NO: 76802 - DNA, 310 bp, Glycine max
  Clone ID: PAT_MRT3847_40367C.1
ctcacgtgtgcgaaaaaaaaaaaagaaagaagcccggaggtagaagaaagaaccagggcaaggcaccaaaacatagatgataaggggtcaaccctgtaggggaaccgtgcttcgggctccgtttctggaattccaagttctcgcactggggccggcaaatccaatgctgtgtccagggtcctccccgtcgtgaacggggagcccctgtacaccccagcgttttggactattccgggcagaccctatttgactgttctggtgacccttaccgggtccgccgggtgggggattcccaaagggggcggacccc

SEQ ID NO: 76803 - DNA, 488 bp, Glycine max
  Clone ID: PAT_MRT3847_40368C.1
acggctgcgagaagacgacagaagggtgttcttaattggtgaaagaaacacaaccccacatgtttgaagacttctgcttgaaggaaatgacaccaatcaaagtacatcatattccttggacagttagattcatgttaccaaagctactctttgtttcttcaactgaaatgttttcttttctctctttttgcaacaagtgttttggagtctcaattttaaaattgtaactaaagaagaatgataagccacccaaggaaaaattgttcagaataattaagcctactaaccagaaaaaaaatattaagagatgaaacacacttctattataattttaccatcatcacagttaagaagattaagtaacaagattccaatttctagctatccgacctactaatgatatcaaatcaagattcaaatcatgaatggaaaagctcattttttgaatcttgtatcataatatgtatccaatcacaagattttaagac

SEQ ID NO: 76804 - DNA, 320 bp, Glycine max
  Clone ID: PAT_MRT3847_40369C.1
tggcttcggacctttgggctgatttatgtgcttgcatggtcgtgagaagatgattagaggggctaccgactagaatagaatctccgcttacgtttgcgacaccgcgaagctttaagggaaccctaaaaggtccctttcaattgacaccaagaccgataccaagaaggctttcaagaagaaagactccgctaaagttacggaagacgtccacgccaagattaagcgggagaagagcctacggggtaagaaatctaccgctaggaagagaagggtaccttctaacgaccccgacagggctaagacaacgccggttaagacta

SEQ ID NO: 76805 - DNA, 398 bp, Glycine max
  Clone ID: PAT_MRT3847_4036C.1
ccctgcggtcgtcctttttttttttcttcaaaaatcttttgatggagtcttattcgggggggaggtcctacacttttcagttttcaccgaattcaacaaccttgtgtgcttgtgtggacatttgaatatgcaaaacatttttaggaactgaaaaggccaagccagtgtgtaactaatgaatgaacggttcttggctgaattaacaaacaaactgcaacaagtataataagacaataaacccgattggatcttctctcaaacttatgctcaaagcacagagggcatgtctttaagaacaggcaacagaacagtttacctaggaattaaaaatctgtatatagattcttctactctctattggcccgtggttgaagaggaccaaacaccaacagaagaac

SEQ ID NO: 76806 - DNA, 345 bp, Glycine max
  Clone ID: PAT_MRT3847_40370C.1
ggggctaaaagctaaaaatcatggaagtactgaaattagcatggctgttacggttgcattcttgaatttgatcattatgtttatagaactcactacttgcaagtcactgtgcttaaactactattcaaaaacacgccctgatagtgtaatgcattgctgccaatgcagtgaaggatgccactgctagggacataactgttccaattgctcttctgcggatgcacttccatgactgttttatttggagctgtgatgccgccgggctgttcaagtcgaaaggaagtagcatagtataaatagataggccaacaaacgattctttgcatgcattgcatgtcactgatg

SEQ ID NO: 76807 - DNA, 763 bp, Glycine max
  unsure (1)..(763): unsure at all n locations
  Clone ID: PAT_MRT3847_40371C.1
tccgccaccacttccacggcgggctccgtcaccactttcgccgtcacctccactggtcgcactcatacagccgccccccacaaccttgcccggtccgcttcccattgtgattgtttccctcatcgccaacagcaaccctcacatgtcctctgacnccgcgggatcaccattctcggagtccgcaaggagcacttcagccgtggaaaggagctcgaccactccttccccctcaccttttacactgcaaaatggttcgacttccgcaacactaacctccatctgctcatttcttcacccattttaatttgggatcctggttcgaatgttgaagccatggtggtagccccaacaccttgaggacaaggtgattttgatgggccagggaatgttatgaatgggaagctacgtgcgcagcccataaggaaagtatgcaaccatgaagcatgcattcacagcgaggaagttagttaggaagtgtcaatgttgttaggattctgttaagaagtttctgttaaagggttctatattctgttaagaaccttgccttataaatagcttgtaataaggggttcaaaggaatgagaatatacgctactttcatcttcttcttctctgcaatttctgggaggcacttggtcctcgaaatccaagtataacaaacttcctctaacatctgtttttcttctccttttttttttcttttttcatttcttgctgcaggtcgactctagaggatccccgggtacagagctcgaattcgtaa

SEQ ID NO: 76808 - DNA, 724 bp, Glycine max
  unsure (1)..(724): unsure at all n locations
  Clone ID: PAT_MRT3847_40372C.1
ccacgcgtccggttagatccagttgccttatctgataatgtttaaccgctaatagtcctacatgtttgttgtttagtttatgctccaattcacatgatgcaattagtttaacacctactgtcttaacagatattctttgtgatagttggaaacaatattttaattgaagtaataaaaattaagatcatgatgtttgtgatagagagattgaatgaattggaagagaaactggaggggatggaagccataattgaggcttggatcaatgtggacgagaaattggtaaattttgagaagattttgttggagatgcaaacattgatgggcaagtatgcagtaggtaacctttgcctttcaatcaattgaagctgattttgaaatggtgggaggtggatgaacatttcaggagttgaaactcagattcttgtacttaattttctaagtttgaatatttcgcacattctctcacatacataccaaatatatgcatttaaatatgtcttttttattcattgcaacttttacttcaattatataaatattcattctgatttgtccagtggatggtggatgagaatgaactccgtgtaattcattatacactangtcctcttaagccttgggactggtggacatcttggcttgtgaaacctgttgatgtctgcagaatgtaagggaacagctggaggaatccccttctggactggagggggccaaatcctaa

SEQ ID NO: 76809 - DNA, 2844 bp, Glycine max
  Clone ID: PAT_MRT3847_40373C.1
tcgtcacgcgtccgcccacgcgccgcccgcgtccgcgccgcgattaaagcagcatttagcccgagtttctggtgaagtaacatactgtgaaaaggctcctgatgaagtctacctgaaaatgaaagaaaatcttgaaggctgccgttcccataagaaacaaaaacaagttgacacacaagcatatatgaattttcactctaatgatgatgaagatgaagaagagcaagttgggtgcagaagcaaagggaagcaattgatggatgatcgaaatgtatctgtaaatttgactcctcttcgctccttaggatatgttgacccagggtgggagcatggtgttgctcaggacgagagaaagaagaaggtcaaatgcaattactgtgagaaaattgtcagtggaggtattaatcggtttaaacaacatttggctagaattcctggagaggtagcaccttgtaaaaatgctccagaagatgtttatctgaaaataaaagagaacatgaaatggcatcgtactgggaggagacttaggagacctgagattaatgaattgatgcctttctatgcaaagtccgataatgatgatgatgagaatgagctagtagaagatttgcatcatatgaacaaggaaactttgacaagagcatttacttgatgattggatagtagatgctaatgtacaaagctctgatgtcgataagattatactttatggagttgaactagatgatgaatatgataatgatacctgaaactacccaagaatcagactcctcaagcttacaaacaagtaaaagttaagacagggcccactaagaaattacgcaaggaagttatttgatcaatttgcaagttcttttaccatgcagggattcctatacaggctgcagactccctatattttcataaaatgctggaagtggttggtcaatatggacaaggactggtgtgcccagcaagccaacttatgtctggtcgctttttgcaggaggaaatcaattctattaaaaattaccttgttgaatataaggcttcctgggcaatcactggttgctctataatggcagatagttggatagatacacagggtaggacaattattaactttcttgtttcttgtcctcatggtgtatactttgtttcttcggttgatgccactaatgtagtggaagatgcaccaaatttattcaagcttctggacaaaatagtggaagaagtaggtgaggaaaatgtagtgcaggtaatcactgaaaatactcccaattataaggctgctggaaaaatgcttgaagagaagagaaggaatttattctggacaccttgtgccacttattgtattaatcgaatgcttgaagattttacgaaaataagatgtgtggaagagtgcatggaaaagggccagaaaattaccaaactaatatacaatcaaatatggttgttaaatcttatgaaaagtgaatttacccagggacaggagcttctaaaaccatctgccacccggtttgcctctagctttgctactctacagagcttgctggatcatcgagttggtctcagaagaatgtttctttccaacaaatggatttcatccagattttccagctcaaatgaggggaaagaggtggaaaaaatagttttgaatgtcacattttggaagaagattcagcatgttaggaagtcaatagatcccataatgcaagtacttcaaaagctttatagtggtgagagcttgtcaatgccatatctatataacgatatgtacagggcaaaacttgcaatcaaatctgttcatggtgacgatgcacgtaaatatgaaccattctggaaggtcatagacagtcattggaattctctgttctgtcaccctctttacttggctgcatacttcttaaatccatcataccgatatcgtcaggattttgtggcgcattctgaggtagtacgaggactcaatgaatgcattgtccggctggagcctgataatatgagacggatatccgcatcaatgcagattgctcattataatgctgcacaagacgactttggaactgaattggcaattagcacaagaacaggtctagaacctgctgcttggtggcaacagcacggaataagttgcttagagttgcaaagaataagtgtacgcatattaagtcaaacatgctcgtcctttgcatgtgagcatgattggagtatatatgatcagatacgttgcaaaagacaaaatcgtctatctcagaagaaattgaatgacattatatatgtccactacaacttgcgacttagagaatgccaattaagaaaaaggtccagggactcgaagttgtcctctgttgacagtgttctgcaagagcatttactcgatgattggatagtagatactaatgtgcaaaactttgatgttgataagaatttcctatttggagttgaactagatgatgaatatgaaaacgattcaattgattatgaagatggagctgcaaggcatctaaagggatcccttgagctggtgactatggctgatgtagcagtaggatcaccagatgtagatcatgctaacattgatgctgacactgatgatgagtctgatctgaattattttgatgatgatttgagcgagtaattgacttacatggttctcatttcggaacagtaattatttggtcgcctggttgtgagcccgtacttgtaattttccagcgaaaaatcaagatgtctatcttagtgcgtacaatcatatttatatcattttggatcgtaataattttagatcgttctaaccagttcaagaagttattactgttatataagatcctcagtaagagctggcacgtagtcatacccatt

SEQ ID NO: 76810 - DNA, 295 bp, Glycine max
  Clone ID: PAT_MRT3847_40374C.1
gagtttgtgctgggccctacattaaattaccacgaaatgtcttgatccattcggtggattcaactgataagccgattaatcttgacgcgcgaatcgacaggttggcgtcaatggatgagactcagcgcaaagagaggtggaaagcgtaacaagaggtatttcttacacttggtgaaagacacgttcggcttggaacaactgttgtggctaacgggatgacataactgaatggaagggatcctgatatttacatgattacaagatcacgtgagtaagaacatgttagcaaaatgac

SEQ ID NO: 76811 - DNA, 1957 bp, Glycine max
  Clone ID: PAT_MRT3847_40375C.1
gggtttgatgtgaatctcctggcaagctattgcataaataaatggaattaagaccaagaaacggatcccaaagctgatttccttatcctaacactctcatctggtctctatgtctcgaatcttctccgcatggaacaagaagaagctgcaccttcatctcaacttaatccccactattttttcttcttcccacactcacttcgacgctctcgctgccgccaatagtgggcttctccggcccagtttgaggctctacagtagtagtagtagcagcagcaatggggagccaccagaggattggcctcacgatcactacgctgctacgcaaactcctattagtgttaatttcattcgggcctctgggcccagggacgggtgggtcggagggtccaatttgggtagggattttcctactccgaaggaaatctgcaagggactcgacaagtttgttattggccagcacagggccaagaaggtgctctctgtagctgtttataaccactatcaaagaatataccaggggtcagaggcagatgaaggactctctcaaggattggatgatggggatgatgtggagctggaaaagagtaatgttctcttgatgggtccaaccggttcagggaagacgttacttgcgaaaacactggctcgttttgtgaatgttccctttgtcattgctgatgctactaccctaacacaggctggttatgttggggaagatgtcgaatcaatattgtataaactacttgcggcagcagagttcaatgtccaagctgctcaacaagggattgtttacattgatgaagtggacaagataactaagaaggctgagagcttgaatattagccgggatgtttctggtgagggtgttcagcaggcattattaaaaatgctggaaggaactatggtaaacgttcctgagagaggagcaaggaagcatccacggggtgataacatacagattgacacaaagaatattctttttatatgtggtggagcatttattgatcttgagaaaaccatttcagagagacgacaagattcttcaattggttttggatcaccagtccgttccaatatgagaactggtggagttacaaatgctgcagtcacatcatctttacttgagtcggtggaaagtgctgatcttattgcatatggtctcatacccgaatttataggacgatttccaatcttaattagcttgtcagctctaaccgaagaccaacttatgcaggtcctcacagaaccaaaaaatgctcttgctaagcagtacaagaaattatttaacatgaataatgtaaagctacacttcacagagaaagctctgagattgattgcaaagaaagcaatggccaaaaatactggtgccaggggtttaagagcactactggaaagcattttaactgaagccatgtttgagattccagatgttaaagcaggaaatgaactcattggtgcagttgttgttgatgaggagtcagtaggatcagtaaatgcccctggttgtggaggaaaaattctttgtggagatggtgctttggaactgtacctagctaagatggagggtttcagtggctaacggtgccgtagctgagccagacttacaagaaggggaatcagagatttcatcaagagccgtgagcatgtaatattatatattatatttaccacaatcaaggtgtataatatatcattgttgttatctgtaaaaatcacattcataatctgctgtaattatcccttgtataacggtgtagcttctgttttatgtacattggataggaaggatatagaaaattgaaggatgtagcattgctaatttaggcatcacgtcatccaaaatttcaattgattttgatgaaactctattttgagacgattttctcttttgctgccccactaatattaaggggaggagtgctagcaaaatactttttaactctctttttaaaaa

SEQ ID NO: 76812 - DNA, 489 bp, Glycine max
  unsure (1)..(489): unsure at all n locations
  Clone ID: PAT_MRT3847_40376C.1
aattcggctggaggaaaattttatgctcctcactgccattgctagattgaaattactagatgatctagactaataagactttctggttactgtaacttggattgggggacagagnaaaccaaggatgctgataggaatggtccaaaaggaattatcagcgctgtcgggatatccattgttgttggatggggttacatactaggcattacctttgcagtcactgacatcctttaccttttgagtgaagataatgatgctggtgggtatgctattgctcaagtattttatcaagcattcaagaaaagatatggccatggaactggaggcattatttgcttagtaattgttgctgttgccatatttttctgtggtatgagttcagtaaccagcaattcaaggtatataaatgtgctaccccttagtgcattnttcatataagagggattgaatttctctagttacttatgaatataaatatgatatacttaa

SEQ ID NO: 76813 - DNA, 338 bp, Glycine max
  Clone ID: PAT_MRT3847_40377C.1
aggacgaagatttattttctaccaacctagaagcaaatatgggcatatatgaattggaatttttagatcacttattaagcctatactggaaaccaaaggaaatgagatcgggacttcctcgggaattccaaatgccacattttcaagaaatacgggaggcaaaaatgttcatctatgaataggaattatttgctctcttattaggcctatcctgaagccaaaggaaatgagatcggaattcctcggcgaattccaattccacattttcaagacataacgaggcataaatgttcatatatgaatcggaattatgtggtgtcttattaggcctatcctga

SEQ ID NO: 76814 - DNA, 389 bp, Glycine max
  unsure (1)..(389): unsure at all n locations
  Clone ID: PAT_MRT3847_40378C.1
tnangacgannangnaanncggaanacnncanganaagaaaannnacaaancgaagnaaacccnagnaagaagacgaaaaanagacagaanngngncaancnnancanaanagaaccagannagnaancaaccnanaggcnnaagaaanacnaaccaanaaaanaaanngaaanngaaaacanccnnagngancaaggnaacgaagaaccnagnnncaggagaggacagagccaannaaagacaccagnananagacaacaancaganaganagaatganganaaccagaagaagaanacccnnnagnagannaaaaggnacaacananagancccnnagnngacagagnaanaccaagacgagaannacagaaanacagcacgaanac

SEQ ID NO: 76815 - DNA, 343 bp, Glycine max
  Clone ID: PAT_MRT3847_40379C.1
cttagttgtcatgttcgaatcaacccatactctatggaatggactggtttggtcaatagatgactgagttagggcatcaatattatgtgttgcagattatgctagttttgatggttcgattactaatcaagttatgagcaggatggtaacaatgataaacacaatttgaagtggtgataaaaaattgatgcctagaaaggacacacctgctgatgctttgtcgttgaagaatggatataagtaagaaagatgttatgagagttgaatgtagactatgttctgagttttcgatcacagctatttgttataacactatttatgagatgcgtattatatatagcta

SEQ ID NO: 76816 - DNA, 458 bp, Glycine max
  unsure (1)..(458): unsure at all n locations
  Clone ID: PAT_MRT3847_4037C.1
ggtgagtccttttttttttagacactctttatttttggtggtggttactttttctcgttggggggggaacaaaaaaagcgaggggagggtggatttggggtcaacgggggaaacaatttgaaagggccgggccccaaaacaaaaaaaaaaaacctcccnttaggggggaaaaaggggncaaaggcccttttggttgataaagaccccccaatgtggaaaaaaacccaactccacaacttatttgtctggggggcaaaaaaggcaccggcccccccaaaaataattttttttttttcaaaagcgacaaccaggggggccttaactcccctaaccccagggttgtaaaaccccccaggctttttattcccccagccaaaaaaccggggctccggagccaagggggcaaccccgtaaaagtaaaggggggaattcgcgaatcacccccccaaagccccccc

SEQ ID NO: 76817 - DNA, 231 bp, Glycine max
  Clone ID: PAT_MRT3847_40380C.1
gatgtcatattacaagaccctcatcaccatgtacaaactctcacaagaatacaacactcaagatcagtgttaatataggtaatatctatagcacgtcgttaagatattggcacacatggatccagtgggccattttcacgttaatggtcccgtcaactgtgcactttgcctttccaggtatgagaagtttgctcttggatacactacagatgttgacattaagttgcactg

SEQ ID NO: 76818 - DNA, 2070 bp, Glycine max
  Clone ID: PAT_MRT3847_40381C.1
ggctcgagctcgagccgattcggctcgagcttctctcgtgtttcacaaactaaagaacaacaatatgcctccaatcttgccggatttctccaactcggtgaaactcaagtacgtgaaactagggtaccaatacctggtgaaccacattctgactctcactctcatacccatgatgatcgccatcttcatggagattctacgcttaggccctgaagagatcctgaacctctggcactccctccacttggaccttgtccaaatcctctgctccgccttcctcatcatcttcatcgccaccgtctacttcatgtccaaaccccgcaccatctacctcgtcgactacgcctgcttcaagccacccgtcacctgccgcgtccccttcgcaaccttcatggaacactccaggctcatccttaaagacaaccctaagagcgtcgagttccaaatgcgtattctcgaacgttccggtctcggtgaagaaacatgtctccccccagcaatccactacatccctcccaagcccaccatggaggccgcccgaggagaagccgaacttgttatcttctccgccatggattctttgttcaacaaaacaggtctcaagcctaaggacatagatattcttattgtcaattgcagtcttttttctcccactccttctttgtctgctatggtcatcaacaagtacaagctcaggagcaacatcaagagcttcaacctctccggcatgggttgcagtgctggcttgatatccgttgacttggctcgtgaccttctccaggttcaccctaactcaaacgccgtcgttgtaagcaccgagatcatcacccctaactactaccaaggcaaagagagagccatgcttcttcctaattgcctcttccgaatggggggtgctgctattctcttatccaaccgaacctccgaacgcaggagagccaagtacaggttggtgcacgttgttcgcactcacaaaggcgctgatgacaaagcctaccgttgcgtttttgaagaggaagacagagaagggaaagtggggatttcacttcagaaggatctcatggctattgcaggtgaggctctcaagtctaacattactactatgggtcctcttgttcttccggcttccgagcagttgctgttccttctcactctcattgggaggaaaatcttcaaccccaaatggaagccttatattcctgacttcaaacaagcctttgagcacttctgcatccacgctggtggacgtgctgtgattgatgagcttcagaagaatcttcagctttctactgaacacgttgaggcttctagaatgacccttcacaggtttgggaacacttcgtcttcttcgctgtggtatgagctcaactacattgagtccaaggggaggatgaagaagggtgatagggtgtggcagatagcgtttgggagtggctttaaatgcaacagtgctgtgtggaagtgcaacagaagcattaagacaccggttgatgggccttgggctgattgcattgatcgttacccggtcgatattcctgagatcgttaagctctaggatggagaattgttcaagaacaagaagataattgcttattttatgaaaaaaaaaaaatagatgagttctcataacccttctctatctgctcaccgtagccgtaccacaaatctctctcatttgtcagtcatattggttattttatcatatatcatatcccacttttatatatatatattttttttctgtttatttcaaaacaattacatgggcctcttgtgaattagcacagaaatcgatcgccaactgggagggggtctgtgtttattcatgaatttgtgcaacatgtacgtaaggaaaacacagtttctatttcaagtttgtatttgcttgcactattattggaaagcttgtaattaggacttgaaatgtaagaagtgctttgctttgttgttgttgtcttgtcagcgagatcatatcattaaattaaagtttcattagcatgaccaaaatgaagtgctttagctataagattgtctggttgtgtgtgaggaagtgttacatttaagaagccg

SEQ ID NO: 76819 - DNA, 486 bp, Glycine max
  Clone ID: PAT_MRT3847_40382C.1
agattcggctcgagtttggtttggggaagtaaatggactcagtgacaaattatactcatcactcacttgatcctctcactctgtcacacttcttagatccaactccacatattacacatgaccaaaccccctatttgagcatattgtcgaataaacgtcttaccagaaaagcgaccatacacattcatcatggaggtaacagctgctactatatgatcattccctgtcacttcaccggagcctgactatgctaacccaggcaggaaatttgatcaaatcccctggaactcatgtagaactaatatccaactttgcctattctgctggctagaatgcaaaagctcaagccccttctaaaattaatggaaccacagtagttacatataaagaaagcttcaagcatgatgatgatctacctttgcttacccccagaactttgatcaaccagctgtctcaatgcatcatgcttatcgatgctatcacaac

SEQ ID NO: 76820 - DNA, 503 bp, Glycine max
  unsure (1)..(503): unsure at all n locations
  Clone ID: PAT_MRT3847_40383C.1
tctagttctactccaattgcgccagtagttttcttgggcaaaggaggggaaggcattacttcacaaagtagaaacaaatccaaataagcaaagtgttttttgagggttagaaggcttactttattttcataatcgtctttttgttccttagattttcgagctttgtgcttccttccttaaggagttccattccactctcacgacagggcatttgagcctttaacccactctggctaggttgactgcctctttttactagcttggcatatactctgacactaagctntttgtctgcaattgcgtgattttccaacaaaataagtaccttccaaagcaaaaggtaaggttaattcatcctcttaacatacccttacaagtgtggaaataattgtctatgaattttgtgacaccatttatacattgccaaaccacacaaattgccatgtatagatcaagaaaatagagacttacacatgttacaaaagttgtcatagatcataaat

SEQ ID NO: 76821 - DNA, 703 bp, Glycine max
  Clone ID: PAT_MRT3847_40384C.1
cgcatcacttcaactgctgcaacatgggatcaagctgcttttgttcttagtgtcccaagaagaaaaccagctgatgaaactcaggagacactccgcacatctgcttttcctagtactcatgtcaaggaaaaatgggcaaagaacctctatatcgcatctatttgttatgggagaacagtgtcataaactgctcaaattgagatttctggttgacatcattttaaccactggcacaatcctgcttgctcttacatagttgggaacggaagatcctctctgacaattttctgaacaattcagttcagcattaatgtatgctaaactttctttatggtcaccatcacatatcatgaagcagaacctgtgcactgtatttcaactttgtcaaaaatacttgagttatgagtaaaattagattgtgtcaattgggaagagtcttttaatgttaagtttgtacatatctgaacagtaattactatgttgaaggcatatgcacaggttatgcttttgtttgttgatgttattttgcaaatatgaaaactaatattttccagtaggaactggacaatttaagctgtgcacccttgtacttggcgcactttatccttatcacttttgacttaaagctatttctgggcttcttgttgtctgtatttgaccaacagaaagttgtatataaaaaaccagctgtttgtagttgttt

SEQ ID NO: 76822 - DNA, 266 bp, Glycine max
  Clone ID: PAT_MRT3847_40385C.1
gaagttgcgagagtgaataaatggctcaagacttgtcattggatttggaggaacttggccggctacacagcatcgccgagagacctctaaccctctctcttctctactccgaaattctgaacctctaaaagttatcgtcagaggaagcttgtgcgcatattacggcaccgatttcgaccggatctaaagctgcaccttcacctgcgcttaagtatgcggtactcgcgttcgtcatttgggaccactatagtgacaatattaaaata

SEQ ID NO: 76823 - DNA, 2913 bp, Glycine max
  Clone ID: PAT_MRT3847_40386C.1
cgagcgactgagaatggaagagcaagacggtgagacgtccggcggtatctctcgaatgggaaaggctgatacacaaaggattagtgtttataacgcttgtctgtaaatgaagtataggtctcaaaataatcgctctcttttttcgtttccctacaaaattctctaagataacctcgattctaaccttatttctgggttgatcttgtcggcttcgatttataaccttatcataactactttttctctttccatttctgttgtttatgtagtgtcttccaacttccttctcaggtcacgtctattattctggaaccttcatgtgtctccctcttcttcaatggcccgtgccacccttacgatgcctgagctgcgttcctggccacgcagaaacggccttgtagacaacgcaaacgccaatccgatcacttaggcaacctcgccgccggccgccggaacccgtcggagggagccagccgccgacgcactgaccgggaggatccgcaggcataacaacgcgtttgccatcgccgccgtcgaaatcgtgaacgccaacgccgacaacgttcgtggaacgagagcgaggaaggtgaaagacgatcaaggagtgaaggagactattaataagaagaaggtttcgggtagggttttggaagcaaaatgtctggatgagtttgatagtggaggccgcagtggcgataaggctcctggagctgaagacgaaggcaccacacctcccattccagagaaggttcaagttggtggttccccgttgtacagagttgagagaaaacttgggaagggaggatttgggcaggtttatgttggtcggcggttaggagctgtgaattctagtgaacgaactggttctagtcgggttgaggtagccttaaaatttgagcatagaagcagcaaagggtgcaattatggacctccatatgagtggcaggtttacaatgcactaggtggtagtcatggtgttccgcaagctcattataagggacggcaaggtgactactatattatggtcatggatatacttggccctagtctgtgggacgtttggaataacaacaatcctcacatgatgtctactgaaatggttgcatgtattgcaattgaggctatctccatattagagaagatgcattctagaggatatgtgcacggtgatgtaaaacctgagaactttttgctgggaccccctggaactcctgatgaaaagaagttgtttctggttgatcttggattagcaactcggtggcgtgatagttctactggccttcatgttgactatgatcaacgtccagatgtttttaggggcacagttcgttatgctagtgtgcatgctcatcttggtcgaacaggtagcaggagagatgacttggaatctcttgcttacactcttgtctttcttcttcgtggtcggctaccttggcaaggatatcagggagaaaataaagggtttcttgtctgcaagaaaaagatggccacgtctccagaaactttgtgttgcttttgtccccaaccatttcggcaatttgttgaatatgtagtgaatttgaagtttgatgaagaaccaaattatgcaaaatatatatcccttttcgatggaattgtgggcccaaatccagatatcaggccaataaacactgaaggtgctcagaagcttatatgtcaggttggacataagagggggcgattgaccatagaagaagatgatgatgaacaaccaaataagaaggttcgaatgggaatgcctgctacacaatggattagtgtttacaatgctcgtcgaccaatgaagcaaaggtatcattataatgttgctgatgtgcggctggcccaacacattgataaaggaaatgaagatggtttatttatcagcagtgtggcttcttgttctaatctttgggcactcattatggatgctggcactggtttcaccgcacaagtttatgaactctctccccacttccttcacaaggaatggattatggaacagtgggagaagaattattacattagtgccatagccggggctaataatggatcctcattggttgtaatgtctaaaggtacccagtacttacagcaatcctataaagtcagtgattcgtttccatttaagtggatcaacaaaaaatggagagaaggattttatgtcactgctatggccactgccggctcaagatgggcaattgttatgtcccgtggggctggtttttcggaccaggttgtggaacttgatttcttgtatcccagtgaaggtatccatcgaaggtgggatagtggttatcgcatcacctcaactgctgcaacatgggaccaagctgcttttgttcttagtgtcccaagaagaaaaccagctgatgaaactcaggagacactccgcacatctgcttttcctggtactcatgtcaaggaaaaatgggcaaagaacctctatattgcatctatttgttacgggagaacagtgtcttaaactgatcaaattgagatttctggctgacatcattttgaccgctgacactatcctgcttgctcttacatcttctagttgggaactgaagatcctctttgacaattttctgaacaatgcagttcagcattaattctacatggggtctctggtcgttctacatgactggatgattcaattgtttgttaaactttctttttggtccccataacttttcttgaggcggaccctgtgcactgtatttcaaatttgtcaaaaatacttgggttatgggtaaaattagattgtgtcaattgggaagggtcttttaatgttaagtttgtacatatttgaaccgtaattactttgttgaaggcatttgcacaggttatgcttttgtttgttgatgttattttgcaaatttgaaaactaatattttcccgttggaactgggc

SEQ ID NO: 76824 - DNA, 563 bp, Glycine max
  Clone ID: PAT_MRT3847_40387C.1
ccctcatcaccctcgcctccggtgcccgccacgatattctccggttaccctccgaagcatccacttttttcaaagcacccggtggcgatcaaaacgatgagggcacgaggtgggccgttttaattgccggttccaatggctactggaattacaggcaccagtctgatgtttgccatgcgtatcaactactgaggaaaggtggtctcaaagaagaaaatattgttgtatttatgtatgatgacattgctttcaacgaagagaacccgcgacctggagtcattattaacagtccacatggaaatgatgtttacaagggagtccctaaggattacattggtgaagatgtaactgttggcaacttttttgctgctatacttggaaataagtcagctcttactggtggcagtgggaaggttgtggatagtggtcccaatgatcatatatttatatattactctgatcatggcggtcctggagtgctagtcttgaagaagaagcatgcttctggaagttataaaagcctagtattttatctagaggcatgtgaatctgggagtatcttt

SEQ ID NO: 76825 - DNA, 1957 bp, Glycine max
  Clone ID: PAT_MRT3847_40388C.1
tacggctgcgagaagacgacagaaggggaacacgcaactgggtgttttgtccttccttgaattaaataaatactatgaaattgtagtttaaggaaggagatactctcactcgttcattccaacctacccttattcttcttcttcaattccacacccatcatggaccgttttccgatcctctttctcctcgccaccctcatcaccctcgcctccggtgcccgccacgatattctccggttaccctccgaagcatccacttttttcaaagcacctgctaatgccgatcaaaacgatgagggcaccaggtgggccgttttagttgccggttccaatggctactggaattacaggcaccagtctgatgtttgccatgcatatcaactactgaggaaaggtggtgtgaaagaggaaaatattgttgtatttatgtatgatgacattgctttcaatgaagagaacccacggcctggagtcattattaacagtccacacggaaatgatgtttacaagggagttcctaaggattacgttggtgaagatgttactgttgacaacttttttgctgctatacttggaaataagtcagctcttactggtggcagtgggaaggttgtggatagtggccccaatgatcatatatttatatactactctgatcatggcggtccgggagtgctagggatgcctactaatccatacatgtatgcatccgatctgattgaagtcttgaagaagaagcatgcttctggaacttataaaagcctagtattttatctagaggcatgtgaatctgggagtatctttgaaggtcttcttccagaaggtctgaatatctatgcaacaacagcttcaaatgctgaagaaagcagttggggaacatattgtcctggggagtatcctagtcctccccctgaatatgaaacctgcctgggtgacctgtacagtgttgcttggatggaagatagtgacatacacaatttgcgaacagaaactttacatcaacaatacgacttggtcaaagaaaggactatgaatggaaattcaatctatggttcccacgtgatgcagtatggtgacatagggcttagcaagaacaatcttgtcttatatttgggtacaaatcctgctaatgataattttacttttgtgcataaaaactcattggtgccaccttcaaaagcagtcaaccaacgtgatgcagatctcatccatttctgggataagttccgcaaagctcctgtgggttcttctaggaaagctgcagctgagaaagaaattctggaagcaatgtctcacagaatgcatatagatgacaacatgaaacttattggaaagctcttatttggcattgaaaagggtccagaactgcttagcagtgttagacctgctgggcaaccacttgttgatgactgggactgccttaaaacactggttaggacttttgagacacattgtggatctctgtctcagtatgggatgaaacatatgaggtcctttgcaaacttctgcaacgctggaatacggaaagagcaaatggctgaggcctcggcacaagcatgtgtcagtatccctgcaagttcctggagttctctgcacaggggtttcagtgcataattcctagaatccgctccattgaagacagagtatagtcgttgtaacattattctttacgagtgttatggactgtactctctgctcatgatttcttataccaaccctgtaaatacaaatgggacgctggggaaacctctttacattatagtttcctgcaaaatagatgctgtaacaaagacattttacttttacttggggagaggcagtggaaccataaggacccttggaacttctaattaatacgacagggcacaataccgtgtttgtaagccaacgctttgtttcaatttaatggtaaccccgttgtgtagatatttcatttttaatagaatttatatttggt

SEQ ID NO: 76826 - DNA, 182 bp, Glycine max
  Clone ID: PAT_MRT3847_40389C.1
actcaaaatacaatcttttcaccgtaaaaacttaaaactgcctcagaagacaacttttgcaagcaaaaaagctagttggttctgtgctttgctcaacgaaaaaacagcgaatgcagcgagagattaagtgaggctcaagatgcgcccaagaatgcccatggccaagaaattgcaaccttttg

SEQ ID NO: 76827 - DNA, 823 bp, Glycine max
  unsure (1)..(823): unsure at all n locations
  Clone ID: PAT_MRT3847_4038C.1
acaattcatcgttcccttgagctaataattttgcacttatattcctgcctttacttggattctgtcgcaaaaggcaaatacatagcatcttgagcagttgagcaattgagctatcatacaaaagcaagcgaagttatgatgagcaattccaaacaaaagaagaaattgaaggcacacaagaaaaaggatgaatggttgaaggacatgaggggtaacctaagtttgctggctaccgtaattgcaactatgacctttcagagtgctattaatccaccaggtggcattaggccagcaagtgaaactggagaaatcacatgtccagatacaagcaaaaacattacggttccatgccctggagaagctgtcctatctgttcttaaagcagacacctacaacagcttcctttattgtaacacaatatgttttgcttcatctttagctgtttgtctcttgcttgtgagtggactccctcttaataaccgattcttcatctggttcttctcaatatgcatgtgcatcaccctcactgccctcacccttacctacttatatggtttgcaaatggtcaccccaaacgacgtttgggataattcattattcagcatggttggagtcgttatttttatttggatcatacttctaggaatcgtcgtaattttcctctccctacgcctacttttttggattgtcactanatgccgaaataaaaaacaaactgaacaaggagaagatcaaaaccaaagtaaacaagaagatccaaaacaaagtacaggagaaagatgcacctagttctgctcantcatcaggncatgcatcgcatatc

SEQ ID NO: 76828 - DNA, 1016 bp, Glycine max
  Clone ID: PAT_MRT3847_40390C.1
gttctttcagagcatattcatgttctcatcatattattcatatataaaatagagtctgtttcggctgcgagaagacgacagaaggggcatttagtcaaatttctgccaatttatctacattgaagtttcaggataacattgaactcttttgtcagacaaggcgcaatattaataccgttcttaatgagtatgtgatgtgaatattataaataagttcattattaatataatccaaatccattttgtttagagcttaatttgatgtgtattgccttttgaagtttgctcattaagtttgtgcagaatgagaacgatgcctggcataatgagccaaatgcccccttttcctgtttccatgaatgaggaacttgcaagtagtatattccccaataaatctgaggtaagctattggataactgaacttgtttcatgtattcctttattgaaattatacaatcatccttccatgtgttttgttaaacacgttgccacataaatagccatagtttgaacatattgaaaaaaggaaataaagaaagcaaagaaatcatgaagggtaaagtttctaatcaagaatcacatactgtgttgttttttttactcacgatcacagagtaattttacttgttagtgtacatttcaattttcagaagggtttgttttggttggaaacttgattgcatcataatatttgtattttgtaaagcaaaagctttgatcttttcttgtcttaatgtgacaatatacttgatctgtctgtctacatgagtaaaatatttataaaccatatctaaagattgccaactcagtgcacaagtctggagttgttgacatttttgaatggaaatattatctgaaatttttttgggtgctacatgcaattgatgagctgcagaataactgatatcacactatcttaggtctttccagaggttttcatacatggttgatcttctctcgataattatattttgtttgtaagaaaatttgcactcctgctcgaataaactaaacat

SEQ ID NO: 76829 - DNA, 317 bp, Glycine max
  unsure (1)..(317): unsure at all n locations
  Clone ID: PAT_MRT3847_40391C.1
cggaannncccgggtcggacccacgcccgtccgccgcattggctagaataggaactttcgatggctcatttcattctacttttatccatatctcattctctggtgtgctcgtgtgcaggagtagagaccgatgctccatgcccatctctatcctgatggaatgattatttggtgaagacttgtttggccataacatctcaccatttcccaactgcatctgactagagccttctaatagcctcctccctgcagggtgttgataatcgatgaagctccctaagcaaatgtgatgatacacatgtacccaaaaacattct

SEQ ID NO: 76830 - DNA, 526 bp, Glycine max
  Clone ID: PAT_MRT3847_40392C.1
aattcggctcgagcaaaatctacgttccaatccaaataaacaaaaaaacccacaattttttcagtttcttgatttcttcttccttctctttcagattccattccaaagagctttcttttatattattattattttccagttttttcatccattttcccacttccgcgccacccactgattttccctgaaaagggtttcttccgatttctcttaccatattctttctgttttcttttctccctcccacgttttttttctccaattttctcttattaaaaaataatcaaaggtgtgtgtttgagggtgttgcagctcgatcacaatgagaacacacgcgttactggcacttttgttcttggttctgattatgtttgatgtttctgacgcttcctttgttctgaaactccgaaagttgattgggcctgatccaaatgatactaaaacaaagggtccaaaccatgttggtgaaacaaacaaggaccatgggagggggcctattgcttccccagttccacagccacaaccc

SEQ ID NO: 76831 - DNA, 365 bp, Glycine max
  Clone ID: PAT_MRT3847_40393C.1
gccaacttgtgaggctttacaaaatagaggaggggtgtttcttgaacgacctggttgtgagttcgatcttgacactttaaatcacatttttgtgcagtgtcagttttctcagcaggtttggaattctattttttatggttcaaattaatttggtgcaacatcattacattcaatttgaatctttgtttagaggaaagaagctgcgaagggttagattacttgtatggcatgctacatgttggtgtttatggttgtatcgaaattctgtaattttcaaggataatttctttcctgatgtgcagaatgtggtttatcatattcagagaatttcttggacctggatgaaatataagggacatggttct

SEQ ID NO: 76832 - DNA, 325 bp, Glycine max
  Clone ID: PAT_MRT3847_40394C.1
cttcaaaccttcgtcgccgtctcgaattcttatttccgatctccgatctccgatctccgatctccgacgaactctcctttgaatttgtttctgggtttgtagaggaagcaaattgctgcctttttcaccacctcattttctattcacccttgctcatgtccaaactttccgatgagttcattggtgtgatgggtttttggttttgcccctaaattttgcaattttagttttttaggttatgcttttggggtttaacatctgcgccgtgactcgatgttgacgatgatgatcatcactgcactcatcactaccataattgcgggac

SEQ ID NO: 76833 - DNA, 166 bp, Glycine max
  unsure (1)..(166): unsure at all n locations
  Clone ID: PAT_MRT3847_40395C.1
tccaaacacaatcaaagatcccaaagctaaaaaaccagaagattagaataacaaagaatttattcctgatcccaagaataagaaaccagatagatataataacatcccaaaatagctcccagatcctnaatccaagaagcctgaatattgggataatgagaaagat

SEQ ID NO: 76834 - DNA, 271 bp, Glycine max
  Clone ID: PAT_MRT3847_40396C.1
aaattagtaaaatgacagattttctgtaattttttcttgaagattttaatgttatgtgaccgtttattttgttttaaaaaaaaaaaaaaaaaaaaaaaaaaaaaaaaaaaaaaaaaaaaaaaaaaaaaaaaaaaaaaaaaaaaaaaaaaaaaataaaataaaaaaataaaaaaaaaaaaaaaaaaaaaaaaaaatgggggggccgccataaattgatctttttaacctggaaataaatttggtacaggaatcctgaaggcgtaccattttt

SEQ ID NO: 76835 - DNA, 591 bp, Glycine max
  unsure (1)..(591): unsure at all n locations
  Clone ID: PAT_MRT3847_40397C.1
atgcacccctacctaagcttttatcctctaaagcggccgcccttttttttttttggggaacactacaaataaaaaggggacttttaataaaccaaagcaccacaacgcagcaaaggcctgaaactccgtgggcttaacaaaaatggaatcaggggttccgacaaaccccacacattaaaacacagataaataaaagcaattttgccaccggcgatcaaaaacccagttctgggaacaacagttgcgaaaagaggggggaaacttcaaactttggccgaaaaacaagctacctaaaaaagaagacaccagagtacagaaaagaaaccaacatttattggaaccaacatcccctgaggaaccagcccggacgattcacttcttcttttgggcagccttggggaccttggctccggaaggaaccttcttctcaacggtcttgaggactcccacagcaacaggttgacgcatggccctaacagcaaacctaccaagggggggagactcgggaaaagggtcaacaaccaggggggttgggnggatcatcttaacaaaaccagcgtcaccggtcttcaaaaacttgggctccttctc

SEQ ID NO: 76836 - DNA, 288 bp, Glycine max
  Clone ID: PAT_MRT3847_40398C.1
tctagctatctcgatcgcactgtccaaggtcctgtcactgtgtggtcatcgatagggttagtgggagacccggggtagggtagctcatgttcaggttgcccagggttatcgtcttgtgtggttgtggcatcttcttattaggagtcagtgcagtgcgatcatcacacacgcaaaccaatcagcagggtacctccacgggtgagctttggggctcttcacaggatcataacaggttagtcggctattagcctcattatcatttgagctacttaaaatcccacgcgttta

SEQ ID NO: 76837 - DNA, 350 bp, Glycine max
  Clone ID: PAT_MRT3847_40399C.1
aacttactaacacatcacacaagaaaccgtgcgccattccaaaagtaaaattctcatcaaccatatagttgctataaaccaatgacacagctgtagaatgaacgcaaaacattgtcgcctggtgccgcgaaacaaaatggagctgagatgcgcattacacgcacactgctcttaaattgacactaacagaagagacactttgacagggccccatttgacgagaaacactctccgaaaaggaatacccggtggaaagatggcatctcaacatatacaaagcaaggaagtattgatctccggttgccaagctttatgaatgtagctattgcaaagaaggttactgacaaaag

SEQ ID NO: 76838 - DNA, 1492 bp, Glycine max
  Clone ID: PAT_MRT3847_4039C.1
gaaagcacaattcatcgttcgcttgagctaataattttgcacttatattcctgcctttacttggattctgtcgcaaaaggcaaatacatagcatcttgagcagttgagcaattgagctatcatacaaaagcaagcgaaggtagaagagatcagttatgatgagcaattccaaacaaaagaagaaattgaaggcacacaagaaaaaggatgaatggttgaaggacatgaggggtaacctaagtttgctggctaccgtaattgcaactatgacctttcagagtgctattaatccaccaggtggcattaggccagcaagtgaaactggagaaatcacatgtccagatacaagcaaaaacattacggttccatgccctggagaagctgtcctatctgttcttaaagcagacacctacaacagcttcctttattgtaacacaatatgttttgcttcatctttagctgtttgtctcttgcttgtgagtggactccctcttaataaccgattcttcatctggttcttctcaatatgcatgtgcatcaccctcactgccctcacccttacctacttatatggtttgcaaatggtcaccccaaacgacgtttgggataattcattattcagcatggttggagtcgttatttttatttggatcatacttctaggaatcgtcgtaattttcctctccctacgcctacttttttggattgtcactaaatgccggaataaaaaacaaactgaacaaggagaagatcaaaaccaaagtaaacaagaagatccaaaacaaagtacaggagaagatgcaacctagttctgctcatccatcaggccatgcatcgcatatcaaccttccttacttgtggactattttacattgttaagcaatattattaatcatacataaataaacaaatttgtctttagtgtacgtctcatagcagatttgatttttcaactttcatattattgtataatgctttgttgggtatataaataattttgtagttttgaactctgtactttgtctagggattttcatacttcatatctgtatacttttatggtttgcaaatggtcaccccaaacgacgtttgggataattcatttttcagcatggttggagttgttatttttatttgggtcatacttctaggaatcgtcgcaattttcctctgcctacgcctacttttttggattgtcactaaatgccggaataaaaaacaaactgaacaaggagaagatcaaaaccaagtaaccaaaagtacaggagaagatgcaacctagttctgctcatccatcaggccatgcatcgcatatcaaccttccttacttgtggactattttacattgttaagcaatattattaatcatacataaataaacaaatttgtctttagtgtacgtctcatagcagatttgatttttcaactttcatattattgtataatgctttgttgggtatataaataattttgtagttttgaaaaaaaaaaa

SEQ ID NO: 76839 - DNA, 437 bp, Glycine max
  Clone ID: PAT_MRT3847_403C.1
ggaaaaggaagggttaattaacgatttggttacagaaattaaacaccccgcggaggtgggcaggtttatatccgaataaaaataaaaccagattctcaattggcttggagactcaaaattaaactggggggggataactcgagacggaaacaaaaaggggggggggaactccacatagtacattcccatgttcctaaatagacctggatcttgggccatatcacactcctgcggttatagatatcaaaacccacaaggggcccagcacattttaacgctgtatttaccggacgtacctacccaaacctccttttttgggaggaaggaaatgccctcctaaagggtgggcgaagaatttttcttggccttttacaaaccctacctctgaatatcttccaggggaccaagaggaataattgggatcaacccaacttggt

SEQ ID NO: 76840 - DNA, 443 bp, Glycine max
  unsure (1)..(443): unsure at all n locations
  Clone ID: PAT_MRT3847_40400C.1
aaaaggggagttgagctgcggaattaacatgagaaattgcgtccattgggcacataaaaattgagggggacaggggtctccagtctctctacacgtgtgagataaaaaatcaaaattcccaatatttttaatgggggagttaacatagaacaaattcaggatttcagcattaaaaattcaacataatacccttctcccaaaagaacctagcaaccaaaaatgaggcgcgggggttgagaaatgaggcctctgcgttcagggggcttggtattgggctcaagagagatcaacccgcgaatccaagggcttccctcttcgcgtggaaatctcaacggggtgcgtcggaggtctctcagcataatatccttctcccaaaagaaccaggaactcattggggtgaatcaaacnacctgggaagaatggtngtttcccaaacgggacca

SEQ ID NO: 76841 - DNA, 270 bp, Glycine max
  Clone ID: PAT_MRT3847_40401C.1
ccacgcccccgtacccattggaatttttaaaattgccggggtttaccttaagattccaatattggaattgggagaggtaaccattttacctggttgggccgaatggtttcaaaaaaaggaagtcctaccgcccttttttttttttttatggatttacccaaccaactccctttattaaaaaaaaaaaaaaaagagcccttttgttcattttgtcctgaatcctccttaaaaaaaaaggccttcctttgttgctgccctgggaatttgttc

SEQ ID NO: 76842 - DNA, 407 bp, Glycine max
  unsure (1)..(407): unsure at all n locations
  Clone ID: PAT_MRT3847_40402C.1
caaaaactactttctatctctttgtaactagtaagcatggagtccacaaagatcatatanaatatgtgtcttagcatgctactgcactcctacgacaatccaattctcggtagaggctactgcagcaaaccctccaaaaagcacaagccacggaaaacaccaaagacacccacaggacgcagtgataagacaccagtcacaatccctaccattggtaagccaccagtcacaacacctaccatcggtaatccaccagtcacaatacacgcccatagccaacccaccagacacaatacctgccatcgataaaccaccagagacagttgcacccattgtgcttgcaacaatagggaaacacccaggggttcttcctacaataattaacccaccaagtacaccaacaccgt

SEQ ID NO: 76843 - DNA, 461 bp, Glycine max
  Clone ID: PAT_MRT3847_40403C.1
tcggctcgagccgattcggctcgagctgtgacatcttggttgctgccaagggatctaagttcatggatactcatgctaggttcatcaactcttaaattatttaattattagggtaattaggatagactctgatatcagtttagagtttggtttggtttggctctaataccagtagaattaagctataactaacaagatgagagtttctctacttatatacattgttttgtccatatcaccggatctcctacattatctgacatacaatttcctgtttttatagcgtgttattgttgcagatttgggatatttccttttttcccaaaagatcaacgatcattaacatagactttgataaccattttagaatttgggtttgtaggattaattatttgcaggttatatccgaaacacccaacaataatttaattgtgagggtaattaggatagactctaatatc

SEQ ID NO: 76844 - DNA, 293 bp, Glycine max
  Clone ID: PAT_MRT3847_40404C.1
aaataaggggataaacacttttcttcctccatgggtaagaagcctattccttataaggatgcagctgcttcccacatagataatcttcacttagtgatcagtggggacaacgacgatcgacattgcctctatgaacagtcattgtaccggacactatctcccgccttttgggggatgggcatataccccaattacgagatatacattggctagattccaaaactgagaacaccagggttcgcgcatcttaattcggaaggacaaaaccctgtgtgactatctaaaaatttcgg

SEQ ID NO: 76845 - DNA, 320 bp, Glycine max
  unsure (1)..(320): unsure at all n locations
  Clone ID: PAT_MRT3847_40405C.1
gataacattaagaagagacggacgctgaatagagtagaggtttacagtatgggggatccgcagtttggatatctgtatattgttactgagacacaggaacctgctctatcctaatttttttatagctcgaactaaattactatttttcgtgcataagtactttaaactgcggtgagttgtgagataaaggactttcgtttgataaactactgttcctttcacatgcgcctttcttcattcccttactctactctctccaaaaccaggacgagttttcctctgagaaagtttttggctccctgttgttcggntccaaatgc

SEQ ID NO: 76846 - DNA, 481 bp, Glycine max
  Clone ID: PAT_MRT3847_40406C.1
tacggctgcgagaagacgacagaagggctaggtgtaatgtgagctaaacaattaagaaattttttgtagagagcaaaaaagaagagatgtcaggtgcaatttggaaaacacacgggggtgcgagtgtaatttactcttgtttatttgttgtaaaatttaattcaaaattgtattattttttatattttaaatttaggtaataaagaaggaaaactaaatctataatgaatcaagaaaagaagggggaaaacatcaactctgaatgcagaagaaataactaacttaagcaagattactctttatgtttttttctttctcatattggggttgctacccatatgcttattaattatttttttgaaagggtggcgaactcctattattattatatgagtgttcataactaaaccaaattgttacaaattgcaaaagttataaaaaataaaataaaattacatagtgttttatgctcaaattttat

SEQ ID NO: 76847 - DNA, 370 bp, Glycine max
  Clone ID: PAT_MRT3847_40407C.1
ttatcctttttttttttttttaaaaatctgaaggggttatttaacaaatttgaaggcatttcggactgggttcaatggcacaagggtcttaacggtggaacccaaacaagaagcctacccggacccaaattttttaaaggtaaaaattttcttcaaaatattatccataatatttaaggagccctaacccccattttttttaaaggggtcctaatttttacacctggcaaatctggagggctgggacacatcatccgttttttttgcagcctccgttttcaggggagggatttttttttgggccttttgctcaagccgttggacattagttccaaaatctccagaactgtctgacacttttttttgaaac

SEQ ID NO: 76848 - DNA, 479 bp, Glycine max
  Clone ID: PAT_MRT3847_40408C.1
gccaatttactcatccttcctgcgcggtatcctacctctcctagcaagatgcagatccacgttatgacccttacccctaagaccatgacccttgacgtgcaaagctctgacaccatcgacaacgtccaggccaatatccaggacaccggatgcattccccccgatcagcaacgtgttatcttcgccagaaaagcagcatcgaggactgtcgtaccctagtcgactacatcctccagaatgagtcaacccttcacgcttgtccttcgtatacgcggtggcatgcaaatcttcgtcaagactctcactggcaaagccataacccttgaagtcgaaagctatgacaccattgacatcgtcgagggctcgatccaggacacggaaggaatccccccagacgcagcaccgattcatcttcgtcggatagcaacttgatgacaggcgcatccttggcgactacaacatcctgattgaatcaaccc

SEQ ID NO: 76849 - DNA, 1638 bp, Glycine max
  unsure (1)..(1638): unsure at all n locations
  Clone ID: PAT_MRT3847_40409C.1
aaactaaaccctttctaatatcaagagtattttttttcttttttttttttttttttgatttttttttttttttcaattttaaatccaaactctactccatatattatccaacaagtcacattaaagtttaaaaaaattaaggaaaaaagggccaaacaaaactatgaatcaatggaagtaatgtaagttagagactctttttttggcacataaaaatgaaaaagaactaaagccgcagcagcagagttacccccaatggcatctgcaagcaaataagggggaggagtggatctataacttagagagagagagctcctaactccaagcttcgccaggaaatcagtagttatttccttccgagagtcatttaatcctcaaagtctccagcattctccaataaatagttggctgccaattgctcatcacggtcacatgccaaaaatgcctctatcaccgaggctctatcaaatcccatagcctcgagccttccaattgcctcctgctccgctggagtcacattgatggcatggggcatgtcttgctcgggctgctcaaatatatctccttcagaaccctcaacaggttcatttatcaactgcagaaactccccatgatgctcttgaatcagtcttaaaagaccaggattctgcttaccaagttcctgaagcacaggctgtagaatttgtggattggattgcaccattgaacgcaatgcttgaaactgggggttatttctaaggaagtctagcgatccaagtccagcaccagtgctagaaatcgtctcctgtggaaacatatttaagggagatgaattaggtcctacaggaactgctccagaagaaatcccagctgtttgaggaactggcacagcaacttctgctgcttcagggattccagaatacaagtaatctatagcacgctctgggttattataagctgctcgaagagcacgactaactgtgtctctgtcccaattgccaccacccatgtccataatttgttgaatagtctgctcaagattactaccagcaactaaattcgaagcagccagaccataggtatctgcagacacatttgtagttggggcatctgtgctagatgtactgttgtttgcagcttgagtttgcactggaggatcagaaggaggggtggaatttgacgttgatacagtcgtaggaggattactggcaggctgaacagatgaagctgcagcagaacctgatgttttactcttactaagcataacaacaagaaagccatcttcagagactttattctctactaatgtagtttcatctttcaaaaccttgccattgtgaatcaacaattgctgtccacatgggtaattatcttttccttgtacatcttcaatattcttcttgacagccataacagtatcggagggttgaaccctgatttcgaaatggctccctttcaaagtcttcactgttagcttcatgccgccgaattatcggaatgacgccagaaacggcagcgatctgatgaaagaacggtagtagagaacgaaaccctagggctagagagagaaacaacttagtctgttgccgttgcagaggatccccttctgtcgtcttctcgcagccgtacccgtctgtcgtcccgggaattnnccggacc

SEQ ID NO: 76850 - DNA, 185 bp, Glycine max
  unsure (1)..(185): unsure at all n locations
  Clone ID: PAT_MRT3847_4040C.1
attaacaacgggggtgaggcnaacaaaaagggaaccagaaaaaatggagttgggaattacggggtggcatctaccatagtattcagctcaaaatttgcaactaccaaagccattaatgcctttgattgatccgtccaacaatgagagcctcacagatgcctggggctgcatcttcagtgaataca

SEQ ID NO: 76851 - DNA, 301 bp, Glycine max
  Clone ID: PAT_MRT3847_40410C.1
gacccactcgtacgcccacgcgtccgattttaactgtgtttgtgtgacaaacttgaaaagtactttatggtataagtttaactcaactttgctatttataatctactattcatcttaataagctaaacttaccatacttaattgctaatctaaattcccttgaaaccaattacctgcatttgtcaaaattttcccactattatatccaccattactaatcataattaacccatatttcaatatataataattccctttcattcttgacattcaaattttacaatttaaccaatttaaatca

SEQ ID NO: 76852 - DNA, 172 bp, Glycine max
  Clone ID: PAT_MRT3847_40411C.1
gagaataccactgaggggtgggttaaactacttatttcaaacacaaactttattgttaattcttttattaatatgaaactattccgggcctggttccttaataagaaaaccacgattatctgaaaaaaaaacaaattttctttgtactagggttttttgtgcttaaataaaa

SEQ ID NO: 76853 - DNA, 453 bp, Glycine max
  unsure (1)..(453): unsure at all n locations
  Clone ID: PAT_MRT3847_40412C.1
aaaaacagaaaaaaaaaccactttatattactttactcctaaatcataaagacagactccaatataattgaactcagagaaaatataacctctagatataagtttgatatatcctctgcatcttctgtactaaaaccttgagatccctcagaccttggagatattgtatcagcaataattgaatctattacagccatgtgctttgtccccccatgcatcatnaagaactttatcaattcctccagaagcaatttgttttgaggcaaagttctgacaccatcaattaagacatctccggcagcatccacactgtttgtactcnnatattttagccgagagaaatgaacatannnnntagggagggcatgtaacattttctctgctgatgccatttttagtgcttctttgtatatactgaaagctgactctgtatttcccaaacgtttttccata

SEQ ID NO: 76854 - DNA, 226 bp, Glycine max
  Clone ID: PAT_MRT3847_40413C.1
ctgcgtgcgacgagacgacggaaggtggtattatcttcattccatcactatcctgtagaatcagtcagcgaagcgctcgaataggtccactgatacctcagaagacgcctccgcattggttcagtgtgtcggtgcaacttaatatcttcgtagatggcctgcgtccactatcgccgcacttcctttacgcttccgcaatcggaacagtctagttgaacactcgggg

SEQ ID NO: 76855 - DNA, 994 bp, Glycine max
  Clone ID: PAT_MRT3847_40414C.1
aattcggctcgagcagagactaacgatgaactcaacaagcagttggctcttttgaaagatggtggtggcaaatctgagagggtagagtcacttgagaggcagctaagggaatccgatttacagctgcagcaagcagtagcatctgctgaagctagtcaagagaagcaaagtatgctgtattccacaattaaagatatggagcatgtgataaaggatcttaagtcaaaggtttctaaagctgagagtcgggctgacagtgcagaggagaaatgcatcatattatctgaatctaatagtgatttaaacgaggaattaaacttctcgaggagtagattggaatgcttggagggatcactacaccaagtggaggaagccaaagtggcatctgcaaaagatatcggaaagcagaccaaagtattcaaaaatttggtgatgcagctggctgttgagagagagcgtcttaataagcagctgtcctccttagcaagtgagaacaaaatattggtagtgaagctaaagcagacaaataagcatccttctcaagaagttactgtgacttttgctactgaccatgaggtggacagaacttggaaaaattcatctacaaatgataatgaagtaaagtttacagatactatgccagatgctggtactgtgaggagaatagatgcaggagttcttaattttaagcatttattcatgttatcagtgcttgtcttactgttttcagccgtgacttatctgaatgtcgatgccaatctttgaatgaatggtcagagttttttcccttgttttttgagatctaggtggggaattggggaagaggtgtggatggatggaatcccccaacctcaaataccacaatgccaggttagtataggttacaaggccattgacattgtaggtttcaatgctagtcattgtgtagccatatcaatcaaattttgttctaatggagtatatgattgtggtagatatgatccttatctcttct

SEQ ID NO: 76856 - DNA, 316 bp, Glycine max
  Clone ID: PAT_MRT3847_40415C.1
accaccaaacaaattattgtgagaatcaaaaccaaagaaataccaaagaaaaagggtttgcattcgttaaggtcaaaaaaaattttaatttaaagataataccagaccttgtggtcaaaaaaaaaaatcaataaacctttttaaccaagaaaaccgttcaccctggaataaactcaaacccctccattgacggaaaaggggggccaacaggagcccccaagccaaatctggttcgccttttaaagttggcccaggggtatccaataggcgaggggggaccccacggaaaaaaaggccccccaacaaaaaggggggg

SEQ ID NO: 76857 - DNA, 348 bp, Glycine max
  Clone ID: PAT_MRT3847_40416C.1
cgaagctcggaattcggctcgagggactacaaggttgcagttggtttccttgcagtagggatgggaggtactctagttttaatgttcaatgctgagcataggggaacgcactccaacagataagattaaagaagcacataggagggtgatggttgcaaaccatccagatgcaggtggcagccattaccttgcatccaaaattaatgaggcaaaagatatgttaattggaaagaccaaaggtggtgggtcagcattttgaagcctgctcaagcctttctttccatcattttgacagtgcagaccggggtcctcattagatgtcaattattaattttttggtcatcgcct

SEQ ID NO: 76858 - DNA, 276 bp, Glycine max
  Clone ID: PAT_MRT3847_40417C.1
acaaaagacaggtagggatgcaatcatacaatagaaaggaacttttgcttcattgtgacaatggggatcaggtgctcaagtagattcatcgtcatgcgcgtcatcaatatctatgctgctcaggttgtgatacaaacagagggaggtactggtgagatagacgagaaaaggttacattgctagtatgatacagaccaggactgtgctttagattacacgaacgaaagtttctccggcggcaagtgcaaacggttcctctagaggatcatttgctac

SEQ ID NO: 76859 - DNA, 460 bp, Glycine max
  unsure (1)..(460): unsure at all n locations
  Clone ID: PAT_MRT3847_40418C.1
atcttttttattttttanatttttgntggtttttgttgaaatggnggagggggaaagcaccccaatttgaagctttgccaaggagattcaatcttgcctgggaaaaagagcaaaaggctttgtttttttcccttgtttgtccctctcggcctctaaaggaaagcttattcacaaatttaaaatcagtggggacatattatttatagaactcgagtaagacaacctccaaatgggaaacaaaaggccggtacctccatttctttatccaactttttatcctcagtttactcaacagcagggggcacagactcggccaatttggggtccttgggagcatagaacatttggagataggggcggttttaaggggggtaaagggtagacacatgtttccagaagccttagacaccagtgggggggagaggcctttgtgagtaaatggcctgtgactttttttaaa

SEQ ID NO: 76860 - DNA, 422 bp, Glycine max
  Clone ID: PAT_MRT3847_40419C.1
cttttgacaggattacaaggagaaaccagattatggtcgctgtgttgctattgtagcatctgcgtcgttaagagagatgataaaacctggtgctttggcaatcatttcacctattgtagttggtgggttaacttttaattttacatgtctgcacatatattatcattaataaaaccaggggacaacggcaacagttttgcaaatttttgatgtattgtaaccatgtcacatacatgtgaccaacataattgcttgataggctagatcatatgccaagcaaattaatgtttggaatcatttgagaaacaaattatagatatcgtggtaactttccacccgcaaccaaaaccctttaaaatatatcttcatgtattcataagacaccagtggctatatttagcacatattgttgcacaacctac

SEQ ID NO: 76861 - DNA, 251 bp, Glycine max
  unsure (1)..(251): unsure at all n locations
  Clone ID: PAT_MRT3847_4041C.1
agctcggatcggctcgaggatgataggttcctcacatccaattagcttcaatcttggacctatnacatncacaagtaaacccataatcctccatcaagatccttttccttgtacaacantactgacattggtattaagttgattgaggatgctgatgaggggaaagaggtttgcatcaggggtgtgatgattggtagggactattgtacaaagaaaaggagcttggtggaggattatgggctgactttggg

SEQ ID NO: 76862 - DNA, 392 bp, Glycine max
  Clone ID: PAT_MRT3847_40420C.1
ttttacttttacaagaggaatttcttacagtttggtcaactcatgtgcgttctacaacaactctggtggatgatgggtgtccatatttgtctgctatggcgcatgatagttcagtgtctacaataccaggtgattatgacattggtgttaagttgacaaccataaacaatatgtttgcatatggggtcaatactggtatttcaggtcctcgacttttggggaccattcctgagtccatgtaggagcaaactgtttggaatcaaatggcaacggtgcggacaccattgtattttgattctagcaagcagagcttatgtcatattgtattgtccttctcggaggaggaattttagtggacacaactggggattggatcacacttatacaaaatt

SEQ ID NO: 76863 - DNA, 174 bp, Glycine max
  Clone ID: PAT_MRT3847_40421C.1
cgatccatccgacccaggaggcgattttcgttttcaggaccgagacctgcaggcgctccagctttcgggatagttagtcgaattagagcttgacgtaatcatggacgaaggtgaatactgggaagaagtaggtatcgcgccccttgttgaaacaaaatactaatccggaagcat

SEQ ID NO: 76864 - DNA, 192 bp, Glycine max
  Clone ID: PAT_MRT3847_40422C.1
gttgactcttttttttttgcggctagggtagtagtacatcatcatctagatttagggaggatgaactcagaaatagtgaaaactcatcctaactcaaaatccacatcataatctcacagaacaatagtaagtcctatcatttatcacacaagtttccaaaattagaaacactcgaagctattaaattgagat

SEQ ID NO: 76865 - DNA, 574 bp, Glycine max
  Clone ID: PAT_MRT3847_40423C.1
cgaattcgagctctttacccggggatcctctagagtcgacctgcagctctctctggctgaatgctagtgacatggagtattgggagtttgtcccggaggaaatcaatggtgaatcaagctgaattgttcttgctaacttacctttatgcttgaattaaacgtagttggtgtgttagggcgagaaacttatttagatggatttgccatgacaaaaatctttactctctataccactagtgttatgtgcattctacttttaagtaggaacattgcgtatcatgtataattcccataatcatactgtttgtgttacaaaacaaccaaccgtctaaaaactgattttttttttatattctttttaaccaatgatctatcataaatgtcgagaaggaatttggattatgaggaattatgtagatatcaatagtaaaacaccgagataagccccaacaaacttttgcttcaaattggcatgtgtactggttaataaagtcatgattataagagtgcggtaagtcatttaatagtttaaagattagtttataaggcaaatttttccaattggggatccttt

SEQ ID NO: 76866 - DNA, 510 bp, Glycine max
  Clone ID: PAT_MRT3847_40424C.1
gtaaaacgacgacaatgcgatcaagaagcgtggttgggtcacgtggacgtagcagagaggtctctgattaaactttcacgctcacacctctcatacacaacgcaatccaaattttccttgcttcttttcttccatggatttggattggtcgtgttcttccaccaccaccaccaccaccggcaacccctactgtctcctcttccaagcgctatcactcattccaatctcgcactacctcctcttctcctccttcgttttcctctccttcctctaccgtttcctggagctccatttcctccaagacctcttctccctcttctccggctcctccgtcaccttaacctaccatcccgcttcccaattctacgacgccgtggtttccaaatgcaggattcttcaccggacctacctcggcacgccctggcttttcagccctcatctgcagaacgtgtctcttaacttcttcagcagacctaccttcttcaaattcagaagacaactgtttactac

SEQ ID NO: 76867 - DNA, 1447 bp, Glycine max
  Clone ID: PAT_MRT3847_40425C.1
aattcggctcgagtacggctgcgagaagacgacagaaggggcttcacactcatcactccacattgtcctctcaccacttctccaattgaaaaggcttcttcatcaaaagaaaaatggctcaaatttgtttgctcttggtggggcttctctcaatgttctcctctgcctatggctacggatatggtggtggctgggttaatgcacatgccaccttctatggaggaagtgatgcctcaggaacaatgggtggggcatgtggatatggaaacctctacagccaaggttatggaacaaatactgctgctttgagcactgctttgttcaacaatggtcttagttgtggctcatgctatgagataaggtgtgtgaatgaccataggtggtgcctccctggctccattatggtcactgccaccaatttctgtcctccaaacaatgctttaccaaacaatgcaggagggtggtgcaaccctccaatgcaccattttgacctctctcaacctgttttccttcgcattgcacaatacagagcaggaattgtgcctgtttcctacagaagggtaccctgcaggagaaggggaggcataaggttcacaatcaatggccactcctacttcaacttggtcctcataacaaacgtaggaggtgctggggatgttcatggtgtggccatcaaggggtcaagaacagggtggatgccaatgtccagaaactggggtcaaaattggcaaagcaacaactatctcaatggccaaagcctctcattcaaggtcacaaccagtgatggccgtacagctgtgtcctacaatgttgcccctgctggttggtcctttggccaaacctacactggtgctcaattccgctagagagggccttaataattgttcacaagttgaagttccaaatatttagatacactacatatagtatatgctataatttctcaatttaagtgttagtatatgactccaaaaaaaagactagtatactaaggtattaatatagtatgctacttggtggaggaggagggggtggggtcaaattggatcgcaaaatggttaagggcttattttaaattggctcttgatcattttttattgggtcaaatgggggttcctaattcttggggcctttttttattattggggtatttttattttcatttttgaaagctttttcaacctttttgctgctgaaagctggtagagagggaatttttatatctgtgacctattaaattggaggaggtggactgttgcaccacccgccattagtataggagaagtttttgtttttttttgttccctaatgggattatttagaagcattgtttgcttactcatatcctttgtaagcagctatggctatgtctttggttgtactactggaagtgtaaattttcctatttctgcctttaatcgaaagttgcagtaatttactattactt

SEQ ID NO: 76868 - DNA, 719 bp, Glycine max
  unsure (1)..(719): unsure at all n locations
  Clone ID: PAT_MRT3847_40426C.1
cccggggatcctctcgagtcgacctgcagcttcacaacctcatgtacgagaaaagccactacgttaaggcgatcaaggcctgcaaagacttcaagtccaaatatcctgacattgaccttgttcctgaggaggactttttccgcgacgctcctcaagatatccaggactccttcttgtccaacgacgccgcgcacaatctcatgctcagaaggctcaatttcgagctattccaggtgactatgcaatattattctcttgcaaaaaatttaaccttgggagtatgcctcacaatttgcaattaggttgcttgaaaaatttagttgatgaaatagaaataagtgtgcgttatgattattatatattttcttattacattggcttctagcaaaagtttattgcagtatcactagtgtgcctctgccctcaatataagttttgcattgataagctaaaagcaaggttttaaattgtggttgcggtttcatagcaatccttgatattgtgagaaattgcggataaatgatgccaccaagacccccaaagcattgatggttgtgtctgaaaccgtnggttgcagaccgatttttaaaaccttggctagaagttaatgcatagtgagaagggattgtaggataaacacaagggaggcttttgntgctgcattctctgtgttttggagaacatgttgggatntgattcttattttatttggaagcgta

SEQ ID NO: 76869 - DNA, 129 bp, Glycine max
  Clone ID: PAT_MRT3847_40427C.1
cttcattggagtttccaaactaaccttaaaatcactatgattcatttccttcctgactgtctcagtctccatcatgctccccgccatttctcttccaaacaacataagagaataaacgaacataacagc

SEQ ID NO: 76870 - DNA, 391 bp, Glycine max
  unsure (1)..(391): unsure at all n locations
  Clone ID: PAT_MRT3847_40428C.1
tagttttttaatagggattcaaattaaccaagcaaattaatatagttgttattttttgtcgttaatataataaaatatatagctaattttgatggttggaattctttgtatccctccttctgtcctttacaatccagtgatttattatggatcccattgattttcttaaagataatattgatttagttgtactagttagtgactttcattttcctactcttgtagtgcttgatacgtaaattgactgcaatataaattgtagtgatgtaattaagtacaaaggcaatttatgttccttggtgacataaattctaaaattgaaagaggccttattgtcccttggtgacataanattctaaaattggaaagaggcctcactaatctctttttg

SEQ ID NO: 76871 - DNA, 370 bp, Glycine max
  Clone ID: PAT_MRT3847_40429C.1
gaattcaatgtcttggtttttttttatatttattgcgggtttttaaacatccaacaaaaggggtgttaaataatttgatgcccctttgaggcacaaactgctagctgtcaggccgtttaccaaaacgccatggaccttattggttcccctcatgcccaaccaaggatgccaataatgatttcgaatgcaaattacaaaacagcttataaccatgggtaaatatcaccatacgtttacatcatttgctttcccatgtgccaatttccaactgtccaaaaccaaatgaatggtaaattagcttaatcgcattggcaataggatggccatcttggatctttttgtgagaatggaaatggttagtttattccaa

SEQ ID NO: 76872 - DNA, 489 bp, Glycine max
  Clone ID: PAT_MRT3847_4042C.1
aggaaggttgcccgtcatcactgtatgacgtcctgcttctttgggtgggggggggggggcccaacaagtaggaggggtgtgaggaattagttagggggatagagttacccaaaagagaaaaaggaaaaaaagcagtaacaaaaaagaggaaataaaaagaatgagtgaaaagggaaatacctatttcggttgagggttttggggtgagatgtagggggcgaaacgttttaaaacaactcgtgagagagaaatgtgacgaaagcggaatggatttgaaccaagaggcagtagattatttgtaaaacgataaaaggtaccgtatgataaaattataatattaccaaatagataattacgttagaaaagtgtggcgccatattgcgacaacattgtacagacaaagtttacaattgccaattaatgcgtggcaccctattgaagcagcgccatatacgtatacacataaaaggggcaggggtatattatttt

SEQ ID NO: 76873 - DNA, 155 bp, Glycine max
  Clone ID: PAT_MRT3847_40430C.1
ctttagaataagccttaatccttttcgcacctaaccggttttccaatagccatggttttttggcaaaggcaccgatctcaataaagctccatgcttccacctcctttttttttttttccaagtcctccttcaaaacgggaagactctgtttccag

SEQ ID NO: 76874 - DNA, 361 bp, Glycine max
  Clone ID: PAT_MRT3847_40431C.1
gctattctctcagctattcaccagagatagcttccatttttgctcatatcttactctggctgctcctgttcctaggaggatacttcccacttgataaacagataacaataactgctccatatacttttatcaacatacatttacagaagttgcaacatctatgggaatcatcactcgcaggtctgatgcttgaaaaccaagtcaaattatcaggatatttgtgacaacctttattattataattctaggattctcatataggagtatcaaactcaacagtgtcattaacaaatttgaatctcccatatagcctgctttccttcatatgatcattattacattcaagacagatatacaggtc

SEQ ID NO: 76875 - DNA, 807 bp, Glycine max
  Clone ID: PAT_MRT3847_40432C.1
gcggcggcggtggcggtggcggcgggttgggggcgacgcgcgggagaggcgcgggctggcgcgcgggacgaagaataatcatgggccagactgggaagaaatctgagaagggaccggtttgttggcggaagcgtgtaaaatcagagtacatgagactgagacagctcaagaggttcagaagagctgatgaagtaaagactatgtttagttccaatcgtcagaaaattttggaaagaactgaaaccttaaaccaagagtggaagcagcggaggatacagcctgtgcacatcatgacttcttgttcagtcaccagtgacttggattttccagcacaagtcatcccgttaaagaccctgaatgcagtcgcctcggtgcctataatgtactcttggtcgcccttacaacagaattttatggtggaagacgaaactgttttacataacattccttatatgggggatgaagttctggatcaggatggcactttcattgaagaactaataaaaaattatgatggaaaagtgcatggtgacagagaatgtggatttataaatgatgaaatttttgtggagttggtaaatgctcttggtcaatataatgatgatgatgatgacgatgatggagatgatccagatgaaagagaagaaaaacagaaagatctagaggataatcgagatgataaagaaacttgcccacctcggaaatttcctgctgataaaatatttgaagccatttcctcaatgtttccagataagggcaccgcagaaagacctgaagaaaaatataaagaactcacggagcagcagc

SEQ ID NO: 76876 - DNA, 171 bp, Glycine max
  unsure (1)..(171): unsure at all n locations
  Clone ID: PAT_MRT3847_40433C.1
cgtacgctaagggctcggaatttcggcttctatgaatccattaagggagacaacatnnaatttggaacatgataccgaatgcgaaatgatgcagcacttcacatgagatgatgtgagacatgagatgatggcagcaacatgagatttgggtnntgttggatgtgggtgaga

SEQ ID NO: 76877 - DNA, 314 bp, Glycine max
  Clone ID: PAT_MRT3847_40434C.1
aattgtaaaatcaaaggaaaatggcgggaaccgtaacgactcgtttgttctatggtgaacctcctcaaactccgtaaaacttttgagaactcccctgaggaaccctggcctaaagggctcgccctcacatggaatcactctaacttatcacgacactgccattcatcaccatttaatgcatgtctaaaataacacccgatggtgatggtcacctgtaaaagcatgctcggcagcacgagaaagctgcctctactcaagaggacccatgagcctcctattacaatgaccaagaagactgcgacgagcataaaaca

SEQ ID NO: 76878 - DNA, 695 bp, Glycine max
  Clone ID: PAT_MRT3847_40435C.1
agcccacgcgtccggttccgttgctgccatagttttagtatcatcactttatcatactcatgggaaactgtttcagaaagacagcagctgatgacaacaagattcacaagaatgagtataagactcccaccaccaataatccacgcccttctcccccagagagattggtgaaggaaacagtggaagaaagaggtgagcgtccacaaaacaacagcgttccaaagcttataaagtacacgttggatgagttgagaagtgcgaccagaaacttcagaccagacacggtcctaggcgagggtggttttggacgtgttttcaaagggtggattgataagaacaccttcaagccctcaagagttggtgttggaatccccgtggctgtgaagaagtctaaccccgatagcctccagggtctacaagaatggcagagtgaagtgcaatttttggggaaattctctcatccaaacctggttaaacttattggctactgttgggaggaatatcactgcctactcgtatacgaatacatgcaaaagggaagcctggaaagccacctattaagaaggggttcagaacctctatcatgggatataagactcaagatagccataggatccgcgcatggtctagcgttactgcacacatgagaagagattgtgatctatagagacttcaagtagtctaacattctgctc

SEQ ID NO: 76879 - DNA, 143 bp, Glycine max
  Clone ID: PAT_MRT3847_40436C.1
aatctggcagccacaaataaaggataacattatgcctccttcccacttgagatactttttagtgccattatagcggttacttaatttgagagggctggcttctaattattataattaagtcttttcacggttttcttttactt

SEQ ID NO: 76880 - DNA, 158 bp, Glycine max
  Clone ID: PAT_MRT3847_40437C.1
cgcagcattactgaggtatggctgctcgtaggcccttattctctgggatcagagcttcctccgcactgtgcttcggagatgaaacttcacaccgctttccggatattgctgcaggccaaaacgtgccaaggcgcgactactgcgagcagcgtcactaa

SEQ ID NO: 76881 - DNA, 1116 bp, Glycine max
  Clone ID: PAT_MRT3847_40438C.1
cggtccggattccccggtcgacccagcgtccgcaagatacagtgaaatgctccaatccaaccttatttgcatcaaaaaaaagaaaaagaaaccgcttctccttaatccctcccacttgttctgtttcagaattagaaaactaaagaacaagaagagaacaacggaaactaaacgtagtacacatcactaactctaacaagaaggaaggaaggaaggcaggagaatcagaaagccctaatcgattttcggttattatggagagatgaaaatgaaaaggcgtgggatcagcgcggaaaggataatcgtattcgtagatgcttctctcgggaggagtgtccgatctcaaatggatcctccaattcgtattctacgcgttcgtcttggcgattggactgcacgcgcttctcaagaacaccgcctccaagtacttcgaccttgacgccactttccacgctcacgctattcctggccttctcatggaccattctctctgcgccgtttgtcgcaaccccgccaacaagaagtgttcgcgatgcaaatccgttcgatactgttcacaagcatgccagcagatgcactggaaatccgagcataaggtgagatgcaaggagtttcagggcagcagcaccagtgtgatgatgaatttggctcaaactgaagtcactaatcgagttttcaaggcttcttctgctgctgtgaataggagtacatgtacttcttcaattgccctcattcctgaatgcggtcgtggaacatccaggactatcaagcagcctaaaagtgttctctttccttatgacgaatttgtcaaattgtttaactgggacaaaccaggatttcctccttgtgactcttaaattgtggaaacagctgctttgcgaatgtggttctccaatgtctctcattcacaaggccacttattgcctttctattggagaagggtcaccacagagaatgctgccataatgattggtgctttctgtgcgaactagaaacccatgttgaaaaacgtaggctaagttctcaggcgttctcttcgaagaatattatctctcgtttgcccaatatcagtggcacactgggctatggaagacaagaggatgctcatgagttcat

SEQ ID NO: 76882 - DNA, 513 bp, Glycine max
  Clone ID: PAT_MRT3847_40439C.1
cattgatgtggcactgatctgagagaattgctttctaggattgcctcgagctataaagtgcgacatcaactttgttgcccatgcgctgggcttagcaatctatattagcccaacatttggcttgatacatgatttaaatcctcgttattgcgaaggggcttgttttgctatattccaaatgcaaaccaggattgaacaataatgctggatctcgatttgaaacctccgaagccggctagtcatggtcatgacactctcctgagtgatctccatatctccgtagttgaatgttggaacttcttagcggacgcaagccatggctgtctcataggccgaagtcggagcatgcttatcgttccacgggcaacacttccactccaccatatcggtgccctctctaatacgtaagaacctaccttgcaaagattataccctgtgaagtccctgcctgatttgcagatgttattgctctgtgtgcgcagccaaaaccataatgccaaccacctatgacag

SEQ ID NO: 76883 - DNA, 165 bp, Glycine max
  Clone ID: PAT_MRT3847_4043C.1
cacacacgtccgctacgtttactcttttgagttttacgtgggtagacctactgtagagaaattttgatgattggatatattgtggcgaaagccatcacaattggaggctttgctctggaggtcaccgtgttattttgcaaacccgcaaatgtttgggaacgcttt

SEQ ID NO: 76884 - DNA, 329 bp, Glycine max
  Clone ID: PAT_MRT3847_40440C.1
ctcgagcggttccagccgttgctgctagagcatactcgtgcatgtttaacgcgtatggggctaatgccaccactagatactgagctgacagggactgtatactgtgacaaatggggaatccggtgaaccactccacttatctatgacaagaactttggtggacaaaagcatggaacaaacctggatagtggtgacaactgactcgatgcaggctagtaatgctagcacaggcatgatcatatagaccgtaaggtacacacatgggaggagagacttgggaccatctaagggatgggcatacctatcgaacggatgctatctagtggagg

SEQ ID NO: 76885 - DNA, 364 bp, Glycine max
  Clone ID: PAT_MRT3847_40441C.1
gcccgaggtgggaggggagttatgctagtctctgtagaataactcgatcgatgcaggacctcatctcgatgacacctccggctggtatcgactgttctaggagaaaagcaccacggacgattttcgagacacaagagggtttggctgattcacgctcgacctaaaactggttctattggcatctaggctccccgaattccgacgacaatactccatgagaacaacgaacaactggtcccggaagagtcttcgagcctaactgaccaaactggccatgtttcattcgcagatgtgaaggccaaagtacgaatactttgttgcgcaatgtcccggagaacaaatcgacaagatcagagatgaaagg

SEQ ID NO: 76886 - DNA, 273 bp, Glycine max
  Clone ID: PAT_MRT3847_40442C.1
accacactcaaaagaacaaccaaagggagaccgggagtcttttttgctaccttctaacagaaaaatatactttcaagaatcaccattaccttatgggcgccttgcttccttcaacgggagcatcacaacatgcgtagatcaacataaaggaactatatgccaccaaccatgatggcgcccattctactgcctgtgatattgctatgaagctgatgcaggagcagatgagcactggtcaaactcttgatctcatcctgattttcgtcaacaacc

SEQ ID NO: 76887 - DNA, 203 bp, Glycine max
  Clone ID: PAT_MRT3847_40443C.1
cccctatcatgatccaacagctactacttagaggtccacgactcttctgaaccactgctgactgcatggtgccttatcatggagacgcatcctgagcgacagaagaagcccgcaacttctcaactacacgtgtaaccgctgtggcatcacccgttactgtaaccacacccccaccggcaggcgctgaaaggaggataaagttc

SEQ ID NO: 76888 - DNA, 363 bp, Glycine max
  Clone ID: PAT_MRT3847_40444C.1
ggccgcctttttttttttttttggtattcccttaattattattggcaggtttccattgttttatggagattcctggtggtaccaggtccattctggcaccttggccaccaggctgaaggtattccccttccccacttaccccaacccatggggggggaaaaaaatggtaaaggaaattcaaaggtccagttttccccacccaccaccttatggacttgtaaccagttcttcttaactggcccccctactgggtattggcctaatctagtatccaaatgctgttttctcactataggtccaaatggattcttcaaatagtgaaaattctttataaccaattggtttgctgggctaacaaataaa

SEQ ID NO: 76889 - DNA, 409 bp, Glycine max
  Clone ID: PAT_MRT3847_40445C.1
ggacaacaactcctggaggcccttttgggttaattactggtttcccctttaaaaaattcccttttggggggaaaaaaccaccccccccaggggccaaaacttaacaaaaaagcgggcaaataactaaaatttttccgccctgaaacaagatttaacaaaaccccctccaagggacccccatttagcgggggggttttggttgtttttcaagcgaggggaggattttttggaggaaaagccctccacacaatttttttaaaagcgggacaaagttctttgttaaaaaactggttttactccaggggggcaccggtgtcctttttaacctccaccaccaaaaacgagggggtcacggggtacaagtccgaaaaaaaaggggggttaccttttcgcccttttttttgaccct

SEQ ID NO: 76890 - DNA, 539 bp, Glycine max
  Clone ID: PAT_MRT3847_40446C.1
ggccgccctttttttttttttttttttttttttattaaaaaaaaaaaaaaaaaaaaaaaaaaaaaaaaaaaaaaaaaaaaaaaaaaaaaaaaaaaaaaaaaaaaaaaaaaaaaaaaaaaaaaaaaaaaaaaaaaaaaaaaaaaaaaaaaaaaaaaaaaaaaaaaaaaaaaaaaaaaaatagggggggggccttttaaaaaaaccaaatttttccccccggttattgaaaaaaaaaatttttttttaggggccaaaaaaaaaaaattatggggccggtttttaaaaacgttgaaatggaaaaaacctgggtttacccaatttaaatcctttggaaaaaaatccctttttccaaggttgggaaaaaaaaaaaaggcccccaaaaaaccccttttcaaaaaattggcccccctaaaagggaaatgggaccccccctttatggggcaaataaagggggggggggtgggggttaccccaaagagaacccttataatttgaaagcccctaaagcccgaattttttaatttttttccttttttttt

SEQ ID NO: 76891 - DNA, 741 bp, Glycine max
  Clone ID: PAT_MRT3847_40447C.1
attaactattactatatatcaataagcaacgcatcaacacttttattcgtattcttcttcttatcctccttcttcatgttcttaaagaattagaattgatggcagtcaacagttattcttcatcagctcaaatctcacttcagaaatatggttcatttatggaatatacaaacaaagagttgatgtccaaacgatgctgcgtcccacagaaaacggcaccggttggtccagtagtattgagaatcacatcatccatcaagaacaagatctatgaggaccaatctcagggcataatttgctatgaagatgaaagtggagaaataatttgtgaagggtacgatgaagggcctcgttatcaccgaattcctagtccaactcaacacccaagggatgttgaaatcatgaatcttcaacaacaacaaagttggcttcagattgttaaaggagaagaaatcaatcatttagctaaaggtgctcttcatctacaagaggatttaaactacaataaatggctttaactcattccaaaccaatcaggcttttgtcactctcaaaggctttaacagttacatgcagtgctaatatgtatcagaaaggaataatagcacaagaatatgcagtaattggtgaatcaaataggacatgtgctgtcttcagcacatttttcatgcaagttgtacaaattgacagtgcgtggtgatgcttttcttatatacttttcttttcaatctgcccatatag

SEQ ID NO: 76892 - DNA, 509 bp, Glycine max
  Clone ID: PAT_MRT3847_40448C.1
aaaaaaaaaatgaaccttttttcccaggggaaacattgaaaatttcaaactggcatcacaaggggctggaacctttaatcaaaaacatttcccaatgaaagcaaaggccctttacaacatatgccatttttattaaaccgtttccatttaaatacaatatttttattataactatctcattcaaaaacccctcttccactttcataagcataatccccccaaaataaatataggaccccccacttttgagggtctgaaacccagggtaagggccctactgggggataaaggcaagcccctttaacaaggaaaccggaaattgcatttgagtcccttcatttattgccacaaaaagcggcccgtccccaaaaagggatttgacccccttttgctcggggaagcaaagggaatgattttaaacgtttttgcccacaaccctgccttgataaactgataccataactttatatcccttttttgccaaggctttggggatccccacaacagga

SEQ ID NO: 76893 - DNA, 633 bp, Glycine max
  Clone ID: PAT_MRT3847_40449C.1
cccgcgtccgtctccatcgaatcactaaaggacggccttcgcaagaacccttctagcggtcgcgcctacgaccgcatggaaactgaaccgggcctcgacaaactgctccacaaccgaaccggtttaaaaaccgccctcgaaccgcttctcaaatgggcgcagaagcagattccaaaaacctcccacaaaaccacttctttattcctctacgccaccgcaggggttcggagactccccttcgacgattcgaaatggttgctcgacaacgcgtggagctttctcaagagttcttcgccgttcgtgtgcaaaagggattgggtgaagatcatttcggggaccgaagaggcttacttgggatggattgcgcttaactacgattcaggtattctcggtgttaagccaaggaaagaaacctacggtgctcttgatttgggagggtcttcattgcaggtcacgtttgaggggaatagaaataaggagcagcaaaatcaacagttattgaatagtgagactaggttgtatgttaggattggctctatgaaccatcatttgacggggtattcgcttgcgggttacgggcttaacgaggcgtttgaatagtctggtgcttatgtttttaaaaaatatgggtat

SEQ ID NO: 76894 - DNA, 298 bp, Glycine max
  Clone ID: PAT_MRT3847_4044C.1
agctatcatcatggcacgttaacgtttatggaactcatcactcacagtatccatcctgtcataattcttagtactgaggagcatcaaactcatgtcaattttgagaatcttggtcagacatcgcatggccatcaaccattcacaggcaaccttcctactaacaagtactgttatgctttccatgcctctcagtatccgacagaatggaatgttcctactctcaaagcatatagcattacatctgcacatgacatatctgagatgaggatctctattatctatttgagcgccattgtca

SEQ ID NO: 76895 - DNA, 483 bp, Glycine max
  Clone ID: PAT_MRT3847_40450C.1
ggaagaagggaggttgatgactttgttatatcacaaaggaggaagaaacaagaaagaaaaacgctcaactcctgcttctcaatacccatctcattatcatatgtttgcaaaaaagtctcctgcaaaagaaattcccttgctgggaaaagataaagatgaattttccttaccgttgtttttatttcttttggaaaacagtgctttgccagatttgtatgtgtggttatgagatcttcaatcgctttcccttctctgactctaatgaagacagtgacacttcccatccttctctctctctctccccctccctctgctgcttctttaataacgcaccttctcttctcttccactgatttctgcttctgacccttcaactctcttctacttttccatttctctaagtttttcactcttaatttttctctctttgatttagcttgttactttacttatttaagtcgttggttttctaatttgtgtttt

SEQ ID NO: 76896 - DNA, 279 bp, Glycine max
  Clone ID: PAT_MRT3847_40451C.1
gccacacgaccacacaactgtcaaaatacaacacaaaatgcagcttcaatgggctaaattgagaatcaagagctaatactataatacactgactgaataaactatccctaatcttacatataatactatctccataccactgcctatattccattactattgctttaacagatttctcatccagaaactaatatcttgactaacaaacctaggatgataatacttcaattcatgcaaatatccaatagaataacaccttaaaaggatctgaccaagtta

SEQ ID NO: 76897 - DNA, 259 bp, Glycine max
  Clone ID: PAT_MRT3847_40452C.1
ggagctggtttttttgtcgcgtttgtttataacgttggtgttccttgactcgtgtactagtactagtactacccccaacacagcacgcagcagaccacgcgccgaggcgaagtccaggtccgggtcaaggcctacgacagcaatccagggagaccttcttcggctcaattctccgatcccatccgcaatggaagaaggcggattcctctctgccgctctccagcaagaaggagaacgtgactcccattacctctaaaat

SEQ ID NO: 76898 - DNA, 615 bp, Glycine max
  Clone ID: PAT_MRT3847_40453C.1
ttttttttttttggcagcaagggttaaacctaccacatctacatgactatgtcttactttcaataagttacacctaaatagctaacatattcctcttgctcacgcacactatctttcgtaaacttttcacgatcatctttatattatcaaattcatttaattaaatatacaattatcttaatattataagcaagtctctgtataatcatgtagggtttctaaattgaatgagcctaaatcacacactcctgaaaaaaggataaaaacatatttaatttcatttagtgtttaatagtgttttggtcttttttgtttttggttttttataggtatttcttttcaaatttgatgacaacattgtcattgggtccttctacccttcacatcagcaaattggacactaaagagactcggtcagaaacaaataactactagggggacaataacatgagaggatttaacacttttggagtaggaaaatgtactttaagaaaagaaaattatatggttatccatgaacactacgctctagacgaaaaaaaaaaccccgagaaatagtatataactctttaggggcaattgggggggggcaaaattgagggggacccagactaa

SEQ ID NO: 76899 - DNA, 318 bp, Glycine max
  Clone ID: PAT_MRT3847_40454C.1
gcctacgtatgctcgtaatgcggatcgagactatctttcgtaactgccttcgcttaatatgccggaacggacagccaacctatcatctaccttatgggaattctgtctgaaacatcggctgaagaagatagcatgtcgcgacgcactggtacatcgcacgtgccctgagggcaaactgctgcatcgtaaccccatgaaagactcagatcagttgtgtacatcagaagaaagagattgactggacgaacagcacgaacggcgactgatgcaacggacatgcctatgagatcacatgcgacgcacgtgacttaacgacag

SEQ ID NO: 76900 - DNA, 650 bp, Glycine max
  Clone ID: PAT_MRT3847_40455C.1
ttctttgacttcatgtaatgccacagctcttcactgtttggggactagtatcatcactgtcattattaatcttaaggcatttcaaggaatagcataggtagaatgcctcctcaaagcttaattgaaaccgaggtttgtccttttcaactgttctcacaggtgagccaaagcatgctttatcgagcaaatgaagttgttctgctcccactgctaagtgtacactactaccagagagaaatccacaagtatttgattgaactagagaagactgaagttgagatacaatctttgacatgggttccttgagcgcttcagcttgtgcatcctttttagcttttgcatcttttcctttccatctaggtgccatttggacccaacgttattgtgctccccgatcttgtgagctccgtaatccacagcccgttctccgaggaaggcgcctgcgatgacgaaggtgacgtagactcagttgcgacgcattaggaccttgtcgaggttttccaaaacgcctcctcctctgcttcttcgaggcactgaatccattacctctggttagggttagggttagggtttcagatctcttctctttcgcaaaggaaaggtatttctgacggagaatgaatcaatgaggtgagactggttcacactgg

SEQ ID NO: 76901 - DNA, 184 bp, Glycine max
  unsure (1)..(184): unsure at all n locations
  Clone ID: PAT_MRT3847_40456C.1
caggattgtaaaactataccttcatgctgtaatggttgtnatgtttcggactggtatagctagcggttgatgtttaatgaatcaccaccattgcacatatgtgcaaattttgtgctgagccaaatgtatgtatgtacagtatcaagccttgaaaatttacttaaattggtagcacttcttctcc

SEQ ID NO: 76902 - DNA, 339 bp, Glycine max
  Clone ID: PAT_MRT3847_40457C.1
tttttaaaacaaaagaatataatctttgtatgttaaaaacgcaccataatcctatagcctcgtgagatgaactacgactacaacgtaatcatccccaagtctattaacaacacttgattattcacattatactgataatgaaaattgaagaagataggtcaacaactggatagataccttcattattactgtttcattacctcacttaataccctttagctatatgaataatgtatatttcaagcaaatatgttgtatagatattatacttattgataagttgttatgagatactgttccttgattcaggtgaacattttattacatttttcaaatcaa

SEQ ID NO: 76903 - DNA, 446 bp, Glycine max
  Clone ID: PAT_MRT3847_40458C.1
gtccaaaatatctgcaaagacaacaccggaccgagattctacattaacatgcctttcactaacatccatgttacatttaccgaattgtggacatactcatttattaacaagcacgataatctaaactaccacaggcatatttcctgtacttatactgcaatgggcgcgtgtgattcgggtatatcttcccacgctgcagtgtaatgacactgtatacgtacaactaaggccttaaggttcccaacacaacaaacggtactaattttgccatttctcgcagtcttaactgcatctatacccaatgtggtcatctcaggcactttggtgcgggggcgtgtcccgacccgatatgaacggaccgcgacctgcgggcgaacatagattgcactatactagagtagcatttgagcctggcatagtcatggccaaaggtgtcacatgggtga

SEQ ID NO: 76904 - DNA, 1838 bp, Glycine max
  Clone ID: PAT_MRT3847_40459C.1
caacagtgcatgcttgcaattcaacttagtctacagtgtccttgtatattactgttttgtccttgctcactggccgtcccgggtcgacccacgcgtccgcggacgcgtgggcggacgcgtgggctcacttgatgctttctacaatctctgggacacccagatctcaattttctgcaatttcactcagaccaggaaattaaccatggctcaacctgcaagcctcacaagaataggccttgctggcctggctgtgatgggccaaaaccttgctctcaacattgctgagaaaggctttcccatttctgtctacaaccggaccgcgtccaaggttgatgagacagttgaaagagcaaaacaagaaggaaaccttcctgtgtatggctaccataaccctaaattctttgtccaatccattcaaaagccaagggtcataataatgcttgtcaaggctggtgcacctgttgaccaaaccatcaagaccctctcagcacacttggaaaagggtgattgcatcattgatggtggcaatgagtggtatgagaacactgagagaagagagaaagcgatgtccgaattgggtcttctctaccttgggatgggagtttcaggtggtgaagaaggtgcaagacatggtccctctttgatgcctggtggttcattcgaggcctacaagtacatagaagacattctcctcaaggtggccgcacaagtccctgatagtggtccttgtgtgacctacatcggcaaaggtggatcaggaaattttgtgaaaatgatccacaatggaattgagtatggtgacatgcagctcattgctgaggcctatgatgtgctaaagtcggttggaaagttgtcaaatgaggagctgcaaagtgcgttttcggaatggaacaaaggggaactcctgagtttcctcatcgagatcaccgctgacatatttggaatcaaggatgacaaaggagaagggcatttggtagataaggttttggacaaaactggcatgaagggaactggcaaatggaccgtgcaacaagctgctgagttatcaattgctgctcccacaatagaggcctctttggatgcaaggttcctcagtggattgaaagaggagagagttgaagcttcaaaggtgtttaagtcaagtggctttgatgaaatcttgagtgaccaacatgttgacaaaaagcagctcattgatgatgttaggaaggctctttatgctgccaagatctgtagttatgcacaaggaatgaatctgatcagggcaaagagcattgagaaaggttgggacttgaagttgggggaacttgcaaggatttggaaagggggttgcatcataagagcaatatttttggacagaatcaagaaagcatacgacagaaatcctaaccttgcaaaccttcttgtggatccagaatttgcaaaggaaatagtggatagacaatctgcatggagaagagttgtgtgtcttgctatcaactatggcactagcacaccaggcatggctgctagtcttgcttattttgacacatatagaagggaacgggtgccagcaaatttggttcaggctcagagagactactttggtgctcacacatatgagaggattgacatggagggatccttccacactgagtggttcaagcttgcaaaacagtcaaggacttagattactactattcaaactctttatgattaattttcaataaatgtaatgctttctactcaggactatgctgagttcagcttaaataattgcattgtggtgaacttcaatttcataatttgtccatcttaattggttggcttttgttctataatctattttgttgtttctt

SEQ ID NO: 76905 - DNA, 354 bp, Glycine max
  Clone ID: PAT_MRT3847_4045C.1
taggggtcaggaacaaaggcagatgcgcgaaaattagcgaatctaatattgagaaacatccagcatgcttcgagatcgagtgcgcgaactccttttaggatgagattatggacattgcttctctggagaagtaccttcaagagaggtttaagggctgcggcctggcctgtacagtcgactattccattaccatcaccagtgacaatagcacgataacagacacttttaacagcaatttctctaagatagagctgaaatattctagctctacgaactcgataaagcgcagagcaagggatcggcatcacagtgttgaatccaacacggagctcagtgtgtatcaatggagatgct

SEQ ID NO: 76906 - DNA, 570 bp, Glycine max
  unsure (1)..(570): unsure at all n locations
  Clone ID: PAT_MRT3847_40460C.1
gagcaacaggttatcaatggaattcaggattaactaggagaagctcatctaggaatggtggtggcagggggaggcgacgggtgcaagttgccccgtctcccctgacaccagtggcaaccaatgaaactagcacccccctgatgcagcagcttaataatattgaagttggattggaggatagaagcctaacaggttggggcaagacaaccagaaggccccgccgacagaggtgcccggccggtaaccctccgttgatccagttaacctaatcaccataagaggcttaaaatttttagatgtgaatttatagaggtaagcagggcaggctttcgaattaatggaacgcatgatgttctcaggcatggggatttctcttgtaaatttcttcaacccgtatttgggtatatgcttgattgtcagtctttggggtggtggtaccaacttgtattattcttaaataatgttgcatgatttcttctcattatctctttatagaactgttgagatatatataccagtgttccttcaattcaaaaaaaaaaaaaaaaaaannnnncgcgcccgctctag

SEQ ID NO: 76907 - DNA, 354 bp, Glycine max
  Clone ID: PAT_MRT3847_40461C.1
gtatttctgattaaccgaggcacaggttgccgcgccttataaccggaaacaaaagcaatcgttacttgatttcaagaatctctcaattgcttcctacttctttgtgcacgatttcttaagggaaagaaaatcactctctgtgctggccacagacttcgcgaatcattttcttttccactcttagcttattggctgaacactctcctatttgatatacgagcttccgtgagatttaaacatcttctgactgtttctcagatatctgtgtaatttcaagttcaagctggggaaaacttggattacgacttgcactttcctatctggaataggattgcgtgggtagacttttatatt

SEQ ID NO: 76908 - DNA, 448 bp, Glycine max
  Clone ID: PAT_MRT3847_40462C.1
agaagaagagggagagagggagagagggagagagggagagggagaggagtcgaatttctgagggttcatagaacactgaggagagaaagagagaaatactctgaaagaagtttgtaattgaagataaaatttgagtcttttatctttaattctttacccttctgacttcatccgatccgtttccatggatcccttcgatttgtttcgtaaaggttttggttgaggctacaaaagcacgagcttttttctacgagaattttctttttcctttcaaatacatgtgagcattctattttgtgttagctataatgaatgtatccaagaagggaacgcaaaccagcgaggtaaaactaaacattggaagcaaggtgactgctttgaataccaatgctgctgagtttattccctttgccctcagagcatctccagttggaagtagtagtgcacc

SEQ ID NO: 76909 - DNA, 263 bp, Glycine max
  Clone ID: PAT_MRT3847_40463C.1
cactaatactaggtttatctgtacacatttattttcatatctaatactcacattctgtttggcctgattcaaggcaagcaggtatcttctacatatgcttttactatcctaattcaaaagcataacatgctttttatttttttatcaaaaacatatataccattaaaagctatacattattcccattataacctttactgttcggttctgcatttcaagatcctcatttaaatcactaaaatttattgggtcacatcacacac

SEQ ID NO: 76910 - DNA, 357 bp, Glycine max
  Clone ID: PAT_MRT3847_40464C.1
aaactctgtttatttatgacaaatacatgttcgataaaacaaaccaaataccaagcccaagacctacacaaatggcgaacgaaccagatgcctcctctgccaggaacacaaaagccagaagacggacttgggtgacacaaaaagccacaagctagagatacgggagggaaaaccacaggaagtcaaggccccccaaccaaaaggatagagcaagggagcaggcctggaagccggaccatagcggatcccgaagggcccaaaatgggccacaaccagcagcagattgaaaacctgataaagaaagggtccaaaccgggggaaggggtgtaatggtcaagcaccggaaacccaggaggg

SEQ ID NO: 76911 - DNA, 402 bp, Glycine max
  Clone ID: PAT_MRT3847_40465C.1
ggggggtttttttaaatctaaaccagggataaattacctaaaaatacccgaccggaaaaaaatcctcccatatccaaagggttatctgtgcccaagtgccgcacgggcggcaccaacaaacgcctggaggggggggccttttctagctggtacgcccattccagttgggcggggaaggcttccaaattttaatcccccaaaaccttacaccctcataaaaatttcatttccaaaggcctaactaaagccagccttctacaaatatggctttaccactgcgtaaccgaggggggaaaagacctagccagtgaacgaacaatttcgacggcatgagaacctctagctgcatatgtctgtcaggggagcctgaaaaaaacccaaaccaatactgttgacttctct

SEQ ID NO: 76912 - DNA, 774 bp, Glycine max
  Clone ID: PAT_MRT3847_40466C.1
gcacgaggaccaaacttggcatctcgtacttaaaacaaaacaagacaccaggcagctaaacacaacaatgtcccaacccagattcatttccatgatctccctctgtctgaccctttttctgtactttccttaactcaaaacaaaacacagcaatgtcccaacccagattcatttccatgatctccctctgtctggcccttgttctgttctacacctgcaatggcctaccatttgtggacctcaatttccatgaagtagatgtgatgaccaaaagggtttgcaccaagagcattggggagtgcctgagcttgacagagccggagatggattcggagaccaacagaagagttctggcaatgcagaaaaagtacattagctatgacacactcaagagagacatggttccctgtgatagggctggagcttcttactacaattgtcatgcaatacgagcaaatccttataatagaggttgtgaggtaattactgcttgtgcaagaggtcaagacatcaaaacttgatgcatcagcgtcacaatggatggaggaaagtcttctcccttctctgtcgcccttcctttttccctttagctttcctctctagttaagatcatgcttttaaatgttttctattttacttttaaacatttatgtccagcatatctatgaaagtatctagttttctttccaagcagatgtcgcattttccttggcattatgatgcctacttgttacaaaataatacaattgatagaaatttgcggttactatttcg

SEQ ID NO: 76913 - DNA, 504 bp, Glycine max
  Clone ID: PAT_MRT3847_40467C.1
ggtcgtccttttttttttttttttttttttttcagagacccaaactgagcgcagctttcacgtctagcctccatgcaaacccgccacagtccaatctccaaacatcacacggcaccatcttcgtgcacttctcgttccgccacgtgtactgcagcctcacaccgcaggtgaacgccgggtgagagtagcaccaccacgaagcgatggcactatccttcactttcaaccacaccacgatattctcaccctcaccctcacgcccctccagcatcatcctcttgtacgcgtcattcacccaccgtaccctaaggcttccgtcacagacaaaagcaggacacgtgtcagcttctaggctcttcaccttctccgcgtccgtacaatctaataacccttgccctccctctccgtctccctcccccatgcacgtgcctgtcacgctctccactgtcacccaagactccgtcacctttgccgtcgaacaagatctgaacgcttacctccctc

SEQ ID NO: 76914 - DNA, 352 bp, Glycine max
  Clone ID: PAT_MRT3847_40468C.1
ggcacacgtgagtttgttgatcgagataacgagaaacagtgtgatgaaaatgaaggtccttgttttcgtccttgctggaagtttggtagcatggcaatgcgatgcgtacgatgtgttccctctccgaatgaacactggctatggtgcccgtactccggaggtgaaatgcgcaagttggaggcctgctgtggaagcacacaacatcgttgggtttgaaaccattcctgaaaagtttcttgaaacatccgcatgaatacatccatggggaacaatatggatcacactctaggtcagtttaccaacaagcttacctttaagccagagaccgtcgaaatccatcccaagggcccat

SEQ ID NO: 76915 - DNA, 279 bp, Glycine max
  Clone ID: PAT_MRT3847_40469C.1
ctgcagcattgatcgccactgtcattctccgtcatcgtcgctttcgatgagtactgtgtctgtggtgtgaaagcgaagagttctcagatcattatgcgcatgctcaacactatcgtttatggccatctgctgagcttgttagctgtgacctctatcatgggcattgaatcgatatgggactacatctcttgcaagaaggccgatgttggcatacgctctagggcatccgagcttactgatgcatacatgcatcgtgtgatctctgctatagcgatacct

SEQ ID NO: 76916 - DNA, 452 bp, Glycine max
  Clone ID: PAT_MRT3847_4046C.1
ggctcgagagaaactcgtatttaatgtaccactctgctgaatgcaaccgcaatcgtataggagtaaccactcgtggatagaactggtagatgcgacataggagctcatgccacacttgggaggagacatggaatggaccgtccctaagtgccacacactatcacctttgattactgcatgtgctgtcgcggcatttcccgcgagccataggatacgcctacatctaggacgacatactgaacacaatgagaagtagctaaccaacttctacgagacacataatcgactgccttaatgtctgtagctacgccacccacggtactcaaggaacctaactgagcatgagacatatattgcgcacaacggcgacactgccaatgctgcatgtctatgatcagtctactcatgtctaaaccattcggaccccctataggttctaacgcaagagcact

SEQ ID NO: 76917 - DNA, 321 bp, Glycine max
  unsure (1)..(321): unsure at all n locations
  Clone ID: PAT_MRT3847_40470C.1
ataggataactacgagaagcccccagcggacaagccggccatgagaaaccaccaggccagcagcccccagnggagaagccnccggggaacaaaccnccaggcgaaaaccccccaacacanaagccagcagcagagaagccaccagcgagcaagcccccagcggagaaacccccagcggacaagcccccagccgaaaaaccaccagngcgcaagcccgcaggcgagaaaccaccagcgaacaagccccgagaagaaaaaccccgagggggcaagccgggagncgagaaacgcccagcggacaagcccccgggagaaaaacca

SEQ ID NO: 76918 - DNA, 402 bp, Glycine max
  unsure (1)..(402): unsure at all n locations
  Clone ID: PAT_MRT3847_40471C.1
ggaatcccttttttttttttttttttttttttttttttttaaaaaatttgaaattttttttttttttggatctttaagaaataaaaaaattaacttggaaattacatcactgacgcgaggctctaactaaaagaacaaattacaaccccctcaaaagggggggttaagaaccgaaaaaagatngaaaggaaaaaaannccagctggggggggggggggggagcacaaaaatttaaacttgaaccaaacccctccaatctaacataaaaagccaataaaacaataatttgttggattggagaacccgaaccctcaaacaacccaccaacttaacccggggacgcggggagggacccggaaattccagaccgggcccggggggcggaccaacttaccctaaaac

SEQ ID NO: 76919 - DNA, 460 bp, Glycine max
  Clone ID: PAT_MRT3847_40472C.1
gatcttcaatcctctaatccaaccctacttccactttccccaacccaattcgcacccaatcttcccccaatttcacttttgtcatcaaggtcctcgccttcaaccgcctcgccgcgctctcccggtgcctccgctccctcgccgccgcccactacctcgccgaccgcgtccacctccatctccacattgaccatttcgcccccgataacgccttccacgttgaaccccaagctccgcgaagcgcatcagatcctggagttcgtcgatgggttcgattggaagtttggggaaaaggttgtgcattacagaacgggcaatgtgggcctgcaggcccagtggttggaggcctggtggcccagttccgatcacgagttcgctttcgtcgtggaggatgacttgaggtttcgccgctttactacgagttcgttaaggctttgattatgaatatctattacaatgc

SEQ ID NO: 76920 - DNA, 464 bp, Glycine max
  Clone ID: PAT_MRT3847_40473C.1
tccgggacacttaattagttctttccgtttcccagtctcatatcatgttccgggttgtctacaatggccgtgtcagccaccgtagtagcccattcctccgccgcaaaacaaatatttcacacttcaagaacaagaggcactaagctgagccaccacaacaacattgcttccactacgtaccgatattcctgaggcttctagggtttctttcatgcataatagagtgagaatgattaatgtatatctgctttgatcattagtttccctcagctcttttaattttcaaatcaaatcatgtaatgtaaaatcgttattaacgttcttgtgttgtggtgacgacgtgaatcaaacgaaatggttaattgtgattttgtgggatgtgcatgcgtgttgttgtcttccttgtgcagtttcatatgatatttcaataaattgtggcttgctttctcattgagagcgtgact

SEQ ID NO: 76921 - DNA, 302 bp, Glycine max
  unsure (1)..(302): unsure at all n locations
  Clone ID: PAT_MRT3847_40474C.1
ccgggncgacccagcgnccgcgccttttagcccacaggaagacgagggcgaggcgggagatcgacacaccgacgccagggggccctgcgccacaccgccctcacgaaccgcagcgccgaagccgcaccaaccgcccccagcgccccccgcccgcgaagggagccccacgccggacgaggcacacgagccccgcgangcgcccgcgcgcgaagccgcggcgccaaccaagccccngccggagcccgacccacgcgaagcgccgccggaggcgacaacaaacccggacgccaggccaacgacgg

SEQ ID NO: 76922 - DNA, 1019 bp, Glycine max
  Clone ID: PAT_MRT3847_40475C.1
cgacccacgacgtcacagcaagagggaaaataagcctggaaacgatggaagatgatgacccgcagcgattgaggtgaggaaccatgtttccccagaaccagagccagagtcggaggaggattccagttgttgttgcccaatctgcttgggaccattccttcaactttcctacctcgacaaatgttttcataagttttgcttcaattgcattttacgctggaccaaggtggttgctggcaagcaccgttctccaccttcttctgtaaaatgccccctctgtaagttttatcttatcaagagcgcacagatatagattacaatgctattacactgaacaaggtttcttagatgacatattcaatatatcgcaatattggagatctctaaagtacaatcagccaaactgttggcttgaaaattggttaagaagagaaattcaagctcttatccaggaggaggatgttgacatcattttgcaccatatccttgctgtggtcaaagcagcattatggactaggagagagcagaagtcacacatgaatgcacctgaaaagaaacaggaggagttcaagatgtcagtctctgaagccgcaaggccttttctggcagcaagaacggacagatttgtatatgagattcaactatttcttgcttcgggaatgaatattgaagcttatgatgctgcttacatacaacggttaggttggagctcacctggggtaaacactgaggtttctcatagtgaattggttgatcgctcaactgtgattccatacatgcacctatttgatggtgactttgatgaaaatgagtagattctttgttctgtttttctcatgtatttgctgtaattgctacccgaatgaattgtataggagaaatttgctcacacaccaatgagtgctattgattctttccagctactgcagaagttgcaaattctccacccaagggtgtaaagttgtttaacatatgtttgttatcaatatcatattatattggttaaataaaaaaataaa

SEQ ID NO: 76923 - DNA, 682 bp, Glycine max
  Clone ID: PAT_MRT3847_40476C.1
ggcaccaggacatcctctgttattcgtagtgaattgagttttgttggagggagggatctgcatctcctcccagtcccatccattaagaggagggaatgcacacagccaaattgttcagtaatgaaacatgtgaatactcttctcaagtgatcaacgaaggtgggagtgagtgctatccaaatgtacgagaaacttgaaacaggagctgtgccgcttgaatcaaaatccattccatatatggtaacaaagaaccaaagttgacagagaccttggtgaatctattaccagccatcataaaaactctttaaatgcactaacttgtgtattgctatctgttgcctttcaagttcagcgaaatccattccgtcattttacaaagagcccaattaatagaaatatgttgcttatcatattagccatttaattaaaccaagtacacctgaacaaccgatcacagccagatgaaaataatcgtacagacatcgtataagcaactcaagtaagtcggctacccaattcctgatatttatttgtaatattttaacttgtaaactagtatcacgtcattatttcattttagtctacaaggaattaatgttgtcaacttatcataactaagatgcttatttactagactttttttcagttttaattgatgctgtaaataattgcaagttagcac

SEQ ID NO: 76924 - DNA, 570 bp, Glycine max
  Clone ID: PAT_MRT3847_40477C.1
ttgacagtcattacttcaagaacttgctcagtggaatgggccttttcagttctgaccagattccaattttcagggatgaagctaattcaactactaaacctttagtccagagctatagcatcgatagtggactcttctttggggactttgccaactctatgatcaagatggggaatatcaatattaagactgggactaatggagagattaggaagaactgcagagtgataaattcttagtaatatgaaattggctttggaagacattaaataagcagaatattggacatcttccagttatattaggtaattgagatggtggttgttatgttatgtttctcgaaatggaatttgtaggttgaatgtgcttttcaggtcccacattgtggatgtgagaacctaacccagcaaaagacaaaatataaataggatagtctgaggtatttcccttgttgttgttctacggggaccagcttattctattcagattattgtaataaatatatattaaaatggataataacataagtcactaagatacctttaaatagcttaatcaccatatatgtag

SEQ ID NO: 76925 - DNA, 193 bp, Glycine max
  unsure (1)..(193): unsure at all n locations
  Clone ID: PAT_MRT3847_40478C.1
cccgcccacgcgagcgcccacgcggggggaattcaggaaccagcgccgaagaggcccacaacaagcnaaaaggcgaacccgagaaaagcgaccccacagngaagggcaccgaaagccccaaggacgagaaaccgccccggcgcaaaaanggggacaaacccaagacgcgccgcgacaccacgccccccaagga

SEQ ID NO: 76926 - DNA, 372 bp, Glycine max
  Clone ID: PAT_MRT3847_40479C.1
atcatatgcatacattaagccttcgctttactgaaaagcaagggaaatgatcgccagatgatatctcactaatgggtcctggacccacgtaagaagtatccaggatcatataagttgaagttagatcgatgttcgctatgaaggaatccacaaggacagggtaatattataactgctggggaagctcggtaaaaatctgaatcagacgttcaaaacaaccggactggacactattgattgcgatagagctagaaccgtctgtgaagtaagctctgtacacggtgccatagcattgcaatccaaccacaaagagtgctacaaagttgatgaaaagcatgtcagatttcccccatagaaaacttactcataaaa

SEQ ID NO: 76927 - DNA, 192 bp, Glycine max
  Clone ID: PAT_MRT3847_4047C.1
gcaggccccttctccatccttcttattgctttcaccactctcttctcttctgggcttcgatgcaacacgtaagtggcaggcccaaccccaataccgtcccaacaaaagtgccttctaccttgatgttggtcatttgcatttaggaattaactattggaccggcttcaattggcccttctttgtttaggtatt

SEQ ID NO: 76928 - DNA, 244 bp, Glycine max
  Clone ID: PAT_MRT3847_40480C.1
tgcgagaagacgacagaaggggatggacagtgtgagagtatcaaatgaacttggagctggtgatttcaaggctgcaaagttttcagtgtgggtggtttccatcacatcagtgtccataggtgttgttgtcatgatcggagtgctattaacaaaggattactttccctacttgtttaccaccagtgttccagttgccaatgaaacaactaggctttctgctttgctagctgtcacagtgcttcta

SEQ ID NO: 76929 - DNA, 262 bp, Glycine max
  Clone ID: PAT_MRT3847_40481C.1
ctcccttcaagatgcagatcttcgtcaagaccctcaccggcaagaacatcgaccttgaggtggaaagctctggcaccaacgacaacgtcaagggcaaggatccaggcaagggagggaatccccccggaacaagcaacgtctgcattttcggccgagaaagcaacttggagggacggaggtacccttgctggactacaacattcagaaggcgagtactcttcacatcgtcctccgtctccgtggtggcatgcagatctccgtt

SEQ ID NO: 76930 - DNA, 1360 bp, Glycine max
  Clone ID: PAT_MRT3847_40482C.1
ggcgaaatcgtcgtgtgggatagaaaaggcaaaaaaaagagagagagagagagaaataaacaatttttttttccagaaaagggaatccaaaaatgcatttcaagaccgttttttcgtcgttgagatttgatcctatcccttcactcccttgttcttggatctttgtatcttcttgcaatcccaatctttccctaaaacactttttattttataaaaaaattcgccattgattcttgaagcgcttcgaattctgttggagcaaaaagatccttttttgagcctccccaacgataatttgcatcaaatccaattctgggtcggtttcaatttctccaaaagattcattcactttgttgcattgtttgtgcccgaggttttaaggttcgatgaagcggcaatgaggtgtgtggctgagaaatggaggttagatcagagggtatacaagtgaggtgtgataaacttcagagttctgtgattcctaggacacgtttgagggtttggttcattcgtgtgtgctcaagcattgtggtgtggacgtgtctagttcagttaatgacagtgagtgaactatggcattcacatttaatttcgggaattactaatggtatatatcacatagcccaagttcagcttccaatacaaggggacaatggggttgctcaatcgcctcctgttgttcttcctccaagaaattatacaagtaatggttttcttagagtttcctgcaatgggggcttgaatcaaatgcgtgctgcgatttgtgatatggtaacagttgctcggtttttgaatctcacattggttgttccagagcttgataagacatcattctgggcagaccctagcaattttgaggacatttttgatgtgaagcatttcattgattctttaagagatgaagttcggatagtgaaaagagtgcccaaaaagttcagtagcaaacatggattctctaccttggagatgcctcctgttagctggtcaaatgaaaaatattacttggagcagattttacccctttttgaaaaacataaagtgtaacaccttaacaaaactgatacccgtctagcaaacaatggtcttccacttgatttacagaaactcaggtgtcgtgtcaattaccaggcacttaaattcactcctcaaattgagaatttggggcacaaattgattcagatgcttcatgagaagggatcttttgtggcattgcatctgagatatgagatggacatgttggctttctcaggttgtacttgcggttgcactgataaagaagctgaagagctcaagcagctgagatatgctttcccttggtggagagaaaaggagatagtttctgatgagaagagatcacagggtc

SEQ ID NO: 76931 - DNA, 406 bp, Glycine max
  Clone ID: PAT_MRT3847_40483C.1
ggagaccggggatttacgaatctattatgacccatgaaagggatttagggcaggaaagcaggttttttaaaggaaaaaatttttttttaatgggtattattagtaaacaaattaaggattaaaaaaaaaaaataaatttttttattttacagggacgggggaaaaaaattttatcaaagttctaaatggggaattttcaaattaaaaatgccgaggatgctatattttctaaagtatccttggactaccaagacccactaaggggaaaaatatatgaggcattctacgggcccctgtcctatttttataaattggattggctgggttaaaaaaacctagggggatagatatcaaaaggagacgagccacaaccagggtggacccttcattctattttattaaagac

SEQ ID NO: 76932 - DNA, 365 bp, Glycine max
  Clone ID: PAT_MRT3847_40484C.1
ggaggcacaggctgcaaaagattttttactgtttttataaaatgccaaacgcaaccctttgtttgtttttcaaccacaaatgcataaaaatccttacactatttttgaatatccaccaaattatcccaattaccctcttactgtgtctccaaaacattatttattcaattctaaacatccatatattaaacatattcattgttaaaattttaacaacactgtacttttaaattgtaatactttttccaatttccaactataaatatcaacttacccaagtatttttattaatttatttttgtaaaaaatttaatattaaatttctttgccccctttaactgatttaacataaatattttacactt

SEQ ID NO: 76933 - DNA, 549 bp, Glycine max
  Clone ID: PAT_MRT3847_40485C.1
attcggctcgaggggaggtactacaaacttctattctaatctcgcagttttagcaattatcacttggcaaatcttgcttgtctgtgtaccaatggtttacattacaatacgcttgcagaggtactatttttccactgcaaaagaagtgatgcgcatgaatggcacaacaaaatccatcgtagctaatcatgtagctgaaactactgctggagttgtgacaataagagcctttgaagaagaagatcgtttctttgagaagaatcttgatctaattgacatcaatgctagtcctttcttccatagttttgcctcaaatgagtggctgatccaaagattagaaataattagtgcaatacttctttcttccacagcactatgcatggttatgcttccacccgggactttcagctctggattcattggcatggctctctcttatggtctttcactaaatgctcagctagtattttcaattcaaagtcaatgcaatcttgcaaattacataatctctgtagagaggctaaatcaatatatgcatataccaagtga

SEQ ID NO: 76934 - DNA, 538 bp, Glycine max
  Clone ID: PAT_MRT3847_40486C.1
caacatctgtaaattcttcaatgatgatggtgagaaagaacaatttcactgtgatgattgagggatctgcacggttggtggtctagataatcttttccactgcacgaagagtggatcttggtatgcaatagggctgcgtgatcatcatttatgtgtgcagatctacatgctgcatcagctgaccatttgtgagattgcctatttgattcattgaaagacaccatctgctatgaaatgtggacacatcctgctccatgaatgttgcgtatagattattgggaatgacatatattaggtggccataggctccaagagagagactgacatgtgtaatacgtggaaaagagttactgtatacatcagatgctcgtgttagcctgactatcatcgaaacatgactggtacgatactatatggtggacgcgttgacactacatgtatttactgccacatgctgtctcgggagagtatgacgctgcggagaatatgtagtcgggcacgtgcccgtggggatcgggcggcgtgatgtgcggtgcgt

SEQ ID NO: 76935 - DNA, 393 bp, Glycine max
  Clone ID: PAT_MRT3847_40487C.1
ccacgcgttcgttgggtgcaaaaagacgcttaaggggtgccaaagagaaagagatagagaaaaaatgatgagtgttaatgtggtgtttgtataattgggatatccaaatataactattatgatattaaatagcatagttgattgtaatgaacaatgttttacatctacaattaatgaaccaaatcaatcctatacaattgtttagagtttaacaaattcttaagaagtaccccacacctccccaacaaatttaaaacattacggtgaaaggttggaataaataaaggaaccttgttccctcagtaacgggcaaagaaagaagttgtacatgtaggttaatgatgtatcatatgtactaaacactggcatataaaatgttcatgggatggagag

SEQ ID NO: 76936 - DNA, 711 bp, Glycine max
  Clone ID: PAT_MRT3847_40488C.1
gaactgaacaagatttagtttagtcaatttttcacacatttgtgcagttataagatcgacttggtggttaaagggagaacgggggaggaagaggccatggttccaatcatctcactaacaaaaactaacaaactaacaagcatttgcccataaaaaaataattcacacattcaagcaattagtacatttgtaacggttgaatgaagatcaaacgactcagattttgaatgctgttgttttaaatctgatttactcagtgtagtggatttttcacacattcccacaattagaatattagtaccagccagttagatgaaaatcggacaactccgatttcgaatgtttattttaagtctgatttactaagatacaaatatgagtcatctaattttttatcctatggttcaagttactaaatgtgtgaatatgtagaaaaatgaacaaagggaatccaaattcagatatgaacacccttttactttggataaagcaaacgacaaaaaaaagtaacttttaagcttaaacccatactggaactttaaattaaatataataaggtaaaatgaagaaaccaaatacaaaaaagttatacttttactaataatataaaagtttaattatatgaaaaatgaacaaaggcttagaaaatttgcaagtggtattaaacaaagaccaaaaattaacataccttgttgctgaaggggactaggt

SEQ ID NO: 76937 - DNA, 442 bp, Glycine max
  Clone ID: PAT_MRT3847_40489C.1
aaacagcatcagcttccgcctcacatgtggtggaggacttccatgatgatgaacaacacatatttagctgtttcagaatatgcacataccaaagccagacatcacgagactgcctttgttcacgagactgtctttgctcagaatggccatgttgctgtgaatttatcattcgagccaactctattgataggtgagattgaagcatgcatgacaccataccatattttatcattcctccgaggccaaaggatccaaagaagcccaatttttttggtttcatcatacttattttaaacttttttatttatactcaactaatcatcttttattggattattcattttagaacaaagtagtatctcccaagatttttaaaaccgaactgatcattaaagtgataaaagcactgattcaagattcaatatatggtacaaccgtttgg

SEQ ID NO: 76938 - DNA, 467 bp, Glycine max
  unsure (1)..(467): unsure at all n locations
  Clone ID: PAT_MRT3847_4048C.1
gaaggtttcccgtcatcactgtatgacgtcctccttctttggggggggggggggggggggggggggggttagagaatacagggatatgaagtagaataatagagcggtaattaagggagcagagaagtagtgaaagagagaccggggcaggttaaacggggtaataagtacatagggtatggtggcgaaagtaacacggtttcaacacgaggtttgagttagtatgtccgtaagagcgttaagacgggaaactaaaggttgagataataaagtccgatggaatagagtgcgttaataggggtatgccgttccagaagtggcataatggcgttatttggtaagttagaagagtgcgtaataccagtgcgcgattgcaagttgacggaatgcacngggttggcatccgcgagtgtgtacataaccggggtggtgctctcgtacgcacaattgcagcgggcccaaatact

SEQ ID NO: 76939 - DNA, 518 bp, Glycine max
  Clone ID: PAT_MRT3847_40490C.1
tactcgagccgattcggctcgagcaaacttccacggttatggctatggataacgtggggagtttagacgcggccattgagcaattcctgaatgcggagaagcatgcgatgctcgccggctacgtcgccgccaccagaaacgccgtcaccgaaattttacggttgtgcttcgaagcgcgtgcctggaaaactctcaatgaccagattggtctcttgttcaaacgacgtggccagcttaagcaggctgtgacagcgatggtccaacaggctatgcaatatactgatgagacaccggatcttgaaactcgtatagaactcatcaaaaccttgaacagtgtatctgcaggaaagatatacgtcgagattgagagagctcggttgatcaagaaacttgcaaaaattagggaagaacaaggacttatagctgaagctgctgattggatgcaggaaattgcggtggaaacgtttggcgccatggctaagactgagaaaatcgcattcattcttgaacaagttcgt

SEQ ID NO: 76940 - DNA, 1698 bp, Glycine max
  Clone ID: PAT_MRT3847_40491C.1
ctgcacgcaaagtagcaaacttccctggttatggctatggagaacgccgggaatttagaagcggccatagaacaattgctgaatgcggagaagcaagcgaggctcgccggcgacgtcgccgccaccagaaacgccgtcactgaaattttacggatgtgcttcgaagcgcgtgcctggaaaaccctcaatgaccagattgttctcttgtccaaacgccgtggccagcttaagcaggctgtgacagcaatggtccagcaggctatgcaatatattgatgagacaccagatcttgaaactcgtatagaactcatcaaaatcttgaacagtgtatctgcaggaaagatatacgttgagattgagagagctcggttgatcaagaaacttgcaaaaatcaaggaagaacaaggacttatagctgaagctgctgatttgatgcaagaaattgcggtggaaacttttggtgccatggctaaaactgagaaaatcgcattcattcttgaacaagttcgtttgtgtctagaccgccaggattatgttcgtgcacaaatactctcaagaaagattagtacgagagtgtttgatgctgatgtttcaaaggaaaagaaaaagcctaaagaaggtgataatgttgttgaagaagctcctgttgatataccatctctaccggagttgaagcgaatctactatgaactaatgattcggtattattcccataaaaatgattatcttgaaatttgccgatgctacaaggcaatatatgagattccatctgtcaaagaaaatcctgccgagtggattccaatcctgaggaaaatatgttggtatttggttctatcaccgcatgatccaatgcagtcaagccttctcaattctaccttggaggataagaatctgtctgagattccaaactttaagttactgttgaaacagttggtcactatggaggttatccagtggacaactctttgggattcatacaaggatgaatttgagaatgagagtaacttaggaaagaatttgggtgaaaaagcagctgaagatctgagggaaagagtaattgaacataatattattgttatatcaaaatactatggaaagattactttgaagagacttgcggagcttttgtgtctcagtgttcagaaagctgagaagcatctttcagatatggttgtgtctaaggcattggtggcgaagattgatagacccatgggaatagtttgtttccaaagagctaaggatagcaatgacgttcttaactcatgggcagcaaacttggagaggctgcttgatcttgtggagaagagctgccatcaaatacacaaggaaaccatggtgcataaagctgccttgaaggtttaagaagctccatatcactgttaaaagttacaggtgaaccccaatatagatgtgattttggactgaaggtgccgtaaaaggatgttaatttgaattattgctgattagattggtgaggtattggattaaaagacgatgctttctttttccattttagatactgtcaatgatgcaattagggtagagatggtatatgctttttagcgttgtatactaatggtgaataccttacctgttaccaccgacttatgacaggatcctaaacggtcttgtttgtagctcagtgggaagaaatcgagtgctctgatattcttttgtctgttttattttcccgtattt

SEQ ID NO: 76941 - DNA, 436 bp, Glycine max
  Clone ID: PAT_MRT3847_40492C.1
aaagcgggggttaactaattaattaattaaagaaacaaaaacgaattttccatgactttgccgcaaaacaaagaaaccttcacccctttcaattttttttttttttttttcaactttggggtttaaaaaaaaaaccccttttaatataaaccccggaacttaaaaaaaaaaaaaaccttgaagggaagccttcccttgggaaccttaaaaaaaccccaaaagggggccccggttgatccggtttcccaccccttttttttcgtgaacccgaaaacaacccctttttgatttggggggaaaaacccaaccaacatgagcccccccatgatcccgaggggaaaaaaaaaaaaaactattggcggggggggaagcggggggagctttagggggaaaaccccctttaaccccgggagccccgccaaaaccaaaacggaac

SEQ ID NO: 76942 - DNA, 533 bp, Glycine max
  Clone ID: PAT_MRT3847_40493C.1
tcttactataaggattttatagtgttcactaatcaatttagtggtccatcacacttatgtactctctgtagtatgaaggaaatactcaaaaaaaacttgtttaggaaaatatagacatgaagaaaaacaaacttcaaatgaattaaacttttgtaaagtaaaattaacttataccattcgtttttcgccagtctattggggcaaactgtatgtagcgttgtagcgagaccaagtggtagaaatatagaagctgcacctcctctttatgatcaatcaatcatgatagatagagacataaacatcatcttgagctatataccatcaatctgcatttgcaatgtgtggtgctgctctaattaattttcccgaatatgagagaccattgttgttgatagctggttggtgccccacgaacaaagccacatgacccataagcttgtcttttctagaaaacgaggtgccacacgagcacagccacttgagatccccacagtgcttctcatgtgtcctcagatcagagagcaccgagaact

SEQ ID NO: 76943 - DNA, 433 bp, Glycine max
  Clone ID: PAT_MRT3847_40494C.1
aacctcttgggctgatttatgtgcttgcatggtcgtgagaagatgatagaaggggttaaattacagagttgaatttggttcccagggagaaagagaagaaaaaaaaaactttcctctcccccgccctttctctcctctctccttacggaaaaaacggtggtagtcctcagaaaattaagaagtgtagcaaccggactttccctcctaattttcaggcctcgtaatctctatctcatactactactcctcctccttctagtccctgtcctccttattcttagtcctattctctgtcttcttcttcctccctattgtctccgtctcttaatatgcgctaattctcatggccttattgtctttcttgcttggcctctttctgattgcctggctctcttgaattgtcttactctggcggtgttgtgaattggtgtcc

SEQ ID NO: 76944 - DNA, 957 bp, Glycine max
  Clone ID: PAT_MRT3847_40495C.1
gatttttctgatgaaaaccatgctggcgagggccctggaggagcagttgcaatggactgtgaaatggttggtggtggaagtgatggttctctggaactttgtgctagagtgtgtttggttgatgaagatgagagattaatcttccatacttatgtacagcctgaaatacctgttactaattacagatatgatataactggattgacagaagagcatcttagaaatgccatgccacttaaggaagttcgagaaaagctactgcaaattctacacaatggggaatccattggcaaagttagactggatggtggaaaagccaggcttcttgtggggcatgacttagcacacgatttagattgcttaaaaatgaattatcctgatcatatgctgagagacactgcaaagtatcgtcctttgatgaaaacaaatttggtcagccattcgctcaagtatctcacccgaacatatcttggttatgatatccaatccggcactcatgacccttatgaagattgtatttctgtcatgagactatacaagagaatacgatctcaacttcatccggaggaagaccatggaacaatgactctgagtaacaacattgttggcatgcctgatagctggatatctagggaacttgacaacctcacaccagatgaactttatgccatgtcaagatcagattataagtgttggtgcttggatttgataccaagattgtcagcctgaattattgatctttgcatttgtccataacatatcataagcatatttcttcaagaaccatgggaatggagcatttgcaatgatattctctgtgcatatctttctatgcatcgagttatcttccggacaagaaaattatgagaaaagataggggtgcttaatgatggagcttttgtaaatatttagaacgctttgttcaaatcacatgcccttgtttagaatgaaaagaaa

SEQ ID NO: 76945 - DNA, 261 bp, Glycine max
  Clone ID: PAT_MRT3847_40496C.1
ttgacgcggggggggctaacgtccttcttggggctatccaatgggtaccttactggctgagcactcacaactgcaccccaaggttacaagggaccacaccaaattgccttgggcaacctattggcgaagaatattcttggaggtatctccgcaggggggacacttgactggctggggttgataggtaaaggatggtgctatctcattaaggcctcattagagaaaacggggggaggataattccttgcccaacattgctaa

SEQ ID NO: 76946 - DNA, 292 bp, Glycine max
  unsure (1)..(292): unsure at all n locations
  Clone ID: PAT_MRT3847_40497C.1
gagaatggctcccaagggtttaacctttctggctgtgttaatatgcgtttcagcactgtcactgagtccttctgttgcgggggaagggcaaaataatggccttgttatgaacttctacaaggaatcatgccctctaggctgaagacantcatcagcagaacaagtgcaagctgtctctgacgaagcgtcgcacagagagacacttgctnnttctgcctggctgcaggggaacgatgcttccatgnagcgtgtgctgttcagnnagttgtgatgcttcagnctgttgctggac

SEQ ID NO: 76947 - DNA, 450 bp, Glycine max
  Clone ID: PAT_MRT3847_40498C.1
cggctcgagcggctcgagcggctcgagcggctcgagcggctgctaagacaacagaaggggggagagaaatggagagcaacgcccgctacggaagcatcgaccaagttagccgatctgcccctcgcgacgtacggacgatattatctctcaccaatctccgttcctattcgagccttctcttcctatcaagcttggcaagccgattcgtctcatttcgcaaaattgtctggacgccgcttatgctctcaggccttctggcactgtgtcttatgattgctacccgtgagacgatcgaattagctgatatagaacgggacaacctgggatttgggcttcagcccacggattatctgtctgccatgaaatgcacacgaggtggaacctgcttcaaggcgaactgcagcgtgctggtgacattgcagtgaacccctcacaggagatctaaactat

SEQ ID NO: 76948 - DNA, 446 bp, Glycine max
  Clone ID: PAT_MRT3847_40499C.1
tcccggaacagaggctagaccactacgtcatcaaaattgaagatttaatttcatatcatgaatcagttatgctaaaagcttaagctattgggcaaaagcacattgatggttttatatctaacaatgtgtaatataattcaatcattgaactttcatgtatccatatcgaatttattgaaattgggatggatttgcaaattattgcttaattaaactttttttaaagaaaaataaaattttattcagggttggattgggggtttgcatcttgtctgtaaaacctgaaacttccagtgctgaaatgttactcaagcaaaggtttggatggcctatagctcatagtttagatttgaacatgcatgctgactttttgcttttgtatatttttctgtgaaggatgaattatgtcctaaggtttatgtcatccccccccccccacccccccc

SEQ ID NO: 76949 - DNA, 184 bp, Glycine max
  Clone ID: PAT_MRT3847_4049C.1
cctcgtgccgaattcggcacgaggatttcaaaggtgataaacctggtggcatgatattatgatgactatgttgatcttcttaaaatttttttgtcaaacaaagtttataagacgctatacaaatttattattgataaaaactcatgagcattttttcaaaataatttcattacttaactaaaaa

SEQ ID NO: 76950 - DNA, 278 bp, Glycine max
  Clone ID: PAT_MRT3847_404C.1
gacaactaagagagaatcgtcctgctcacatcaacacaatgcatctctgcgcaaccatgttgatcagaaacaacattactctgcacgacaagatcaggcacaccatcaagctttcaaaggacaggatgcagaagacagagcgaatacctcctgaccaggacacattgatttttaccagaaagcagatggcagatggtcttactcgtgcagtttacaacatgctctcagcatcaacacttcatctgatcttgctgctaacgttaagaaacatgagtaac

SEQ ID NO: 76951 - DNA, 247 bp, Glycine max
  Clone ID: PAT_MRT3847_40500C.1
taccaggtttgaaagagaagatggcactggaggaaatgttgatacgatgccaactgaagatccttctaatggccttactcaaccaagcttgcaaattgaagatacagaccaaggcaatatgcatgagttaagtgaggtacatactgagcaatctcagcggggtgatataattaatgatgaaagcgatatagttgatgatgtagatttgattgaatctattgctctggaaggggagcaacaggaagaa

SEQ ID NO: 76952 - DNA, 323 bp, Glycine max
  Clone ID: PAT_MRT3847_40501C.1
cccatataaagcatgctgattattcaatgcagtaaagcaaatgagacaggttttcatacaggaactgattattattacatgaaaataacctccttattaagatgctgagtgcgctatggatgatgacggtaccacataatcaatcaccatcacactctcgagaggctccttgaccttctcattcttatgatagacccataacttcttaactgtctctatgtctatgactgcatgaacagcgtggaggccagcaacgggcaccgctgaagctctagcgggagagaaatatcccccgcaagtgaactgaatggcctgtttgaact

SEQ ID NO: 76953 - DNA, 322 bp, Glycine max
  Clone ID: PAT_MRT3847_40502C.1
tgatcaacacaaggatatgcaacttaatgtggataacatgtcctatgaagagctattggctctggaagaacacattagaaatgtaagcactggattaaataaagagatggtatcgaggcttttaaaaaaggaagagtattcggcttaaccagattctcatcatagaacacaaccatactgggtttatcagaaggagtataaatataaaaataattgaggatcactaaattataaacataattaccatatacattatattaaacaataacttatacataataatgttggtgcgatttataagacaacaaacttaactacctca

SEQ ID NO: 76954 - DNA, 433 bp, Glycine max
  Clone ID: PAT_MRT3847_40503C.1
aatggaattgggtaaatgttttattaagatggacgaaaaatagctaatgtatgatagtatcatgtctaaagaagttgatatgaatgttgaaaatgaggaaggtgctggcatgaaagtaaaacacgtcgattgctctgatgcctttaatacttctcaggtatttgtctaatttgttgttggtacaacaattatattacatagatgtttattgatgttaaaacttttttgaattgggttatagttgtttgctacccgcgatgaagttttacattgggctcgattgggggcttgtgacattggatttgttgccggggtaataaggtcaaacactaatactggtgttcgaggaagggcctcatttttgttgatagcttgcaaaaggagtgggtgagtataggggaatgtgaacctgagtaggagccgaatcgttcga

SEQ ID NO: 76955 - DNA, 354 bp, Glycine max
  Clone ID: PAT_MRT3847_40504C.1
ggctcgagacttggtgcactcgaatggcgacatccttgtcgaacatgtccttgacgggaatcacaggtcgtactctcagtagacccttacatggggtgtcttattgcacaagagactcgactactgcgtcagatgattctgacacgcatgatgactgcaagccaactcatagccatgagaattctggcatttctatgccaaatgctattgagcaggatgtccaggataatgctgttatggtttacatgaaaggtgtgcctgattttgcacactgtggattgagctcgcttgctgtaagagttgtaaaacactatgatgggactatcagtgctcgaaacattttgcatgatcctg

SEQ ID NO: 76956 - DNA, 303 bp, Glycine max
  Clone ID: PAT_MRT3847_40505C.1
gatcctccaaatagcatagccccattgttgcgggacggtccctgtcctttccgccgtcgctgcagtgaccggcgcggctgagcccctcccgtgcagccttctgctccctcctcgtcagtgaccgacccccgctccccgtattcgggtacggctgcctctggttctgctactccttcggttattggtgttgccactgctgcggcgtttgctcgctcccgctgtcccttcgggcttccgagcggcccttttggaactagttgtttctacaagcatgcatatcgagatggccgtctggagcaggta

SEQ ID NO: 76957 - DNA, 921 bp, Glycine max
  Clone ID: PAT_MRT3847_40506C.1
gagctcactacggagcttaagactgcacttgtttttgaagctgacgatcaatctgctatggtttatgagttggcatatgggaaggagcactacggcttgcatggttatcgggggattttggtggatcgttatgaggagatgattgagaattatcacccggggcttggggatcataggtggcctctggtgacccattttgtagggtgcaaaccttgtgggaagtttggggattaccctgtggagaggtgcttgaagcagatggatagggcctataactttggtgataaccagattttgcagatgtatgggttcactcataagtcccttgctagccgcaaggtgaagagggtgaggaatgatactagcaaccctcttgaggttaaggatgagcttggattgcttcaccctgctttcaaagctatcaagctcccttcgtcttgataagatcgaggaggttttagattacggaaaattacggacaaatgcggctgatgcagctgcaactatggtggtgttgtggttgtggtgactccagaaaccttgatgttgcagccaaaattgcggtcagcttcgtttttttaaaaccttggtgatgtcggtgtgggctacttttcctaattcacactactactgctacttgatattcattcatatgctgccactattctactatcattgctttgcagttgcgtaagacgatgatgatgatagtgttaaaaattgtaatctttaatttattttgcttttttaagttatagtgatttttttgaaaagaacaaaagctcttcttctctactgtgccttttctaaccctggactctgttggctcattttgtggataaattgattgataaggaattgtataagttcctttctatatttttggatgaaaaaaaaaaaaaaaaaaaacttgagactagt

SEQ ID NO: 76958 - DNA, 514 bp, Glycine max
  Clone ID: PAT_MRT3847_40507C.1
cgcattttttttttttttttataacctcatcagtcacgaatatatgaatcacacagcttaatcacaaaataacagtaagccagtaaacatccccagaactagtaaaattaaacaaaaaagaaaaagaaaaagtcctagttgtgcttcaaatttcacagatgattataccctgcaaatagtaaaaccctaaacttaaaccataaacacacctttcattgcacccagagtcccaaaccagaaaaagtaaaaaagaaaaaaaaaaaaagatgcgtttcatttgagaccatttcccggtgttgaaatcgcaagcccaggccaagcgaagcaatctgcggtaacgaacccttcttcgccactctttaactgacacgtgtttaggccagaagacgcgacggtgccgacaatgttggcaccggcgcaccatttctgggaagggccgccaatgttgtcattgtccacaactcctgggaatgcccagcccgacctcccaatagcaaagcccacggacgaatgg

SEQ ID NO: 76959 - DNA, 1796 bp, Glycine max
  Clone ID: PAT_MRT3847_40508C.1
agaaacgcatacgcgcaatttctgttgttcagagctcttcaggaagaaaagaaaaacagagaaaaccaaaccctaattagaaacgatttcggaatccctaattcgcaaatcgcaaccctagttgtgctgtgcgttgttgtagtggtttttggaagaggaggcttgagctaaacgctgcgtttcgacgacgatgatcgtgagccagaacatggtgacggaggcggaaattatttgcaagcagaacattccgatgttggacgtgaagaagtaccaccttcgcgtggcgcaagagctcggcgttaacgttaaggtcgtcgaggtttctcccacctctaacggcgttcccgtcttcggccacgtacgggtttcttctgaatcggtttccaccgaaacgactcgttttgaatcggttatgggttgctctgagatgattgaagaatccattatagagactcctgctactgaatttacaccgaatgttcgatctggttgctgtgctgatattggaccgagggggtctatggatgatgagcatattcagatagatgatctagcagcccaccttggatttgtgttcaaacaccctatgccgagtgcattctatgcagtttttgatgggcatggagggcctgatgcagccgcctttgtgaagaacaatgctatgagattattatttgaggatgctgatatgctgcaatcttatgatgctgatgcactttttctgaagaagttggaagattctcatcggagggcatttttgggcgcagaccttgccttggctgatgagcaaagtgttagtagttcctgtggaacaacggcgttgaccgcgcttgtacttggaaggcatttgatggttgctaatgctggtgactgtcgagctgttctttgtaggcgaggagttgccgttgatatgtcccaagatcacaggccaagttatttaccagaacgaaggagagtggaggagttaggtggtttcattgatgatgggtatctcaatggttatctttctgtgactcgtgcccttggagattgggacttgaaatttccactaggttctgcgtcacctcttattgctgagccggatgttcaggtggtcacattgacagaggacgacgagttcctgatcattgggtgtgatggtatttgggatgtaatttcaagccaggatgcagttagttttgtgcggcgtggattaagaaggcatgacgatcctcaacaatgtgccagagagcttgttaaggaagcattgcgcctacacacatcagataatcttactgtgattgttatctgcttgtcccctgtccaaagcattgtcgaatcatgtccaccccagaggcgaagattcagagcttgttctttgtctgaagaggccaggaacagattaaggagcttgctagagggaaactgaatgtaaatacggttctcatgattcacagtcattcctttcatgaaaaagattgattcgtgtttgtaggctgttttagagttatagcaagcagccagcagttttgtacgggtagtagaggagtataattgttgggggtttagacctatttatttaattctggggtttaccttggtctaggtagagaaacatgtggctaggtaattttggcgggaacaatgtgggattcgatttcacatccgtaaataagagatgatttaggcttctcagcaatgctgtgggtgaatgcgaccaaaagactcattattttcttgattgttgcattcaatagcggttggtttgatgcgtggggtgggatagttgagtagagtgcacgtttcaacctatttct

SEQ ID NO: 76960 - DNA, 420 bp, Glycine max
  Clone ID: PAT_MRT3847_40509C.1
atcagagataggcaaattattagtaagagatgaagcaggttcttcatttgagttaggtggtaaggccttatgcttcagattgcggtgctgagggaatgttggcatcattttggggtctttggtcaagaaaagaagagtcgaatgatattcacttccggcagctttccctgagaggagccctgcagctgacaacaaagggaaggctttgccgactgcctttaaagtcagtcaaaggaatttggtacttcgattcatgcagagagatatagaagagggtgaaattgtcagtgataaagaagactgtgaaataagcagtagtgatgaggtaataacaatataaccctcgactgtgttttacctatatcctcttgtgtgctgcctttggggcttcattatctcaagttaaaattaagttacatt

SEQ ID NO: 76961 - DNA, 260 bp, Glycine max
  Clone ID: PAT_MRT3847_4050C.1
ctgacgcatagtccgtagtggatatatgattttctgcacctgaacgtgtgtacagggcactgactgaaacaaagcttcttattgtcaacaccatctctttgcctacgacatatacagagtcaatcatgtgaagacctgaggcacaacgctgaccaaaccaatggactgattctatacagggtgatcatagagagcgacaatgatgactgtgagattaagtatttatcgagcacttgaacacattgtattcttaaattata

SEQ ID NO: 76962 - DNA, 376 bp, Glycine max
  Clone ID: PAT_MRT3847_40510C.1
cgatttaaactatgtttacaagtttgttcaaccagcttaaccagaaatcaaacacgaatggatgcgccaaataaggtagcgagggcgatcccagcgtggggtaatcatggacatagctggatacggaaggttggaaagaggatcatccaattgttctgggggaaggaaccggagccatttagtgagaaggcgagagcgtctaatggggaataaatggcacgtgtggtgtctatcgcccacaggacgctttgtaggtgtggcacgacatataatacctttgtgtgagaaactaacaacccgactactgagggtactggtaaagtatgtatctgccgtaccaagaaaaaaattaatgtcaaaaagctttatgtgttac

SEQ ID NO: 76963 - DNA, 203 bp, Glycine max
  Clone ID: PAT_MRT3847_40511C.1
cccactcgtcgcatcacacatccagctaaatcaacaatcacttttctaattttaaacaccctcttcaatgatggcatctagagccttcaaacaggcccctgtcactcttaataaatcctcatctatagtccttccctccctctcaaggaactcctcttcattcatagttgtggccactactcacattaatatcaatactcaca

SEQ ID NO: 76964 - DNA, 342 bp, Glycine max
  Clone ID: PAT_MRT3847_40512C.1
attaatgtaaacggattttttgtggcagtggccaggacaacagggacactaatgcgatatctgttaaaattggtgcgggcaggtaattgtcggcggcaggctcaaaagggagaggggattaacgccgggaaaaacccatacttgggtcacgtgaacaaacggacgcaacctatctcccgtgcgaacaatgaaacgcatacgaagcgtcctggtggaaaggtacgacagaatgatcatcgatctccgtgccagatgcagcaacaaggacaggcacttaacgtatatctggaagaggacctacaggagggcacaaatgagcgatgcactcgtatccgcccgcta

SEQ ID NO: 76965 - DNA, 240 bp, Glycine max
  Clone ID: PAT_MRT3847_40513C.1
gagaaaaagggggggtggtttaaaaaatccttggggtccggccccttttaaaaaactcccacttttactttggggggacaacaactggggggaaattgaaggggttttttattccttgacctcgcgtgggcacggcttggccccccggggattaaaaagggagggagcccacccttcaaaaaaagaagggggggggggtaaaattcagtaaggggggccaagggttttttttccgggggg

SEQ ID NO: 76966 - DNA, 159 bp, Glycine max
  Clone ID: PAT_MRT3847_40514C.1
gccgtgccgtggcctgctcccgtacgtcagcattgagttcgggaccagctggatttgcctttccaatcacaacgggaagtgccggtcccttcaacgcactcattgtcacccaaactgttaatcccccagcccacccccgcattgtcaacgccaaggccg

SEQ ID NO: 76967 - DNA, 278 bp, Glycine max
  Clone ID: PAT_MRT3847_40515C.1
tcggtctcgcattataagcactacgagctccgatcgcgtcatataaagtctctcaactgaagccgcgttgatatctcatgcctgagacttctactgctcctcaaactcaggtcgaacaatttcttcatctataaaggattaacataaccgtgagagttgtgtttagggtctcatggattaataatgcactttccgacactaaactggctgcttactatgatcactcaattgggctagtcccttggttttctgccatcatgcaaataaggattagaatg

SEQ ID NO: 76968 - DNA, 136 bp, Glycine max
  unsure (1)..(136): unsure at all n locations
  Clone ID: PAT_MRT3847_40516C.1
ccangaacaagcagttctctnatgngctataacaccctantanagatncacangcgcagananttnaaatggcnctggaagctcttcaatcannccaganctgctcactccatcgtttagtgcnctttgaagngac

SEQ ID NO: 76969 - DNA, 418 bp, Glycine max
  Clone ID: PAT_MRT3847_40517C.1
ctccaacataatcttatatttaagcatccatcatgggcaatgataaaacatgtatatatagattaacatatccctaaaaatgctaaatcaaatacatatgaatcacaacaaattccattcactattgactaccacattgcttgtctctatattttccttccctcctttttggtagctccctttgataaaaatattcatataaatatgagttcggatttctatatcataacaacttctttaatcaacacatggggactgcaataggcacctttgcattgaggatatttggcttcctatcaatccagtgctagctagctgagactctgaaaactgtgcatataactgaattcacctgattcccaaatatgacggattcctaggcctctcgaatgtttgtcatgccatccctgattttgaa

SEQ ID NO: 76970 - DNA, 206 bp, Glycine max
  Clone ID: PAT_MRT3847_40518C.1
ctctctctatatagggaaaagcgtcctctatataagctcactttgagtgagggaaaaccttcaagagtgatatattaggcggcggtgcacattctgcatgatatgttcctcgcaaaggtggatgaggagggtcccattgagatggatgctccgattgagacctagaatagatcctcagtacaaggagggggaggctgagatggaga

SEQ ID NO: 76971 - DNA, 413 bp, Glycine max
  Clone ID: PAT_MRT3847_40519C.1
caaacacttgtatcatcttctagcttctaatttctaaccatgcaaatgcagctattcaccatcttcaaactccttatactaacactattatttcagctacaagtcactcccactctcacactctccccttgcaaaacctcatgtggcaacattcctataaattacccctttggcctagaagatggatgtggtgcaccccagttcagacacatgctaaactgcagcaccgacttgttctttcaaaccccttcaggttcttacaaagtccaatccatcgactatgacaaaaaaaccatggtaatctatgacccttcaatgtccacctgctccattctccaacctcaccacgacttcgaaatgacccaagttcaatccgccataatccccccatcacaggacacagttttcgtgct

SEQ ID NO: 76972 - DNA, 241 bp, Glycine max
  unsure (1)..(241): unsure at all n locations
  Clone ID: PAT_MRT3847_4051C.1
ggctgttctgcgtgttagcattgaaacaantacacttggnnnnanagtncnnagncattangacnngtgttntggaggaganggnnnctgcttgtgacaggntatnttgcgatgctggtgggttgangggaggagtnttnccttggattgacnangttgctttcacattggttcctcttcttanattttacttccatgaagaagttaggaaggnagcagtttcagccatnccggaactgtt

SEQ ID NO: 76973 - DNA, 280 bp, Glycine max
  Clone ID: PAT_MRT3847_40520C.1
gatcttcatcaagaccctcaccggcaagaccatcacccttgaggaggaaagctctgacaccatcgactacgtcaaggccaacatccaagacaaggaatgaatcctcccggaccagcaacgtcttattttggccggaaagcaacttgatgacggccgtacccttgctgactacgacattcagaatgagattactcttgacctagtgctccgtctctctggtggcctgcatatcttcgctaatacactcacaggttggaccatcactcctgtagtcgatagc

SEQ ID NO: 76974 - DNA, 414 bp, Glycine max
  Clone ID: PAT_MRT3847_40521C.1
ggctcgagacttcttaatggccacaacgactcacacagatacaccgttttgggagttacatggagccaatgtgggagagcctctgagggaaaggtggatgtatgctatgtggggcatacatgcttcacctcttgagacgtcgatcctctacgctcatacgatacttgagtctcttacagcataccccgcattgtgggacgaagacactgacagtgccatccaagggagatggatattcatggtatgcttgatcgagcctatactacagcttatgtacctcaatccttgcagacaggagctagggctttggatttttcttctgaaagaattggctgcttactgttgcggagccgccaatcacactctatgtgtcattaggcagcgagaggggtgtactgtttatctctgagggga

SEQ ID NO: 76975 - DNA, 369 bp, Glycine max
  Clone ID: PAT_MRT3847_40522C.1
acacccttccggtaaccataagttttaatgggctgggggggcaccaagtaatgtagccatggttccatttatgggtgaccaaaaccacgttgccccgttggggttattgccttgtgggttttgggggggacccaaagggaagggcttggtttttctttattgggccccccaaattaaaatccttagccccagttaagttggggggttttggcttaactggggttggaattcgatccttgggggtgtgttaaggggggtgccattaataacatggccattgtttgcggggcaaaaattgaatgcgattttgttttgtgggggtttaaatgggggggtggggccaagggttggtgaaaatggtttggggga

SEQ ID NO: 76976 - DNA, 2856 bp, Glycine max
  Clone ID: PAT_MRT3847_40523C.1
cccgtgacatttggatttaggaattaggacatggccacacccattctatataacgttccctcccttggccaccaccctcgctcacatttattatttccctctttgccccaaatgtcttcaaccttctcacccctcctcaatctcattgcagtcttcctcctcctcttcttggtccggcacacgtgcgaggcacgtgacccgttcgcgtgcgacccgaaaaatggcgccacggagaacatgccgttttgcaaggcttcactggcgataccagagagggtgaaggatctggttggaaggttgacgctgcaagagaaggttaggcttctggtgaacaatgccgcggcggttccaaggcttgggatgaaagggtacgagtggtggtcggaggcactccacggagtttcaaatgtgggtcccggagttaagtttaatgcacagtttcccggtgctactagcttccctcaagtcatcaccaccgctgcttccttcaatgcttctctctgggaggcaatcggacaggtagtgtcggatgaggcaagggccatgtacaatggtggaagagcggtgctcacgtattggagcccaaacgtgcacatattcaggaaacgatggttggaccgtggacagaaacggcccgttaaggagccactgttggcctgtatatatgctgctagttgcctcatgaaactaaaaggaaggaccggaaaccggttgaaggttgctgcttgttgcaaacacttcacggcttatgacctcgataattaaaatggcaaggatcgtttccacttcaatgcacaggtgagtaagaaggacattgagcaaacattagacgtgcgattctggatatttcggagcgcagcgaacggagccagtgtgatgtgtccttacatgcaattcaatgggatccctcaccataccgaccccaacctcttgaatataacagtttgtggcctgtggcaacttgctgggtaaatagtatcagactatgaaactgttgcggtgttttatgataaccaacattagacaccatagccataagacgctggtcctgatgcctttaaatctggtctggatttagcctgtgggcctttcctagctgtacacacgaataatgcgatcgaaaaatggttgctttgcgagggagccatcaacggcattcttataactacacttggtccaagagatgtgtgcacccaaagtcaccaagagcttgcccttgaagccgcaagacaagggattgtgcttcttaaaaacaaaggtccttctttgcctctctccactaggcgtggccgcactgtagctgttattgggcccaattctaatgtcactttcacaatgattggcaactatgctggtattgcttgtggatacactagtcccttacaaggaatagggacatacaccaagacaatttatgagcatggtttggcaaaagtagcctctactgatgacaagcaagttgtgacagccataattgcaacccaacaagcagatgtaaagctgctagagatgggattatatcagcctattgagtttaggctaaggggcagggtaactccgccacttacatgaatgttagtatgccatgtttttaaagtttaagacagcacaggttggtcctatttttaggtaatctttttatatacctggattgaaaacaagacgtgttagattaatccaactatcttaggctaataatgtctggtggttccgtggatataacttttgcaaagaataacatgtattttgttggctccttctatgcctgttttcttttcggacattctgtgtctggcattgcatctataggatttctagtaagatacgttgtctcctagcagttgttgtcgtggtacccacaagaatccctaacaaagttgccaatgacaaacattgcaatgcgaggaagcaaatcagcagggtacccaggaagaacgtatcggttctacaatggtccagtggtgtatccatttggacacggcttgacatacacacactttgttcatacattagcgagtgctcccacagtggtgtcagttcccttgaatggtcaccgccgtgccaatgtcaccaatatttcaaacagggcaattagagtgacacatgcacggtgtgacaaactctccatcagcctcgaagtagacattaaaaatgtggggtccagagatggcacgcacacgttgctagttttctctgctcctcctgcaggttttggccattgggcactagagaagcaacttgtggcctttgagaaaatccatgttcctgcgaagggtctacagagagttggagtcaatattcacgtgtgcaagcttttaagtgtggtggataagtctgggattaggagaatcccgttgggggaacacagttttaacattggcgatgttaaacactccgtgtcacttcaggctgcagcacttgggattatcaagtcctgaaaattttaggctaaggtggagaatatctatggcacgtgcataatatatattagtatgtgaaaagttttagctttcaacaacaaaggttgcttctaagggatattcaaaggcaaactgttgatatacttggatacttgtattgaagacaaaacgtgctagattaattcatctatcacagtcaaattacacaataggattgatttgattttggagaggagattaaggaaatgtattgttttctcttctcctatatctttctacttttaggacttttattttattgttagtgtcttatcaataggattggtaataagatagttttctcattgtaattgtaattgtaacttccccccttatctttcttacgatattgttaataagattgggttcacatctattaaaaaaaaaaaacaagggc

SEQ ID NO: 76977 - DNA, 277 bp, Glycine max
  Clone ID: PAT_MRT3847_40524C.1
cttttctcccccaaacaccatcctccctccgcctctgccgccaccaccaccgtatccttctcccacaaaccaccgtcagactccaacagcgctgccacccctcgccgcccctccaaaccccccaaagccacaccaataactcctccctcaaaccctctcgctaacaagctatggctcacaagcaaactctcccctcctcctcctcctcccccaccggcaccgccaccaccggaaattgacaccgaaaccaaaaaagagagcggcggtgaaggcgcgg

SEQ ID NO: 76978 - DNA, 458 bp, Glycine max
  Clone ID: PAT_MRT3847_40525C.1
ggttttccatccaatactagttcgaagctttacgtagtacgtagtgaagccaaaggtctgtcgacaagcataatttcatcatctctgaaggaaaactgtttaatggtacatacgtgttcggtgcaaaactagtagcactctaaaaaaataggccgctgggagaggccttctcattgactatagtttaaaaaatgcaataatgaagataagcatctttgactggcgctaagaatatcaagtggaaaagaaaccattacatgtaagcttcggcggttatccataatcaggtcattcttgatttcccttaaacggttcccctcttttacaggattctgaatgtgtttgtgtgatcctcctgaagatgaatattttggaagtccctagtacaccataatttcttcaaaattttatactttggttggaaagattaaactgcaactgggtcacttactgggcta

SEQ ID NO: 76979 - DNA, 328 bp, Glycine max
  Clone ID: PAT_MRT3847_40526C.1
gcgagatccgaatcggctcgaggaataaacgggttgaagttgatctggataatcggtggacggttcaagtgtaggaccttccttgcaaaatacttgtgactcttaaatgacttgaatgagcacaacagtgtgattagaccgcgaccaccttaataagtgcgctcttatatagttgcgccctaaatataaatgataagatcccaaccctatcgaacataatctgcgccatccattttcttgttgcttttccccaaaagttaatttaacattaatttccgtccgttactgcaataggtaccagattaatctaattttggcggggtgagag

SEQ ID NO: 76980 - DNA, 440 bp, Glycine max
  Clone ID: PAT_MRT3847_40527C.1
aaaaaaacaaaaaaaaatataacacactaaaatatataaaaaaaaaactgggatcaatatcacaagaggctgggaagtgaagaaaacaacaaaaaaaccaaaaacacctaaataaaacaaaaaaaaaaattacttggggccccccccatttacatactcaccacacctccaattattttaccccacaccccttgatgtttcccaatttttccttaattaggcccctttaaaacctgggctaaaacacggtacaagtgtttccaggagaaaaatatttcccccctaaaattccccacaaaattccatgcccgaagccaaaagggaaaaacccgggggccccaaaaagggaggctacccaacattaatgggtgggccccacctcccccctttcaaaacggaaaaccttttggcccccttttttaaattaaccccccaacccc

SEQ ID NO: 76981 - DNA, 369 bp, Glycine max
  unsure (1)..(369): unsure at all n locations
  Clone ID: PAT_MRT3847_40528C.1
tgggttggnacatttgttcatngaaattttttcaaagtgggtgatagaattccaacggtaaatttcatggcangatttgaaacccaaacgcctttgctgttgttcgaagaaattaatccaactatgatcgaccgtatggacactcggcaaacatttgtacgagctgaaatacaagatggngatattatctgtattcagaaaagcattctaaatgaaaaagcttcaagcaattttttttttctcccaatatttttccaaaccaaattatttaaaaattttttttttttcccggataatcacccccgcgtttttatttccccccccataattatttaaaaaccccccttttttaaattttttttttttatt

SEQ ID NO: 76982 - DNA, 444 bp, Glycine max
  Clone ID: PAT_MRT3847_40529C.1
atcctctagagcggccgcccgtgacttagttttcatatgagaaagtttccttacgggatgagagtatgcctgtgaagctcatgacttagggagtcactggcgttgtaatatttgctaacagcaccggaatttactccttaaggcacatgttcgtagggaatgccgatcctcactgaccaaagcgcaacaagtgttatatcagtccaaggaaactgttgtctggggcaagacatatcacacacctcttagtacacctcagacagtcaatgctacagtctaggacatcacctgggtagtcgaagccttcattggagttccttgaggaagtcaaggttctcaaccagaaccactttccagccatcttgatcaacaaaagaggcgatcttagtggggatccccagtagaggccctggctgccggaaaatcttgccgcctagttctttg

SEQ ID NO: 76983 - DNA, 198 bp, Glycine max
  unsure (1)..(198): unsure at all n locations
  Clone ID: PAT_MRT3847_4052C.1
nnccnaggagagtngatcgtcacacgttgcggtattacatgtatggtgaaagccacactatgtgaggcatatagtcantaactngtatatcgatgtcggtgatatgngtgnctggtagatcaatccttcatgggagactcttgtgagtagcttgcagtatgacttgtcctgaagcatgagttctgcgaaagagatgac

SEQ ID NO: 76984 - DNA, 325 bp, Glycine max
  unsure (1)..(325): unsure at all n locations
  Clone ID: PAT_MRT3847_40530C.1
aaaaatataaaaataaggagtgtgaatagataaaagagaagggaatcatacgagaataggccaatatttaaaatggacgcagcaggaaacaacaatagtgagagtgagagtgagagtgcatgtagcaacatcctgacagttcaaatgacaattagacgagtgaagataggcccaaaaaagaatgtaaagaaaaagaaatttaaacagtaaaagtttaagtactaatctgaaaaaaaattattgttgaatttatactcataaaactagttaaaacatgatactactataataatttttngaataataatttgngtaggncccctcc

SEQ ID NO: 76985 - DNA, 250 bp, Glycine max
  Clone ID: PAT_MRT3847_40531C.1
cgggtgccaaaaaaacacaaaaagggagactcaattcattatcatcatctgcgtcaacgtcgcttctcttctctcatacggttatggttttgttcacgtcactgcgttcccagtccttctaattcaatggctcagcaatatgctgagaatggtacgtccgacattgctgctgctgagttctctctgtgtcaccttcaagctgcactacctcatcgaaactcgtaatccgaactacgccgattctgttcta

SEQ ID NO: 76986 - DNA, 361 bp, Glycine max
  Clone ID: PAT_MRT3847_40532C.1
ggctatctcaatgatctttaccccagctgctaccactgtcaaccgtgccggcgccggcatggttgctccattcactggcctcaagtccatggatggctttcccaccaaatagaccaacaatgacattacctccattgctagcaacgggggaagagtgcaatgcgtgcacgtgtggccatcagttggctagaaaaagagtgagactctttactacctgccatacctagatgatgcacaattggcaaaagaagtggaatatcttcttacgaagggatggattccttgcttgtaattacagtgggagcacggctacttgtaccgggatcacaacaggtcacctagatactatcgatggacacta

SEQ ID NO: 76987 - DNA, 217 bp, Glycine max
  unsure (1)..(217): unsure at all n locations
  Clone ID: PAT_MRT3847_40533C.1
tnngtanccaggaagcagtgaacaagatagtngcacaaattangaacntaattgtangctgcgnggcaggantatgaganagaaaagctgagtgagagaattgctaaattnnctggtggnttngntntgatacagggtttgcgcacaaactgatanagagcgcaaggataagnnnttataggttgnagacgnctcggnantgccncaaaggcagcgt

SEQ ID NO: 76988 - DNA, 468 bp, Glycine max
  unsure (1)..(468): unsure at all n locations
  Clone ID: PAT_MRT3847_40534C.1
ggantcaaaaggaaggttgacgaacgaatctgtaaacgctaggcgctcgtcccagctcggaatttgctctagtgctctcttatttctaaatccacagagttacatttttcttcacggatgacacggcaaggacttgtggagagggacgctcaaccttcttctgctttggattaggggttcggcgactcctacgatgaccatgcggacccagatgtgagcatcgggacgagacgttaacgggtcttgagcacaagcacatcaagttacgtctcaaactgccagaatgccaccgctacatacaatatcgagagggttacgtccctgcagcagaatacgaggcgctgctgcggacgctgctctggagcgactgacgaggaacgaggcaacctccgccgaagcggaagtcgactggtagccttgccgacggagaaaattggaactcaagcgaagtcgtggcgtgctctatat

SEQ ID NO: 76989 - DNA, 373 bp, Glycine max
  Clone ID: PAT_MRT3847_40535C.1
ctcgatccgattcatgctcgagcttatagtaaaatcatacacgttaaggacggtgttgaccgtggaacttgaagcataccgttgcccttgatagatgcaaaggatgtactcttggatgagaattacatggctcttgtggctgattctgatctctcaacgcttgttgaaaaggatgtgagtcacactatgacaactctgacagggacaagagggtacttgcctcctgagtggctcttagaaagaggggagtcagaaaaaactgatgtttacagctataggatggttctactggagatcattggagggagaaggactgtgccgaggctagaggatcccagggacaggacctagaaatagtgggagtttcttccca

SEQ ID NO: 76990 - DNA, 720 bp, Glycine max
  Clone ID: PAT_MRT3847_40536C.1
aacatgtcaattcaacttcacattgcacatgctgcctagagttgcatcaatacacaataagaggtctagtagccacatacattactatgcatgttctaccaacttattttagggtctaaagaaaaagactacctaactccctggctacagttttaaacaatacaaagtcatcaaaggcaacaaataaaattaaagagacacggtagagagctagagtcatgcacatagctagaactagaagagtccaactaaggctacacagctagccaatagtccataatagatacatataataacacaccatcatcagaatattgcaggccacgcctccaaaagcataaaccctagaagggttaatactgcaaacttaattcacaaattacctcctcctgctcctgctccctcactgatatcctccgaggaggtatcagtccaaggaagagcataaggaaaggaaaaagcagtagcagcagtagactggtggcgataaaacccacttgctaattcgttgccaaatcttgcactaaactgcctcttggggaacatggtgaaatgaagcaagtcctggtggcacagaaagtgatgctggagtgatgtcagtgtaagaatagcgtagcagatcagcatttgcagcatcaagctccttttggagcctttggacttgtctctgaaggaaagagatggctcctacacagccataaactgggtccctcacacgtg

SEQ ID NO: 76991 - DNA, 231 bp, Glycine max
  Clone ID: PAT_MRT3847_40537C.1
atcgaattttcattttcatttattcgcaacacttcctaactaccgattggtcagagtcacgtttttttcattcttccctccatccctctccttcacaatggcgaaaaaaccgttactctgctggctcctcctcctcgccgtgctcgccgaagccggagcttccgacgaagacggcgccgagctcgactactcgaagctctccggcattataatccctggcttcgcatccac

SEQ ID NO: 76992 - DNA, 376 bp, Glycine max
  Clone ID: PAT_MRT3847_40538C.1
ggggggggttaatagaactataaatatattcacatatgcgtgaaggtggagggaatacaggcccggaaaacagtttatacgactaacgaaatataaaccactgcccccaatggccaaactacagtccaaggccaaattaactcaaatctaacaaaaactttttggggggggggaacaaaaaaagattaaaaagatttgttttactttgaccttggacaaacttttgggaatcggggccaaacgggaaaacgacacacgtgacataaccgcgtgcccgtgtctgattccccacagcactactacttaaatgaaaaaagttacattcgaataaccgaaaacgggtgctggggcccaattactagctgacctacgcgcg

SEQ ID NO: 76993 - DNA, 479 bp, Glycine max
  Clone ID: PAT_MRT3847_40539C.1
tttagttcatggtaatgcacattcgactagccgttctcgctgctgtcgtcgcagcggctgccacggccgccgcccaaccacaatgcagcaactctggatggttggaaatcaaagatcaggccggactgcagagcctacagggctgcaccagttttaccggatcaattaagctcggaggttccgtgtcagatctcagcccacttgcaggtcttgcgtccgtgtcactcagtctgaacatcgagggcacaaagttgaccagtctcaaaggcctcgaagcgctgaaggaagtgaatgacaagctgtatatcaaggcgaacccctctctgaacagcctagccggtctcgagggactgaatggaatcggtcatggcctcttcgtggaatacaacaacttgctctccgacatcagttctttgaagaacgtcaaggtgatcaaccgtgatcccaacatgtttggcagtcctggcgaaccttcgttt

SEQ ID NO: 76994 - DNA, 1227 bp, Glycine max
  Clone ID: PAT_MRT3847_4053C.1
gaaattttaactcgagccgctttggtggagaagattgatgaggaagcaggaaagcttggaaccttttggcctggtgaatggctttccggtgattttcctgaggctcggatgtttaccctaaaatacaagactaatctcacacaatggtctggagctagcttgcctcttcaggaagttagctctatgctgttggagaagcttcttgctgcaggaattgggaatcgacctgttgtttttgttactcacagtatgggtggcctggttgtgaagcagattcttcataaagcaaaggaagaaagatttgataatctcgtgaaaaatacaataggaattattttttatagctgcccacattttggtagcaaacttgcagatatgccttggcgaatgggctttgttcttcgtcctgctccaacaataggagagctaagaagtggatcttcaagactgatagagcttaatgactatattcgtcaccttcataagaaagggttgcttgatgtcctcagcttttgtgagaccaaggtaactccaatagttgaaggttatggtggatgggcctttcgaactgaaattgtaccaattgagtcagcatatcctggatttggggaattagttgtattggagtcaacagatcatataaattcttgtaaaccagtgagccgtttagacccttcttatacggagacattaaagttcttgcagaaattaaaagcatgtcatgcctgaatttgtttcagcggaaaatatgtaaatacctctagaagagttagataggtgttccggagtggaatttatatttcaaaagcatgggaagtctatagatcttgtgggttcgttcaacttgatatagcaactaaaaccttatcttgctaggtgaaatcgactacatgcatagaagttttaacatacttaatgaaacttaaaggtggactaacatgtgaaagccttctattagattttggctttcataagctggacatttttccattcatcaatcattcatttgggtcaggtggcccttagggattgtaatcagtgtcccttgtacataaataggaaacacaaatataagccatgtatatatatattcttcattttaacccagatgggtttttcatctgcggtccccagtaaaaaaaggtttgatatgatatcttttttccaaaaaaaaaaaaaaaaaaaaaaaaaaaaaaaaaaaaaaattaaaaaaaaattacccacaac

SEQ ID NO: 76995 - DNA, 255 bp, Glycine max
  Clone ID: PAT_MRT3847_40540C.1
gctttcatcctaatttctctgccaaatggaggcgttacctcttatatattttccactcaccaatgtgaaggtatacttgaccaaagtaatgacaatgggcacttttacaacagttgtaaatataacgaaattcatgattctgccagcaaggatgagttagaaaatggaaagaaatcctacgtgttcagcacaagcaaagtaaaccggcttttgcgaaaattagaaggaaaattgttatcctacaaaatgtttgcc

SEQ ID NO: 76996 - DNA, 226 bp, Glycine max
  unsure (1)..(226): unsure at all n locations
  Clone ID: PAT_MRT3847_40541C.1
cttgacttaaattttccttttctnncattttatnatngttgtttgagataatcctncactaaatttttnacttaactaatgataaatttntttnatagataagatatgagggatgntcagaaatcangaaatttcataaaaatatacntcaantanttacaatngatatacancatnnaaaaataaagtngaattgaatgataattttgatgacaccattcaaagg

SEQ ID NO: 76997 - DNA, 435 bp, Glycine max
  unsure (1)..(435): unsure at all n locations
  Clone ID: PAT_MRT3847_40542C.1
gttagacccaagagttgtcaagtgtgtttttaaattaaaagggggggtacaagtgctatcatcctcagagttgtcgagttttttgtatcaatggatgtcacctttcattaaatagaatccttccttgttagccgtcagcttcagggggagagtatactattagccaagtctatcttagggtcactacctcttttgtccttgtaggatgtccaagacactaatcttgaggaagcaccacaatgaagatgtagaaaaagataataatgaagcagaagagcaagatcaattctttggacaaaaatatcaaaggggagtgaagcaaaacccacttttatcccacagcaaattcaattgtctaaaccagagatgcctcaaaaaatggtgttgcacaagagacaattcanaatactatccgcagagctagcaaggtgatga

SEQ ID NO: 76998 - DNA, 1052 bp, Glycine max
  unsure (1)..(1052): unsure at all n locations
  Clone ID: PAT_MRT3847_40543C.1
gggggctgcccgtagtcgccggaccgctcatgttctgcccaacattactcaaaatgacataaataaaagtaatgagtgcttgagaaagagaaagtgaaaggaacacactaagcagatatggatgggatgcaaatagctctacctattgttggagttattgcggctgcagctgcgaccttctatgcagtaagctttgctgaacttagagagaaatcgtttagagatttggaagaatctgaatatgaagatggggtttataggccatcccctagctcccgagagaggcgtgccagaagacaagctaacaaaaataacaaaagatgaatgacttcattcaatcatctatgcttttcccaaaggtgtggtgtggtggaattgcttccacgggaccgtttttctatcttctttttttaattttaaaaagtttccaaatgagatatacttgtctatttagtttggttggctttcattttctttcgtgtttcgttaattaattcgtatttattttgctaccatgataaaccccaacttttgtttaagtctcagcctctgaatagcgatgttatgccattatgtgtatggtgagggactgagaatgatcaaattgttttttaaaaaacattctcttttatattgcnnnnnnaaaaacgtgacagagaaattgggcatcaagattgagaggaaccctcctgaagacaagctcactcaacttggtgttaggcaatggcccaaatggggttgtcctccaagcaaattcccgtggacatatgaatctaaagagacctgctatctcttgggaggaaaaagtgaaggttacccctagtggggcaaatgagtcagtagaaattgctgctggtgattttgttgagtttccaaaagggatgagttgcacttgggatgtgtcagttgctgttgacaagcactataactttgaataaaatcctacaagggatattcctaatgaatgaaacgggaggactttcttgaacaaataaatggctgtaatgttgagtgaaataagaacttttaagtagatttcagtttttgttggg

SEQ ID NO: 76999 - DNA, 1131 bp, Glycine max
  Clone ID: PAT_MRT3847_40544C.1
tcgtcagctcgcaatgtggcacgagcaaccatcctttgcaattgcaagaatctttagtttttttatttcttcccatcagtgtctctttcagttgagtgccttacttttaacgcaggtacaaagaaggaagaagcacgcgtgggggtgtgggtgaatatatggcgaaaagagtaccagtaggagagttgttggtgttggtgttattattgttggcaccaaagacaaaggcaatgagcataacaagaggtcataataaaagcaggggcaaagagtcctctggttctagtgatgaggggggtgcaattagcttttgtttgagttggagattggcagtggaggcaaacaatgtggttgcatggccaacagttccacctcagtgttcccgatatgttgagacttacatgatcaatggccagtacgaccgggacttggacttgattgtggaggtaatcttggcttatgtcaaccaaacttttctccttggggatgccatggatgcttggaatttggatgttgatgacacttgcatctccaatatctattattacaaaggcaagaaatatgggtgtgatccatatgacccattttcctttaggacgtgggccatgaaaggagggtgccctgcaattccttccgtactaaggttgtttaacatattagtagataaaggattcaaagtatttttactcaccggaagagatgaagagacccttggtcaagttacccggaacaacttgcacaatcaaggatttattggctatgaacgccttattttgaggagttcagcatataaagggaaaagtgcaatgaaatacaaatccgatgtacgaaagcagttagaggaccaaggttacaggatatgggggaatgtgggagaccagtggagtgatatccagggagattatttggggaaccgtactttcaagctacctaatcccatgtactttgttccctaatcctatgatttacatgtatcatgaacttgtggcaaattaaaatagccgacatgcaaatgtatttggcatcaataatttacttttgggtgctgctaccaagtttatacaatatgatgagagggatattagtatagtaaaaaaaaaaaaaaagggcggccaacagaatagtgagcta

SEQ ID NO: 77000 - DNA, 374 bp, Glycine max
  Clone ID: PAT_MRT3847_40545C.1
cggacgcgtgggcggacgcgtgggagaagactgaaaaggggttattgtctgagaagttgggctgccttggtgtgagtgtgtatctttgtttcgagtgtgctgttcttactacattcaggttttcctgatgtctcactagacaaaactgtctcggcaacttccctgacattggtaaggggttagggaaactaggtgagatgatggtcaaaatgttgtccgatgatctttgattataaaggctaacataaattcgatcagagagcatattgccttggctgttgactggtggttggttgtaagttggtaaaccgactactaattaagattttacctttgtatggttgggtaggtggtacaataaaaatgcctcattg

SEQ ID NO: 77001 - DNA, 259 bp, Glycine max
  Clone ID: PAT_MRT3847_40546C.1
actaaatgctactgctaagcttgtaatcttcaaagacaagagtatgcttacttactgcttagtatacagttaagctagtcataagtggtgattcattcttgtctatacttcatagggatgctcattttgttgttgttttggttcattcactttattggcatgcaaaaatcatgtaaccttcctatgtcttgtttagtgacggacgataatactcattccttggttggttgcgagaatgattattccttgtaaatggaat

SEQ ID NO: 77002 - DNA, 214 bp, Glycine max
  Clone ID: PAT_MRT3847_40547C.1
ttcggcaatggcgcctcttcagttcactccctgagagagggagagggaagctttaattactcatttttttcccataacagcaaaacaaaccccccgttgtttttcacctccgcactctctctctttgctcgtgatctttaccaatttcaaaccctagaaacttcttattccatcggagcagcaaccaccgcgataacaccttttttagacattt

SEQ ID NO: 77003 - DNA, 404 bp, Glycine max
  Clone ID: PAT_MRT3847_40548C.1
tttttagagaaaaaccttcattttataatccagaacaatcaaactttaagtacattcatgaatgcaaataatataatcattcatcatctataaacttacttgatggcttgatgcatgatagttgaaacttatcccaagttgcacgtcattatagaacatcagtatacgtatatccgtgagaattttcatcacaaactttacagatcaatgaagagtctgaagaagtgcaccaccagtttgtgtgttgcttacaatatggtttgttgcagaaactgcacttgggaagctgtaaccaacattcaaggcagaagatatcttcacaagctccctcttccacttctccggattcaatgcatccaccacagttttcgcaccttggaatacaaaaattgcaacccctacat

SEQ ID NO: 77004 - DNA, 252 bp, Glycine max
  Clone ID: PAT_MRT3847_40549C.1
tttttattagactcatataccatattccatcaagctatcccccctgagtgtgacaagccatttgattgctcacggcttggttattaaaaatgcttttttgttgctttgcttcaaaccacaggtttgttggtaaggagtttttttttttttttatacggtttaaaaaaaaaaagttaataaacaaatacacctcaaccctaaaaatttcaaaaatctaaccccattaatataagtacatgctttaatataccc

SEQ ID NO: 77005 - DNA, 271 bp, Glycine max
  Clone ID: PAT_MRT3847_4054C.1
ttgagcctcaacccggttttcaaaaggcgggggaaggacccaatggggggttttttattggggcttacaaacttcctttttttacttttcttttttttccacattttccaaaaaccctggactctctcctttggcaaaaaccaatacctttctttttccggtctcccctttcccaaaaaccccttcttccttgtgggtaccgccacccgactctcccaacccgaaactgggggcctgaaaaaatacgtcaagtcgaggcttcccggtggat

SEQ ID NO: 77006 - DNA, 2063 bp, Glycine max
  Clone ID: PAT_MRT3847_40550C.1
cccacgcgtccggtgcggcagaggagtgtctcgtttatggaggatcaaagcggagaaggtgaaggagaagaagaagaacaacaacaaccttcactcttctattattattattattcaatttaatcatttaataataataataataattttgttcaccaattattattattctacatcagcatgggtaagggtcccttttccttccgccgctccgcctctcgccgccgacccaagaagaccgccgccccgcctcctcctccgtctccgccgcagcctccctacgcggccggaatcgccacctcacccgacgacaacaacaaccgtctcattgctgccggcgccggcagcagcgccttgacgaaggcgaagaagaagaccggcggcgcccgcttgtggatgaggtttgaccggtcgggccggtcagaactggtggagttggagaagaacgccatcatccgccacgcagcgattcccgctagagacctgagaatcttgggccccgtcttctcccactcctccaacatcctcgctagagagaaagcaatggtggttaatttggagtttataaaggcaatcgtgactgctgaagaagtgttattgcttgatcctcttcggcaggaggttcttccctttgttgagcaactcaggcaacagcttcctgggaaaagtcaacctaaacttctcggcggcgtggaggaacaggaaggcgaaatgcaggtctctaatggcaggcaatggttgcctatgccggaggcggctgatggtttgcagtcagagcttccgtttgagtttcaagttctggagattgctttggaggctgtgtgtacttatctggactcgaatgtggcggaccttgagcgaggtgcttaccctgtgttggatgaattggctcggaatgttagcaccaagaatcttgaacatgtgaggagtttgaagagtaatcttacgcggttgctggcaagagtgcagaaggtgcgagatgaaattgaacatctgttagatgacaacgaagatatggcacaactatatttgacgaggaagtggttacagaatcaacaatttgaggaggctcatttgggtgccacaacctcaaataactttcctaatacctcacgttctgttcgtcgacttggttctaacagaagtgaaagtcttgtgacctgccattatgaggatgataacaatgtggaggacttggagatgttgcttgatgcatatttcatgcagttggatggaactcgtaacaaaatattatctgttagggagtatattgacgacactgaagactatgtcaacattcaacttgataaccaccgaaatgaacttattcagctgcagttgacgttgactattgcatcatttgctattgctattgaaactatgattgctggtgcatttggtatgaacattccttgtaacttgtatcacattgatggagtattttggcccttcgtttggatcacgtctgcagcttgcgtattgcttttcttgcttattttagcatatgcaagatggaagaagttgctgggatcataaggcaaggctgttgtgacaattggcaatttgaatctccgccgcgagtgatctgaagaacagacacaaacgtgtcaccggagaataattgtaatagttgatgtataagatgttccaacattgcttttagcatcatgtgttttatagccgatattattcacaccatcatttttaatttaccaactttatggtgtcgcgtgcatgcgtgtgtgttggccattttgttctgggtccgtgtgtatttcggcttgttcaatttatatgagcatgacaaatgaaattgcataaggaaaaatgaccctgtgggggcttgatttatatgaatagccaaccccattgtacaagagggttcactttgtaagcagacaaatcgacaactatcaagaaaattgggatcttctcaattctaatgaggaatttttgtactttaggtagagtagttgttgtatgtctgtctcaaatttcaatacttctagtctgcattggtttgccaatccccccccctgctcctggtttgttttatcactttt

SEQ ID NO: 77007 - DNA, 1013 bp, Glycine max
  Clone ID: PAT_MRT3847_40551C.1
ggagtgtcttgttctcgtttatggaggatcaaagcggagaagctgaaggagaagaacaacaaatacaaccttcactctttcattatttaataacaattattattctcaatgggcaagactcctttctcctttcgtcgctccgcctctcgccgccgccccaagaagaccgccgccccgccccctcctccctctccgccgcaacatccctacgcggccggattcgccgcctcacccgacgacaacaaccgtctcatcgccgccgccgccggcagcagcgccttgacgaaggcgaagaagaagaccggcaacgtccgcttgtggatgaggtttgaccggtccggccggtcagaactggtggagttggagaagaacgccatcgtccgccacgcagcgattcccgctagagacttgcgaattttgggccccgtcttctcccactcctccaacatcctcggtactgacaattaatagtatgtataggatgttccaacattgcttttagcatcatatattttatacccccgccgatactaaaaaaaaaaaaaaaaaaaaaaaaaaaaaaaaaaaaaaaaaaaaaaaaaaaaaaaaaaaaaaaaaaaaaaaattttataaaaaaaaaaaaaaaaaaaaaaaaaaaaaaaaaaaaaaaaaaaaaaaaggggggccccttttaaagaaccaaagttaactaccccggcaagcaaaaaaaaaatttttttaatagggcccccaaaataaaattaaggggccgggttttaaaaaggggggaaggggaaaaacctgggggtacccaaattaaaccccttggaaaaaaatccccttttcccaggtgggggaaaaagaaaaaaggcccccccgaatcccctttccaaaaagtggcccaccctaaagggaaaagggaaccccccttgaaggggcaattaaagccgggggggggggggggttaccccaaggggaacggttaatttggccgggccctaaggcccggttcttttggttttttccctttcttt

SEQ ID NO: 77008 - DNA, 546 bp, Glycine max
  Clone ID: PAT_MRT3847_40552C.1
gggggggggggttttttttttttttttttttaggaagcccccccaaatactggtatttatggaacattttctcagaattatgacaataataaagttctaaaaaaaaaatactttcccttagcgctgtctctcaatacctataatgcctgagccgcaatagggggggtggggggggtcaacatatgaatattacaagacatttttctcttcctaagagagggctactatagcacgaatgcttctcgggaaaagtaaccttttccacatgaagccaaggaataagcccttaacgcttgcccccttgggttatttggtcttgaaaaattccaaacaggggtcttgggctaagatcccgctccaaaacttcttaaagtggtccgcatatgtaaaccctctgcatattgcttcaaatccaccttccctgaggggttttgcagggcttaacaatgcctcgccctttgggcaaagaaatgaagccccagaaagccttgggttctcaacattgacaactgcaccgagccccacactcttggaaagccccttact

SEQ ID NO: 77009 - DNA, 263 bp, Glycine max
  Clone ID: PAT_MRT3847_40553C.1
gggaaggggacaaaaaactctaattcgagacatttaccctcgtttttcttcccataaatttgggaattcatgggattgggcaccattttcttttaaatctcttcctgaattgcagggttggaaggtgggggatggaaatttttttcaaatttaattccattcttatgttgaccaactgggcccggattggttttttgtgcttgaaccccgggattctggggggggggggaaaacgctctttgttcaatttgaggggaaatcgg

SEQ ID NO: 77010 - DNA, 1052 bp, Glycine max
  unsure (1)..(1052): unsure at all n locations
  Clone ID: PAT_MRT3847_40554C.1
attcttttcctccctctcccnngctaaacagatttaatgtatatagttatcaccctactacaataacttaaaaaggtctttatttgtcaaggtagatgagccaacataacagaacatgccattaaataatgacatcaaaattacaaatttcagtggcactactcgtaacccaagctttgttaacaaagaatgagcttattgatcggtatgaagtagtactagataatgctgtgaagagactgcttccaagacaacaattaggtggcatgggtaggaaaattagtggatttctctatattgatcacaaaatgatgaaatgaaatgatatcttttggacattgttttccagaacttaaaaagttctttatttgtcaaggtagatgagccaacataacagaacatgccattaaataatgacatcaaaattacaaatttcagtggcactactcgtaacccaagctttgttaacaaagaatgagcttattgatcgttatgaagtagtactagataatgctgtgaagagactgcttccaagacaacaattaggtggcatgggtaggaaaattagtggatttctctatattgatcacaaaatgatgaaatgaaatgatatcttttgtacattgttttccctcaaaggcccttaagctgagcagcaaggcctgtcatagaagtccacttctcaaatgcagtggccaaagagacaaaggcaattttggaggactcaacatctttcttagaaaaattatagcacagcatgatttcctttgatagctgatgctatgatagtcaatgcgcatggcttagattgtgattgcagttgcaattgtgttgtgattgctgaaatctcaggcaaatgcagccacaacattttgtacacaattggaatttcagatggcaatttaaaattgagtaaatgaggcacacacacacatngatttgtgtgtgttacgaatttgacatgaatcggacctgatgaaattagtgaagctaatgaggaattgaatgcgtncacctcagtcttctcttctgaactggagctcagctgatta

SEQ ID NO: 77011 - DNA, 143 bp, Glycine max
  Clone ID: PAT_MRT3847_40555C.1
gggtggtccctctattgatggggaaaatattcttggaggaaggagcaacccatctggatctaagccaagaagggttccacccaacctaaggaaagggtcaaaattggctggcctcttgtattcccggggaaggagggggaaaa

SEQ ID NO: 77012 - DNA, 129 bp, Glycine max
  Clone ID: PAT_MRT3847_40556C.1
ggctcgatcatcgatcgaatcggctcgaatacgctgcgagaagacgacatacggggcatcagatgatcgagacgacggcgaagcgaacgctatcgttgcgccaatcgcggcgttgttaatggtggtgct

SEQ ID NO: 77013 - DNA, 1223 bp, Glycine max
  Clone ID: PAT_MRT3847_40557C.1
ggctggagggagagtccagttatggggaggaagctgcttcagaccaacagtatggtgaggtgagtcatgatagagctgggtggcctatgagggaaaaagatagaggttcggaaagggactggtctggttcttctgagagaaggtacagagatgatagagatcaaggatatgagagagatgcatctagagaaaaagatatgggtcatgatcatgaatggtctgaaagaaggcatcgtgatgatagagaaacgggcagagaacgatcccgtgaccgtgaacgatctcttgatcgtgatcgtgatcgtgaccgtgaaaaggatctccgtgagcgtgacaggcacagagaagatagggatgggtatgcagatcatcataggttcagagaccgggaagcagagcacgatgatgagtgggagaggggacggtcatcaaggactcacagcaagtcacgattatcgcaagaggaggaacaccattctagaccaagagatgctgattatgggaagaggcggcgtcttacttctgaataactatgtatgctgcctgttattgctctgaattctttctgttgaggaaggaaaataccatgaccaaagagtcaggatttgtcatttgctttgattgtctggggcccagatgttgttgagcagctgttttatttcaatcacttgttctgttttcttcttgttaggagcgtggtttctttcttctctgagaaaggacaattgttttgagaaaggaaactgttcattcaaactctgggttatgatggggatcaagcgtcttcaatgttggagattcaagtcatgacaatccttttcttacattcatacattgagaagtggaacttttgctatgaagtattagcttttgatttgaatttatgtttcagttattagcacacgattaattaaaccatcaatgctgatgtaatgggtttaacttgctgaagtctgaaatgtggcagattgtttagaacttattgtttgaaatatgtactaggatttagcagaggatgctgataatgtgccgtttcttattgggtggctgttgtatcttttttccccaccttttggctggctgttgtaacatttttccccacttctttgttgttttctccctcacattttgttagcatagcagcggtgtagcatgcaaatattgtgtatgatgtagagagctaaccatttgatcactgtaattattcaaagctggagaattgt

SEQ ID NO: 77014 - DNA, 1430 bp, Glycine max
  Clone ID: PAT_MRT3847_40558C.1
ctactgatgctgagctggaagctgagctttccaagtatgggtctgtgaaggaggtgaagtttttcgatgagaaggccagtgggaaatcaaaggggtattgccaggttgagttttatgaagcttttgctgcgactgcttgtaaggaagggatgaatgggcatgtttttaatgggagaccttgtgttgttgcatttgcatcgccttttacggttaagaaaatgggggaggctcagataaacaggaatcagcagatgaaccaaactgctgttcctcagggaaggaggggacctgctgatgcaggggctaagcctggtgggagtaatatttcgacaggtggtaattaccaaggtggagatggaaatagaagttatggaagaggaggaggaggtaattgggggagaggaaataatcctggtatggggaatagagggcctattaatccaatgaggaacaggggtggtggcatgggtgggagaggtataatgggtaatggtggaaatgggtttggacagggtatgggtgctactccaccactgttgcatcctcagtccatgatgaatcagggttttgatcctgcatttggccccatgggtagaatgggtagttacggaggctttcccggtgctccgacaccaccattctctgggattttgccttcattccctggtgttggaggtgttggtttgcctggagtggcacctcatgttaatccagccttttttggaagagggatgcctgttaatggtatggggatgatgcccggatcaggcatggatggtcctaatatgggaatgtggtcagatccaaatatgggtggatggggtggtgaagagcctggtggtgggaaggctggagagtccagttatggggaggaagctgcatctgaccatcagtatggtgaggtgagtcatgatagagctgggtggcctatgagggagaaagatagaggctcggaaagagactggtctggtacttctgagagaaggtacagagatgatagagatcaaggatatgaaagagatgcacctaaagaagaagacatgggccatgaccatgaatggtctgaaagaaggcatcgtgatgatagagaaacgggccgagaacgatctcgtgatcgtgaccgtgaacgatctcgagaccgtgatcgtgaccgcgaaagggatcaccgtgagcgtgacaggcacagagaagatagggacaagtatgcagatcatcataggtacagagaccgggaggcagagcatgatgatgagtgggagaggggacgatcatcaaggatgcacagcaagtcacgattatcacaagaggaagaacaccattctaggccaagagatgctgattatgggaagaggcggaggcttacctctgaataactatgtttgctggctgttatttctctgaacacttccactgaggaaggaaacaacagt

SEQ ID NO: 77015 - DNA, 939 bp, Glycine max
  Clone ID: PAT_MRT3847_40559C.1
tcttgactggtctggtacttctgagagaaggtacagagatgatagagatcaaggatatgacagagatgcacctaaagaaaaagacatgggccatgaccatgaatggtctgaaagaaggcatcgtgatgatagagaaacgggccgagaacgatctcgtgatcgtgaccgtgaacgatctcgagaccgtgatcgtgaccgcgaaagggattaccgtgagcgtgacaggcacaaagaagatagggacaggtatgcagatcatcacaggtacagagaccgggaagcagaacacgatgatgagtgggagaggggacgatcatcaaagcctcacagtaagtcacagttatcgcaagaggaggaacaccattctaggccaagagatgctgattatgggaagaggcggcggcttacttctgaataactttgtatgctgcctgttatttctctgaatgctttccactttggaaggaaaaaacagtaactgaaaatcacgatttgtcatttgcttgaattctctggggccagaagttgttgagcagctgttttatttcatcacttgttctaattgcttctttttaggagcatggtttctttcttctttgagaaaggacaattgttttgagaaaggaaactgttcattcaaactctgggttgtgatggggatcaagcctctacaatgttggagattcaagccatgacaatccttttcttacattcttacattgagaagtggaacttttgctatgaagtattagcttttgatttgtatttatgtttcagttactagcacatgattaattaaaccatcaatgctgatgtaatgggtttaacttggtgaagtctgaaatgtggcagcttatttagaacttattgtttgaaatatgtactaggatttagcagaggatgttgataatgtgccgtttcttgttgggtggctgttgt

SEQ ID NO: 77016 - DNA, 1257 bp, Glycine max
  Clone ID: PAT_MRT3847_4055C.1
ttgtgctttcaaggcaatcaaagagtcattttcatttaaaagatcaagctatcaaagtcacataaataaactacatcacctaatttacaaaaattccaaaactacaaaaaaaaaaaaaaactcattcattcactccagtacttctcatcaccctttttctcctctccctcatcactctccgacccatccccgtccattttgaaccgggtgacatcctccagggccgcgctccggaacagccccacgtcgacggcgccacttaccatgtgatacccacgcgacctcaaatccctcgccccatcatacgccgtagcgaaacccgccaagtaggccccactctcaacgtcgtcgtttcggctctccaaaaccttgttctcggcctccctcaacacctccctcactttcttgggcccagggtcccacaagtaccctaaactagcactcagatccaacggccccatctgcacgcagtccacaccatcaacagcggcgatcgcgccagcgttcgccacgccctcctcggactccacctggcacatgattaacagctcgtcgaggtaattaccgagatacccctcgtcgaggccgtacttggaggcccggacgatggggtgggccgcgccgcggagtccggtgggaggaaaacggcagtaggagaccgcgtcctgggccgactgcagggagtcaatcatggggaacatgaggccctgtgggccgaggtcgagggctttcttggcccaagcagcggtggattcagggacgcggaggatggcggcggtgttcgcggcggcgagggcgtgaaggcagggaagggcgtcgcggatgccaccggggccgtgctccatgtcgacgacgacgaagtcatagccggcgtggcccgcgatctcggcgagggtgggggagaaggagaggaggaagagaccatagagggtctcgccgttgcggaggcgggacttgaggtttaggggggaggatggagaggtagcggcggaggaggaggagggggtggatttgggaatgggggggtttggattaggggaaatggttaggggtttggagagatggaatgggtggggattggaagtggatagggcgagagaatggggtttgggtttggggagaagcgaagagaaaggggtgagtgttgttcttcgggttgggggagctccgatggtgcttgtggttatgctccccattttcttagttgcactcgagccctcgagcctattcacctcactctctcgaccggacgcgtgg

SEQ ID NO: 77017 - DNA, 1021 bp, Glycine max
  Clone ID: PAT_MRT3847_40560C.1
cagagaacgatcccgtgaccgtgaccgtgatcgtgaacgatctcgagaccgtgatcgtgaccgcgaaaaggatcaccgtgagcgtgacaggcacagagaagatagggagagatatgcagatcatcataggtacagagaccgggaagcagagcacgatgatgagtgggagaggggacggtcatcaaggactcacagcaagtcacgattatcgcaagaggaggaacaccattctagaccaagagatgctgattatgtgaagaggcggcggcttacttctgaataactttgtatgcttcctgatatttctctgaatgctttccactttggaagggaaaaaacagtaactgaaaagtcatgatttgtcatttgcttgaattctctggggccagatgttgttgtgcagctgttttatttcatcacttgttctaattgcttcttgttaggagcatggtttctttcttctctgagaaagggcaattgttttgagaaaggaaactgttcattcaaactctgggttgtgatggggatcaagcgttttctgtgttgataggtcaagtcatgacaatccttttcttacattcatacattgagaagtggaacttttgctatgaagtattagcttttgatttgaatgtatgtttcagttattagcacatcattaattaaaccatcgatgttgatgtaatgggtttaacttgctgaagtctgaaatgtggcagtatttagaacttattgtttgaaatgtgtactaggatttagcagaggatgttgataatgtgccgtttctgattggctggctgttgtatcctttttttcccctccttttggcttggctgttgtatcatttcattccccacctctttttttgttgttttctccctcacattttgttagcatagcagcggtgtagcatgcaaatattgtgtatgatgtagagagctaaccatttgatcactgtaatcattcaaagctggagaattgtacgtgttttcatgtatatattgatattaactttgctgat

SEQ ID NO: 77018 - DNA, 712 bp, Glycine max
  Clone ID: PAT_MRT3847_40561C.1
ggtaatacatcagtttgtcagcgatcattataaataaataatgggaagatctacattcaatatgcttaatgtgtataacgaactcattcaagattaattgtcaaacatacaatatcaactcttgaaaggttcccaaaaacttatcttcagatgaggactcccaaaaacttcccaataacaaattttaccagctgaaagccactgtacactcagttctcacaaataagagaagacaaaatttttatagcataatctattagaaagaaaagaaaagaagaataagccttaactaagaaagagatattaacaccagaatctgaataaaaatttcactaaaacttggtgccatagaaaccatttggtcctgggacggaaataggtcgagagacaggaaagccaggttgcagaagaggaatgtggcttcgaagtgtgaagggctgatgtccacttgttaagacaggagggggcacacaaaccggcattgctggaccaattgttccatccctgctgctttggaaattgtacatgattcatcagagggcgagctgagactggtgggacagccgtcgttccatgaatcaaatcaggttgcgaaaattgagagccactgccaccatttcccaccgtcaaattactatactgtgaaaccttaacaggcattgatggccgagaagcaaaagtattgaatccaacttcaggttgaatagaaaca

SEQ ID NO: 77019 - DNA, 307 bp, Glycine max
  Clone ID: PAT_MRT3847_40562C.1
atatatctcgcttggttttagacttggtacaactcacagtcatgattctatttggtttgcttaaccaacatattatttcgatattattctatatgataaaaaactactagattgtatcaaaaattatatacaaatatatataaaaatatcttttggtgtatatggaattggacagataaagattctaaaaagaattgatcttattcaacttataatatatatgggatttccacagatttttatacatgggcagtgtcactatatcaaagatttacctacatttatgtaacagaaattgaactctgtt

SEQ ID NO: 77020 - DNA, 689 bp, Glycine max
  Clone ID: PAT_MRT3847_40563C.1
aataagaactaaatttttttacatcaaatgttaatattgaattgttcagcattgcacattggaatcagttcaccaacaagtttaccaggaaagacaaaaagcaatggaaattaaaataaaatgaagatgatgtacctaaaaataaaataattgaagatgaataaatagacaaagtttgaacaagagaaatcaaacaatgaaactgctttttggtggagggcaggctaaacacttaattcatgaagtcatcacccaaataacatcgtgactgacagtgctcccaaaccagcaaaaaccagcaaccccacaactctgttttgagcagcagagtaatagtatgcatatccatcccccggcacaccggttacatatatgaaccttggtggcggtggtgttggaggtggccgtgatggtggtggtggtggtggccgtgatggaggtggtggtggcggtagtggcgatgaatcatcacaactctctggtggggttggagaggaaatctctggaaggaatagtggtggcggggaagctggaggcggaggaggaggcgatagaagttgctcatcacaggggtttccacaaggacatgatccacatttgatttcagtgtgtgttggctgtgaaaccagtgattggtctaatttgctagaaaatgtgttggcctcaaccggtgatgaaatgtaatgcag

SEQ ID NO: 77021 - DNA, 124 bp, Glycine max
  Clone ID: PAT_MRT3847_40564C.1
atagcttctccacttgataatacaagaaaaaaaaagaccagcaggcaacactataagatctattgtggtggcccctaaatatgatcgcactggccgttgctctacaatcgacgtggctgggaac

SEQ ID NO: 77022 - DNA, 259 bp, Glycine max
  Clone ID: PAT_MRT3847_40565C.1
cgtcttttcggtactttagagcgattatatcataggaattgaataatgaatgttgttttaggttttagctctatggtctagtatgtcttctatcagtaataacgtttttttctgaatattaccagaatgggcgtgttgcatcctggatctaaggcgatattttacatcgattcccctgtgaagtcgctcaaaaataacgataagaccgctaatagactccaaaattccccaataaacttaaaaatgcgaaaaagtaaga

SEQ ID NO: 77023 - DNA, 475 bp, Glycine max
  Clone ID: PAT_MRT3847_40566C.1
aaacccaaaaacacttaatttgtaattttcctcttctcaatcttctcttgggtttctcttgccgtgagattgaacatccaccatatgccacaagttgtgtaaagagagagtgaaggatcaagcacatgcataagatagagcctgctgacagaagatagagagcatagctgaacatacccaacagggctttgtgtatgagcagttgttctctcttttcttctatcaacatatcagttcctggccggttggaaacactcactgaactctccaaactaaacttaattcttgaaaaaaaaatttagcatgcatggcagcaggcttaagttctcctctatttcccttaacctgcagttttatagtggtagattttctgatggtcgggtgattccagatttcataggtaagtatgctaagttgcctctaagcccaccatatctatttcctggttttcaaggatacgttcatggagtcattt

SEQ ID NO: 77024 - DNA, 222 bp, Glycine max
  Clone ID: PAT_MRT3847_40567C.1
tttttgaccaaaaatggaaatatcctaatccatgaaaatgcagggtcaaggcacatctgaattgatactgtttatttaaaaacacatgcccaactacagtactgtaaatctgtagatgtcccatgatgactgatctatcaccaaactgttccactgtagtgatcataaaggtattaaaggctaggctctttactgagcacatactggatcaaatgccacatg

SEQ ID NO: 77025 - DNA, 504 bp, Glycine max
  Clone ID: PAT_MRT3847_40568C.1
tttatctttggcattgacaacagatatgtgtagcaacagttcaacagatacggattccaacttggtaaaagatcattgacatacccaaattagttaagttttgataataagaaagttggaagctttgataagcccttctcctgcaggaagttgcttgtaaagtgcttactaaatctagagtctgattggcatgtaatagtcatgccactagacagattattgcattcgttttcctttcctgtcaatgaatataacacaataattggtgaagtactttatacacaaaacaagttgattttgcttgtcatgtgttacaagtgaactagtggcgccctttgtaacttgatatctttatttgtgtttacttttgatttaaatgcaaaattttatagtacacaatctcaaatgtactagcattgattgatagataatcccaaattgttcctttgagcccttttattttgattgctagtctgcaacgacactgcttatttgcagtaatta

SEQ ID NO: 77026 - DNA, 173 bp, Glycine max
  unsure (1)..(173): unsure at all n locations
  Clone ID: PAT_MRT3847_40569C.1
gtcgcangnncgcacgcgtacataagctcggaattcggctcnaggttcatacttttgttgtngttgtaaanangaaanangggnggccgccgantaatganctcggngacccgggaattaantnnggaccggnacctgcaggcngtaccagnttnccctananngagtcgtat

SEQ ID NO: 77027 - DNA, 1470 bp, Glycine max
  Clone ID: PAT_MRT3847_4056C.1
ctcgagccgattcggctcgagataccctctctctctctctcttcctctttgtcatggcatttctcttctcttccctttcgtaggttctttctctctctctcttttttgtaatataattcttcccgaattccaatcttgttcaaccatggattcagcatctttatgcctttagctgtattatcaatagcaatatttatgtacaaagtttatgtctttttgtgcaaattctgctttagtctcgtgaaattaataaactttcttggggtgttctgtatttatgcaggttaaaacttggaactttgtgatttttgaatgacccaacaactaaggttatgatcagttggaagcgttggcaaaaaagaatacgcaatagtggtgttgtttgttcattttggtcaaagaaatagtatctgggtacccaggatattgtagttttaagatgggttatctcaattcagttttgtcatcttcaagcgaggttcatgctgcaggtgatgcaattgcgagtggtggggggctaagtcacaatagaaaattcagctatgggtatgctagctctcctggcaagagatcttcaatgggagacttttatgagacaagaattgatggtgttgatggtgaagtcgttggccttttcggagtttttgatggtcatggtggtgctcgtgctgctgagtatgtcaagaaaaacctgtttagtaatttaatcagtcacccaaaattcatttctgacaccaaatcagcaataactgatgcatataatcataccgattctgagttgctgaaatcagaaaatatccataatagagatgctggatcaactgcttccactgctattttagttggtgaccgcttgcttgttgcaaatgttggggattccagagctgttatatgcagggttggtaatgccattgctgtttctcgagatcacaagcctgaccaaactgatgagaggcaaaggattgaagaagcaggaggctttgttatgtgggctggaacttggagagttggaggtgttcttgctgtttctcgtgcgtttggtgatagactcctgaagcagtatgttgttgctgatccagaaattcaggaagaaaaaattgacagctcccttgagtttcttattctggccagtgacgggctatgggatgttgtcacaaatgaggaagctgttgctatgattaaatcaattgaggatgctgaggaggcagcaaagaggctgatgcaagaagcatatcagagaggtagtgctgacaatatcacatgtgttgtcgttcgtttcttgatgaaccaaggtggatccaaagacaaagaggtagtagctcctcctcataatagtagctctgccagtaggaatccttcagtagaaggtttgtgtgataggtgagttgtggatccaaaagatgctgagacttggtaaaaaatcggtttatagtttggttccgtgataagcaatcttagtagttgtgttgg

SEQ ID NO: 77028 - DNA, 273 bp, Glycine max
  Clone ID: PAT_MRT3847_40570C.1
gatcactcctcttttatctgcgtcgctaccgtcgatggcgctctctgaggccagccacgactaggacactctcacctgttacagaaagtcaatcaaaaaatccctataccaatcgctagtaatgtgtgtaatgctaatgtcgtacaggctgagccatatgccacagaaactcagcagccgacctttgtatctgagtgcgatacagactattggtgtatcagggaagctgactcactgctctcaggacggaacctcccaggttagaaccacgca

SEQ ID NO: 77029 - DNA, 272 bp, Glycine max
  Clone ID: PAT_MRT3847_40571C.1
cacaaatgatggaacttcagtttcaagacaagatattgaaggaaaaagtatgtttggttctcttgctcaaggtataaacagtggactaaacatggagaacttgcagcaagttaattctgaacaaagagacatacctattgaagattttaatgggaggcaagaacttgctggatcttctgacacttcacaggacaaggtgttagcacaggttcctccttcacagaatgtggctaccctagatccaacagaagagaagattttatttggttcag

SEQ ID NO: 77030 - DNA, 303 bp, Glycine max
  Clone ID: PAT_MRT3847_40572C.1
actcccactcgtccgctgcggtaccgccgtggggtgctagcggctagcagaggcttaccttcatgacctgttgaacagtagaaggtgactcttactacagggacttgcgcgggaagcagtgtaaggccactctctacacctccttttgaagagaggaaaagagcgactctgatgatggccgcataactggttcatggagcctgtatagaacccgtgatagatctggctattcaaatcgatccaaggcctatctcttgcgcattagggggaacatccttggcctttgcatgcgtatcatgagca

SEQ ID NO: 77031 - DNA, 401 bp, Glycine max
  Clone ID: PAT_MRT3847_40573C.1
gttcaataaaaaaggacgaatcaaatgctaacatatgctattttgatgattcctcctatggtggagatcgatcaatatgtgtagttaacgtggatagttcaaatacggtgacttgaggtatgtattttatttttggccacttttcatctgcaggtgcgattgaatgcaaaactgaatgacccctaatttgcaactcattttggcaggtcatttcatgtatcgaacaggtgagctcccctcgctcacgttatttgcattcactggtgtgcagaaacaaatgtggctaacataggattttctaaatcaaattatttagatttggatctggtattggatgatggatccagttgagaagcgtctttttttcttcttttgcgcagactaacatatagaatagatct

SEQ ID NO: 77032 - DNA, 363 bp, Glycine max
  Clone ID: PAT_MRT3847_40574C.1
tggttcctctagacggccgccctgggttttttttttttttttttttgctcggggctgggcgcgtctttatttaacttgagtccctacggcttaagttcacgtactgataatacatcccctgccgaattgtgatctcccccagaagtgtagccaccaccacattcgtcagctagattttgggaggggggggaaaacacacactctagttatcattccttggtctccgccttgtggggcttcgtgcttctgccgtcatcccccaggcgccactttttcgcatgggagctggttcatgcgatcctgatcctcccctcccgttttgctggtaggacgtccccctcccgtgcctctgtctttgctgaa

SEQ ID NO: 77033 - DNA, 476 bp, Glycine max
  Clone ID: PAT_MRT3847_40575C.1
gatccccaaagtgaacaatccacaatgaaggggaattttattgtctgatcttagagtttgtagatagtttcttagctgctgttttgttgcattcttccccattccttgtgaattccaatggcatagtgcaattttatctagcattttgtgttaactaactgattgacgatgaattatgccatttccgttgctctgatatgtttttttattggatcgcatgtttttgcttagtttttttgtggtaggaccagagacagaaggtggtcgagaatcaccgtgtgctgctgagttcattgatcgaatttgttctctgaatcctcaatataactttgtataccatttctttttttaatttactgagcgagtgttgccttttatttttcagtgatcaagatgattatgaggttgtgcgaaaagtgggcaggggtaaatatagtgaagtttttgaaggcataaatgtcaatagcaatgagcgc

SEQ ID NO: 77034 - DNA, 259 bp, Glycine max
  unsure (1)..(259): unsure at all n locations
  Clone ID: PAT_MRT3847_40576C.1
ttcctttttttttcaaaaattttaatcttccccactcttattcattaagaaatttttttccattcatttaaccctcccccnccgcctttggatgaaccatatttttcaacaatacatctcaccaccctctaccctaataaatttaatatttgtcaatccaaaatttaaatagtacgtctttctactctttctaataacatctaatcaatgctcaacaaaactgtcttgtttctcttgtccagattctacatattacatt

SEQ ID NO: 77035 - DNA, 637 bp, Glycine max
  Clone ID: PAT_MRT3847_40577C.1
gtggccccttattttatcttggagttcggattctgtttcacaagaaagatacatgagacgccaagtggacgccgaagaccaccagctaagggtgttatacgagctatgttccctcatcattcacactctcaagtttcctccgttaccctacccttttcccacctcgtacccatgttcttcttctcgcgcttcttcgtctttgtcgcattctaggagacatcactggtggacaacgttggctacctcccaggattccccggcagcattcgcgtcgctgtttctgggcatgtccctgtccctcatgcttctcggggcggtcacgttcctcgttgggttgctgctgctgccttgggttactcttctggtgctggttttctatgttgctgcacttgtctccaatttgtctgtgttgggccgtttcattcttgggtccatcacgttgcagagggatcttccacatgaggctaatatataccgctgaagctttaggagggaaaagaaattgtccgagacattgaggttaggtagcagatcacaaatacatatgtcatgataaataataagtgaatctggttgagattttgatgacttcatttgcttgcaataaaatgaacgatttcatctttttgctcgtttc

SEQ ID NO: 77036 - DNA, 381 bp, Glycine max
  unsure (1)..(381): unsure at all n locations
  Clone ID: PAT_MRT3847_40578C.1
gaaccactcatgtttgagtattggggaagtggctccagacatccttctggacttgacctggtttctggattcatgaacgggatgtatccgagcaacaggatgtacagccaatatggaaacacattcaggcctaattctcatttcggatctgctgcgtatggatctagaatgggctctttcgatagcaaacataatggttaagannntggctgcngncttnatctttttataaatgtatgtagggcctcagttagttataataggtgcccatagcttgccagagttcttgtattttaaacatgaatagttttggacctgttatatttttacacatgggacataaccttccatcttttatttgaccactaagaagtttctttt

SEQ ID NO: 77037 - DNA, 237 bp, Glycine max
  unsure (1)..(237): unsure at all n locations
  Clone ID: PAT_MRT3847_40579C.1
acatncaatgcatcatattcaggtttggcaaacaagattataataacgtggagctgcatatagtactagtactaccctacataatcccaatcttgaagaaaacttttttaaaaagcatacattctatattttgtgttttgctataccgtatcttttgtctcagcagacactaaccagaccttttgtttcaattttgactagataactttttaaattggagatttaaacgatcacaac

SEQ ID NO: 77038 - DNA, 1535 bp, Glycine max
  Clone ID: PAT_MRT3847_4057C.1
ctaaaatcaaacagaatacaataccctctctctctctctctctctcatagattatttctcttctcttccctttcttaggttaaaagttggaactgagtgattacccaactaatgttatgatcagttggaagcgttggcaagaaagaatacgtaatagtggtgttgtttgttcattttggtcaaagaaatagtatctgggtacccaggatattgtagttgtaagatgggttatctcaattcagttttgtcatcttcaagccaggttcatgttgcagatgatgcaattgtgagcggcgggggtctaagtcacaatggaaaattcagctacgggtatgctagctctcctggcaagagatcttcaatggaagatttttatgagacaagaattgatggtgttgaaggtgaaattgttggccttttcggagtttttgatggtcatggtggtgctcgtgctgctgagtatgtcaagaaaaacctgtttagtaatttgatcagtcacccaaaattcatttctgacaccaaatcagcaataactgatgcatacaatcatactgacactgagttgctgaaatcagaaaatagccataacagagatgcaggatcaactgcttccactgctattttagttggtgaccgcttgcttgttgcaaatgttggggattccagagctgttatatgcaggggtggtaatgccattgctgtttctcgagatcacaaaccagaccaaactgatgagaggcaaaggattgaagaagcaggaggctttgttatgtgggcaggaacttggagagttggaggtgttcttgctgtttctcgtgcatttggtgatagactcctgaagcagtatgttgttgctgatccagaaattcaggaagaaaaagttgacagctcccttgagtttcttattctggccagtgacgggctatgggatgttgtctctaatgaggaagctgttgctatgataaagccaattgaggatgcagaggaggcagcaaagaggctgatgcaagaagcatatcagagaggtagtgctgacaatatcacatgtgttgttgttcgtttcttgatgaaccaaggtggatccaaagagttagtagcttatcctcataatagtagctctgcgggtaagaatccttcagtagaaggtttgtgtgatatataggtataggtgagttgtggatccaaaagatgctgagacttggtaaaaatcggtttatagttgggttcctgataagcaatctagtagttgtgttgtactacgtcatgcaagaatttatggtcctcttgcataaaactattcattatttgttagctaggaaatgtatgtaaggagtgtgaccagagttctcattgcacctgctctgcatgtaaacatggttcttttattagtccatttaatttccttagggttattagtttattcagtactatttgtctattgtgaattgtggcttgtattaagtgtaatatataaatataaggaacactgattttttttcccccaaaaaaaaaaaaaaaaaaaaaagggcggccgc

SEQ ID NO: 77039 - DNA, 373 bp, Glycine max
  unsure (1)..(373): unsure at all n locations
  Clone ID: PAT_MRT3847_40580C.1
ctctgggggggggggacgctttttttttttttgaacatttttgtttaatttttgaaacataaaaacgcggtaattttatttaaacaacatgaatattcaaaaaaacccttgaacttctttgaaacgtggggtttaaaagaaagtggtttgcgaaataagcccactggaaaaatcatttttggacaaataaaagtcccgaatctggnggcccgggttagaactgggtgaaattaaaaaatcaaaaggcggggcccctccgtcgttgttctgggggggggacttgtcctgcggggaccccggggcagtacccttttttaggggtttgttttatacaccgtttttttttttttttttttttttaaaaagttttttt

SEQ ID NO: 77040 - DNA, 552 bp, Glycine max
  Clone ID: PAT_MRT3847_40581C.1
ggcaagccgacacattggcatctatgtgaactccatcaagtccgtcaaaacggcgccgtgggggtttgccaacgggcaagtagcgcagattctcattacctataacgccgacacgagcctcttagtcgcttctttggtccacccctcacggaaaacgagttatatcctctctgagacagtgagcttgaagagcaatcttcccgaatgggtgaatgttgggttctctgccaccaccggggcgaataaaggcttcgctgaaacccatgacgtgttttcttggtcttttgcttccaagttgtcagatggtagcaccagtgatactttggatcttgcaagctttctgctcaatgaggccatctagcttccaacgtcgtaagtagttaaatgtggcaaaaaaaaaagggtaaataaataacgctctagcttgctaaaggctctactaataatgtttatctgtcccaaaaattatcgtaatttgaaataataataggttttttactccatcatactggtgctactaaatataataatgtttatccaagcgttttcccc

SEQ ID NO: 77041 - DNA, 2240 bp, Glycine max
  unsure (1)..(2240): unsure at all n locations
  Clone ID: PAT_MRT3847_40582C.1
cccacccggctcgagaccaaatcatattaagccatggccacctccaacttctcaattgttctctctctctccctagccttctttctagtgctactcaccaaggcaaactcaaccaacaccgtttctttcaccgtcagcaagttttccccacgccaacaaaaccttatcttccaaggagatgctgctatctcaccctccggggtgttacgactcaccaaggttgacagcatcgacgtgccaacgacgggatccctaggacgtgccctttatgctaccccaatccagatttgggacagtgaaacaggcaaggtagctagctgggctacatcgtttaaattcaaagttttctcgcccaacaagacggccgacgggcttgccttcttcttggcgcccgtcgggtccaagccccaatccaaaggagggttccttggtcttttcaatagtgactcaaagaacaagtcagtccaaaccgtggcggttgagttcgatacttattataacgcaaagtgggacccggcaaaccgacacattggcatncgacgtgaactccatcaagtccgtcaaacggcgtcgtgggggttggccaacgggcaaatagcacagattctcattacctatgacgccgacacgagcctcttagtcgcttctttgatccacgttattttctgaagtctggtgtgtatttgcggcaaggtttggctccaacaagagaaacgagcaatcatatggtatttgatttttagggtggaagaaaaatcagagtgagagaaaaaatcgatggagatggaagtagacatcgagaagaagcaacaagacgtggtgaaagagaaagacttgttcaaagctgcagaagagggcgaggcatcaacgttcgaagctctctcttctgaaatcctctccaaagccctctctctcagaaacgaagacgctcgttcccttctccacgtcgcagcttcttccggtcactcccaggtagtgaagatagtgttgtcttgtgatgcatctgctggtgtggtgaattgtgctgatgaggaagggtgggcgccgcttcactctgcagccagcattgggagtgtggagatagtggagactctattgagcaaaggagctgatgttaatctgaaaaataatgggggtcgtgctgctctacactatgcggccagcaaaggttgggtgaagattgctgaattgctcatctcacatgatcccacgattactataaagtactatctcgttccactccattgcatcgagtagctcgcactgggaaatctgagctgtgtgaacttttgattgcagaaagagaagaggttcatgctgttgatagcgctggtcacactccactaatgaatactgcgatttgctgtaaaaaacaggtagcccagcttgtgataatacatggggcagatgcggatttggaggacaaggaagggtacacggtgcttggtcgagccacgcatgagtttagaccaatattaattgatgctgccaaggccatgcttgagtgatcattcaattataagaaaatgagaaaattgtcaggacaggaatgtggaaagagagcagaattgtggtagttatttcgcaatgccttaatggtggttacgttcttgacaaattatgttgctcaggcaaaaagttcatctatacccttatgttcttagttgtcaaaccagtttgttttgggtatttttgtgccagctttaaattaaatcaggaagattagaatttttgttttgataatcccctaaattagcaattcagattgtataagtcaaaacattttaattctagagattttaagaactctccgttagttgattttataagaaatggttcattttacttttatatcctctctgagacagtgagcttgaagagtaatcttccagaatgggtgaatatttggttctctgccaccaccgggttgaataaaggcttcgttgaaacccatgacgtgttttcttggtcttttgcttccaagttgtcagatggtagcaccagtgatactttggatcttccaagctttctgctcaatgaggccatctagcttccaacgtcgtaagtagttaaatgtgacagaagaataacaactaaatagcgctctagcttgctagaggctagtactactaataatgtttatctgtcacaaaaattatcgtaatttgaaataataattggttttttactccatcatactaaatataatgtttatccaagcgatctacactatttaaaaa

SEQ ID NO: 77042 - DNA, 239 bp, Glycine max
  Clone ID: PAT_MRT3847_40583C.1
ggcgacccgcaccgaccctcacacattcgtatcatttctaaaaaaccttctatatagacaaccagttaaccttaattgaagcgctttttaaatattccacttcaactaccaaaccctatatttttaaccttcccataatttcaataaactattaatcgttcaactttggaaaatttcaaactccttttcaccacattcaaaaaactaaatattttttctcatacccctttttaaaaatc

SEQ ID NO: 77043 - DNA, 304 bp, Glycine max
  unsure (1)..(304): unsure at all n locations
  Clone ID: PAT_MRT3847_40584C.1
atcgctcattcgtccgggngaagggganggaagaacagccaactcaaaggcaccacacgccccaaccagncaccggagnnagnangccacagaaggcggcacncagccaaagacgacagcacgaaaaccggccaccgggagcaccagccccacccagaaccggaccccccaaccggccagaacgcccgcaccacccggaccaaacccgaacaccaaaaacagccgggcgacgaaccccccccaagagaccgcacccgacgagaccgccccagaggaagacccccacgcccccaagaaggaacaa

SEQ ID NO: 77044 - DNA, 232 bp, Glycine max
  Clone ID: PAT_MRT3847_40585C.1
gtgtctatctaatcaaactgcttggatgtccacgccgggaaaggcgccccataagcagctggcgactaaggcggatcgcaagtcggctccggcgaccggcggcgttaataagcagcacaaattcaggcccgaaaccgtggcgctgctcgagatccagaatattcagagaagcacggctactttgatggcgaagcttccggaaaatcagtcgatcacagagatagagctagaa

SEQ ID NO: 77045 - DNA, 631 bp, Glycine max
  unsure (1)..(631): unsure at all n locations
  Clone ID: PAT_MRT3847_40586C.1
ccgcaacaatgcaaatgaacagaatgaacagagaagaacatctttatactgccttccaatactttgataaagataacagtgggtttattaccactgaagaactagaacaagccctccgtgagtataacatgcatgatggcagggacatcaaggaaatccttcaagaagttgatggagataatgatggacgcattaactatgatgagtttgcggcaatgatgagaaaaggaaatccagaagttatgacaaaaaaaaggcgtgattcattgccattgccatagaggggggactctaaaggaaggaacaaaagggctcatcagttatagtggttttcttcggtggagaagctgatgggtgaatgaaagaatgatcatggattgcactgcatcgtagctttgctggttgggaggggatacagatgaggaatgggacaagggtggaatcaaaaaccaagaaaagagggaaagtgggaggggggaaggaagaacataaacaaatctttgagaaatgttaagatacactaggtggtttggttgattaacattntttttcttttgcttttttcttacctgtgaaaaccttgtacatgtcatgtattgatattgtggctcacataactaggaaataaaca

SEQ ID NO: 77046 - DNA, 1383 bp, Glycine max
  Clone ID: PAT_MRT3847_40587C.1
gagaagctgagcgtgaaatgcaaaaaagaagagaagaaagtgacaaaatcccagtaaagcgtgacagtgccagctccctacctcaaccccaaagtcttgtgcttttcacatccccattttccccattcccctttctgcttcctctttctttcgccaaatgggtcatcatctccttctcccataacacaatcttcttcaccttttctttcttcttcgcttcccttcggtggggtttcaagtttcaccataggaataggatgttttctaggttgattcatccccatgaaggccaggaagacatgcagggtggttccaaccacgctcacctcggagacccttgtcttgttctcacctctgatcccaaacctcgtcttcgttggaccgctgaccttcacgaacgctttgttgatgctgtcactcaacttgggggtgccagtaaagccactccaaaagcgataatgaggaccatgaatgtcaagggtttgacgctctatcatttgaagagtcatcttcagaagtacaggcttggtaagcaatcaggaaaagattctgatgagggactcaaagatgcttcatatcttcaagaaagccctggtactgataactcttctccaaagttaccagcttctgatgctaacgagggtcatgaagtcaaggaggcattaagagctcagatggaagtgcaaagtaaactacacttactagtggaggcagagaagcacttgcaaattcgccaggatgcagagcggagatacatgggcatgcttgagcgagcgtgtaagatgttggcagatcaatttattggggatgtaattatcgacagggatggccaaaaatttcaaggactggaaaacaaaacatcaagaagtcccctagttgatcatggaggcttttttcccgcagcgtgtactgaggtgggtggaatgcatgtttcagaagtaccacccattctccagcctcaaggggctgagtgctccagtgaaagttgcctaaaatcacttgagagtctgggagggttgacactagaaggatctcccggcggatcaaagaagaggatgctgaacttggactcaatggtagcacctttgatctggagcgaagccaacaccagaactcaaggaatccatttagcccaagttaatcctccaggaatgactaggtatggcatgtaggtaggatagggaaggctagttcctcatgaagagagttgaggacattgtgctttgttccaagcttttaggatgaagtaccgagttagattcttatctgttcttgcccatcaagttggtgggaatcaacttgtctcacatctttgtgtaaattgaaaatactatgtggcttaacttggactatcactactaaaggttggcgctgaccattgac

SEQ ID NO: 77047 - DNA, 630 bp, Glycine max
  unsure (1)..(630): unsure at all n locations
  Clone ID: PAT_MRT3847_40588C.1
tttttccttttctagagagagaaaactgaaattagcatagaatgagaattagcttacaagagagtgggttattacagtctatacagtcggttacaagagtaacaaacttgtaactaattaagctaactaaactaactttagtaacaaagtaatcaatctgaattaaccattatcaaactatatctatgctaagaatggccaaagaaattccttacattttcatggctccctcctcctcattcccacatatgtttatatgactgtattctcttcctcatcttcgtaattaaaaggcaggggtactgatttgaatgctcgatagttgccgacattgttcaagtgctcattctccaacctgaaaaaattccatatgccacggcgaaggatctccaagcaagttactagagcagtcaaagctgttctatgcaggataggagtttccctaatgcctaaaacagattgcatccatgcaagtcgcagtataacattcaacaccatagcaacaaaatatacattnnttgtttggtacaagagagtttttctctcaaccatggatttctgaattccttctcagcaaaccccaatctatgacaatatcccaatatgtattaacaatcgttgcaatgcctg

SEQ ID NO: 77048 - DNA, 1327 bp, Glycine max
  Clone ID: PAT_MRT3847_40589C.1
ccacgcgtccgatctccttctcccataacacaatcttcttcaccttttctttcttcttcgcttcccttcggtggggtttcaagtttcaccataggaataggatgttttctaggttgattcatccccatgaaggccaggaagacatgcagggtggttccaaccacgctcacctcggagacccttgtcttgttctcacctctgatcccaaacctcgtcttcgttggaccgctgaccttcacgaacgctttgttgatgctgtcactcaacttgggggtgccagtaaagccactccaaaagcgataatgaggaccatgaatgtcaagggtttgacgctctatcatttgaagagtcatcttcagaagtacaggcttggtaagcaatcaggaaaagattctgatgagggactcaaagatggaatgtcagcttcatatcttcaagaaagccctggtactgataactcttctccaaagttaccagcttctgatgctaacgagggtcatgaagtcaaggaggcattaagagctcagatggaagtgcaaagtaaactacacttactagtggaggcagagaaacacttgcagattcgccaggatgcagagcggagatacatgggcatgcttgagcgagcgtgtaagatgttggcagatcaatttattggggatgtaactatcgacagggatggccaaaaatttcaagggctggaaagcaaaacatccagaagttccctagttgatcacgttggcttttatccccaagcgtgtactgaggtcggcggaatgcatgcttcagtagtatcacctattcttcaacctcaaggggctgactgtttcactgaaagttgcctaacatcacttgagagtctgggagggttgacactagaaggatctcctggcggatcgaagaagaggatgctgaacttggactcgatggtagcacctttgatctggagtgaagccaacaccagaactcaaggaattcatttagccaaagttaatccttcaggaatgactaggtacggcatgtaggtagggtagggaaggttagttcctcatgaagagagttcatgacattgtgctttgtcccaagcttttaggattaagtactgagtagggaaggttagctcctcatgaagagagttcatgacattgtgctttgccccaagcttttaggattaagtactgagttagattattatcggttgttgtccattaagttggtgagaatcaacttatctcacatcattgtgtaaattgaaatactatatggcttaacttggcccgtcactaaatgttggcgctgaccatttatgatcattgccttgattttc

SEQ ID NO: 77049 - DNA, 1038 bp, Glycine max
  Clone ID: PAT_MRT3847_4058C.1
tcggctcgagcttgttctttatgtttcccattgcatttgctgatcttagggttggattctatagctctagctgcccaagagcagagcaaattgtgggtcaagttgttcagaggagattcaaccgtgatagatctattactgctgccttgcttcgcatgcacttccatgactgctttgtcagaggctgtgacgcgtccatattaatagactcaaccaggggcaatcaatctgaaaaagctgcaggagcaaacggcaccgttcggggatacgagctaatagacgaaataaaaaaagccttagaaagagaatgtccatcaacggtttcatgcgccgatataatcaccctggccacacgtgattccgtgttcctagcacatgggctcaaatacgacgtcgcaacgggaaggcgtgacggacacgtgtcgcaatcctccgaagtgaacctgccggggccacgatccactgtgtcgcgggtgttggaagtcttcagcgcaaacggcatgtcgttggacgaaatggttactctcttgggggcccacaccgtaggttttacgcactgcagtttcttccgagacaggctcaacgaccccaacatggacccttctttgcgggccgggttgggccggacttgcaacaggcccaacagtgacccaagggcgtttttggaccaaaacgtgtcgtcgtcgatggtgttcgacaatgcgttttacaagcagattgttttgaggagaggggtgcttttcatcgaccagcaattggccttggacactttgtcgaaagggttggtcacagtttttgcggggaataatgcggcttttcaaaggagttttgcagatgctatggtgaagatggggaacattaaggttttggtagggaatgagggagagattaggagaaattgtagggtttttaacagtgcttcctaataatcacagaatgatttcattggtgtttcaattgagattaattgctcatatatgtgttaatgtgcactacttgtgcagggattttgatttgaataaaaatgcattcatatcc

SEQ ID NO: 77050 - DNA, 635 bp, Glycine max
  Clone ID: PAT_MRT3847_40590C.1
cacgcgtccggcagagagcggcaaatgcaaaaaaggaagagaagaaaggaaaagcagcagaaagtgacaaaatcccagtaaagagtgacagtgccagctccctcaagccaaagtcttgtgcttttcacatccccattttcccatttccctttctgcttcctctttcgccaaatgggtctcccataacacaatcttcaccttttttttttcctctttctttcttcttcgcttctcggtggggcttcaagtttcaccataggatgttttctaggttgatacatcctcatgaagggcaggaagacatgcagggtggctccaatcacgctcacctcggagacccttgtcttgttttaacctccgatcccaaacctcgtcttcgttggaccgctgaccttcatgaacgctttgttgatgctgtcactcaacttgggggtgccagtaaagccactccaaaagcaatcatgaggaccatgaatgtcaagggtttgacgctctatcatttgaagagtcatcttcagaagtacaggctaggtaagcaatcaggaaaagattctgatgagggatgcaaagatgcttcatatcttgaagaaagccctgagactgataactcttctgcgaaggtaccagatgctggc

SEQ ID NO: 77051 - DNA, 745 bp, Glycine max
  Clone ID: PAT_MRT3847_40591C.1
caagtgataggttgcaaatatgggatggtggggagagtgatgctagaactccaactatggggagtgatttggatgaagatttgatggctttacgtgtagatgatggtagtgaaagtttgactcaactccaacctctgaaagcacccaagaaatcaaagaggcagggagagaccatatgcaaaggacacaaaaattatgagcttatgcttaatttgcagctgggaatcaggcattctgttgcaaggcctgctccaacagcatcacttgatctcaagccttcagcttttgaccctaaggagaaagtgtggacaagatttccacccgaaggatccaaatacactccaccacatccatcatgtgactttaagtggaaggactactgcccggtagtttttagaactcttaggaagctattcaaggtggatccagctgattacatgttatccatatgtggaaatgatgcccttcgtgaactttcctctcctggaaaaagtggtagcttcttttacttaacccatgacgaccgttacatgattaagacaatgaagaaagctgaagtgaaagttctattgagaatgcttccagcctattacaataattttcgagaccaacaaaacactcttttgacaaagtattatggcctgcattgtgtaaagttaaatggacctattcagaagaaggttcggtttatcataatgggcaacctcttctgttctgagtatatcacccacagacgctacgattt

SEQ ID NO: 77052 - DNA, 647 bp, Glycine max
  unsure (1)..(647): unsure at all n locations
  Clone ID: PAT_MRT3847_40592C.1
ggcgccacgcgtccgagatgagtaacatcaccatctcggatctgtgtccctcctttgaggcaaaagtgatgagttgcatggtgcggctgcttccaacctctctcacgcgtccgctttttttttttttttcctcttaacggctgctccccttcccggtggggcttcaagtctcaccataggatgttttctaggttgatacatcctcatgaagggcaggaagacatgcagggtggctccaatcacgctcacctcggagacccttgtcttgttttaacctccgatcccaaacctcctctgtttcagtccgctgaccttcatgaacgctttgttgatgctgtcactcaacttgggggtgccagtaaagccactccaaaagcaatcatgaggaccatgaatgtcaagggtttgacgctctatcatttgaagagtcatcttcagaagtacaggctaggtgagcaattcggaaaagattctgatgagggatgccaagatggaatgtcagcttcatttcttcaagaaagccctggtgctgataactcttctccaaagttccccggtgctcacgaggggtctgaagtcaagggggcctttttgagccccgttgggagggcaaagtnaacttcccttactagggggggcggggaagc

SEQ ID NO: 77053 - DNA, 313 bp, Glycine max
  Clone ID: PAT_MRT3847_40593C.1
tttgattacggctgttgacaccatgaatatggaggctcttaccctcatgctggtgcagtgtgaagcgatccaggaaaacgtagtatcgccatttccacaggaggaatttcttacagcgcggccaactcatgtacgtcctgcaccaactgtgatggctgatgggtatacatattggtatgctctggtgcatgataggtgactgcctacgacaccacgcgattatggcaacaacgttaatatggctaccataaacaatctgagagcctataggctcaactctgcaatctcaggaactcgtctctagaacaccatt

SEQ ID NO: 77054 - DNA, 575 bp, Glycine max
  Clone ID: PAT_MRT3847_40594C.1
caaaaaaaaaaaaaaaaaattttgttttaaacacaaaaataatttttacattgttagggaaaacggggaaatagggcatgtttttttttttcataacaacaacactttaaattgaaaagtggggggcattgaaggaaacaaaaggttacacacacgggggaaaattaatggtttttttttggacattttggaggggggttttttaaaaaatttagcagttaccgggggggtaataaaataaggagtgtaaggttgggggttgtattaaaccagttttaaaaaaaaaagggcacctttggaattttggagaaggttaataaaatccctgaaaaaaagaacttgggtataatagggggaaattcttaaaggaaaccggggataaaaaaaatccaaatggatggaaaggtttactcttttagacccttttcttaaaattaggttttcaaaaaaggggaaatttttaaaaaaaaggggtttttaaaaatggtttaccccaaatttttggggtgggaaaagcttttttttttggttaaaaaagggggggggggttttctcttaaaaatttttgggggggg

SEQ ID NO: 77055 - DNA, 120 bp, Glycine max
  Clone ID: PAT_MRT3847_40595C.1
aaatacttgggcgttggtgcacatgcttgcttagttaattttatctggagacaacatgctctctgcgaaaacaatcttaactagcagagatttggacatccaggtcgttctctccccatt

SEQ ID NO: 77056 - DNA, 313 bp, Glycine max
  unsure (1)..(313): unsure at all n locations
  Clone ID: PAT_MRT3847_40596C.1
natcgcgtgcncgcntncgtngtctcggnattcggctcgagaagcncngtcacntggtgagtnngnnattanntganctnnagcntncntcannangtgagncccctgtganacaancctgatggctccnntgnnggtngannncntggananagccggnntatgtcncnncgtgtcnntgcccgnctngtgtggctttanntanactccgtataanacccttagcnangtanatcnctnggtgcaanttcaanntttttanggggngttanggggggntgcntngaannancantagttggnnngttgnccg

SEQ ID NO: 77057 - DNA, 339 bp, Glycine max
  Clone ID: PAT_MRT3847_40597C.1
aaaatgagactgtagaatttctaggtattaagtaatactatatatttcataaataaaatctcatgtcatgagaggcatgtataagcatggaaacccattttttcttccgaccttttttagcactagagatatttcaaaatttgaataataagtcatattgtgcctgcagtgtgataagttttatagaaaactgaaatatcaaatatgtactgtacaaatagtttgtcatatatcgtgggttttacttgtattgttacaatacattatcatcatcatttatatcatcctatttaaaattaacaaaaaaaaaaaaaagggcgaccgccgaataatgagctc

SEQ ID NO: 77058 - DNA, 216 bp, Glycine max
  Clone ID: PAT_MRT3847_40598C.1
taccggtccggattcccgggtcgactccacgcgtccgcttgcatgcttggcggcccatccgtcactaaccggttggcagtatcaacgcacgggggatcactcgtattgaatgctgccaaagctttcaaaccacaaaaggtcacttatatacaattacattaatggtaacaattgaacgaggaactacatcttcgccactgcgaaaaccgctgctgt

SEQ ID NO: 77059 - DNA, 684 bp, Glycine max
  unsure (1)..(684): unsure at all n locations
  Clone ID: PAT_MRT3847_40599C.1
catttnnnnnaggattttacttataagagagaccagattagctgtgaaagtcaaatgatcgttattgtatattacgtatattactgcaagtgatacgcaatagtcttacagtggcttgattgtatgatttcatgtagcagaggagatttaccggcttcaatgaatcagtaaggtccacaatatcaaggttagcctgtttccctagggagagaaaatagttgaaagtttcaatattccggataacatatgcaatataagccaccggtgcttcctttgacaggctactactaccatcattataaattgctttgcatccaccatcagatttgtcaatagcatattcatgattatgttcaccattctcatgttcaatgtttggagagtggcccttgcagcttgcatgctgtctgcaagagcccaaattcgtctgattcaaaagcatggcaagtactctaacaagatgtggcaggcaaactggatcatatatcacatcagcacccaaaacaacatctggcatgatatcaggatggtgactttctgacgaacaaatccatggcagatgcaagcataaaaccattcttaggagcttttgtttctttgcagcatgtcatcttcaaattcaggtgatttcattccaattaacttcatgttagctaaagttgataggtcaccatcacttaatat

SEQ ID NO: 77060 - DNA, 184 bp, Glycine max
  Clone ID: PAT_MRT3847_4059C.1
actaacttgggaccaaaacaaacattttaatttccccctatatatcaaaaaggtcatggggtgaattggcccccaccctttcttttatctttgatacggccaaagatctatcattaaacccttggtggtccaacccccagccccccaaggcgcgaaaaacccttgatcccccattttttgggct

SEQ ID NO: 77061 - DNA, 728 bp, Glycine max
  Clone ID: PAT_MRT3847_405C.1
ccacgcgtccggtagatttcaacttctacagtatgcaatttcctgaaatttgttagtgtgaactttattttttaaaacaattcaagttccaggtcacatattgagctataaaagattgacacttaaagaaaagattatgatattttaacacattacaaactttgacatccccaagcagtaatctttggatatgaaaatattaattatgatatttaacactcagatgattttaaaatgttttatgcatgcaaaatatatctcatatttctgtgtcgagagcatgcttttttttttttttttaaatagacataaaaacatacacatttctataattattattttttagtatatatgatgatgccttgtctccttatattttgaaatctgttgtcagttgtcacattatgttatataggggcttatagacagtgtccatgtctatgcttcataaatgctatacttttgctgattcatttggatctattcatcaaatcttcagtttcaaatcattaccaatgcaagaactctgctgggtattatattcaagctcattcactattcacattcattatttgtacaaattaaaccaagccgtggtttaagagaccaagactaagtatcttcctagtaactcagttcattttgactttagccattaaaagtttccttagacttagtatttttccctctctcaaaggatttcagggggttgacatttatcatatact

SEQ ID NO: 77062 - DNA, 300 bp, Glycine max
  Clone ID: PAT_MRT3847_40600C.1
gggggggggggtttttttttttccaaacaaaaaaaaaagttcaaaaactttttttggggaataaagggtccggctttttccaggaaacatgggaagggtgttattttcacgggaaccttttttttttgaaggaagggggaaaagggaaaaaagggaaaaagaaatttttcgccaaaattggggggaaaattaaagggggcctttccaagggttgggacaccatgtacccgggccttaatttttttggaggaaattttgggggggtttaaagggaaagaaatccccaaggtggcccctttt

SEQ ID NO: 77063 - DNA, 772 bp, Glycine max
  Clone ID: PAT_MRT3847_40601C.1
gcacgagaagtcttgtttgctgctttgaattatgctccggtctatctgtcaatcgggggtagtcaacaaggaggttctgatagcaaactcggtaactcactctgatgatcccttattttggtcttggaattggaatagatctctctttgtttggaaagatgagcaaatggcagatttggcagaagaatttctggcacaaggcttacaaccggtagcccagattcttagaggtggaacccggatgaaggaaatggatgctctgtggcatcagcttacaagcatctatctgttggaacacaataagctcgacctcaatttgcagaacccaccattgttgtcttccaagttttgggagagcaaagcaccatccaaggttttggttttctcgtggagattgctacaacacaagctcccttgtgatcaactatataagaggggatacagattcaaaacatcgatacctcatgttacttctgcaatcatagcatggaaaacatgaaacatttgtttctatcatgctccaaaatatcgcagatttggtatcatgtttgtcggtggatgggagtggatgtgttcttaccgcaagatatctcacaactttacaatcaatttggtctattcaacagaggaaggaggaacaacaaatggagatatcttatgtgacacgcaacctgttggagtgtaaggttttggaggaatagtattgtatttagagaccaaccttttgacacaggagggattctgaatcttatcaagtccatatcctgacagt

SEQ ID NO: 77064 - DNA, 361 bp, Glycine max
  Clone ID: PAT_MRT3847_40602C.1
gtaatgcaaccgcagaattgcaccatcaaagcgggcgtttgtgcgcagaacggggagggtggaccaacacagtcatgggcaaggccatggggacaggaagggcggaaaggaaccgtaacaccaactgtccttggggacatggcgatcactgtcatggagggtgtctcaagcaagggctacagacaggaagctgcaaacgatgggacacagcatgcataccactgaatgcgaatgagctcatagtgcttgcaggcctaggactgactgtgttcatgaagaaacccatcctgttgcccgacatggggaatcgtgtgacagaaactacatgcgaggaccgaggggtacgtgcccaatggaccac

SEQ ID NO: 77065 - DNA, 290 bp, Glycine max
  Clone ID: PAT_MRT3847_40603C.1
aattcggctcgaggtaaacttcgttcatattatggctgtcttttgtgatggtgggataggggcagatatttattatatgtagagaacgggtcaagttttttggccaattttgtcttaggcacaactgccaagtgttttatcagttgtgaacaaagtcttattttgtgttgctaacggctatggatgtaagcacttgaaattattcatattttgctactcattgtgcatgcaaatcttcaacattttaaaaaaaaaaaagggggggcccccaaccatggtcctcgtccccc

SEQ ID NO: 77066 - DNA, 395 bp, Glycine max
  Clone ID: PAT_MRT3847_40604C.1
aacaaaaaaaacgggacccaagaaacgggaaggacccaaaaacataagccaaaaggggtaaaatcccgggatcctgaggccggttaaaaaaggggtcccccagggggaaaaagggccccccaaaagaaagaggaccctcatgccagcctggggatttcacaaagggggccccaaccttaaggttagccaaggaaaaaaaaatccgggattgatttgccattttatgaaaggggggcaattgccctctaaccccaaaaactgggctcttttcaagggggggccggaaaaccaaaggatcggggtataaaaaaaacccttatttatccaacttttccatttccaaccccaaaaggccccaacggggtctatttacccgggcccccacccaatttagc

SEQ ID NO: 77067 - DNA, 158 bp, Glycine max
  Clone ID: PAT_MRT3847_40605C.1
aaacacccttgtgtttatattataatatttgtccccttaataaactatttgaacaaaagaaccgaatgccactgtgcaaccctttgacttactttggaaaaatagaactagtgaattttgtcacattatcaaattagaggacagatggaatactccct

SEQ ID NO: 77068 - DNA, 126 bp, Glycine max
  unsure (1)..(126): unsure at all n locations
  Clone ID: PAT_MRT3847_40606C.1
gattatgtggaagnnagntcncctgantccnaccaccaccacctatnnnggatcctttcacctgnngtttgcttacnctccctntacgtcacngatngattgcgaaacgcaaccctccacacaaca

SEQ ID NO: 77069 - DNA, 210 bp, Glycine max
  Clone ID: PAT_MRT3847_40607C.1
aattcggctcgagctcaaatatatctatcgttgctaacacacaaagtctaacttacattacgccacgtttacaacaaagctggcaatacccacctccttgtattttcatatttcaaatctcacatacctaacatttacttatactcctattacacccaaaagcatggattcattaccctcacactcatgccatggtctagaagtctatgt

SEQ ID NO: 77070 - DNA, 685 bp, Glycine max
  Clone ID: PAT_MRT3847_40608C.1
atttgttagaggagaggaagcatgtgggtgcctggtgggatgacattagcagtagaccatcatggaacaaggtatgaaaccaaatttattgaagagattgtcgagaaggtctataaaaagatacctcctaaagcattatacaccaatcaaaaccctgttgaacttggcgcccgcataaaagaagtaatgtcacttctagacatgaaatactggtgataatgtactcatgttgggcatatatggacttggtggtatcggaaatacagaacttgccaaagctttgtaggacaacattgtgcaagactttgatgctgcaagttttcttgccgatgttagagagaaatcactactagaataagccttttctaagtcggtcgattagacccttctaatcgatgttaatcaaacaaaatcaatggcctggaagatctacagaagacccttcttttagagatgcaagaggagttagaaactgaattggggggcagtaaaagtaaaagaatgtatgaaataaaacgcaagcttcgccgaaagaaagttcctttggttcttgatgatgttgatgacaaagacaagttagaaaagctggcaggagggtgtgattgctttggttcaggtagtaagatcattataacaacaagagacagatgtactaattgcttatcaagttgaaaaaatttatcaa

SEQ ID NO: 77071 - DNA, 562 bp, Glycine max
  Clone ID: PAT_MRT3847_40609C.1
ctcacgcgtccgcccacgcgtctacgcacccgcccgtttgagcgctaaaatgcaagagactcacattgttctcgggattgcctcggtgtgctctctgttggctatcatcgccacagtcgtcactctgccatctctgtactcggagatgagccaaatgaacagcaaagtgcgcgacggagttgaggccttccgcgtcaacaccgactcggcctggactgacttgatggacgtgcaagtggtcgtgacgccgccgtcgaagccccgtgataaccccttcaactccatcttccgtgccaaacgtcaactgcccggacactgccagtgcgctggcctccaacagccaagctgtccccctggtccgcccggcccgtccggaccgcctggacagcctggacagcctggaggcgcaggacagcccggacagcctggacagcctggccaacccgctccttcttgcccgccccagaacatcccctgcccacgctgccctgctggcccgcccggtcgccccggaagacagggacccgccggacagcaaggagcccctggacaacctggtacg

SEQ ID NO: 77072 - DNA, 454 bp, Glycine max
  Clone ID: PAT_MRT3847_4060C.1
ttttggtttttttttttttttttttttttttaatataattttttttttttttttttttttttttttttttttttttttgcacaccagtaaattttatttcaagctcaatcgttcaaaatccttgggaaagatggccaaaattttaaatatccttataacatttaatacccgacatgttttcatgaccatcgaaaaggtaaaagggtgaggaaaaaggcgacccaggatcaatgataattcaaatttgacccatttgcaagtcatgggggaggtgtccgccccctccggacacggggaggtctattatcagagcctccatctgaagattcgttggcatcatcaaatccagattgtccatcataattttccccccagagggaagaagtgggtctccttattcgcattgggaggggggcccccctggacttggaagccggctgaaaaatgaggaaaa

SEQ ID NO: 77073 - DNA, 305 bp, Glycine max
  Clone ID: PAT_MRT3847_40610C.1
aagatggcgcgagtgatcacaggggagtggtacacggaggctgtgctattatgcgccaaggccggtgcgtcatgcgtggaggaggcggctaacccaatacgaatggtgtttggcgtgtaagcagaagcggatcggatgatcgttgagtgccggcgtgcgatgaagtttgctaggttcgtgagcaaggatggaaagagttaccaaaactgggaatatatgaatgataagtatgagatattttctcacaatcttaagttattcggtactacaacatgaaacgttgggcctatactttgtctgttaat

SEQ ID NO: 77074 - DNA, 257 bp, Glycine max
  Clone ID: PAT_MRT3847_40611C.1
tgaagagaagatagtcagtctgatcaagaacctgttagttgctcttaaggacttccattctgaatatattgtcagtgcctctaactttacttcccaactctcaagtcaagttgagcaatttctgcacagaaatattcaggaatatcttagcatccttaccgatccagatggaaaagggaaagagaagattgcagagctttctgccactgctcaggaaataattaaaagccaggccattgcgacgaataaaataattt

SEQ ID NO: 77075 - DNA, 666 bp, Glycine max
  Clone ID: PAT_MRT3847_40612C.1
ccgagctgcgccgcgagctgccacccgaccaggctgagtactgcatcgcgcggatggccccctacacccggccccgactccgtgccaggtgcctctggactacatgtccttctccacggcgctgtacggcgagagtgacctctaatccaccccgcccggccgccctcgtcttgtgcgccgtgccctgccttgcacctccgccgtcgcccatctcctgcctgggttcggtttcagctcccagcctccacccgggtgagctggggcccacgtggcatcgatcctccctgcccgcgaagtgacagtttacaaaattattttctgcaaaaaagaaaaaaaagttacgttaaaaaccaaaaaactacatattttattatagaaaaagtattttttctccaccagacaaatggaaaaaaagaggaaagattaactatttgcaccgaaatgtcttgttttgttgcgacataggaaaataaccaagcacaaagttatattccatcctttttactgatttttttttcttctatctgttccatctgctgtattcatttctccaatctcatgtccattttggtgtgggagtcggggtagggggtactcttgtcaaaaggcccattggggcaggtgtgtttgctagctcacttgtccatgaaaatattttatgatatt

SEQ ID NO: 77076 - DNA, 293 bp, Glycine max
  unsure (1)..(293): unsure at all n locations
  Clone ID: PAT_MRT3847_40613C.1
gccgccctgggaattcctggttctctggcccctccctccctcgggatncttcgaaactcttttnnnagcantaccngaagatntacattgttgcagcagccgaaccccgaaaaagaaaagccacatgaggacttcctatcttgggtcgccggacgggcgcaaaaaggncgggcgcggccgncacgggaaaaaagggaaaaagaaaaagggaacccaaaaacccccccccccccnnncncccccccccccccccccccccgccnccccnccnnnccccnnntttttcccctggc

SEQ ID NO: 77077 - DNA, 733 bp, Glycine max
  Clone ID: PAT_MRT3847_40614C.1
acgaggaacactcttcttcaatcaagcgaaggtggtctcgattgcaagtgatccacgatacactctacgcttcacaaaaccttcaaacccaattccacagaaatttgactaggggtgaacacagattcctcagggcacagtgcacagtgcacaagcttttgcttttttttttttttttttcactgttatggtttaaccgtgttttctctattatcttgcaaactggttggtgttgcatttgttaagccatatgttatattcctttaagtattctgagtctacatatttgatgaagttatgattaaatcagagaagtctaattatggagctgagtctacatgtcagtctttacttcactagttagcttgaattctgttattgaagaaatctaatttccttaaccgaaacacttcacatgtagtagaataggaattcttctgcttcaccatgccaccaaagcctttagactatgggtcaataaatgaaaacgtgaagaagagtcaatatgctgtcagaggtgaattataccttcgagcttctgaacttcagaaagagggcaaaaagattatctttactaatgttggcaacccgcatgcattgggacagaaaccactgagcttccctcgccaggttgttgctttgtgccaagctccattcctacttgatgatcctaatgttggactgctattccctgctgatgcaattgcaagagctaaacactatctttcattga

SEQ ID NO: 77078 - DNA, 713 bp, Glycine max
  Clone ID: PAT_MRT3847_40615C.1
cgtttaaccgtgttttctctattatcttgcaaactggttggtgttgcatttgttaagccatatgttatattcctttaagtattctgagtctacatatttgatgaagttatgattaaatcagcagaagtctaattatggagctgagtctacatgtcagtctttacttcactagttagcttgaattctgttattgaagaaatctaatttccttaaccgaaacacttcacatgtagtagaatagggtaatcttatggtgctttgttcacgaggcatgtctgcgtgacaggtctcattattttcccttttccctcattgaactgttctggttggcaattgatttttttttcttattctgtaatatctgcaagaattcttctgcttcaccatgccaccaaagcctttagactatgggtcaataaatgaaaaacgtgaagaagagtcaatatgctgtcagaggtgaattataccttcgagcttctgaacttcagaaagagggcaaaaagattatctttactaatgttggcaacccgcatgcattgggacagaaaccactgagcttccctcgccaggttgttgctttgtgccaagctccattcctacttgatgatcctaatgttggactgctattccctgctgatgcaattgcaagagctaaacactatctttcattgacctcgggtggttaaggtgcttatagtgactcccgtggcctt

SEQ ID NO: 77079 - DNA, 1688 bp, Glycine max
  unsure (1)..(1688): unsure at all n locations
  Clone ID: PAT_MRT3847_40616C.1
ggttcctttaagtattctgttatgttcctttaagtattctaagtctgcatatcagtatttacttcactagttagcttgaattctgttattgaagaaatctaagttccttaacgaaaacacttcacatgtagtagagtagggtaattttgtggtgcttttgtttcacgagtaacatctgcaagaagtcttctccttcagccatgccaccaaagcctttagcactatgggtcaataaatgaaaacgtgaagaagagtcaatatgctgtcagaggtgaattataccttcgagcttctcgagcttcagaaagagggcaaaaagattatatttactaatgttggcaacgccacatgcattgggacagaaaccactgagcttccgctcgtcagggttgttgctttgtgccaagctccattcctacttgatgatcctaatgttggactgggctattccctgctgatgcaattgcaagagctaaacactatctttcattgacctcgggcggtttaggcgcttatagtgactcccgcggccttccaggagtgaggaaggaagtggctgagttcatactcaggcgtgatggttatccaactgatccagaactcatatatctcactgatggtgccagcaagggggtgatgcagatattaaatactatcatcagaggtcaagacgatggggtaatataatttttttcttgttagtactgcagttttctatattcagtgtccattgaaagaattgcccaccacttcttattgccagattttggttccagtcccacaatacccactctactcagcaacaattgctctgcttggtggtacccttgttccatactaccttgaagagacagcaaattggggtcttgatgttaatgaacttcgtcaatcagttgagcaggctcgctttaaaggaataactgtatgtgttttgtctttacaatgttatgtttccactctgtttctacatcaaactcacaaaaccaaacacttacatgtttggaagatgctgaatcaatgtgaagggagtgaatcttgtcatattgaaagtatttgttgttgatacttctcttcctatttcttctaagttgattactagaaatgactttgctggttgctttgtgcaacataaaagggaaaaggaaacaaaatagcacatggctgattgataaacaatgttcccacatgaaattttacaatatcttggctgtttcttgaaaagtattttctaccagtgaagaaatcatgtaatgatgaattatttttgttatgctaaaatttgaattgcaaaacttaatatccttcttatgttctttgtatttgtcaaaatcttttcttatctattcatgtaatgctttatttgaatgaagcaacaaaatcataaatttaattttgagtangttaaagcaatggtgatcataaatcctggaaaccctactggtcaatgccttagtgaagctaatctaagagaggttttgcaattctgttatcaagaaaatttagccttgcttggagatgaggtttaccagacaaatatatatcaggatgaacgacccttcattagttctagaaaggttttgatggacttggggccacctataagcaaggaagtccagcttatttcttttcactccgtgtcaaaaggttattatggtgaatgtggacagcgaagtggatattttgaaatg

SEQ ID NO: 77080 - DNA, 428 bp, Glycine max
  Clone ID: PAT_MRT3847_40617C.1
tgttatgttcctttaagtattctgttatgttcctttaagtattctaagtctgcatatcagtatttacttcactagttagcttgaattctgttattgaagaaatctaagttccttaacgaaaacacttcacatgtagtagagtaggtaacatctgcaagaagtcttctccttcaccatgccaccaaagcctttagactatgggtcaataaatgaaaacgtgaagaagagtcaatatgctgtcagaggtgaattataccttccagcttctgagcttcagaaagagggcaaaaagattatatttactaatgttggcaacccacatgcattgggacagaaaccactgaacttccctcgtcaggttgttgctttgtgccaagctccattcctacttgatgatcctaatgttggactgctattccctgctgatg

SEQ ID NO: 77081 - DNA, 859 bp, Glycine max
  Clone ID: PAT_MRT3847_40618C.1
aaccataataaaattaatttggctgtaaatcactatcgcctctacgtcaagagcagaatacaacgtgtctgtacaaacaacaacgattatcaacatctgaactgaacacatcaataatataaacatgctgccgcaaagcttatagctgaggttggccaagcaggaacatagttcaaaccttcaaaacttaccatgacatctttgtgcaaaactgttgatttgttaactaataataatcatttaggtctcaccaagtaagatgcccatatctcattagctggaggaggaggctgaacccaatgccctggtatgcggcttcctcctggtctgatataggcatcccatcctcttctaacctcaataagtgtgcccatatcattgttgcttccgtgataataatgatagaactcaatgggtaagtttgccaaaggatcatacgctcctccactgatctgtcctattttactagatttcttctcgtcaactgcaccagatccctcttcagtcacactttgaactgttagctcttttctctcctttacttcactatcataattgcttccttttgacaatttcccttgattctgaatagctttcctggattcctcagcagttgcaattgcatctttagcagcatctgtttcaactgcagccaaagcttcacgctcctcttcttccacagcagcttgaactttctcaagaaacttgtcatcctcctctgggagaaaatggccttgttttttcaacttttgtattcttatggagcgtaactcttgaagcttctctactaccaagagcagctcaatctcagcctctactttcttcttctcttctttggctttagacttcgcaatttctt

SEQ ID NO: 77082 - DNA, 119 bp, Glycine max
  Clone ID: PAT_MRT3847_40619C.1
actacagaaggggtagataatgcaataggatcggacataagagagtcatgtgctatagatctgaatgtatacatatgtgatgcataatatgtgagtatatagagtgggatccttaactg

SEQ ID NO: 77083 - DNA, 238 bp, Glycine max
  Clone ID: PAT_MRT3847_4061C.1
ggggaacttaaatttgggtttacttttataagaatattccattttttcataataatatcaacatggaaatttaatcataatattcataacataaaatagtccaattttacatggaatattgggggataatctcatgggtttcatgtggcaaaatgccacaatacttaatggcatttaacttttaaaaaaacctccttttttggatttgtgcccactggaacacttttggcgggctttc

SEQ ID NO: 77084 - DNA, 2124 bp, Glycine max
  Clone ID: PAT_MRT3847_40620C.1
ggctcgagatttcaagatgctctctctctcccccttgttttaaacttgtaaataatggtatggtagaagtagtagtagcccttcaaatttcaaactgaaatagcacaaacaataccaactctcctcataccaaaacacacaactccagttattgaaattgaaattacccttttccttttttcccccaaatttcacccgaggctgtttttttttcttttttttttttttctctcttttgaccttaccctttgagagtttcgtggctgtaatttcgttgtaaccgatgctggaaatctcaactttaccggaaaccgcgacggagaacgcggacggcggttccgcggcggtctccgacgggtcgaaagccgagcacagcgaggacgatgaccggaatcccgccgcgaaccggtggccgagagaggagacaatggctttgctcaatataaggtctgaaatggacgttgctttcaaagacgcaaaccccaaagcccctctctgggaacaagtctcaaggaaattatcggagctaggttataataggagtgcgaagaagtgcaaggagaaattcgagaacatttacaagtaccataggagaactaaagaaggtcgttttggaaaatcaaacggtgcaaaaacttaccgatttttcgagcaattggaagctttagacggaaaccactcacttcttcctccgacaacaaccgttggtgatgatgttgtcctgaacgcggttccgtgttcggttagtgcggcggcgcacgagcattcgagttcgacgacgtcgtgttcggggaagaagaagaggaagctgacgcagtttctggaggggttgatgagggaagtgatagagaagcaagagacgctgcagaggaagtttgtggaagtgttggacaagtgtgaaaaagatcgaatggcgagggaggaagcgtggaagaaggaggaactcgaaaggatcaagaaagaacgcgagcttctggctcaggaaagatcaattgctgctgccaaagacgaagctgttcttgcttttcttagaaagtttgcagaagcagaagacacggtgcagttactcgagaaaattcaggttcaaaacgacaaacagaaaaacatgaaacaaaatggcggtaatgataatgctaatggaggtggtggtgtcacagttgtcactgatatggataaacaagaatgtggaaatactaatgtcgtgttagtgttgggaattttgtgcacatgagtagttctcgttggccgaaggatgaagtggaggctttgataaggttaaggactgagtttgatgtgcaggcacaagggaataataataatagtaataatgggtctaaagggcctctttgggaggagatatctttggctatgaagagcattggtgaagtgcaagtaaaatgggagaacataaacaagtacttcaagaggatagaaatgggagaacataacttctgtctctcgcagccacttcatgaggagacgtgtccttattatcaccaccctgaggctttgtacagtaagaagcctaagaaggtggatcatgggaacgagttgaagcctgaggagctgttgatgcatatcatggtgagtcaaagtcaagaacagcaacagcaacaagagatgcagactcagactcagtcaccatctgaagatgctgagagagatcagaatcagggagataatgaagatcaaagtgagtatcagaatcagatggttgataataatagtccttccattgcaattatgagttaaaaagcttggtttcaagagattctttctttagtatgctaaaattgaacatcttctctgatgacaaccaacgtgggttcctttgactttccaactattcatcaacaagagcaggagaagatttcaatatttcattttgttgctgggtttaggtggtagtaaatacaaatcaatctcaagggtgttgtttttgtatgtattacagtacactgtattttccaattttcaattcttcatcgtttttttttcttttctttagcgaacatggtagatgatacaaggaacacctgcacagagaaagagagagagatttacctctcagtaaaaaacaaagtcactgggcgtgttattttaatattaaaaacttttccctag

SEQ ID NO: 77085 - DNA, 210 bp, Glycine max
  Clone ID: PAT_MRT3847_40621C.1
ggatgaattgttattatattagcaggttgggacagggcattcaattataggggtggttattatagcaacccagtttcattttttattaaatgttgtgtggtaagaatcgactaaaccccccccccaatcaaatgatggataaaaaatttagccatcaaataagggtgtgaaggatctcggtccaaggatctggtacaccaggaagacacc

SEQ ID NO: 77086 - DNA, 411 bp, Glycine max
  Clone ID: PAT_MRT3847_40622C.1
gggagaacataaacaagtacttcaagaggataaaggagaagagcaagaggaagcctcaggattccaagacgtgtccttattatcatcaccttgaggctttgtacagtaagaagcctaagaaggtggatcttgggaacgagttgaagcctgaggagctgttgatgcatatcatggtgagtcaaagtcaagaacagcaacagcaacaagagatgcagactcagactcagtcaccatctgaagatgctgagagagatcagaatcagggagataatgaagatcaaagtgagtatcagaatcagatggttgataataatagtccttccattgcaattatgagttaaaaagcttggtttcaagagattctttctttagtatgctaaaattgaacatcttctctgatgacaaccaacg

SEQ ID NO: 77087 - DNA, 1172 bp, Glycine max
  Clone ID: PAT_MRT3847_40623C.1
ggctcgagaaacttgtcagtaacaataatggtttggtagaagtagtagtcgcccttgaaacaggacaaacgatacgaactttccccaactcaaaacaacacacagactccagttactgaaattgccctgtttcatttttctcccctaaatttcaccgacgctgtcttttttctcttttgaccttaccctttgagagtttcgtggctgtaatttcgttgtaaccgatgctggaaatctcaactttaccggaaaccgcgacggagaacgcggacggcggttccgcggcggtatccgacgggtcgaaagcggagcacagcgaagacggtgaccggaattccgccgcgaaccggtggccgagagaggagacaatggctttgctcaagataaggtctgaaatggacgttgctttcaaagacgcaaaccccaaagcccctctctgggaacaagtctcaaggtcagtttccttcttttgttttcccctcttttcaactgaaaccccttctatcattccttaattagtaatactaatgttacacttaattcataaatgtattgtatatatatagtctttcattttttggtgtaataatatagtagtgattgaactgaatgaattaattataaattcaggaagttagcagagctaggatataatagaagtgctaagaagtgcaaggagaaattcgagaacgtttacaagtaccataggagaaccaaagaaggtcgttttggaaaatcaaacggtgcaaaaacttatcgatttttcgagcagttggaagccttagacggaaaccactcacttcctcctccgacaacaacaaccgacaacaacaacaacgttgatgatgatgatgttatcctcaacgcggttccgtgttccgttatagctgcggcggcgcacgagcattcgagttcgacgacgtcgtcttcggggaagatgaagagaaagctgacgcggtttctggaggggctgatgagggaagtgatagagaagcaagagacgctgcagagaaagttcatggaagtgttggataagtgtgaaaaagatcgaatggcgagggaggaagcgtggaataaggaggagctcgagaggatcaagaaagaacgcgagcttctcgctcatgaaagatcaattgctgcctgcaaagatgaagctgttcttgtgttcttaa

SEQ ID NO: 77088 - DNA, 377 bp, Glycine max
  Clone ID: PAT_MRT3847_40624C.1
cctatccttgtgtgttggttcgtactatgaagtaggactatcccccccaccgacgacgatgagtcatccccccaccattaaggaggcagaactgtttttgaaactggaagagaaaaaaaaaaggtcttatgaaaaaaaaaaacttttttctctggggggggggccctatgactccagcagaaagatctcacgtttgaccaaaacaacgcgaagttttatacaaaaaaatttgcgccgcaattggcgacccccccctgattatgacaatatttcaggagggaaaaaaaaacatggtttctggaccaattaactaaaggggggggaaccccccctggaagaaaaagccccccgggatatgtcccccatcttgagaaaaa

SEQ ID NO: 77089 - DNA, 683 bp, Glycine max
  unsure (1)..(683): unsure at all n locations
  Clone ID: PAT_MRT3847_40625C.1
ccacgcgtccgggcagggttgttgtcggcttgagaatggataaaagcatatctgacaaggatcagggagctcttgtagaaggttttgatttttgtttgccagaggttttgattcatgggtggttcttctgagtttgagacagagttgtactttggacagatatataaaatactgatcttcactccttccttccaagagttcatcattggcaataacgttgtaaggctggtgaaaggggagatggatttccttatcacagaactgagtgacatgtttaacctttaaataaaaaagtgatctagatcagagaaaggctgcagttcatggaagatagtggaaggtttgatgagaagtccttttcaaatggggatgtctacataggtatgatcaagggcatagtgcctcatgacaagggaaagtacacatggtcagatggaacggtatatgagggcgattgggaaggcgagaaaatgacaggaaagggactgattgtgtggtcatcaggagcacaatatgagggtgaaatctctggaggttacctacatggttatggaacacttacaacatctgctgggtgcatttatagaggaggatggaggatgaatgctcagcatgggattggacggnagcagtattccaattctgatgttttttgaggtttatgggaaagaaggagttcctga

SEQ ID NO: 77090 - DNA, 355 bp, Glycine max
  Clone ID: PAT_MRT3847_40626C.1
ggtggtggggggtgggatttcaaatttggattaaagaaccattttggaggggccttattaattttctgcccctaattattattctaagccggggccgaatgcttccccagttgctttcccagggttgccacctctggatttatttccaccctcccttattcaaggcccagcctccttagggtggggatggcttcccagggcttaatcggttcctttccattttgggagaggcccacccacaccggggggaggcccccccctttttccacctggtttgtgggggttcctgtcttaaaggaccaaagttttttgggggtaaaggtgggttttctgaggggccaatcaatgggctttt

SEQ ID NO: 77091 - DNA, 285 bp, Glycine max
  unsure (1)..(285): unsure at all n locations
  Clone ID: PAT_MRT3847_40627C.1
gncgtangctacggnattcgggctcgaggncgtncgncttacncancntcngngnatatnnccnacnantnacnnagnncccngagatcgaatgnanantgggnnctcgntaagntttgngntnnngnctncagctangnnnacnngtntgcaccntcnctnaattnncaaangtcanaaggcccttnaaacacanttacaccgagncccccnaagggggggcctcttaaccacattngncttngcacaaaaannaagggnccnncngngngggnngcnaccncc

SEQ ID NO: 77092 - DNA, 491 bp, Glycine max
  unsure (1)..(491): unsure at all n locations
  Clone ID: PAT_MRT3847_40628C.1
gtaacagactacanatccgtcaaatcttattancagaccatgtgcttttatgcagctctatacgaccactcttgaagaaagtgcctagagtaaatagcatagcagcagtctaacgattaccacattcacctagacgtatcatatgcaacgttcggatctagtttcagacacactcttcagcgaacacgaactcatttacattgctcaagtatggcgtttagactcccaattgcaagacctgagtaatgaaagactcctggtaagcctaacttcacttgctagcattatcaagagcatgctcgttcaagcacttgccagacaattggactctcttgacattctatcgctcttggacacgcatgttaccgtacagtaagagcttgtacacagtaatcttgggctgttcaaaggtacgaggtccatattctgagcccacaagcttcttctacaacactgtctatagctacacgtgataatcactgcctcactta

SEQ ID NO: 77093 - DNA, 511 bp, Glycine max
  Clone ID: PAT_MRT3847_40629C.1
cttttctgtattttactacgaaatccttaattctccggatcgtgcctgcaaccttgcaaaacaggttagattcagagatagtgaatatcatggcctttgttttgctctgtttatttgtgttttactatattttgagcaaagttttggatgtttaacgtgaaaagaggaaggaattcggccatatacagtgaaatttgcagctattgttgtccattgatttgaataactttatggctactgcatgttgcatttcgttaatgtcgaagcaataatgatgttactggttggattctagcggctaaatatgaatttgtaatatggtttgtacagttgttcctcctttacctgtagcttaaatgagttgtcaaatatttattgggtttcacagtaggtgtttggaattctaatagttatagctagcaaacaataatcaatcaatatttgacttcttaatctagatactggtatagatgggaatctgaccttgaggaatacccgttgaataaattct

SEQ ID NO: 77094 - DNA, 410 bp, Glycine max
  Clone ID: PAT_MRT3847_4062C.1
atactcgaagaaatcaccaagtcagcggagacaatatatgagtctgtttctgagttttctcacttagcccacttcaagagtgttgtagaacccaatgtctcaccagagaagcctccccttcttcatcgaggtatcataaaacctgttgtggatattgataacaccgtcgaccatgttgaaattacgatcccagatataactacagactctctagagaaagaaaaagcaccaataacaaaaccctccgaacatttgtaaatagttgtcaatgtcaattacttgagactagttatttgtcatgactcaacattcgtattccatagtttagtttaatagtctccgatgtaattctactcttgcaatgtagagtatttagattaaggttagaagatttttaatattcttacctt

SEQ ID NO: 77095 - DNA, 467 bp, Glycine max
  Clone ID: PAT_MRT3847_40630C.1
ggctcgagctcccatcttgcaatcttttacactttcctatcgttccacacgcaaaactaagaccgggactattgtgaacaggcccttttaataatcctcccctgtaaggcgatagacataccagtgttccgacggggttacctcggtggagcaccacatctgtgatactgcaagccctaactaggatgggctggataacaaccactagacccgtcccccgtccgttcctgaatctgaacacgaatatagcctatctggtcatgaaactgatccgcactctgccacgcagtacaacaacataatgctggtgcctacacaaacacttacgctccatacaaaattgcctgagtggaggaggacactggcacgtactataacgacaccagcttgtacagttagaaaggatggcttcccaccaacgaaaaagaatggagggacactgcaagactcacatgcactggttacac

SEQ ID NO: 77096 - DNA, 457 bp, Glycine max
  Clone ID: PAT_MRT3847_40631C.1
gctcatcttaattttttttatttttgtgtgtgtgaatttccctattttaaataggacaattttagttcatcttgtaagttgttattggatacttagagatactaaaatgacatatttgtggtgtggtgggtttcttcaaatgagttcacatgccatctgatttttttattggcctttttcaagctgtgttatatctcacatgacaatcgtgtaaatgtgttaatatttaatacaaaacgcactccgtgaaattggtatgatttgaaaggaatgctcatacacggatagtactggatgacaaaaaaagcctggtccagatggctatatacttttaccagttacctggattagaatgatgaatttaaataaaaactcgagacctgctcagcatttgtcaaatatatcatgggtaatgaacgaaaccttagtactttggttgttgagtaccaatacctga

SEQ ID NO: 77097 - DNA, 393 bp, Glycine max
  Clone ID: PAT_MRT3847_40632C.1
agccgaatctagcactgccgattaattaccggggagccgcgctgactactagtcggccgccgtccttttttatttcttttatattttttttttatattaattaataattttaaattgggggggattattacattcaataccgacaaatcactacatcacgaccaactaccacttgactaaatatacattttaaacaaaaactaatcttctttaaacgcattttttgcacgcgagggtttaaatcaaccacagggaagaatataaaaaataatagaattgaagtctcacaatctggggaaacaacaaacaggggggccaaaaatctttggggaaatacaaaacattctggtttatttatttgcctttatcccccccaaggggggacccttttaa

SEQ ID NO: 77098 - DNA, 579 bp, Glycine max
  Clone ID: PAT_MRT3847_40633C.1
tcttgactcactaccatcaatggaagaccaaaaccagtgtactacaagggacgaacaattaaaaaaccttaatctccccaaagtcctaattcacggtcccccaggtttttcctctgttctccaaccacccttttcccaaaagtttcatattttaaaccactcttctcttcccctgcacaagttcgcggccacccacgcccaccactgttcctccgtcgccgccgtgctctgcgacggcggctaccccgtcactgccgacgtcctccgcctcctcccttcgctccgccttctcgtcaccgccagcgccggcaccgatcatgtcgacctggaggagtgtcgccgcctgggagtccgcgtcgccggcgccggaaacatgttctctgaggacgttgccgacttagcggtgggtgtgttgattgacgtgatgatgaaaatttccgcggcgaatcggtgtctgagagaacggattctggtagtttcacgggattttccacttgcttctatttttaaggtttgcaatttcgtaattttccacttgcgaatcggtgattaattttcagctttttacgaaatttatga

SEQ ID NO: 77099 - DNA, 318 bp, Glycine max
  Clone ID: PAT_MRT3847_40634C.1
gccaccttcgtggactctgagctgagcttgaactgagcttactaaggctggggctcgttacgatgtgaagttgttcgatgagacagctagtgggaagtctaatgggtaattgtcagagttcaggtttattgacccttctgctggcactgcttgataagaacggatgaatgggcatgtttttaatgggacgccgagtgttgttgcgtccgcatcgccttttacagttaagaaaatgctggaggctcagatcaatagcaatcagcagatgaacccttctgctgttcctcagggaatgctgacgcctgctgatgcacgggc

SEQ ID NO: 77100 - DNA, 165 bp, Glycine max
  Clone ID: PAT_MRT3847_40635C.1
tgtatgtcattttgtattctcttctctttcaaaaagattattttgtctttgattaatatgtgtgagatggaggcgcttttgggttttgacgtctataaagtaaatagactggctgtgtacgcactctaggaaaaaaaaaataggcaatatagcaatagtttcagt

SEQ ID NO: 77101 - DNA, 1167 bp, Glycine max
  Clone ID: PAT_MRT3847_40636C.1
tttgtaactaaatcccggtagcttcattttccaaacccagttattacttactgcccaaacaagcataagaagcagtgctgtttatatgcttctccacccataattcctcccctatcatatttatggctgttgaactacacacttcgcttccttctcacttattccccgacgacaaccacgacgtcgtttcgtcacagcataaccacaaagacgacatccaccacgcctcagctttaaacccgctccccgagcttcccatgaaggacaacgacgacgatttcatctccgagttaactcaccgcatggctcgctttttgcttccagatgacgacactttcgatttctcttccatcgatcttgattcgtcacgggactcaaaacaggggagtccagaaggttcatctcaggaggcatcagcgccagctacacctgaagagtgttgttggaagagcagctacgacatgtttggaacggttgaggagatgaagcttaacgaaacaggaaattccaacaacaagcttcttcgtagctccaatattgaactctattcttaccaatctctaattcaggaacagattcgagccattgaaatgtctggggtgaagccagagcatgtggtagtgtctcagaagcggaaacccagtacgcgtagagcgcagacatacgaggccaagaaaggaaacggacggagggcccgtccgtcacgacccggcccacagcaaggcggtgcggggatgcgggtcctgtttctgaaagggcccggttctagagctgggactggcgtcttcttgccgcgtggtgatgtagccactaccccatccgattcaaccaacaaacaaggtaaaggttgctccactgttcttatacctgccagagttgtccaggctttgcaactccacttcgaccaaatggctgccacgtctgggcccaaagccggtggcttccctcctcttcatgatgttctagtgagtaacagggatggaatgtattcacttcagaagccccggtcacagaacgcgccggcaagtatccagaatgatacgattctgcctcaagagtggacgtattgagaaatacacatcacatgcacatgcatttcccattactcctctttttacaataataatcctgttttggcagttttttgcccaaactgaagaacaaaaa

SEQ ID NO: 77102 - DNA, 553 bp, Glycine max
  Clone ID: PAT_MRT3847_40637C.1
cgctggctcagcgtatgaggcaattagcaatgcactatctccggtctctactatggttgtgattttgaatgatagccgtcactctttacttccaaaaattgaggagggcccaaagacatttgtcaatgccctatctagtaccctgagcaagctccagtccagtaaatctttccggagatttagagaagctgctaagggtgttacgaaacgaattggtaggtatgcatgaattggcagctaaagtggatgaatatgctcgtggtatgatgggtcctctaggttctactctttttgaagagcttgggttgtactacataggcccagtggatggacacaatattgaagatctcatatgtgttctgcaagaagtagcttccctggattcaatgggacctgtcttggtacatgtgataactgacgaaaatcagggagatgaaaacagtcagaaaagtgatatatcagatgggcagcaggatgaaggttctgttaaatctgattcgttagataatcctgttcggcctcaaacatatggcatttgctttgtggagacttt

SEQ ID NO: 77103 - DNA, 448 bp, Glycine max
  unsure (1)..(448): unsure at all n locations
  Clone ID: PAT_MRT3847_40638C.1
accacaaccatctgccaccgacatccactggggagtaacatacacaaaacggggaacccaacatgacgacatgctgaggtaaccgactaggcttggagtattaatagtgcgactagagctaaagccctaagccttaagagtaactgtacaacaggttaacaccntgcaccagcatgctatacaccttggaaagtggcagcagtcagatagaaaagtagatgtatcaacagtaatactgacaaaacaatggcgaaaaaggaaagaagtaagccatcactgaagacttgcacggcaattaatagtacaaagtacaaatcgagctcactgacgtggggagccaacagggggacaactgtccccggtgccactatgcgatccaatgaaaacgccaacgtaacaaaacggaaccacatctagttatttaggatcacgatgaaacgtgcatgat

SEQ ID NO: 77104 - DNA, 1514 bp, Glycine max
  unsure (1)..(1514): unsure at all n locations
  Clone ID: PAT_MRT3847_40639C.1
aaaaagaaggaaatttttatagacaaactaattaagaacaatattaatcaacccaaaaaaaantaatacagcttttttccaatcattcaatttctcaacttctggtttcacagttaaaactccatgaaaacctccgaattatttgatccaagagaacaatgactacgtacatttacatttaaacatcactgatcagtgcatataacttacacatacattgaattgatgaagtccaaataatagaaagggcttaccgcataatctggcaagatacataacttcatcgttgatttgcttcccaatcaccagcagcaaaatgtatttgcactgcagttaattagtattttacaacagcactaaatctcaaccatgaaaatgattttatttaattctactacgcttattatccacaattaacaattaatactaacaagcactaatctttcagcgtcgtagtctacccagcattttattcacaacagcatcgatcaatctatantgtgatcctcttccatcacgatgaactaatactataagttcaaaccaatcgaacgatataattaacttgaacaacatatgttataattctaattgctaattaaccaagcaattttatactcaaatttctctaaagatcaaagaagaaaggatcattataatcccacaaactaccagtgtaatcatcctcgttcgccatggaccaaaaaggcgaagaagatccaagccccattgtccccaccaacgccagatccggatccaccgaagaagcatccatggaagacgaaaccgaacccacgacggaggaattcactccctccaccacgctattctgatgttgctgctgttgattcgaaaaaaccccatgttgcacttgcacatgcacaggttatgttattattaatattatccaaaaccatgccgctggtacgaggttgatctaatagaaccatcaacaacaatattattattcccacctaaaccccccaaatcagattccgaatgtggcacttgcaccacttcccggacgcgtggatagtgatgtggatgatgaacttgcactgtattaatattgtgattcttactattatcaatagggtacaacacgggtggggtgtaagtgtaattgtgactattgttataagggtaaggcacggtggtggcgggggcggagttgaagggaaaattgaaagtaaaaccagaagggcgaggaagcaagggtcttagggtttgagtggaagaggaagaggagcgagaagaggaagattgagaagaggaaccggagggttgtaggttgagctgtgctctcgaaccgtagaggatgatggcggcgcggtcgtaagctctggcggcgtcctcggcggtggcaaatgttccgagccacttgcgcgtacgcttacgtggctcgcggatctcggcgacccatttgccccagcttcgttgtctgacgccgcggtacctaaatttgttgttgtcggggccaccctttacctttgcacttacgaccggacgcgtgg

SEQ ID NO: 77105 - DNA, 247 bp, Glycine max
  unsure (1)..(247): unsure at all n locations
  Clone ID: PAT_MRT3847_4063C.1
tncagattgagaagaatggccaatacaacaactaaagtactacaacacaacacaatctcaccactctttctagaaaaccctgttcttgacaacacatcttcgtcanaanantcnancgacatcattaagcnnaattcccatcactttgaatcctctctctctgnctnntgtgctcttggtttggagcngtttctttaaataaaacttctcntgaatctggagntanccaaaattggctttcaagtgt

SEQ ID NO: 77106 - DNA, 308 bp, Glycine max
  Clone ID: PAT_MRT3847_40640C.1
gggtgtttttttttttctttttttctgttttttgttctttaatgaatactgtcctgttaactagaaaaatagcaagacacgaatattattttatcacactaggccggagaaacaaagtatgtgagacataacagggtccccctccattttttttttttgcgggggatttagcaggcacactataagagcgccccgcttctttaaaaatagcctgcccaagtctgcggagcttttttgggggtggaagctcctcccccaagagcgcggaggagggctctccccgtatttccgacccttgggtacatgcg

SEQ ID NO: 77107 - DNA, 201 bp, Glycine max
  Clone ID: PAT_MRT3847_40641C.1
gattgaaatactgatcttacattgggcttactcatgtatgaccacgaaaccctctttatcacgatctatctgtgacgagcatgatgggcttacgagcagtgttattgttggctgtacacttgctatcggggatggacttgggcattcaaacagccaagaaccctgtttgctttaaaggtccagtatactgtgacctttgac

SEQ ID NO: 77108 - DNA, 605 bp, Glycine max
  unsure (1)..(605): unsure at all n locations
  Clone ID: PAT_MRT3847_40642C.1
actatgtaggataaaatttaatgtgaaaatcacaatatgatgtcacatatgtatatgaagatttaatggacacgctgaacctgtaagtcgaaagttacctcgtgtgaataaacaacaccgggtaggaagcgaaacgccttaaagaggattgggtatatgtatgcatttaatgacctttgaaactaaactgctgtgcgatgacactacttactagtacaaaacaatttcattgttatgatatgaaaacctgctaaacactattgttgcatactgcacaaaccaaggcaaacacactgtcaaagatcaaacatttaccaatgtcccatcgatgcatattgcgtntcttactacctacaggtagaatgatctctgagagactaattagatgacgctatttttaaacactccacaataggtcttaacacgttgtctatacatttatccacagccattctggcattgatactcggctacagacagagcttatctaaactcggacaaagttttaagcaatgcgcattcctaaacattgtgccttaagctgtgtgctctctgattatccattgccaatctgggatgacactattctgaagcatacctatctg

SEQ ID NO: 77109 - DNA, 434 bp, Glycine max
  Clone ID: PAT_MRT3847_40643C.1
ctgatccttgtcctcttctatctgccgcaaaaaagaaaggactgcgtgatgaggaaaagttattctatgctgccatgtctggccttggggatcttttgtacgacaaagatgctgtatacataaatattaatgatcaccttgttcaattctcaaaagttgatgaaaactctgctatgacgagtaaaggaaagggtggagatattggggaggatttggtgaaatcgctacagaatatcaaatactcaattaatgaaaaactagagaacagctttatcaatatttttggtcaaaagacaaatgtgtcatcagaagctctaggtgatgcacatggcacaaacaaggaagttgaaccaaatggcaaaacagaagcttttgataaatatcatcctgaggctgttataactggtgaagataataacaaaatggattttgat

SEQ ID NO: 77110 - DNA, 354 bp, Glycine max
  Clone ID: PAT_MRT3847_40644C.1
gcacagcaaaaatctacacagacctaccttggatggggttcaatttaacatgattacccacacacaaagggaggagctgactgccccattcacagatcttgaactcaaggatgctatgtggagttgtggtggagataaatgccctgggccggatggattcaattttaatttcataaaggagttttggagggttctaaaaccagatttcaggaggtttgtggatgaatttcacgtaaatggaagcttttctaagggcaagaatgcatactttgggggctgaatggctaaaacaaaccattcacagttgttgaatgactgcagacccgtgtggctgattggctgggtgggtgaaat

SEQ ID NO: 77111 - DNA, 1343 bp, Glycine max
  Clone ID: PAT_MRT3847_40645C.1
tacgggtatgagcagacgacaggagcagaaaacaaatcgtgtaaaggcaaagtacagacaaagttagttagaaattgaaagggaaagggaaacgaaaatgagtagtagggtttggtgtgtggtgatggtatcagcgttggcgttgatgttacaatggcacgaagcattcagctcctacgctggctccgcaagtgcgatcatcgacccttccaaggtcaaacaagtttcgtggaaaccgagagctttcgtttacgagggttttctgacggaattggaatgcgatcacttgatttccatcgccaaatcggagctcaagagatccgcggtggccgataatttgtccggcgagagcaagttgagcgaagtcagaacgagctccggcatgttcattcccaagaacaaggatctgattgttgctggtattgaagacaagatttcatcatggacccttcttccaaaagaaaatggagaagacatacaagtattaagatatgagcacgggcagaaatatgatcctcattatgattactttgctgataaagttaatatagctcggggtggacaccgagttgccacagttctcatgtatctcactgatgtaaccaaaggtggtgaaacagtgttccctaatgcagaggaatctccacgtcacagaggttctgaaacaaaggaagatctctctgagtgtgcccaaaaaggaatagcagtgaaaccgcgaagaggggatgcacttcttttctttagtctctacccaaatgctatcccagacacaatgagtctacatgcaggatgccctgtaattgaaggtgagaaatggtcagcaacaaaatggattcatgtggactcatttgataaggtggtggcagatgggggggattgcaatgataagcaagaaaactgtgagagatgggctacccttggagaatgtactagtaatcccgaatatatggttggatctccaggccttcctggctactgcatgaaaagttgcaaggaatgttagaagtgttactgaatgctttccagattccacatggtatttttgacgttgactcaaatttcaattggttctcagatttttattatgtattttcttttttgtgaattgtattgtattctgtctcattataattagctctcagatagtgttctagtgcatggtcacacttcaagaggtacatttcgtcggatactttgtatgtaaaactacaaaaaaggaagtatacgttgttttatcccatgttaaaaaaaaaaaaaaaaaaaaaaaaaaaaaaaaaaaaaaaaaaaaaaaaaaaaaaaaaaaaaaaaaaaaaaaaaaaaaaaaaaaaagaaagaaacaataa

SEQ ID NO: 77112 - DNA, 210 bp, Glycine max
  Clone ID: PAT_MRT3847_40646C.1
cgattcccggtcgaccacgcgtccgccacgcgtcgcgacagaggggtgtgggggttgaaacggttatcattttaggggggataattggctggggaatgaaccccaactatgaagatccgtggatagtcttgtactgtacaacatgcctatttcccacaaatttggatggaagattatgaccaaaccttctaattactacttgcaaagatt

SEQ ID NO: 77113 - DNA, 492 bp, Glycine max
  Clone ID: PAT_MRT3847_40647C.1
tggaccttttaggccgcaacatgtatctgtcccatccgaactatatcgagcatacgctcaagcaggttgtgaatgagaagcagactttggagcacctgcgcgattttttagtgaccgagaaacctgcaaacttcgacgattgtatcgtctgggcgcgtaaccagtttgaagcccagtacaacaacgccatccaacagctgctctataacttcccccgagactcaactacctcaacaggccaaccgttctggtccgggcccaagcgcgctcccacgccactcaagtttgatagcaccaaccctacgcatctcggtttcatcattgcaggcgcgaatctccatgcttacaactacggaatcaagaaccctggcgttgataaaggatactacagaaagattgtggataacatgatcattcctcgaatttacgcccaaatcttgtgtttaagatccaaggccagttgacaaatgaccccgggatccaaaatgcccg

SEQ ID NO: 77114 - DNA, 705 bp, Glycine max
  Clone ID: PAT_MRT3847_40648C.1
tacggctgcgagaagacgcggctcgaggagctccttacgtaaattctccacgaagcaaccctgagcagtgaccataaccacactctctcaagtctctagagagaagctaccaaactccacaacacatacccaattagctaacccctctcacacttacagaccatgccaaacgcaaacatgcttctccttttcctcttccttctggcgctcttctcagccatgacaacaccgtcaacctccgcgatcgacaccttcatctttgccggctgctcccagcccaagttcacgccgggttccgcctacgaaaataccgtcaactcgctcctcacctctctcgtcaactccgccgccttcgccaactacaacaacttcaccgtccccgcctcctccgacgccgtctacggcctcttccagtgccgcggcgacctcaccaacgaccagtgctctcgctgcgtgtcgcgtgcggttacccagcttggcaccctctgcttcgcctcctgtggcggcgcgttgcaggtcgacggctgtttcgtcaagtatgacaatgccaccttcatcggagtcgaggacaagacattggtcaccaagaaatgtgggccgtccgttgggttgacctccgacgcgttgacccggagggacgctgtgctggcgtatttgcagacgtcgatggggttaataagacgttcaggagagcggtatggggga

SEQ ID NO: 77115 - DNA, 728 bp, Glycine max
  Clone ID: PAT_MRT3847_40649C.1
tgaaaatggtgatgacatgtccttgttttcctttgacaccaacactcgttccaccgaacatactactactactactactactgctactcatgcaaattatgagtctaaaagagtgaaccgcacttgcaacttgccaccaccactgaccacaatcactgattttggcggtgttcatgttcgacctcatcgcgaaggtggaaggctagtattggaagctgtagcttctccttcccctcgtccatattttcacatagagcgcggcgatggaaggcttaggctgtgtttgcttgagagcttttcggcctcggatagtgatgatgaagtttgtgatgctgaggaaggtgttgatgcccaacaggaagaagaaaatgaaagtgagaagaacagaggagaagaagaagaaaaggagtgtggtgaagaggatattgctactggggcagaggaggaggaggaggaagagtgtgttgagaacgtggaggatgggatgggagtgaaaaagttggcgagaccaagcaggtgcaaggaaagtgggaaaagagatatttttggtgatgccttggctaatttgagcttccctcgttttctctctgtctccgaatagaatttcgtttactactattatccctcactcttctctttcatttttctttttaggatttcgaccacccttatgattggaagactggtgcatcaaatttctgaatgcatgtcctaatgttagttagtta

SEQ ID NO: 77116 - DNA, 2228 bp, Glycine max
  unsure (1)..(2228): unsure at all n locations
  Clone ID: PAT_MRT3847_4064C.1
gtggtggtgataggcattaaccttggtagctaattggtttttgccgctcagagataccaaatctgatcaaaaggctacagaaagagcaattgacttcatgtatggatggtaagaattcctctttccctttatgtaattttggtgtctccaaaatacacatacatttattgcccccaaaactcttaaattagaaatacaatgcactannnnnactttncaattataccttgatataatcctttggctttgaaggcttccattcatttctcaagccttaaatggagggtcttcacggatctatatactaaggatttgataattctaacttatgattttctttattttttggtgagaatnncngaggggaggggccnnnnnnnnntnnncntccttattttttaatttcaggcacataacggacatgtacttgtacttctcattgctcttgttacctcattcattattatcacagaaggcgttactacccctaatcctgaaatagcatctctgaatcggaatagtttcccaactggcttcatctttggcacagcatcctcggcatatcaatacgaaggtgcagcaaatgagggtggtagaggaccaagtatttgggataccttcacccataaatatccagataagataaaggatagagacagtggagatgtagccattgattcatatcatcgctacaaggaagatgttgggattatgaaggatatgaatttggatgcttacagattttccatatcttggtctagaatactcccgaaaggaaagctaagtggaggtataaatcaagaaggaattgactattacaacaaccttatcaatgagctactagcaaatggtctgaaaccatttgtgactcttttccattgggatcttccccaatcgttagaagatgagtatggtggcttcttaagccctcgcattgtgaaagattttcaagactatgcagacctttgcttcaaagaatttggagatagagtaaaacattggataactttgaatgagccatggagttatagccaacatggttatgcaacaggggaaatggctcctggtcgatgttctgcttggatgaatcctaattgcaatggtggtgattctgcaacagaaccttatttggtctcgcatcaccaacttcttgctcatgcagcaagtgttcatgtgtacaagaccaagtatcagacatttcaaaatggtctgataggcataaccttgaatgttaattggtacgtgccgttctcggataacaaacttgatcacaaggctactgaacgagctattgacttccagtatggatggtttatggatccactaacaacgggagattatccaaaaagcatgcgattcttagtgagagcacgattaccaaagtttacaaaagagcaatccaaattacttattgattcttttgattttattggcatcaactactattccgcttcttatgcctcagatgcacctcaactaagcaatgccaaaatcagctacctaacagattccctttctaattcctcatgttgcttcaaattggttgtacgtttatccaagaggatttcgagacgttttgttatacactaaaaagaaatacaacaatcctttaatttatattacagaaaatggtataaatgagtatgatgattcatcattatcacttgaagaatctcttcttgatatttatagaatcgattatcattatcgtcatctcttttatcttcaagaagcaatcaagaatggtgtgaatgtaaaagggtatttcgcatggtctttgctggacaatttcgaatggcacttaggttatactgtgcgatttggaatgaattttatagattacaaaaatgacttaaaaagatactcaaaactttctgcattatggttcaaggattttctcaaaattgaaatcaaacttgaggaagattccatgtaatagtactactgtatgagattccttaaacaatcatatttgtaaatatatatagtttaggtttatttaattctttggctatttcttatgaatttgtagttcttataattattcttgtgaatttattgttcttgtaatttgaaatctatacgtggaagcttgttttaaagatgtgctgaaatatattaaggtcaagcaatcctaagaatgtaatatctcttaattttgtgaaaataaaaaatatttattatgggattatatttcgcacggtacctggcggggacacacgttttcc

SEQ ID NO: 77117 - DNA, 574 bp, Glycine max
  Clone ID: PAT_MRT3847_40650C.1
cagactccttcctaagctcgctggtttgtccaagcaaactagagccaccttcgcctctcttggatctaaggacctttccaagcaaaacaacactgctaacctcgccagaagagacagattacaattctccaaggaaagactcactgatttcggtgatctccccgctggtgaaatccctgaatccttgaagttcgacagacctgttgaaacctctcaactcaacaatggtgttagagttgccactcaacactggcctggccaacttgccaccatctctgtctttatcaagtgcggttccagacaagaaactattgaaaacagtggtgttgctcacttccttgaacatctccatttcaagggaactaagaatagatctagaagccaacttgaactcgatgttgaaaatatgggtggccaactcaatgcttacacttcccgtgaaaatacctcttacactatgactgttttcaaaaacgatgcttccaaggctgttgaaatcctcggtgatatgctcgccaactccaactacgacaagaaccaaatcgaagccgaaagagaaaccatctatagagaa

SEQ ID NO: 77118 - DNA, 766 bp, Glycine max
  Clone ID: PAT_MRT3847_40651C.1
aattcggctcgaggcgttattgattccgtgacggtgacagcgcggcggctttcaaatctctttctctctgcctgctttttttctctgtctagaatccatttatggcctctgagagaccctttgggaggaaacgccagaaaacccaaagttttgttcttcctctctttgcaatctctacacagaagatttatggataaaatttgcaaatttggttcactgcagcactgttccgtcgcaaatttcttccaccgacaagtgtttgacttcgtggttccgtcgctttttcaacccttcgatagattcattccttggttacgctttctggctctcaaataacattcaagctaccctctttgtcttgtaattttcttctgaattgaaaaaaaaaagttattgacttggatgttttgcaagcaaggcctccagattgtggctttctgagttctaaatctgctcaagtcttaagacagagagattgcaaagtgatttgagaccacgttgtggtgtaaggactaaaatgactgcttcagcccgatcttcccttaagaagatgtcatgggctaggggtcaatcctctggttggacagcttttgatctcaagcagagaaagaataacaattttgaatctgaagatgacaaggaccctttcccagctataggcactaccgatcctatggtcgggaagaaccatgttcctgcaaagcctttctcttcagtacttctcccaactagaaactttcccccttttaaaagaggtgggaatagc

SEQ ID NO: 77119 - DNA, 147 bp, Glycine max
  Clone ID: PAT_MRT3847_40652C.1
agggaaaccaaatgagggtgatccatctgacaccgaagtattccgatatattttgtaagtggggacacaaagatctctgtcagaaacagaaattcatgcaggtcccatcactgcccatacaaataacatgtttattgacataatgat

SEQ ID NO: 77120 - DNA, 1503 bp, Glycine max
  Clone ID: PAT_MRT3847_40653C.1
tcgcgatctagatagagtggagccatctaaattatcacagattccttgcaagttgattgagaaagacatgcacaaaggcaacaaaggtaatcatgatgtggaacagcctgctggctctctaaaggcatgttcttcagtatgctttgtcacatccaagtgtagaatttgtggggataccacatgccattgtgtaattcctagcaattcaatacaggtgtcatcagatatatcatctgaaggatctgaaggaggggatgtaattacacgtggtgctgattctttgagacagaattgcccgactaaatgtacttcacctattgagaagaaatctgatcctgattctgatggggctgtaagttctttggacagtgaacatgtttgtcctagttctcagcatgtaactcctactactgatgcctcttctggggaagtatggagcacacctgttttgcctgtccagctttctcctaaaaaggctcttcgtgctgctatgcttaaaagccgctttgcagataccattttgaaagcacagcaaaagacccttcttgatcatggtgataaaggtaatcctcaaaaaatgcagcaggaaaaggagaggttggaaaggattcagcgtgaagaaagagctaggatcgaagcccaaattaaaattgctgaagctgctgctagaatgagggccgaggaagagtcaaggcagcggagagaaaaggaaagagaagctgctcgagcagctatagaaaagatgaaaagaaccgttgatatagaacattttttggagattattaaagaacttgaaagtttgagtggatgcacgctatcttataaagccgtgggctgtagaaatggctacaaagttgcattggagacattggataaacctcagtttgagaacccattggagcggcttggtttatttatcaaggaagactttaccgcagatgaagatgaggaggttttgaacggaggctttgaagaaggggaaatttttaactgcatgaaggtgtattcagttctgccagcgctaactgtttatatcctttagacagggaaacagacaattattgtaaatgcacatattgtttggaatctagtcttttgactatatctgccttaattacctcttgtctgggaattaggtaactacacgcttgcaattttgttgccaatgatctaatcttgggcattcctttgtgttcagatacttgtgtctttttgggcaaggaatctctatgccgggacagcatgtcaagactttttctcccagtttccttaattgtttcagattcgcttttatcatgctcatcttcacacttccatttccgacctaagtctttccattttctgtcaaatattttgctgagttcctttgccatcaaatgaacatcattactgggaggattatatttcatagcatttgagaaggtcagtctgacatcagctgcaaactcctcagtgccagaataaatatttttctccagcttagatttaattgtgcccaaatcc

SEQ ID NO: 77121 - DNA, 2460 bp, Glycine max
  Clone ID: PAT_MRT3847_40654C.1
tccacacgtccttttgttgtgcaggagacacaaggggacaatatataccttttaaacattcggtgaaaaccctagacggaggttcttaaccacactgatactctcacagcgccactcgctttggcagcgcaactcgtcttcgttccttagactcggctcgatctgcgagaggggcttcctagccctccctctctctctctgctgcaattcaggtgatttgtcttcacatggaaacattgcttgcttgagggactcctttgtctcaaaggagttggaattttctggttttttgtgggattggagatttagagagtgcccctgcactccctgttttatttcatcaccatgattgccactgaaactatagtgccgagtacaaaattgaagatcaagttttcaaccaaaagaatggaggttgatgtctgggccaaaatatgaatttggacagaaagtgtctcacactgacgaaaacaggagctgtaatttgaatggaaaatcctcagcactgaattccaacaagaggggaccaccaacaagtattgagggccaaaaggagaaaagggcagagtacttgatcggaaaaggtcgatgcagccaaaccctggaattaagcacgttatttcattagggttggttttgttgaacagaaaaaaagagaaaaaaaaattatgggaagcgatggcgtgaggaaaccaagattcctatgccttcatgggttccgaacaagcggagaaatattgaaaacacagttacataagtggcctcaatcggttctagacaacctcgatctagtatttgtggatgctccttttccttgccttggcaaatccgatgtagaaggcatttttgatcccccttactacgaatggtttcagttcaacaaggaatttacagagtacaccaactttgacgagtgccttcagtaaattgaggaatgcatgataaagtacggaccaattaatgggcttcttggtttctcatagagatcaatattatcgtctgaagtacctggtattttggagaagagggacgcactcttaaaggtccctaggtggagaaatggcaaaaaagttgcagtggagacattggataaacctcagtttgagaacccattggagcggcttggtttaattatcacggaagacttcaccacagatgatgatgatgtgattttttgaacaggctctctaaagtagtacacatctaagtgtagaatttgtggcgatatcatatgcccttgtggaaatcctagcaattcaacacaggtgtcatcagacatatcatctgaaggatctgaaggaagggacctaattgcacgtggtgccgattcattgagacagaattgccggactaaatgtacatcacctatggagaagaaatctgatcttgattctgatggagctgtaagttctttggacagtgaacatgtttgtcctagttctcagcatgtaactcctactactgatgcctcttctggggaagtatggagcacacctgttttgcctgtccagctttctcctaaaaaggctcttcgtgctgctatgcttaaaagccgctttgcagataccattttgaaagcacagcaaaagacccttcttgatcatggtgataaaggtaatcctcaaaaaatgcagcaggaaaaggagaggttggaaaggattcagcgtgaagaaagagctaggatcgaagcccaaattaaaattgctgaagctgctgctagaatgagggccgaggaagagtcaaggcagcggagagaaaaggaaagagaagctgctcgagcagctatagaaaagatgaaaagaaccgttgatatagaacataatgtggagattattaaagaacttgaaagtttgagtggatgcacgctatcttataaagccgtgggctgtagaaatggctacaaagttgcattggagacattggataaacatcagtttgagaacccattggagcggcttggtttatttatcaaggaagactttaccgcagatcaagatgaggaggttttgaacggaggctttgaagaaggggaaatttttaactgaatgcaccttcatgcagttctgccagcgctaactgtttatatccttttagacagggaaacagacaattattgtaaatgcacatattgtttggaatctagtcttttgactatatctgccttaattacctcttgtctgggaattaggtaactacacgcttgcaattttgttttacaatattatagcattccttcgagcaaacgtagaaaactctttaatagacgtgatgtgtctttgtctcgatgtaaataggttaatataaatgtctcaaaaaacaggaattttttttatttagttaccctagacaaagctttttatattcgcaaggagaccagaagcatcctggcaaatctgcaagtatttacacacaaaaaaaaaaaaaaaaaaaaaagaaaggcgcggctagtgaactagtcag

SEQ ID NO: 77122 - DNA, 649 bp, Glycine max
  Clone ID: PAT_MRT3847_40655C.1
attaaatctaagctggagagaaacatttattctggcactgaggagtttgcagatgatgtcagactgaccttctcaaatgcaatgaaatataatcctcccggtaatgatgttcatatgatggcgaaggaactcagcaaaatatttgacagaaaatggaaagactttggtaggaaatggaagtttgaagatgagcatgataaaagcgaaactgaaacaattaaggaaactgggagaaaaagtcttgatgcaatgcttccccggcataaagattccttgcccaaaaaaaacacaattattcgaacacaaaggaatgcacaagattagatcattggcaacaaaagatgccagagtggagacacctaaattatcacagattccttgcaagttgattgagaaagacttgcacaaaggtatgaatgcattaagagtactgtgcaggtttctggctcttaaaggagctgataactgtgtattatataggcagcaaaggtaatcatgatgtggaacagcctgctggctctctaaagtcatatttttcagtacgttttgtcacatccaagtgtagaatttgtggcaatatcatatgccattgtgaaaatcctagcaattcaacacaggtgtcatcagacatatcattcgaaggatctgg

SEQ ID NO: 77123 - DNA, 1413 bp, Glycine max
  unsure (1)..(1413): unsure at all n locations
  Clone ID: PAT_MRT3847_40656C.1
gaaaccagactgatatactcttagtgtcttacacacactgtggctttggcagcgcgactcgtcttcgttccttaccctcgggttgatctgtgagaggggcttgatagccctctctctctctgctgctgcaattcagattgttggcaactattttttatacagacgatttgtcttcacatggaagcattgcttgcttgagggacgcctttgtctcaaaggagttggaattttcgggttttttgtgggattggagatttagagagtgcccttgcactccctgttttatttcatcaccatgattgccactgaaactatagtaccaagtacaaaattgaagatcaagttctcaaccaaaaggatagagattgattctgggccaaaatgtgagtttggacagaaagtgtatcacaatgataaaaacaggcgctgtaattctaatgaaaattcctcagcactgaattctaacaagaggggaccaccagtaagtgttgagggccaaaaggagaaaagacaaaagattgatcggaaagggtcgatgcagtgtgctacaatacttaagagtttaatgtctcactcatatagttgggtgtttcttaagccagtggaccctgtagcattgagtattccagattattttacaatcatatctcatccaatggatttgggcacaattaaatctaagctggagaaaaatatttattctggcactgaggagtttgcagctgatgtcagactgaccttctcaaatgctatgaaatataatcctcccagtaatgatgttcatttgatggcaaaggaactcagcaaaatatttgacagaaaatggaaagacttaggtcggaaatggaagtgtgaagatgagcatgataaaagcgaatctgaaacaattaaggaaactgggagaaaaagtcttgacatgctgtcccggcatagagattccttgcccaaaaagacacaagtatctgaacacaaaggaatgcccaagattagatcattggcaacaaaattgcaagcgtgtagttacctaattcccagacaagaggtaattaaggcagatatagtcaaaagactagattccaaacaatatgtgcatttacaataattgtctgtttccctgtctaaaaggatataaacagttagcgctggcagaactgaatacaccttcatgcagttaaaaatttccccttcttcaaagcctccgttcaaaacctcctcatcttcatctgcggtaaagtcttccttgataaataaaccaagccgctccaatgggttctcaaactgaggtttatccaatgtctccaatgcaactttgtagccatttctacagcccacggctttataagatagcgtgcatccactcaaactttcaagttctttaataatctncacattatgttctatatcaacggttct

SEQ ID NO: 77124 - DNA, 149 bp, Glycine max
  Clone ID: PAT_MRT3847_40657C.1
gtggtacggcctgcaggtatccggcccggaatgtccggctcgacccacgcgtccgtgtggttgtgggcgaaagctgcttgccagaaactgagcaaagaagccagtaaagggcggtttggaaattgctactattagttttctgctcttac

SEQ ID NO: 77125 - DNA, 352 bp, Glycine max
  Clone ID: PAT_MRT3847_40658C.1
gatggcaagctgatacagcctagctcaacccagaagatgcaaaggatagccattactagtcatcgttcccgtttgggtagcaatgattgctcgaatcatcgagactgtgtctgataaggtaccagcacaccttttcgcataatcagtagcacacactgtgaatgaaccattgctggtggtaaacgtatatgacttagagccatcgaatgtctctgtatatatactacacatgcggtttaatgtgtggcacaatgaagagccggctcatcgtgcatagctcccaatagatttgagaagccgtattactggattactatgacatcatggggcgatagctggggagagaatggat

SEQ ID NO: 77126 - DNA, 437 bp, Glycine max
  Clone ID: PAT_MRT3847_40659C.1
ggcgggaaaaaaaaaattttattaaaacataaggggttaaattaaacccttaaaaagcaaaccaggaaaaacaaaaattttggcgtaaaaaaaacgggacaaaaaaaaggggttaaaagggggggttttttttttccaaattttaaaaggggggtccaaacctgggggaataattttttcttggaaaacaaatgttcccaaagttttttttgaaaaaaatttttaaaaagtttttgcaaatcaaaaaacccctttttggagggaattaaaaataggtggggaaaaaacccccctttttaataagggatttgggccaaggaaaagaaattaccttggcggtaatacaaaagaaaggggcccatattagccgaaattaaaatttccaaaaaaccaaggataaaattttttttctcaaggggcccccgggctttttttta

SEQ ID NO: 77127 - DNA, 307 bp, Glycine max
  Clone ID: PAT_MRT3847_4065C.1
ccggctcgaggggtcgaggcgaggaacatcacaacatggtcaactttaccggactggacagcatgaagtcgctcttgcaatgccgcaggctagctaaagatggaccggtagcaggacattacatatgcgtacgaattgatggcaggcaattacagagagtctgatgacatactcgtagttgtattgagcatggacatgaggggctgaaagcgcgacattgtcatggcgtgctataacagtaaggccgcagagagtgatcctgttgcactttacggagaaccgggatcgtgacactcatacacacgat

SEQ ID NO: 77128 - DNA, 305 bp, Glycine max
  unsure (1)..(305): unsure at all n locations
  Clone ID: PAT_MRT3847_40660C.1
acacggaaagcggaccaggcgacgggggaatcacagccaccagagaaagcccccacccccaaaggaagagccccaaggccccacgccgacgacgctcagcaggaagcggnggccagcacgagggcaaggacaccggagtgacacccgcagctcaaccgcacatgaggcatgaaggcccagcacgaaacaggaagactgggcagaaggaaacaaccctgagcacagcaagagccggagcaagaaaaggggcggcaaagcgtggacggatgaacgaccgagttggaagaagaaaaacaaacctggac

SEQ ID NO: 77129 - DNA, 537 bp, Glycine max
  Clone ID: PAT_MRT3847_40661C.1
gcattctgaccactttcttccatgtatttttgtcttgctgagtggcatgggaatcaacttcttcattcaatatcttgcgcatatgttttgactctgaaatgtcgggcttctccttcaataactctatgggagtctccctttttttgatataggtttccatctcaattttctcttcttgcttcaagatactcaaaatctttcaaagaagtggttaccgtctccgaattttttttatcaaagccgtgaaaaatgattcctgatctgaatctgagttcttttggctctaaatgtagaatcaatgcattgcaacacctgccatgctcatgaatgcatattacagcttatggaataaaagagtttcttgtacctcagaatttttagccttagtaatccaaccaattgggtcttccccacaaatgttggcagctcccccttaacctgcgcttcctccatctctaaaattgcctctccctcgaagatccagcaagttggaccaattgttaggagccaagaatcagaatggaaagaaaagataga

SEQ ID NO: 77130 - DNA, 1148 bp, Glycine max
  Clone ID: PAT_MRT3847_40662C.1
ccccgcttgagttccaatttgcctagctctgaagcgaatatcatggcacgcaagttttcaagattgcttagttcaattttcattcaaagactttggaccaggacccaggttcttggccaatggtgaaaacaaagcagaaacgcacaggagaagttcctggtaaaaaaagtggtacttcttcacattgccttgttgattctggagacggtgataatcagcatgaggatagtgattggattatagtgaaaaagcagagagtcaccattctggtgcctgctgcacctctcaatgatagatcattaacagcaaatcaaggaccaaatcacatgcatcttatgcctcctgaaatagcaagtaaccatgtgcagcttcccatgcagacatctactgtgcatccttcaggtaaggaacatgagaaagccactttggctctccgaaaggagactcgtgccgagagaagagctccccctaccttacctaaaccaactgtggtcaatccaccgtctttagatgaaataatagaatcagaaaatccacatcaaacgaacagtttgaagtcacataaactacttggaatttctgatacatcaaaagttattaagcagcccagaacactacttgcaccaagaaggtcctccaacttggaaactctgaataaaagcttaagagcatcaaaccttgagaggaagctcgaaagagccggtggacttagcaaatggctgacatcgcttggactggcgcaatttgtgagaatttttcaggggaatagtctcagtaagtatcagctggtaaatctaaccatgaaaaaactcaaggatatgggcgccagtgcagtgggacctcgcaggaaactgatccacgccatggactgtgtttgtcagccatattgctttgaggcattgtaaaagttcttaggattttcagataatgtacaaaaatgttgatccatgtagccgaccccacctagtgggataaggcgttgttgttgttgttgttgtacaaaaatgttccaagacatggcacaaatgcaaaacttttgtttctgtatgcttttgtgatggttcacagcacttgagtcccaaagtacttgtagagatttctgtatataacttataagcaagtaaacgcattctacaatgaatccttct

SEQ ID NO: 77131 - DNA, 414 bp, Glycine max
  Clone ID: PAT_MRT3847_40663C.1
atgcaggtacccccgcagggtccggtcctgaattaattcccgtttcgtctagctcacttgtttgaacgacgccctttcatttcatatatgaaggtttcatttgactgatcattggatcaccggaaatatatagatcacctggggttcataacatatcatgtttgaaaacaggataggagtacattgcttacgaatgaaaacccacaacttgtgatcacattcggctgccaattgaaaaccatcaaggtcaaactagatcctttgtaacatggaaattacaaaatatgggggaacatatggtcatctatgatgccagataaccccgccatacttcataacacttgggccacctgatcagccgttgactctgaattccaactgctcctagtgatccgtctaactccgccatcacct

SEQ ID NO: 77132 - DNA, 175 bp, Glycine max
  Clone ID: PAT_MRT3847_40664C.1
aagggcaccggggaaaacccctttgatttttgaccctaccaagcaaagcttttgcaaattttttattgaccttttcgggggaggaattttaggggacaaaccgtgggattggatcaccctcataccaaatttctccatttagaacttgttgagagtcgctgcttggaaaaaggct

SEQ ID NO: 77133 - DNA, 344 bp, Glycine max
  Clone ID: PAT_MRT3847_40665C.1
tttttctcaagaccgcaaagaaaaaagctatggggaggggccgaaccacaagcgcgaatctgaccctatctacaaatggtctcaccaaatctgccttggcttacagcattacaagtctatatccgcgattcctgttaacaaacaccacctaggatgctgaccaacggaaacaaagcacaactctgcaccaaactcctccccagttttgctttcaacggacagggatggaaaaatgaaaccattacttcttcagcaaagacaaaaaaatcctcctggggatgcctactcatcatcaaaatcatcaggagctcaaatctgcttcaaatcagcacttttagctacct

SEQ ID NO: 77134 - DNA, 534 bp, Glycine max
  unsure (1)..(534): unsure at all n locations
  Clone ID: PAT_MRT3847_40666C.1
gataaaaaaatgttgttgattttgaagtattatgagtggcatgcatgacaaaatcacatgacaccaaggattaatttgtctggatggaaattaaatcattgaatgtgcacactccaacgagatcctagtccaattaagaggatctagatccatgagaaaacattcaagcataatgacttaaaagcattggaaacttggttgaatggcatagtagttgctgctccaccatggcatcaaagactttgtcataagcaacagacgaagcagacctgacatggttcccatgaacaagcggagcctgtctctggaaaatcaaaatagatgtttgagccgcagagttcaaatcggtcaaagcatcgccaagaggccccaacgcaggctcctccaacaccggatccagcgtctgcgccagcgacatcttcctcccatgccctctccccaccacatacaaatcaaaccctttattccctatcttatccaacaccttcaccgtctccttctcatccctcaccttcttctncaaatacctaaccc

SEQ ID NO: 77135 - DNA, 176 bp, Glycine max
  Clone ID: PAT_MRT3847_40667C.1
gattcatattgatagaacagacaaagaaaaagtaggtacttcaaccagagtgagacgctccaccagaaacggaggctccaccaggatggatccgtatcctgatccgtacctctgcgacataaacccaccgttccttcctcttattccattttcgaaaaactcacctttctaactga

SEQ ID NO: 77136 - DNA, 268 bp, Glycine max
  Clone ID: PAT_MRT3847_40668C.1
gttaggtaagaattgagtgcatctggaacgtttgggtttggcggtgctctggtatttgggatcctattattaagcttttctggttcctttgtgaacttgttgtcagttttctgtattttcggaggtcttcctctgtgttcaggagctaggataatttgttccgtagatagtagctgtttacttaacacacttttcctggaatgggtgcatgcttgacacggcagacatctttatagctgctagactagagaattctgttataaaattg

SEQ ID NO: 77137 - DNA, 398 bp, Glycine max
  Clone ID: PAT_MRT3847_40669C.1
cgaataaataattaaatactcattggtaccagaaggccctttatgaaataccggattcaagaatatccacttccacccaaaattccacctttttgaatcccgaatcccgttggtggaggcccttcatggcccaagattattttattctccttaatacctattggaagaaccaggcttgtttcttaatcttaattaaccaactgggggtgaccggaacccctgatttttgcttcccctggaaattaatccaaagcccaacccgcccccagaaagggaattaatggggattgaatggattcgaccggccaattttaaaacccttcggaccgtgccacccttgcaaggttaaacggcttttaacaatggaaaataccccatttttggaccaacctcccaaa

SEQ ID NO: 77138 - DNA, 1512 bp, Glycine max
  Clone ID: PAT_MRT3847_4066C.1
gaaggaaagttaagtggaggtataaatcaagaaggaatcgattattacaacaaccttatcaatgagctactagcaaatggtttgaaaccatttgtgactctttttcattgggatcttccccaatctttagaagatgagtatggtggctttttaagccctcgcattgtgaaagattttcaagactatgcagacctttgcttcaaggaatttggagatagagtaaaacattggataactttgaatgaaccatggagttatagccaacatggttatgcaacaggggaaatggcaccaggtcgatgttctgcttgggcgaatcctaattgcaatggtggtgattccgcaagtgaaccttatttggtctcacatcaccaacttcttgctcatgcggcaagtgttcatgtgtacaagaccaagtatcagacatttcaaaatggtttgataggcataaccttgaatgttaattggtacgtgccgttctcggataacaaacttgatcacaaggctactgaacgagctattgacttccagtatggatggtttatggatccactaacaacgggagattatccaaaaagcatgcgattcttagtgagaacacgtttaccaaagtttacaaaggaacaatccaaattacttattgattcttttgattttattggcataaactactattccacttcttatgcctccgatgcacctcaactaaaaagcaatgccaaaatcagctacctaacagattcccttgctaatttttcatttgtgcgtgatggaaaacccattggtttaaatgttgcttcaaattggttgtacgtttatccaagaggatttcgagaccttttgttatacactaaagagaaatacaacaaccctttaatttatattacagaaaatggtataaatgagtatgatgattcatcattatcacttgaggaatctcttcttgatatttatagagttgactatcattatcgtcatctcttttatcttcgagaatcaattaagaatggtgtgaatgtaaaaggatattttgcatggtctttgctcgagccgattcggctcgagttgaatcgtacagtgtaacctaagtgccatttggaatgaattttgtagattacaaaaatggcttggaaagatacccaaaactttcagcattatggttcaaggattttctcaaaattgaaatcaaacttcatgaagattccatgcaataatactagttactatttgagattccttaaattgtaaatatatatatatatatatatatatatatatatatatatatagttgctaggtttatttaattcttaggctattccttatgaatttgtagttcttaaaaatattcttgtgaatttatagttcttggaatttaaaatatatacataacacagtgtaagcttgttttaaagttatatgctctgaaagttattaaagtcaagcaatcctaagaatgtaatacctcttaactttgtgaaaatgtaaatatttattataggacttgatttt

SEQ ID NO: 77139 - DNA, 156 bp, Glycine max
  Clone ID: PAT_MRT3847_40670C.1
tccactcttccgaaactacttaaaaattttcaaagacatgactaccactaagtcattcgtataatctataccggtaacttatactatccataaaataatactcaatcctatctcttattcattatatctaaagccactgtctctactcacttattc

SEQ ID NO: 77140 - DNA, 267 bp, Glycine max
  Clone ID: PAT_MRT3847_40671C.1
attttcctttgtttgacttgattccttttctgggttgttgtcaaaatttgagcttgttcgtggacgatctggttttcgatcgatatcctgttttgtttactttttccttgtggggttgcttcacaatgaaaaaaacttaatcatagtttagggttttcttttttagaaaaaaaaatattgttggctaggaattggagatttaatgttttactcctcattaaaagtgagtataagttacatataaaacttcaattctaattaaatggt

SEQ ID NO: 77141 - DNA, 600 bp, Glycine max
  Clone ID: PAT_MRT3847_40672C.1
tgcggggccacgtgggcggctgcgagaagacgacagaaggggattgtgcctccgaaccaaaacctgaagcctagaaccttcttccgtctcacagtttgccggaatcagcgatggatcctcagcccgagccagttagctacatctgcggagattgtggaatggagaatacgctgaagcctggtgacgttatacagtgccgtgagtgcggttaccgtatcctttacaagaagcgcactcgtcgcattgtccaatacgaggcacgctgaagaaaactgctctgacattggcaagtaatttccatggaaattgttactacatctgtgttgtgatattgaagaactacttttaattctacagtaccattgcttttgggtgatgtttagaaaaggataaaaactttgaaatgtgaatatgttacaaatatttgtgtttcattagtttgcaattttatcactacgatggttaaaaaaaagtttcaactaggaaaaggattggtgctcttaatggatcaacttgctatgatttagaaaacagtctgcccacgcaacgcttcatttgtggcttgtaaaatgagttccattcgaaatataacatattttg

SEQ ID NO: 77142 - DNA, 174 bp, Glycine max
  Clone ID: PAT_MRT3847_40673C.1
ataatcaactaattgaatggggttaaattgattatgtaaccaacacacactattcaataaatacataatactacagcaaccataccatgatttctgaatttctaacctcccttatgggacaatctcatttttgggatcttatgctacaagtacagagatttatgaatacctatt

SEQ ID NO: 77143 - DNA, 556 bp, Glycine max
  Clone ID: PAT_MRT3847_40674C.1
aaaattatgggcatttggagggtatagaagggtgaattgaccccttaagggggggcaaagtcttttttttaccccctttgtctaggcctctcctttcactgtattgtggttcagtacaacccaatagcgatgctttcgatggtgaatgtgaagaaaaattggaagccaaaggctatatatagcctttaacaatggaactagtgcggcggtttttttctccccgtacctattggtccgtgtatgtgatctagtagtttttccattgtactcatcgctttgatacctgtatcttgaaccaaaatgaaggactgtttactttcttgtcacaccaattttatttgaagacattacaacttagtaagatcgacctacttcacctgcctcaaaccgcagtgaagaatgatggagtgacagacaaagggagctaaatgagtttgctgaggtcgtcgagttaaaaagtgaaaaacttaatgttcataaccttataaatagcgaaccagacgatagattttgcttgaaatatttatacatgagaacgacaattacattaaaaaaa

SEQ ID NO: 77144 - DNA, 402 bp, Glycine max
  Clone ID: PAT_MRT3847_40675C.1
ggcagtcatcgttctgcttaagttcatagagagtgtgtgtatgatgcagcagcagcagaacgtggcattgatttggaatgggtacgggtagtgttgtcagctgatcctggggctagattggaagatattgaggatcaagcaccacctctgaggaaggaacatcgccgtgttccaagtaccgtggcaatagaggaagtaaaggctgcggcagctaaaggggaagcacctcttgaactccctttgaaaggcgctggtcaagattcttccgatgcacaaccaagggttaatggacttaatcccaaagctagcgatgccttgtctggtgaactttgggaggcaaagaaggataggatatgcaaggcttccatatatggaaagttacatggttgggacttgcgatct

SEQ ID NO: 77145 - DNA, 972 bp, Glycine max
  Clone ID: PAT_MRT3847_40676C.1
caagtgttagatctgtacccgcctagcaattgatttggaaaagtccaagcttcaaagatgaggtattcattctctcatcttcaacttatctttgttcaaatttcttagtttgttcgtacgttttattgtgaaagcaatgttgttgattgtttttcgttgatagctgatgtgtactttgcgtggtcttactgtgtatgatgttaatgaaaattgttcggtgaaaattgtgcatttggaaaatctatgttttgtgttttctgatctgtattgggtgttggttgttatagtaagctttagagtgatgcttttagagaagctatctcaggaatcatgactgattccaaggaaaagaacaggaaatttgtggagaccattgaactccaaattaggctgaaaaactatgatcctcagaaggacaagcgttttagtggctctgttaagttgcgtcacattccttgccccaagatgaagatttgtatgcttggagatgcccaacacgttgaagaggctgagaaggtaggattggactacatggatgttgaggccttgaagaagcttaacaaaaacaagaaattggtgaaaaaactagccaaaaaatatcttgttactcaacttcttcaacaagtgattattagtgtcaaacaatatcatgtacgaaattaaaagtgtactgtagggactaagtaattataccttactaatttatcaccggttaaaaacaagtcattatctcttattgtgggattttgtgacttattttattttcattttcctttgtgaatagttattctcttggtatgggcaatgttccagaattatggctacaatctgttggcatctcctactatccaagcatattagacgccagttatgttcctgttgttattgaagctttggcaactattagaagcaactgtttgtgtgcagaaaacaataaattttcattgataaaatgaaattctggagtgttaa

SEQ ID NO: 77146 - DNA, 187 bp, Glycine max
  Clone ID: PAT_MRT3847_40677C.1
cctcgaaccgtatcggctcgagggtggagataacggcacctgcaattactgaggatctcgaaaactttatgccaaatcagactatttaggcagctgaaggggaagcagctaaatcacagtatcaacagggcccttctggccactgggtcgatgtgatatgaagctcaagcgccagtcatgcgaatat

SEQ ID NO: 77147 - DNA, 261 bp, Glycine max
  Clone ID: PAT_MRT3847_40678C.1
aggatcaaaggtatcaattttttgatttttttaaggggttataataactaccttttacaacttcccataaagttaccttttttgcataatgaacaaacttaactaccttaacaaaattgccacattgcctcaaaaaccaataaatcgtatgccaaagcaaaggttgaaaaaaaaaaacaagaaatttttggttctgacgagattataaatatgcaagcccttttagtccctatcatatattcaaaacatgggttcacacct

SEQ ID NO: 77148 - DNA, 248 bp, Glycine max
  Clone ID: PAT_MRT3847_40679C.1
cggctcgaggtacctttgggagatgatgtgggctctagaatatgatcctgatttgttcttgatgtatgaaatgcctcaatcagcttctgaaaaggctgagggctcaaaagggaaaacaaagtcaatacgtcaatgtggaaagtatgagagagaaattgtgaagagtggagcaaaaaatgctgaagcacctcttcctatgtctgttttccttgttgctagtgttttgaaagataaaagtgcaaaactac

SEQ ID NO: 77149 - DNA, 563 bp, Glycine max
  Clone ID: PAT_MRT3847_4067C.1
gcacgagcaacatcacaaaggtcgctgccaagatattcacactatttctccactgagcctattagagctggtaagctatacaacactcccattcacaccaaagacttggacatgccattcactgattcacctagaaggtcttccaagagaagggctaggagaaaaaccatctacaagccttctcccaccgttgtttcgtcctctttcattccctcttccggctatgactccgcgaatcattggatcaagccatgccaggttcagtcaccagattatgatgtgtcttcagctgaaagctcttctgagtctgatcttcatgagtatgcttattcagagtctgaatgtgacagcttttctgttcctgatttgcttaatggaatggacactaattgcagctgcagagttagctcttccactaatgacatcatcattgacatgaacagtgagtccttccttgggaatccggaaaagcaagatgggtttgatgcaatttcacagcttggtcttgctccaatattgacaaggccagtgaagtttgatgataaggtcatcgaagccgctga

SEQ ID NO: 77150 - DNA, 410 bp, Glycine max
  Clone ID: PAT_MRT3847_40680C.1
tcttctacccgtccgaaccctcgatcactctcacgcgcttttatactcgctcctccaccgtcgctctctcgaacaaccacaacaccaacttcatcacatggtaaacgcaatatctggcatggcagtccatgatgactgcaagtagaggtgctaggagctgaaggcaaaaaggacacaccgtttgatagattttaagattgaggagcagaagaagcaggtcattgtggagaagcttggtgagcctgcccaggggtatgaagattgcactgccagtcttactgctgacgagtgccgttacgcgggtcatgatgttgagtatcagactgaagggaatgtccctaaaagcagaatttattcattgcgtgggcccctgacacctcaagggtgaggagcaagatgatttaagcaag

SEQ ID NO: 77151 - DNA, 227 bp, Glycine max
  Clone ID: PAT_MRT3847_40681C.1
tgcatactgagttatccaccttgactctcatataacgagaaccgcctagccactagtcctacttcagatgagatagggcacactcatccctcttgttccatccatcatagatgtaataacaacattcgcgcgcccttcgtattttccttactcaatccgcgcgacaccaaaaccctagatacgacgcacacatctggtctttccagagacagcaccgtgcatgaccc

SEQ ID NO: 77152 - DNA, 628 bp, Glycine max
  Clone ID: PAT_MRT3847_40682C.1
ccacgcgtccgctagaactgctcactggcaaggccccactgggatatcctggctatgaggacatggttgatcttccaaggtgggtgaggtctgtggttcgcgaggaatggacggctgaagttttcgacgaggaacttcttagagggcaatattttgaagaggagatggtgcagatgcttcagattgcactggcctgtgtggcaaagctggcagataataggccaacaatggatgaaactgttaggaacatacaggaaattaggcttcccgagttgaagaaccctaacacatcatccgagtctgattctaatctacaaactccatgattattttgtatatgtatgcttgccttgccatgatgcacttgttattttctgttcaatgcaaggaataaccttgctttgtctctagaattttaaagttatggtaactctattgtatgtttagatgacaatagtagtttcttattctccaaatgtagtaagaaacgtagtgtcacgtgagtggtcattgaagaagtaaaaattttaaaaccttacattcttgtataattcatttgtgtattttgcatgaattttcattgtccccctgatccaaataagaaagacttggaaatctttgaattccc

SEQ ID NO: 77153 - DNA, 344 bp, Glycine max
  Clone ID: PAT_MRT3847_40683C.1
tgcgacgcgtccgaccacacggccgcccgggggttcttaaacaagcaaccgtgtgaataaacctgacatagtgaaccaagcatggcaagaacacacaccttcacaatcgaaattagtgttgcataagagccatgacgggggaagagactaccgtgaagaagagggtggggacataatgcctgggatggctaacggaatggtggataatgccaaagaagcaccgtgccatagctggcgttggcacattctcaattctagaattgatggccgaactgtgcatgattcaggaagaatccagaaagactcgcgaattggcaggccccgatgacgagtaccaacgcgcc

SEQ ID NO: 77154 - DNA, 686 bp, Glycine max
  Clone ID: PAT_MRT3847_40684C.1
gaacacaggagtgtggcatccacaagttcaggaacacgtgtcattacattcaatcctctccctttcttatctcatccactactcggttaacggctgcgagaagacgacagaagggggaagccaaggagaagataatctcataaaaaacagaaaaaggagtgaaaaagagagacccttttgaatggagtctgttctaagccacgttggtgcaggtttcttcaatggcatgatcccaaggggagttttaggtacccatttcaaggctagttcctttgttggtgttgatggtgggaggccaaggcgtgtagtgttggtgaaagctgaggctgtgagcataaacccagatataaggaagagtgaagagaaagtggtagattctgtggtggtaactgaactctccaagcccctcactccttattgcagatgttggagatcagggacttttcctctatgtgatggaagccatgtaaagcacaacaaagccaccggagataatgttggccctcttcttttgaaaaagtaaaattatgatgatcatggcctgtttttattagagaattacattaaatattttaaggaagttttttttttttttttttgtggatcagacttggcatttcaatgtttgaaataaagcgtggcttatgctatgaatgtgattccttttactgtctattatcccctcc

SEQ ID NO: 77155 - DNA, 470 bp, Glycine max
  unsure (1)..(470): unsure at all n locations
  Clone ID: PAT_MRT3847_40685C.1
gaacccaaagtttcaaaccaacaacaccaacaaggttcaaaatatggagatgaagagagagattattaccaaggaggaagagcacaaggaggatagcatgcacactatagtgttcacagcaggtacatttcttctgatggtgtgtctaaagcactttctagttgagcaatggcgtgcttgggttttcctcatcctcaatgtcattttgttagccattttattcatgtctatgaggccagccaagctggaggatcacagttcaggaagtgaaatcagtgttgaagaagtgaaaagtgacaataataaattagagaaaaagaggtctcgagaaactgaggaaggaaaagattgctacacaaaacaatgttgtagtagcactagtagtagtacttatgttcatgttgagaccccnaaaaaaaaaaaaaaaaaacaaaataaaagcggccgccctagaggattcnagaaaacgt

SEQ ID NO: 77156 - DNA, 346 bp, Glycine max
  Clone ID: PAT_MRT3847_40686C.1
ctttgggctgatttatgtgcttgcatggtcgtgagaagatcatagaaggggcagtacattgcgattaaatcaaacggagaagaacgctaacaccgaatatagtaggcctacataagcccagtagcgattgtatgacctacgaacacgtttgagagacacggaataccgaattagcttaaccgttacagaggagcacagagaactggcgttacgcggccgcgacgactatcgtacagtccaaccttctgcagtagagaacaaaacacaatcctgtgcagacatgtctcccaagggcgtgtctacagctaaaacaagtccgtagcctcgcaacacacacgccccacgg

SEQ ID NO: 77157 - DNA, 210 bp, Glycine max
  Clone ID: PAT_MRT3847_40687C.1
ggcttggatttctcacgaccaaccggttttgtgctccgaatcgaatgactttttaatctcaaaagttcctcttggatcctgtttccataaaaaggggggggcgctatatgtctggtggccagccatgactgttgcgatccacgatgctccacgtaagctctatcattgagaccaaccatggagtctttaatccccgtgatttttttaaac

SEQ ID NO: 77158 - DNA, 540 bp, Glycine max
  Clone ID: PAT_MRT3847_40688C.1
ggctcgaggtggcaatggcagcaccgctcttcctattctgcgggccaacaaagatttgattgtttatgcatgcgactgtagtgatgagactcttgagagggctaaagagattataagtgcagcctccacagatgcatcctttaagcatcgattccgcacattctgttgtgatctttccactaatggattcccgaactggttggcgtgcaatccttcccaagataattttttacagaaacagtcatactgcttatcaggtgtcagagaggataatgggctgcattttaccaatctgtctccctcggaagaatttgaatgttgtggtggtggagttgattttgtaacattgatattcactctatcagcagtaccactggaaaggatgccaaagtccgtcaaggaatgttttattgtgttaaagccaggaggcatggttttttttcgggactatggcctctatgatatgaccatgcttcgatttgagccagactagcaagtgggattcatggaatacatgcggtcagatggaacacgatcata

SEQ ID NO: 77159 - DNA, 267 bp, Glycine max
  Clone ID: PAT_MRT3847_40689C.1
gtacatcgctttctgaggcaggcatgtggtcaaacctggaaccacatccctgggaattggtcttcccaattcaggcgcgtggttccaacaatggggtggacaagttgtgttcggaatgggcatatcactctgtatgggccatgagcttccttattgacaatcccaaacagtctaaggtttttggcattatacttgtgatttttccaatatgacgtaattgcagattaaacctttatgcgcgctttttttgtttcacaggctaatgtc

SEQ ID NO: 77160 - DNA, 218 bp, Glycine max
  Clone ID: PAT_MRT3847_4068C.1
cacacaacaaacgagcttgcgaaagggagaataacgaataacaacacaggcatacacgaacaacctaaaagcctagaagcccaggtcatagaagaaatctgaaacaaggcataacaagcggacatcgccacacaacgacggaatgacagcgaaggaaaacacgtcactcacgctgccatgatcggcgaagaagagtcgcggtcggctcagagtaccga

SEQ ID NO: 77161 - DNA, 1254 bp, Glycine max
  Clone ID: PAT_MRT3847_40692C.1
aggagatgaaggatgaggattagggtgttgaagatgcacactctcaatacttcatacggttatggagggttcaagtgggattctattaatttagaccacccttcaacgtttgagacactggctttggaggcagagcagaagagtgccatcatggaggatttgaacaggtttgtgaggaggagggagtattataggaaagttgggagggcttggaaacgcgggtacttgttgtacggccctccggggaccggcaaatcgagcttgatcgcggccatggctaactacttgaagtttgatatctatgatcttcagcttgacaacttagtgaccgattctgatctcagaaagttgttgctggcaactgcaaacaggtctattctggtcattgaagacattgattgcagtgtggatctgccagagcgtcggcatggggatcatggacgtaaacaagctgacgtgcagttgaccttgtctggattactgaacttcatagatgggctatggtctagttgtggagacgagagaatcatcatactcaccaccaaccacaaggagaggctagacccagcactgttgaggccaggaagaatggacatgcacattcacatgtcctattgctcctaccaaggcttcaagattttggcctcaaactacttagaaacttcctctgaccaccccctctttggagagattgaggggctaatagaggacatacagataaccccagcacaggtggcagaggaactgatgaagagcgaagatgctgacacggcactagaagggttcctaaagctgctcaagaggaagaagatggaaggagacgtgtgtgagaatgatggttcagataaaacagaacttcaccaatctaaaaggtccaaagtcggttgcaagcagaaaagaccagtttgtatcagcaagagaaaaaatggtgtggggactcaaagaaggacaagaggacgtcctttgtaatcagcttagcaccttggaacggtctaaactctaaagtgtgtccccaaatatagtagtagttacgactttgcctcgcatgtaggtactctactcgtttacatacagttgatattaaataaaatccgttaacttagattgagctcatgtttaaataatacaacagatttttatatccaacaattgtcttagttggatcatggacaataacatatattttaaatttaaatatgtttttatttcctgcactatattggtttttggctttataaaattactatatttttc

SEQ ID NO: 77162 - DNA, 369 bp, Glycine max
  unsure (1)..(369): unsure at all n locations
  Clone ID: PAT_MRT3847_40693C.1
cggacgcgtgggtgcgattgctggacaagtccatgatgctgtgccggctggggggccgcgtcntggacagcacatgctccatgaaccccatcgaggacgaggccgtggtgctgcactgcctgctgcgggcccgtgggcggtacgagttgtgtgacacggcagggcaggcggccggcctccagtggagcgcggggctgacccgctggccggtgatgctgcaggacgggcagttggttgcttccttcgacgaagtgccagaggcagagaagaagcatgtctggaacacaatgttccccatccctgacgaggcagtggcgcgggcgttgcatctggaacgctgcatgcgcttnctgccccacgtacagaaca

SEQ ID NO: 77163 - DNA, 672 bp, Glycine max
  Clone ID: PAT_MRT3847_40694C.1
aaatggcaatggttggattgaatgttcaataaaaatggtagagttgagacttgagtggtcggaacagtgaaatgtcaaaccgttgtttgtttgcatttgtattcatttagagtaatgtggttcaagagtttatagacagggaacttgctgcaattcaattattaaggattgaagacttggaactggttaatgtggattggacaatgaaagggttgcttgatcaacttctgccgttggagaggcaggatggaaatccttttcttttgtttgtgtagcagcccatgccattttccatgttgactaaagaagttaaaagcaaggtttggtaaggctttgtgcttgtgatctagtggcttctgtacaaaacccttgttcaacatatatatattttcatggtccaacagttgagttatgcatttcatagaggtgtgatctacttattggtcccaagcttggatggaagaattgtagaaacaaagggagaatgagcagctctgtaatggatgcatgagagtagatgagttataattggcaagggcaaagaaaggtggtcggctgccgacaagttgccttccctgaaaatattacttgtgatggatggtttggtaattttgtaacagatggtaaaccaacaattttaatcctcctgtttcatgctattactccattata

SEQ ID NO: 77164 - DNA, 512 bp, Glycine max
  unsure (1)..(512): unsure at all n locations
  Clone ID: PAT_MRT3847_40695C.1
attggaattctattttattcaacatgaaaggtgatacaaattttatttaaacttgaatacctacataaattcgaactacttgaacaatcaattctaatttcaagcctgaccttgaaacatccaattacataaatttaattaaacacaccacaacgctatcaaaaggatattcaaggcacatcacgacactgctaatgacttgctcaactcaccacagaatagatcaatggacactcctttttttaatgcggtaaacaaagtaaagaaaagtaaactgtaggtgcaactatcacacgtgcaacatgacaatgatatcacttcatcacttgttaattcttctgcagttctttctgatctcaccccttgaccctgttaaaggagtaatgtttcccatcttaaccatggacttggcaaattgttcaaagaaaatatcgttgttttctgcatactgcttcactaaatccgcggatactttattctttgtcaagagaatntcgtcagaacttaagaga

SEQ ID NO: 77165 - DNA, 503 bp, Glycine max
  Clone ID: PAT_MRT3847_40696C.1
aaaattagggtttatgtctcaacatacaagaacccacattgtcgccaaatataacactcaagttcagggggaacccctaatagagagggggaatcgaaaagtactcgagttctcatatttaccacaagacgggcattagctctatcacggccaaaaactgttgcattttacctgaccacgaccccaaaacccaacctgactctcctactgaaaatccacccaacttttacccctgtgttgatgtctagataacacatttcaacaagcacaaacccaaaccagctaatctcatggctagcattacccccggaacagctcagattcttattgctggtagatttaaagaaaagaggagtagtagttttgaagcagctaccttccgggttgattcttgtaacatgtcctctcaaggttaatggagtttcttctagacgtgtgaaccaagcctatgttattgtcacatcaaccaaaagtgatgtctctgttgttaatgtcaacaactt

SEQ ID NO: 77166 - DNA, 226 bp, Glycine max
  Clone ID: PAT_MRT3847_40697C.1
gtgagagacaacttttatctgatcctgctgttcaccagaacaaatgttggttttataggaagcgtatcattcatgcaatcaattgatgcacgttcatcacagtgtatcttgatactatttatctgtatctctctggtgctcatgatttatattgggatacgtaagataaaaacactgagaactgtaagaacatattgatttattgggtgggatacccacattatta

SEQ ID NO: 77167 - DNA, 205 bp, Glycine max
  Clone ID: PAT_MRT3847_40698C.1
caaattctattcctaattagtgtaatatcctgaatcaaagaaaaaatcataatgtgtgcctgcgctctcacttggatgtagtgctgatgccactattattatcggagagggctaaaggacactttgttcctgacaaggtgatgctgaccactactaatttcctttgattgggacagaggtcatacacatttggtgcctgttaatg

SEQ ID NO: 77168 - DNA, 264 bp, Glycine max
  Clone ID: PAT_MRT3847_40699C.1
cctcgtgccgaatcggctcgatcctattcttatgcaagtgtattcacacaagtctgtaccagacagtgtcgtctggccaatggctgtgattgccacacttgctgcaatgattgccagctaagcaatgatatctgctacattggcatgcataaagcaatctatggctttgggatgcttcaccaggctcaagatcattcgcacctcttaaatgttcattggccacatgtacatcctcatcatgaactggtttctgatgaccatgtg

SEQ ID NO: 77169 - DNA, 1127 bp, Glycine max
  Clone ID: PAT_MRT3847_4069C.1
ctagcatggcccataaaatgtctactcattagtcttatgacatgaccaccatcttcctctcccctattcaatgctcctagatagttttcaccctccacttttaaattccttccctttattattaatttacaaaatccacataaatctctggatcttgagaagatcatgaaccagcaccacaatgtcttcttcaagtggcaaagatttgggagaaggatcaagctctccaacagaaaactaccagcagagtccagggacacttagccgctatgagtctcaaaagagaagggattggaacacttttggtcagtacttgaagaatcaaaggcccccagttcctctctctcagtgcaattgcaaccatgtgttggattttcttaggtatctggaccagtttgggaagaccaaggttcaccttcaagggtgcatgttctatggccagccagaacctccagcaccttgcacatgcccccttagacaagcttgggggagccttgatgctctcatagggaggctcagggctgcttatgaggaaaatggtgggtccccagagactaacccttttgcaagtggctccatcagggtgtatctcaaagagattagggagtgccaagccaaggcaagaggtatcccttacaagaagaaaaagaaggcctcaaatccaagcaagggaaacgatgaatcatcctccaccatgcacttctcttgaacaacatcatcagtatcgatctctttggacctttcaagtcatggataatgtagcatacaatcaaattggagatcctttttacaaggcacagtctattggaggttcggtttctatttggattgataatttgttggcatgccactcgatctttttaaagttgctcttttgtttacccgggagtttgtatgatcctagctgaacagcatactcattaattatatgacggtcagttatgccttggtttatctttgcattaattcaaacttctcagttgcatatatacatatatagttagtttgtcatgtatttttcggattggttccattgaagtgtaaggtattttaataaattcggtttcacatactctaccaagcgcatcaataataataataataataatatatagcattcttaaaaa

SEQ ID NO: 77170 - DNA, 184 bp, Glycine max
  Clone ID: PAT_MRT3847_406C.1
ttttaaaaatgaatactattctttccagcgagtgtataatcatccattacacagtaatcatcacaatacatgccaacttcatctaattttaaatcccctacataaaattaatgcaacacttaaatcatttgaatctcgattttcaactcattactcactaaaactataaaaaaaatcttaaaat

SEQ ID NO: 77171 - DNA, 749 bp, Glycine max
  unsure (1)..(749): unsure at all n locations
  Clone ID: PAT_MRT3847_40700C.1
atggaaatcacacttattttactccattgcattattatgcttgagaacatgaccatattcttattcacttcttcacctttatttctttgctaatataatataatgcacaattctagtaaaattgagcaattagcatgccggacaaaaaaaaaaaaaaaatcagatccactaagctataaattaaatgtaggaaagacaaaaaaaaataaaaaaacattatcatcaatgtcttgttaggtggtctttgtttccatgaggaattgatgaagctttcgtgttagactgagatgnnggttgccccctatcagagtcactgccactagcttttggctggggcttgttaagttcattggctttaaaaaggccatgcaaataccctttgtcctgaggtacaactcgctccaaaaacctgtgtatcatctcataactagtgaatgtaataactgcagatggagttgttctaaatagattggttgcgcaaccacgataaaagcctggaatgccttccttttgaaacaccttcttagtacagtcaataacccctgcatattgaaccccaatatttttggcttgnccttgctcttgcagccgggatcgaattacttcatgtggatangccattacagaggcgaatactttngnnnntgatgatgcaacggcaacactcccaggagttagcttntcaacagnnngagatnnntnnnnctgcantnnntgacttgatcttttcatatgcnngannntgaatt

SEQ ID NO: 77172 - DNA, 914 bp, Glycine max
  Clone ID: PAT_MRT3847_40701C.1
tacggctgcgagaagacgacagaagggaatcgaatcgaaattaagtggagagtgtgtagaaactaaatggggaacgatgacatgacagagagagtagttttcgtgaccgtagggacaacgtgcttcgatgctctcgtcagagccatcgattccgacaacgttaaaaaggccttgtttgcaaaagggtacactcaccttctcattcaaatgggtcgtggatcctatcttcctactaagtctgaaggagatgattgttcgttggctgtagactacttcactttttcttccagtattgcagaccatctcagatcagcttctctagtcattagccacgcaggatcaggtagcatatttgagaccttgcggctgggcaaacctttagttgtggttgtaaatcaagatttgatggataatcatcagagtgagctggctgaagagcttgctgatagaaaacatctgtattgtgctagtcctcaaacactccatcaaactatagcggacatggatttaagttctctccttccttactccccaggtgatgctacaccagtggccaagcatataaacagattccttggttttcctgatgattgatctaatctctctctctctgcccgaaatattttaagttttaatgatgcataaaagatcaatgtctttcaagaaatgtattatgtatgtgatatacatatactcacattgcatgcatgttcaaattgtgagcttaatgttcaggtgtgagtgaaaatcgacaatacatcaagtcagacatcatgtttagctttgctttcctgtcattcattacttccattttcacttgattgaacttgcttggatgaaaagcaatgataaaaagcacagttatggcaaaccattatttcagacaactatgaattggaatttgttagtaagaa

SEQ ID NO: 77173 - DNA, 429 bp, Glycine max
  Clone ID: PAT_MRT3847_40702C.1
cattaattttgtaatttctaaaaattagaaacactccaaataattattatatttttattaagagatttaatttaattagttaaatcgtataggcacgtgaattattataaatctctcttgaattcaattaacttcaattccaaaagttagtttaaaaaagttgtctctcacttattgttagtagacatgagacttggatttatttgttagtttacctacaaaggcaatgcttctgtttccattccaattatagcttccaaacattacctgtcccccgaaacaaccgctaaaactaacggaacatggcttccctctcctctccattctcttctcccatttatataccctcactttccttctcctctctttccattttccctctcctccgctgccgcgtccccgcgcggcaaccaccttcttcctcgtcca

SEQ ID NO: 77174 - DNA, 251 bp, Glycine max
  Clone ID: PAT_MRT3847_40703C.1
ggttcgaggcccttgcttgagacttgtgttgacttttcaaactttcctaccagacagtgatggaattggagggggcgcctattcctaacaaatacttactatccatagtcattagggggggtgctggacaataactttacacaatccaaacaagtcatagtttaaccccaccccccccgctgaaaagaaaagtacccctttatattttccaaagcagaccctgctgccccactaatattggtcccccttca

SEQ ID NO: 77175 - DNA, 479 bp, Glycine max
  unsure (1)..(479): unsure at all n locations
  Clone ID: PAT_MRT3847_40704C.1
atttcttactaagccttttttgttgtgattcagtatcatcatcatggcaatgtccgtgataagaacaaaaggaggcctagttaagccagcagaggagactcccttgagcacagttctggacctatcagccatcgatagattacctgttctaagatgcaatgcgagaaccttgcacgtgttcaaacacggtggtcctgaagcgccaagggtcataagagaggccttgtccaaagcactggttccgtattaccctcttgcaggaagactcaaagaatccaaaccagggtgccttcaaattgaatgctctggtgacggcgtgtggtatgttcaagcatcttctgattccacccttcactctgtcaatntctttgatgatgttcactctattccttatgatcatcttcttcctgatgctattcctgagacccaatgcatcgaccccctcgtgcanatgcaggtnacacaatttggttgcgggg

SEQ ID NO: 77176 - DNA, 383 bp, Glycine max
  Clone ID: PAT_MRT3847_40705C.1
ggacgcgagggtcgagacaaagaatagattctcaatacaacgaggctcatgctcacatggaaacaaattcgttcaaatcgtcctctgatgacgtagaaactcctaaaggtcccatggcggatcttaaaacacctgaagctaaaattgcacttcccaaaaacacagtaggaggaaccagtctgcgtagtgagctattggcaaataccttgacagagggcaactatagagcaagcgatgatttgcagcgcactcatcgaatcaaaggcatgatcaaaatggcggtcacagttggcatacctgcgaatacaggtatctcatcggcccgtgctctgaacagttcctatagggggcgtgccagctccgatatttacaccatctgccct

SEQ ID NO: 77177 - DNA, 711 bp, Glycine max
  Clone ID: PAT_MRT3847_40706C.1
cttattattattatttttgtttttcatttctcactcgctcgctgttttttttctacgccacacctcactgggactacagtgcacctggtttggttcatcattttgaagagggagaggggagcgattttgtgctgatgtgttttgcttaagcttatccaataaagaagttggtacaaatggcttttgagccattgaattggtattgtcggccagttgcaaatggagtatggacaaaatcagtggagaatgcctttggtgcttacactccttgtgcggttgactctctggtcatctccgtttccaacttgatacttcttggcctgtgcatttaccgcatatggttgattatgaaggatttcacagtcaagaggttctgtttaaggtcaaacctttacaattatattctgggattgctagctttatattgtgtggcagagccattatacagattgatcatgggaatatcagttctaaatttagatgggcagactcaacttgctccatttgagataatttcactgatcattgaggctcttgcttggtgctctatacttattttgattgggattgaaactaaagtctacatccgagaattccgatggtttgtcagatttggtttgatttatgctattgtaggggatgctgtaatgttcaatctcatcatttctgcgaaggagttctatagcagctctgtgctatacttttacatca

SEQ ID NO: 77178 - DNA, 570 bp, Glycine max
  Clone ID: PAT_MRT3847_40707C.1
cttgattctgttgttatttgcatttgaagctgtttgcttggggagaaagtatttttttgctcagagacaaatgaaaaaaaaaatgtaaaacaagattgttacatgcatgtggatgtaaaaaatgctgctacatattgcttgaaattttacaataaggaaacaaaaaaaatttgaaatgcaatatgtaaaaatcaagtcttttatacagtgagtgattattgacgaataaagcctgctaaataatttaatttttgtgtggacgtcctttagcgttccgattaacttgccacatttttattcccattcataggaattgggtgaatttatttggtttcctaattgcgaaaagctaataaagggttttgctgaattcgagtgttatatatttgaattgaagtgaaggagttgttggctgcttagaagtattatacctagccgtccaaaaggttcttgttttcacaagcttcatatgagaggcaaaggtcaatcgcttgaaaggctagtgattgaaaagtgatgttcatgtttgaaagtctaatctagatatagttggggagggtgtgttatttg

SEQ ID NO: 77179 - DNA, 845 bp, Glycine max
  Clone ID: PAT_MRT3847_40708C.1
aaactagaaagggcgcaattggaagatctgaagccgaagatatgcaaacccgacaaccttttggacccacgcagatgactccaacaacaactcaagtcatcggatctcagtattgtaaaccgtctcccacctcactggagattgttcgaacggcgaatacgttcgctaatgaattccgtgtctacgaccacaactccgttttcaccctccaaagcgcttccttctccgttcataaacgctgtatcttactccatcaagggaaccccatcgtcacgctacgccgaaagagaatgacagcacataatagatggcaagttttcaggggtaaaagcgaccaaataagggatttgctcttcagtgtaaagcgacccaataaaggatacaacatattccagccaaacacggcactagaattagaagtgttcttagcccaaaatactgaagaaaaagtttgtgagtttaagatagaaggaaattggtccaatggatcttgtgaagtttgttccgttcaacaccgcaatattatagcactgatgaataaacacgctgttcaagccactgggtctgataatttcgtagtcagagtggaagccaatgttgacactgctttcatagttgcattaattgcgattctttgcctagagtagaagcaagcatggagttgatttcgaatttgattctgcgttcatgttccttcaaataaaactgtttgtgtgttatatgagtaaacgaaatctttaaagaaattaatgcaaaggaggggatgcaagtgtaatatgaataaattttaagggaagtgtatgtaatttgctctgaatttaatgtagaaatttttacttaaaaaa

SEQ ID NO: 77180 - DNA, 640 bp, Glycine max
  Clone ID: PAT_MRT3847_40709C.1
aataagcatcccagggccaagttgatggatttccccccccctctttttttcccagcaggcaacaagagttctgcccctattcctgttgatgtggatcatacagtgaaagccttttataagttcctcaggaaacatgcatcaatcccattccagctccagaaaccaacctcaactgctaaaaccgggagtgagagttcctatgtcaaggagagccaaagcaccagcccggatgtgaaggatgaattatgagacttaaaggacacttctattgataaagagatatgattcagaaattcagacagctgataacggagtgaaaatgtgcatagcaaagaaagtgactcaatgattgggagagaaagccgtatatttttcctcaccctggccaaaagacaactagccaagtaaagggtagtggaaaaataaggtaacctgtgtattagtttcttcaacttttacatgtttgagtatcagaattttggggagactaattttaaaaatggctcgaaattttattttcggtgtcagaatactggttatttttgcccttaggttaagctttagttgataaaaattgttgaataataaataaaaaaatgaactttcattagagaatgggtttggcatgcaaggcaaatta

SEQ ID NO: 77181 - DNA, 729 bp, Glycine max
  unsure (1)..(729): unsure at all n locations
  Clone ID: PAT_MRT3847_4070C.1
aggccgggatctttatcttgaaacaaacacattactagactccattataactatcttcattctgcacccttctgtttagccaaaattctgagagtttagtgactcatggctgctactatgatcaagttattattttaccttgccattttggttatcttgcttaccaattcaaagggtgtgagttcaagttcaactagtgagcctacaatttcagcttctcctggtgttttgccttatgtgactgccccagatatttcctcatttttccccactccaagagccaatcaaccaatgagttctggtgctccttttgaggccgaggcaccagcaccggcacccagttcaggagagtttgagggcaagaagtcttctgcttcagctaggttgaattgtgcaggtgccattgttggtgttctactatgttgtgccttcttaagtagcatagttgttgtttgagcatgtaccatggtactagtcttaaaggggttgtgaatttcatccactagagcatagagcatagtgttcttcttttctattagtccatgttcagtgatttctttgttgcttgcttaattaatatacgtgatggcttacttatgccgaattcagcaaatctcgtttgtattcgtaagtcacataatttttgttccacattagctnaggattgaaaacttgctatggngaaattgaactactagaaaaaaaaaaaaaaaaagccccctaggccgc

SEQ ID NO: 77182 - DNA, 1984 bp, Glycine max
  Clone ID: PAT_MRT3847_40710C.1
aatgcagctgcggaattaaaaattgaagaaatggaattacgaattgaaaagcttgaagaggagcttagagaagttgctgctcttgaagtgtcactttattctattgcaccagagcatggcagctcaacacacaaggtgcacacacctgctcggcgcctttctaggctctatatacatgcctgtaagcattggacccagaaaaggcgagccacgattgccaagaatactgtttctggtcttgttttggttgccaagtcttgtggtaatgatgtttcaaggttaattcgcggcgcctcggctccaattgtgctgagagagataatttcacaatcttttgggaattcctgtcaagctagtccccttaaaaggttggtcgagtcaaatgccgctggcaagagaaatgatgggaagtctatggcactgaaatggaactgtcttcgaggccctaaacggagagacgattatagagcgaggttgaagattggcaagagacaggaacctttacatttgctttggaaagagtagaatcgtggatcttttctcggatagtggagtcagtgtggtggcaggctttgacaccctacatgcattctccagttggggactcttcaaataaacccattgggaagctgatgggacctgctcttggtgatcacaatcaagggaacttttccatcaatctgtggagaaatgctttccaagatgcttttcaacgactctgtcctgttcgagcaggagggcacgaatgtggttgtttgcctgtattggccagaatggtcatggaacaatgcatagctagactagatgttgccatgttcaatgctcttcttcgggagtcggcccttgagatcccgactgatcctatatcagaccctattggctattcgaaggttttgccaattccagcaggagatttaagctttgggtctggtgcacagctaaaaaattctgttggcaattggtctagatggcttactgacatgtttggcatggatgctgaagattgtctgctgcaagaagatcaggagaacagtgagaatgatgaaaagcaaggcagagacggtgaacctaaatcttttgttctccttaatgacttgaaggaccttctgatgctacctaaagacatgcttatagatagaaatatcagacatgaggtgtgtccaaccatcaatctttcattgattatacgggttctctgtaacttcactccggatgagttctgtccagatcctgttccaggaactgtcttggaggccctgaatgcagagactattatagagcgaagattgtcagcagaatctgcaagaagctttccctatgtggctgagcccgttgtgtatatggctccctcttctgctaatgtggcagagaaagttgcagaggctgcaggaaagtctcacttggcaagaaatgtatcagctgttcagagtagaggatataccagtgatgaagagctagaggaactagattcccctcttacatccatcattgataagcttccttcatctccaacagtcactgaaaatggaaaaggtaataatcataaagagcaagggggcaaccccaccacaaatgctagataccaactcctacgtgaagtttggtccatgtgaaccttgtcagttccacatgtgtacacctaccaagggaaaaatggatacgttagagatttggcttcaaagaattgtgaattgaagaaaattaaaaagaaatggaatagaaagattttagatattgagagaatcttcaccaatagcagagcttaagcttgcagatttatttttttgtatataaaaataagtcattatagtgtagcattaaaaaatttgttatgttcaatgtttacatctttgtgtctgctttataattagaatgcaagatatatttgtaatagaaattttagtatttatttgttgttaattgtatacaaattctttatagtttacaaagcttacgtatttgaatgttattagttgtttaactt

SEQ ID NO: 77183 - DNA, 530 bp, Glycine max
  Clone ID: PAT_MRT3847_40711C.1
caaggtccaaaactgttggctgctttctgctgtggttgcaaagagggggatgatagcagtgctatggatgtcaatggtttggctttacatttccaaaattttaaaatcatccttcaaggattgtctgattgtgtagcaacttgtacaggtggtttactggtaagtttgcgaacaaagatactgatatcgtccatataagtttaaaatttgatatatcaattgtgaaaattgagatgtgattattttcttatgaaaaatagtccatttgagtgtacagttgcctgtggaagcatcaccataactcattaaagatttgctttgcggattggggggatgccaaatttatgataacttgtagagtaaagaaggaagaacttaaaacatttgagaagtgaaaaaaatgaggagaaatgtgatgtgtagccacctaaattactcttacttttattttatatattcatttatatgcatatgtttccacacttcatttaacaaatatgtaaatttcagtactctactggaactttcag

SEQ ID NO: 77184 - DNA, 657 bp, Glycine max
  unsure (1)..(657): unsure at all n locations
  Clone ID: PAT_MRT3847_40712C.1
ggaccaactcttaaattcttcgaagctgttaaatctagcaacaaattgatgtatcctcctgaacagcttaaaaatgatagtgatgtaaggtatacctctgcatccagggcctccaagacagttcctggaacaggatctggacagaactcatccggagtgaagttacagagaacccgtataatcaatgaaagattgatggttggacacacctgtacaacaataaaagatatggaatgaagacaatgacaaaccaaccaaaaaagtgagggtggcatgccactgaagaaaatcagcatttgattcatgaaactaacctcatgtctgatatttctatctataagcatgtctttaggtagcatcagaaggtcactcaagtcattaaggagaacaaaaggtttaggttcactgtctctgccctgcttttcatcattctcactgttctcctgatcttcttgcagcagacaatcttcagcatcaatgccaaacatgtcagtaagcaatctagaccaattgccaacctgcagttcaagtagttcttccataagcataaacacatataaacataactttgctacatgatgaatccttcatacttcataatagncacattacttatgccaactatgctaattgatatcatattatcatttttttttt

SEQ ID NO: 77185 - DNA, 461 bp, Glycine max
  Clone ID: PAT_MRT3847_40713C.1
ggacgcgggggtgaccccgggaatttttgactggttccggagggggcccgggttttccctatattgggccacactgaaccgggggggaaacaagggcaaccatggtagggggggaaaaaagtttgccattaaaaatggcacacaacaccccaggcgagaaaataaagaggcataccgggggggcaaaaagggggggccaaaaaaaaaaaattgaaatccggggcgtgcccattatggaacaaggaaaactgtcgggccgggggcttcaaggaactttaaaaaaccgggaaaggggcgggctgagtatataaaaaaaaggggggcccccctggaaaaagggaaaaggaaaaagacggagggggggttattgccttgccccgaaagagggggaaaaagttgtcccccctggatcgcccccccagggaaaaacccgcgtaagggggggccggaggggggaaaaa

SEQ ID NO: 77186 - DNA, 249 bp, Glycine max
  Clone ID: PAT_MRT3847_40714C.1
atcttggaaggatgtcttacgctgctcatttcgctaatcagccccaacagaaagagtggtcggagggaaattcttcctttgatattaaatctcgctctaggctggaaaaagtttactatacaaaatcacaatttgatagtggaaaaaccttcagaaatgatataaatggtgctggaccacactcttcataagattgttctgaaaagcaagatcaagaaaaacccacaaagattgatgccagatggagac

SEQ ID NO: 77187 - DNA, 1300 bp, Glycine max
  Clone ID: PAT_MRT3847_40715C.1
ggctcgagaaaagcatagctaaaccctttctaaagtccaaagtcatttttagaaatttttttttatcatttggaataaactcctattttgattcctgaaaatgaaatacatggtcattattttctaaaactatttttttttcctgaaataacaagtctttaaaatgttcagttctttgatctaaatttaataatttattatgattttgttttcttgatagtattacttaagaaactcatggaatgatggtagtttactcttgagtcttgagtctttctttaccatccatcccttctattatatatattataaatacaaatggtggaatgaagtcatatatacataataagtaatacagaaccgtggtcgacatggattggttctcatggctttcaaaaagtgggcttgaggcatccctagtgtatgagtatggccttacctttgctcacaacgagcttgaagaagaagacatgttttacttcaaccacgagtttctccaaagcatgggaatctccatagcaaagcacagactagagatcctcaagcttgccagaaaagagaagggaaagaggccactcgcggtggcaaggctcgtggcggcaatcaagaagactaagaacacctttgctaactatgttaggactttgctgatgcacaaacaagaatcagcacttgctgtggtgccggtgccagtgcctactagaagtggtttggggacaagatggaacaagagtgctatgatgaagagggggcgtaaaaagcaagagacactctttctcacaaatggaagttccacacttgttccagctcagcctggtttttctagtcctgtggtctaccatttccagaaggaggagaagatggatggagatgaagatgatggctattggtctgctgctgttgaagagatcaagtgggataccatgttccaggatctcaagccaaactgaaacttttaaattagttggtgagaaagaaagatttgagtgtttttcttcttacagatactggtggtgggtaagtttagcaccctgtatgttctatactatagtatccagcttgtttcttttgcttgtactattatatgtgatcagggtaaattacatcttcatgagcagagtaatattgaggtagacattttagctaggttgttatatagcagcaagagccaacaagtatataatttgaattttgaagcataagcagttaggcttgagtctgcctgactttactttaggcactgtattatgttatgtctgatgggaatgatcatattaacagactatatttgatttgattc

SEQ ID NO: 77188 - DNA, 366 bp, Glycine max
  Clone ID: PAT_MRT3847_40716C.1
gatggacacgtttacatctatagtttctttgcaaccattgcgtttttaggagcagagagggctttgcacgagatactatatgcactggtcgatcagtttcatataggattacagtataaaaggaacagactcttattaactcttgcctatttgctgatgttaatggggagcttggttaacacaattttcaggttaattgccatacatgtttgggatcctgtccaggaggatcataaccctattggtcatatacggtgagcttatacccattatgtgcaccaccagaaccagggccaggtgcatgattgcactggttcggaccctgttgaacctgtttgtgagatggactgagacacggtgatagac

SEQ ID NO: 77189 - DNA, 578 bp, Glycine max
  Clone ID: PAT_MRT3847_40717C.1
ctctaggctcgagcgaccatatcactttggtcaccttcagatacattcgtcgcattcatccatttaacttccacaaattcctacaaattctaaccaaacccttcactactccaaatcccacaacttctctcttttttttccctccttcttttccctttttctgttgtccgatcttctgcctcctagatcttggtatttgggattgatcacctggagttggaaatggttaaaagttatggagtgttctgatttgcgaaagatatcatgttgcagtgcttagaaggacttaagcctttatttgcgtccatattgcgatgttgtgacctggatatatataaccagccaagaggccttgaagatcctgaacttcttgctagagagacagtgttcagtgtaagtgaaatagaagcactctacgagctcttcaaaaagattagcagtgctgtaattgacgatgggttgattaacaaggaagagtttcagttggctttgttcaagacaaatataaaagaaagtctgtttgctgatcgggtatttgatttatttgacacataacacaatgggatactgggttttga

SEQ ID NO: 77190 - DNA, 188 bp, Glycine max
  unsure (1)..(188): unsure at all n locations
  Clone ID: PAT_MRT3847_40718C.1
aacgattccatccaaactgaaatggncggtcagtagtatcaggcatcttctncatactattgtttgtncctttcgttgcacaacccattatncatncatncatcccctnctttgcatttnctacttcctncaacaccnctncttncttgtntncttacncncccctatggctgtattctcaacaaccc

SEQ ID NO: 77191 - DNA, 2053 bp, Glycine max
  Clone ID: PAT_MRT3847_40719C.1
attcccattaatggctttctctattgtgcgttgccctgcttcagcttcatagggcttgttggcggtgtcataactcgtaagaaaacaaagctcatcgaatcgaagtccttcattttcattctcttccttgtcactgatcgtcatgtacagagttgcagcatcatcattcagaaggcatctcaagggccatggaggtaacttgggatccactaggttttcaacttcagccgcggtagctgcaaggacttcatcaggtggtttgtttagctggcttactggagagcgttctagtgctcttcctcctctggacatgccccttggtggtgttgctctccccgattcacttccagattacgtcgaacaaagcaagaccaagatcacaacactccccaatggactcaaaattgcgtcagagacctcgcctaaccctgcagcttcaattgggttatatcttgactgtggttccatctatgaaacgccattttcaagcggggtttcacacttgctagagagaatggctttcaaaagcacaacaaaccgtagtcactttcgtattgtaagggaagtagaagcaattggtggaaatataggagcctcagcctctcgggagcaaatgggttatacatttgatgcattaaagacctatgctccacaaatggttgaattactggttgactgtgtaaggaacccagccttcttggattgggaagtcaatgaagagcttcggaaagtgaaagcagagcttggagaactctctaacaatccccaaggcttgcttttggaagcaattcactctgctggttattctggtgcattggcttttcctcttttggctcctgaagcagcactgaacagattggacggccccaatttagaggaatttgttgttgagaattacacagcacctagaatggtacttgcagcatctggggttgagcacgaagagcttctatctattgctgagccacttctctctgatctaccaaaggttccctgtcctgaagaaccaaagtctgtctatgtcgggggtgattttcgtcgtcatggtgcaagggcagggtacacatgttgctattgcttttgaagtgcctggtggctggcaaaaagagaaagatgctattgttttgactgttttacagatgcttatgggaggaggtgggtcattctcagcaggggggcctggaaaagggatgcactcaaggctatatcttaatgtgctgaatgaatatcagcagattcaatctttttctgcattcaacagtatcttcaataatacaggactgtttggcatttatgcaagcactagccctgattttgtgccaaaaactgttgatatagcagccaaagaactaatagcaattgcttcccctggacaagttacacaggtacagcttgaccgagccaaaaaatccacaaagtctgcagttctaatgaatctggaatctagaatgattgcatcagaagatatagggaggcagattttgacttatggagaaaggaagcctgtggaacagttcttgaaggctgtagatgaaatcacgttgaatgatatcactaaaattgctcaaaagattatttcctcacctttgaccatggcatcatatggggatgtcatgaatgtgccaagttatgaatctgttaacagcaagttccatgcaaaatgaaattgcatgtgatccaccagctcattatattttctggatcacaagcatgcctacttcaaattttcgagagcaatatacaccgaatcagcaatgctgaaaataaatcccagagaagtttttgtgcggacctgaggaaccattgttcttgttccatgtttttttttttttttatataacgatttgccttagtgtattaggtgcatcggtcttatggctaatgttcaccttaattttttattttatgaactaattctcaagagagcacgaaagccaagccacgcatgaatagatcaagaaaaatgcaagtaataattttctaacatgttctacagtttctcttggatatatttatttagggtttattaaatattaaatataatccattaaat

SEQ ID NO: 77192 - DNA, 363 bp, Glycine max
  Clone ID: PAT_MRT3847_4071C.1
acgcttaaacaataatcataatgggactgagtaagtatttgaatatcttcttctaaacaaaggtattctaaaaaaatatattagaaaattaattatttataataaatccatatttataaatatatcattataaatgaaagaaatcaacatattagattatactataaatcatgaaataaatatctgtataaatctcaccatggaataaatatcttgaaatatgtagtataattgataaactattatttttcctcttacggagcaagttgatccgtgagaggaacaataagcctgggcacttttgccatgtctgtagaaagctgggtgcacctagcgacagtctccaaacaaagcaatgatgac

SEQ ID NO: 77193 - DNA, 2368 bp, Glycine max
  Clone ID: PAT_MRT3847_40720C.1
ctaaagcccccattgatgaaaagaacaatttttcctttcaactatatgatctcaagccgcagggttttattgaaaggcaagaggtgaagcaaatggtagttgctacccttgctgaatttggcatgaacctatcagatgatgttatagaaagtataattgccaagcccttcgaggaagcagatccaaagcatgatggcaagattgccaaggaagagtggagaaaccttgttttgccccatccgtcccttttgaagaacatgccccttcaatatttcaaggggttgtactctatctgtcatcgaccatatcactcaccttcagatacattcgtcgcattcatccatttaactattaaatgactcattcaccatatgtcatggctcatattcctttagacatcgaccatatcactttcgtcaccttcacagatacattcgttgcaatcatccatctcacttccacaaattcctccaaattctaaccaaacccttcactactccaaattccaaaacttcttcacacttccttcttttccctcttctgttgcccgatcttctgcctccaagatttttggtattttgggattgatcacctggagttggaaatggttaaaagttatggagtgttctgatttgcaaaagatatcatgttgcggtgcttagagggacttaagcctttatttgcttccatattacgatgttgtgacctggatatatataaccagccaagaggccttgaagatcctgaacttcttgctagagagactgtgttcagtgtaagcgaaatagaagcactttacgagctcttcaaaaagattagcagtgctgtaatcgacgatgggttgattaacaaggaagagtttcagttggcattgttcaagacaaataaaaaaagaaagtctgtttgctgatcgggtatttgatttatttgacacaaagcacaatgggatactaggttttgaagagtttgctcgtgctctctccgtttttcatccaaatgcccctattgatgataagatcgaattttcctttcaactatatgatctcaagcagcagggttttattgaaagacaagaggtgaagcaaatggtagttgctactcttgctgaatctggcatgaacctatcagatgacgttatagaaagtataattgacaagaccttcgaggaagcagatacaaagcatgatggcaaaattgacaaggaagagtggagaaaccttgttttgcgccatccgtcacttttgaagaacatgacccttcaatacctcaaggacatcaccacaacattcccgagctttgtatttcattcacaagtagacgatacttgaagataatttctcccatggcttcttcctttgggctgcatggccacttttgtacaaaaaagggcatggcagacagccttgcttttaccttacatttgttatatctttgaataatgtattttgttttgtggattcttttgctgggattttactttcattttttcttcaaacttctagacacatttggttcccatttttcaaatttcaaaagcaagattccaaggttgtgtagatttagtttttaattataattatgactatcttccagaatattaggaaattctttatatttatgaaagcactagccctgattttgtgccaaaaactgttgatatagcagccaaagaactaatagcaattgcttcccctggacaagttacacaggtagctttaccgagcgcaaaaaatccacaaagtctgcagttctaatgaatctggaatctagaatgattgcatcagaagatattaggaaggcagattttgacttatggagaaaggaagcctgtggaacagttcttgaaggctgtagatgaaatcacgttgaatgatatcactaaaattgctcagaagattatttcctcacctttgaccatggcatcatatggggatgtcatgaatgtgccaagttatgaatctgttaacagcaagttccatgcaaaatgaaattgcatgtgatccaccagctcattatattttctggatcacaagcatgcctacttcaaattttcgagagcaatatacaccgaatcagcaatgctgaaaataaatcccagagaagtttttgtgcggacctgaggaaccatttattctggttccatgttttttttaatttttttttttataacgatttgccttactgtattaggtgcatggtctcatgactaatgctcacctcaattttttatttatgaattaattttctcaagagagcacgaaagccaagccacgcatgaatagatcaagaaaaatgcaagtaataaaaaatttttattcttatccagtccgttcaaaaaaaaaaaaaggacagcccgcccccaaacaaa

SEQ ID NO: 77194 - DNA, 487 bp, Glycine max
  Clone ID: PAT_MRT3847_40721C.1
cggaataccgggccccccaccgtccggggaaagttaaatgaattataggggctgcatgatgctctttgtatcattcctacgcaaataaagcgttgagccggatgctgcggattgctcgtatggtgcagactgactgtgccaacgcgactctgggcttcagctcggtgtgaacgcaaacgctcattagagcattccatattcacagtctaagaggacatgagttgattagactctgttagtccaccgcgacaatcatagttcatcaccataggctcatttagtccttgcttatacatataataacatatgatggtttgtctgatgacgaggctacatctacttaaacatggatggctctttaagatcatattgccttgggtagatgttgcagacttgaaggaatgctatctgatgtgaatgagtgttttatcaaggcacttaattcctcaccccttattatcactcttaactatccccagacgcgtgg

SEQ ID NO: 77195 - DNA, 135 bp, Glycine max
  Clone ID: PAT_MRT3847_40722C.1
gggatagataatattggacctagacgcgtgtctgagcggtagccactggcggcagatgcaggacgggtgtagtacatctattgtggaattgtttgtgtggaaactatgctccgatacatatctgatggcgggaag

SEQ ID NO: 77196 - DNA, 354 bp, Glycine max
  Clone ID: PAT_MRT3847_40723C.1
gaggagatgagggatacggcaataggtgctgcttatgtctgttaatttactagccaggtatgagaatacagtgaagagaaaacggagtcttcgatcctgagatgtcctatacgatagagctggcatgaacccgaactgaacaaatgactggggacgccaggggaatcgatcaggggaaaaatggacaattgacagggacattgcacttatcgagaaactcgaacactgtggaagcgaggctcacaacgctcttgagtcacatcatttcgcgagagacgcagaagctgggctttacagggaggtcgcaggcgcgtgtgctggtacttgggtgactgggcccagagaacgagagca

SEQ ID NO: 77197 - DNA, 159 bp, Glycine max
  unsure (1)..(159): unsure at all n locations
  Clone ID: PAT_MRT3847_40724C.1
anncgcgtacgtaagctacggaattcggctccgaggcncnanccatgnnatcggaannnnaaggncnagcagcanntcacnngaccccacnnncncgntgtgnngtttgaaggcctgggttnggtttatactacagttgcntgcnggttccgaagttcc

SEQ ID NO: 77198 - DNA, 377 bp, Glycine max
  Clone ID: PAT_MRT3847_40725C.1
catctgccccactgaatcaccacacctcttttcgttcacgctacccctttctgctcttcttctacctttcaagttttaaaagtataaagatggcagagacaatcctatttacctcagagtcgatgaacgagggacaccctgacaagctttgtgaccaaatctgcgatgctgtactcgacgcttgcctcgagcaggacccagacagcaaagttgactgcgaaacatgcaccaaaaccaacttggtcatggtcttcgagaaatcacgactcaagccaacgtcgactacgagcagagccctgatattgctcagggtgtacacggccaccttaccaaaaaacctgaagaaattggtgctggtgaccagggtcacatgtttg

SEQ ID NO: 77199 - DNA, 638 bp, Glycine max
  unsure (1)..(638): unsure at all n locations
  Clone ID: PAT_MRT3847_40726C.1
ccccgcgtccggccggcaagccccactaaccacccacctctcctcgttcacgctacccctttctgctcttcttctacctttcaagttttaaaagtataaagatggcagagacattcctatttaccaggncaacgntgactacnagaagatactcagagtcggtgaacgagggacaccctgacaagctctgcgaccaaatctccgatgctgtcctcgacgcttgcctcgagcaggacccagacagcaaagttgcctgcgaaacatgcaccaaaaccaacttggtcatggtcttcggagaaatcacgaccgtgcgtgacacctgcaggaacatcggcttcgtctcaaatgatgtgggactggatgccgacaactgcaaggtcctcgtcaacattgagcagcagagccctgatattgctcagggtgtacacggccaccttaccaaaaaacctgaagaaattggtgctggtgaccagggtcacatgtttggctatggcactgatgaaacccctgaattgatgccattggagcatggtcttgcaacaaaactcggggctcgtgctcacggaggtcgcaagaacgggacctggccttggctggagccctgaggggaaaacccaggggccgaggggggttacagg

SEQ ID NO: 77200 - DNA, 1087 bp, Glycine max
  Clone ID: PAT_MRT3847_40727C.1
ctcatgcctatgcaacagttccccgtagaaaacaaagtccataaagtgaaacataacatgctgctattttaaaaaccttaccttcaaacctaaatctcacagttccgagttctctaattcttgactccgttgggttcttaatccacttatatccccaactagaatcagaattactttcttttttcctttatcttgttcaattcattggcattcttctaaaatgattattatagcacgccttatgtttcttcttgcattgtttcttttactcgtaacaaatacaggccaaatggtatttgcacaagatgacaataatgttagagatgcttgcagtgtgacaaggttccaaagcctttgtgttcagacgctagggcatttttcccgcactgcaggaacaagccccagcaagtgggcacgcgcgggagtatccgtgtcaataggcgaggtcaagaatgttgaagcatatctagcacaagtgaaacgtcaaggacaattgaagggaagaaacagtgttgccctttcagattgtgttgaaacttttggctatgccattgacgagcttcacaaatcacttgccgtgctaaggagcctaagcaaaagcaagttcagcacccaaatgggtgacctcaacacgtggatcagtgcagcactcactgatgaggtgacttgcctcgatgggtttgaaggcagcaaggggaccaatgttaaattgctgcaaaaccgggttcagaatgcgtcttacatcacaagtaacgctcttgctctcatcaacaaacttgccactgaaggtctgggaagcatcaatgatccatagaagttctgaaattggtaaaaaaattatatgtgtaattctctaaattaaggattgtatcatatataaataagctgtgaacaagtgtctatagatactatataacagtggttttatgtgtctaaattaaagattgtatacttgttttttaatgatccgggaaatgtgaccacatgtgagatatgttaacgtttcgatatgtggttttactagaactatgatgctgcttgctctttgtaaatatgaaatgcaatagcaaaagctgttctctcgttg

SEQ ID NO: 77201 - DNA, 1436 bp, Glycine max
  Clone ID: PAT_MRT3847_40728C.1
gggcgagtgttttcttctacctctcaagtttttgaagtatagagatggcagagacattcctatttacctcagagtcagtgaacgagggacaccctgacaaggctctgtgaccaaatctctgatgctgtcctcgacgcttgcctcgaacaggacccagacagcaaggttgcctgcgaaacatgcaccaaaaccaacttggtcatggtcttcggagaaatcacgaccaaggccaatgttgactacgagaagatagtgcgtgacacctgcaggaacatcggctttgtctcaaacgatgtgggactggatgccgacaactgcaaggtcctcgtcaacattgagcagcagagccctgatattgctcagggtgtacacggccacctcaccaaaaaacctgaagaaattggtgctggtgaccagggtcacatgtttggctatgccactgatgaaacccctgaattgatgccattgagccatgttcttgcaacaaaactcggtgctcgtctcaccgaggttcgcaagaacggtacctgcccttggctgaggcctgatgggaagacccaagtgaccgttgagtattacaatgacaatggtgccagggttccggttcgtgtccacaccgtgctaatctccacccaacacgacgagactgtcaccaatgacgaaattgctgctgacctcaaagagcatgtgatcaagcctgtgatcccagagaagtaccttgatgagaagaccattttccacttgaacccttcaggccgttttgtcattggtggccctcatggcgatgctggtctcaccggccgcaagatcattatcgatacttatggaggatggggtgctcatggtggtggtgctttctccggcaaggaccctaccaaggttgataggagtggtgcttacattgtgagacaggctgctaagagcattgtggcaagtggacttgccagaaggtgcattgtgcaagtgtcttatgccattggtgtgcctgagcctttgtctgtgtttgttgacacctatggcactggaaagatccctgacaaggagatccttaacattgtgaaggagaactttgatttcaggcctggtatgatctccatcaaccttgatctcaagaggggtggaaataacaggtttttgaagactgctgcatatggacactttggaagagaggaccctgacttcacatgggaagtgatcaagccactcaagtgggaggaggcctaaggccattcattcctcaccgctgtgtgctgggagttttttgagctttgcccttatcatatctataatttgtttcatttattttacttaattcgtgtgtgcttctcactttctcttcctcctctccattctattttgtttcttctatcctcatatgtaatttttttacatgatcaattaaacgtgatacaaaattattcttaaaaaaaaagaaa

SEQ ID NO: 77202 - DNA, 324 bp, Glycine max
  unsure (1)..(324): unsure at all n locations
  Clone ID: PAT_MRT3847_40729C.1
gaaactgcaacatcattcttgtatgtctttgcttggtcaatattgacaactgactcaaatgcttggttgatggttaggaatatgggatgctagtatgtttgtgaaaaaactgaagtttgttttggggaaagttggaaggcttggggattatggagtttttgatgaaaatgtanatggattggaagaagagtttttattatcagaagcttgtgttatctgaaaggcataaatcttcaagaataaattccaggcggtattgatgaaagaggaaagctttatttagtggctacgagaaaggttatattttgatctcggagattaagt

SEQ ID NO: 77203 - DNA, 248 bp, Glycine max
  Clone ID: PAT_MRT3847_4072C.1
aggaatattatttttttgagctggttttttgtgggggaaggttttaaaaaaaccctgtaacacatactttctttagagcctaaaaaactgttgaaaatcccctagagaaaaccatgtgcattaaacaaaaaaatatttataccttgaaatgaagtggcatcaaactgttttattaaaaagcacggagaagttcaaaattccaaacttatttacccgtaaatgcaactttctacaacatttattttggc

SEQ ID NO: 77204 - DNA, 1855 bp, Glycine max
  Clone ID: PAT_MRT3847_40730C.1
tacggctgcgagaagacgacagaagggtacggctgcgagaagacgacagaagggggcagcgcttgagaccaagccccactcaaccaccacaccactctctctgctcttcttctacctttcaagtttttaaagtattaagatggcagagacatttctatttacctcagagtcagtgaacgagggacaccctgacaagctctgcgaccaaatctccgatgctgtcctcgacgcttgccttgaacaggacccagacagcaaggttgcctgcgaaacatgcaccaagaccaacttggtcatggtcttcggagagatcaccaccaaggccaacgttgactacgagaagatcgtgcgtgacacctgcaggaacatcggcttcgtctcaaacgatgtgggacttgatgctgacaactgcaaggtccttgtaaacattgagcagcagagccctgatattgcccagggtgtgcacggccaccttaccaaaagacccgaggaaatcggtgctggagaccagggtcacatgtttggctatgccacggacgagaccccagaattgatgccattgagtcatgttcttgcaactaaactcggtgctcgtctcaccgaggttcgcaagaacggaacctgcccatggttgaggcctgatgggaagacccaagtgactgttgagtattacaatgacaacggtgccatggttccagttcgtgtccacactgtgcttatctccacccaacatgatgagactgtgaccaacgacgaaattgcagctgacctcaaggagcatgtgatcaagccggtgatcccggagaagtaccttgatgagaagaccattttccacttgaacccctctggccgttttgtcattggaggtcctcacggtgatgctggtctcaccggccgcaagatcatcatcgatacttacggaggatggggtgctcatggtggtggtgccttctccgggaaggatcccaccaaggttgataggagtggtgcttacattgtgagacaggctgctaagagcattgtggcaagtggactagccagaaggtgcattgtgcaagtgtcttatgccattggtgtgcccgagcctttgtctgtctttgttgacacctatggcaccgggaagatccatgataaggagattctcaacattgtgaaggagaactttgatttcaggcccggtatgatctccatcaaccttgatctcaagaggggtgggaataacaggttcttgaagactgctgcatatggacacttcggcagagaggaccctgacttcacatgggaagtggtcaagcccctcaagtgggagaaggcctaaggccattcattccactgcaatgtgctgggagttttttagcgttgcccttataatgtctattatccataactttccacgtcccttgctctctgtgtttttctctcgtcgtcctcctcctattttgtttctcctgcctttcatttgtaattttttacatgatcaactaaaaaatgtactctctgttttccgaccattgtgtctcttaatatcagtatcaaaaagaatgttccaagttaatgttttggattccactgcttctctggatgaactcgcgtgcattttaaatacttggttctcccaatttcgaaaagttcgatctgcaaatttggacagatgatatatggtaggcaagtgtgttgttgcaactgccgaagcaaagcaggctattgtgggagagtccattaagtctctcgctacgggtaaaacatgttagctgtaggatgtgttttttttttttttttcttgagattagtgtgggtgtactataagaatggttacactggattattttttaaacaaaatattgacccctcttcc

SEQ ID NO: 77205 - DNA, 1835 bp, Glycine max
  Clone ID: PAT_MRT3847_40731C.1
ggctgcctatggacactttggaagagaagaccctgacttcacatgggaagtggtcaagacccctcaagtgggagaaggcctaagtaattcattccactgctctatgctggaagttttttgagcgttgcccttataatatgtctaatatgcctcaaccaccacacctctcctcgttcacgctacccctttctgctcttcttctacctttcaagttttaaaagtataaagatggcagagacattcctatttacctcagagtcggtgaacgagggacaccctgacaagctctgcgaccaaatctccgatgctgtcctcgacgcttgcctcgagcaggacccagacagcaaagttgcctgcgaaacatgcaccaaaaccaacttggtcatggtcttcggagaaatcacgaccaaggccaacgttgactacgagaagatagtgcgtgacacctgcaggaacatcggcttcgtctcaaatgatgtgggactggatgccgacaactgcaaggtcctcgtcaacattgagcagcagagccctgatattgctcagggtgtacacggccaccttaccaaaaaacctgaagaaattggtgctggtgaccagggtcacatgtttggctatgccactgatgaaacccctgaattgatgccattgagccatgttcttgcaacaaaactcggtgctcgtctcaccgaggttcgcaagaacggtacctgcccttggctgaggcctgatgggaagacccaagtgaccgttgagtattacaatgacaatggtgccagggttcctattcgtgtacacaccgtgctaatctccacccaacacgacgagactgtcaccaatgacgaaattgctgctgacctcaaagagcatgtgatcaagcctgtgatcccagagaagtaccttgatgagaagaccattttccacttgaacccttcaggccgttttgtcattggtggccctcatggcgatgctggtctcaccggccgcaagatcattatcgatacttatggaggatggggtgctcatggtggtggtgctttctccgggaaggacccctaccaaggttgataggagtggtgcttacattgtgagacaggctgctaagagcattgtggcaagtggacttgccagaaggtgcattgtgcaagtgtcttatgccattggtgtgcctgagcctttgtctgtgtttgttgacacctatggcactgggaagatccatgataaggagattctcaacattgtgaaggaaaactttgatttcaggcctggtatgatctccatcaaccttgatctcaagaggggtggaaataacaggtttttgaagactgctgcctatggacactttggaagagaagaccctgacttcacatgggaagtggtcaaacccctcaagtgggagaaggcctaagtaattcattccactgctctatgctggaagttttttgagcgttgcccttataatatgtctaatatccataactttccacgtctcttactctgtgtgtttctctcctcttcctcctattttgttatttgtatgttcttttgtaattttttacgtgatcaactaaaaacatgtactctctgtttgtatgtatgccctaccaatgtgtctcttaatatcaatatcaaaaagagagtgttcaagttaatgtttggattccaatgcttctctcgatgaagttcgagctgcaaatttggtcatatgataaatgctaggcaagtgtgttgttgtatacataaaaactgctaaaactaaggtgttaaatattactggtcatgtaagatattgttttctaagtttatagttagtagtaaataatagttaccctatt

SEQ ID NO: 77206 - DNA, 192 bp, Glycine max
  Clone ID: PAT_MRT3847_40732C.1
agggggaccagttcaacccttgaatacctcacccaattaccaaggaagccaaatttggcaacaacccaattcctaatttcccccctaatttggctaataaggttaattgcaaaaaaccctgtgcccccccaaccgaaaaatcccaacccgaccttaattccaacttttggcaattcccaacctttaaacccc

SEQ ID NO: 77207 - DNA, 249 bp, Glycine max
  Clone ID: PAT_MRT3847_40733C.1
aagtacgcaaacggcgcgtgaattgcttctgttctcagggcaagctcacgaaccggggaccccgtgagcccaacttgccgcaccccccaatgacgcctgcgctcaacaaacccctgccggaaattgaggctcaagccaccggcggcgtgaagttcactgccaacgccttcctgggcaagtcggtcgtgctgtacttctacccgaaagacaacacaccgccttgtcccccccaggccatgggttcccgcg

SEQ ID NO: 77208 - DNA, 461 bp, Glycine max
  Clone ID: PAT_MRT3847_40734C.1
tatttttttttttttttttttttttttttttttttttttttttttttttttttttttttttttttttttttttgggggccccccctaaacaaatcaaataaaacccccccccacttaattttgcttggaaagggaacacctttttaaagagttaccaaaacaaggagttttttaaagattggggcgaaaaataatagtggaatttcccccccattcattaacggagcctttggggaacccactaaaccctttaaggaaaaatgttcccccccccccgtttaaaaaaaaaaaaatgggcaaattttttccccccccaaaaatgttctggcccccttttttgtaattaaaaaccaaaacaaactggtttaactcccacccaagggggttgaaaaaaacgtgttttgaaaccatttaaccacccaagtccccgcttaaaaagcttaaaaatgcccccaaatttt

SEQ ID NO: 77209 - DNA, 811 bp, Glycine max
  Clone ID: PAT_MRT3847_40735C.1
cattttaagtgaagatttggatattccagataacatttgcaatttcctgttttggtgctatgtgacgatgtcattcaaatatttaattgtttgactaacagagtgttttttgggcatactgtgaactttaggggatcatttgcgtcaatccgaaccctaaggactatctgcacattggttaaaattggtgagtataagctgtaagttacccttagtttagcattaattaacttatgatgatggtaaatatgctactattatcttagaaaatcccatcttgtaggaataagttgaaggcgattttaatatccttcccaatggagaagatcactaatagctggtacaaataaaacacataattatatataatttgccacaaagcatcctctgtaaatcttcaaaaagtatgcagagtgaatggaacccttttaaatacagacatcctgtaaagtacctttatttcataaccccggaggcgtttcataatcaagttctgggctcagatctgcttgcgctcatcatataatttatgaggctaaaactatccgggcaactgcattggtgtcacttaaaatctagaatcatttggcccatggtgatccaaagaaaagaaaccattttccgcagaacattctgattataatatatcacagccagaatgaaagagaaaaggcaattattgacgaatagaaataaaaacacacactgaggacagtgctattggatagaactctaagaccagttgataaaatctgcagatatcaacctttttgcgctcttgacgtatattttttcttttactttgcttcat

SEQ ID NO: 77210 - DNA, 1613 bp, Glycine max
  Clone ID: PAT_MRT3847_40736C.1
atttgaaatttgcatgaagctacctcaatgggctttgcagattttgagacagctagcacctgaggtttcttatcgaagtttagttgcacttggcattgctagtattcaggggttgcctatagcttcttttgagaaagatgatgctgaacgcttactgttcttctatcaaaactgtgagaaagatagctgtacaaacaaaaataatataatttttagcagtccccctggttggttgaaaccaccccctcctactaggaaaaggtgtgaaccaagacaagaggctagccctggtcttcatgaaggtgtctttgcagggcagggtggtgtttgtaaattaaatgaagaggaaaaggacagaaaaattgtcaatgggattagcatgccgttaactcctgctaggcagagattaaaagtatctgcaatgaggccaattcctcacattcgtcgccatagaatgacacctttttgtgggccttctgagacagatggttttgatggcactcaggtagaggctattttgccacttgttgcccctacgaagcgtactagtattggatcaacatctggaacacacagaaaatcattttcaagtgcagctcagtctaagcaggttatttcattgaacccattgcctcttaagaaacatggttgtggtagaggcccagtacagacatgctctgaggaggaatttcttaaagatgtcatggagtttctgattctccggggacataatagactgattcctcaaggagggcttaccgagttccctgatgccatactcaatggaaaacgtcttgatctctacaacttgtataaagaggtggttaccaggggaggatttcatgttggcaatggcatcaactggaagggacaaatcttttcaaagatgcgcaattacaccacaaccaatagaatgactggtgttgggaatactctcaaacgacattatgagacctaccttttagaatatgaattagcacatgatgatgtggatggagaatgttgcttgttgtgtcacagtagtgcagctggtgattgggtgaattgtggcatatgtggtgagtgggcccactttggctgtgacagaaggcagggtcttggtgcatttaaggattatgcaaaaacagatgggctagaatatatatgtcctcattgtagtgttacaaatttcaagaagaaacaaaattttgctaatggttattctcaagggttaatgtcttcacgacccctttgatagttttccccattcccttctggaatagcggacaaactagttacctgatttgctggatttatctgtaatttatgttttagatagattagtgaaatataggatgaaaaatttgaaaattaggtttaatcaacacaaatgtcatcaggagtaggcgaaccccttccacatttgttcttgattaaggggagcaaaaattcctaattcagataatggaaatcattccactttcggatctccatcaaactctccattgtgagcagtgagctgaagtttattttattacgagtgtcctattgtattgaaaggaaaatgtatagacttgtgcactaagcatgtttatatgatttaatttaacatctcaattttaagtctttctgtt

SEQ ID NO: 77211 - DNA, 280 bp, Glycine max
  Clone ID: PAT_MRT3847_40737C.1
tcattccactccaacttaccggctgaaaccccatacattagcctctccacatcttcactgcttcttccatacaaatcctaaaccagactgaattcacaaaaaactttaccatgtcggacgatgatagatattataattaattttatctcacttctccctaagttgtcactaattacaacatctccgcttatattattaacaattcctttcatttatttattttttaatttaaactaaacacaaaaattgtttaccttttctataaaaggtattcttatat

SEQ ID NO: 77212 - DNA, 1410 bp, Glycine max
  Clone ID: PAT_MRT3847_40738C.1
tgattggaaatgatttctttgaccgtgtttttcaatagtagtgtataaagattaaattgtctcgacagcatagcaaaagcatgaggcatccttttattcagttcttgaatgttaaagggaagctagctcgattcaaataaaactaaggagcatatacaaataccattttgcaacagagggtagtaatagtataaaagagtgacatcagaatggtgttccaactttatatggcactatgatcccttacgtaggttggcctcccaaaaaataaatttataattgacatgccctcttggccaccaaatgcaattcctttcctttcatgggtggaaaaggaagaaatgaaatagcctcttgccgtcagaaaaaaaatattctgtttttccttcctccaccctatgtttgaatatgctcctctattcaatccaatgtgcgtctaacattttggccatgaaactgtaccggtcggcagcttcatctatcattttctgtgttggacgcccagctccatgcccagccttgcattcaatgcgaccaattattgggtttgtttggggacttttatcaaggctggtaacgaggacatactgcagggtcgccaacagctttaacgaatgcaatggcacaacacgatcatcatgatcagcagtcaatagcattgttgatgggtactgaattgactgatcgggatgctgttcccaaggtctccggacgttatgcaatggtgagtacttgatcagccaatgaaattcttcctccttttctgaacaaccatagtctgtggcccaagcatgacctattgtaaatttgtggaaccgtaacatgtccataacaccaacatgagccagggcacaaccaaaaagatcaggtctctgatttatgcaagcgccaacaagaagtccaccattgcttccaccctcgatacataactttctgggttgggtataaccagcagatacaaggtattcagctgctgaaatgaaatcatcaaagcagttttgcttatttgcaagggagccagatttatgccattcctccccatattctccaccaccacgtatatttgctatgcagaaaacagcacctaaatgtcttgccaatacagtgcgactgatgttgaaatatggtgtaagactgacgttaaagccgccatatccatataacagacaagggtgtgaaccatccaaaacaatatcctttctggcaacaatgaacattggaatcttggtaccgtctttagaaggcacaaaaacctgattgacatgaaactcagagcgatcaaacccagggatgtcaatctcacgaaatatcttcatgtcaggagtttgtgttcccaggtcgcactggtatatgattccaggagtcaaaaagctggttgttccaatgaaaagcacagtgtcttcacgccgt

SEQ ID NO: 77213 - DNA, 274 bp, Glycine max
  Clone ID: PAT_MRT3847_40739C.1
tgggccacccaagacctgacaccatgcacaaagcattcttgccatctgggccacccaagttatctagatgggtgcacgttgagggttacccgaattgctgatcgacctcttggtgaggctactgacccaatctatccagactggcaccgtctcacccattaaacccaccatcactaccagggaacttcagaccgcttgcaggcttgtgctccccggtggataggccaagcacgccgtccctgttggtgcgccggcctggccccaagttcgctag

SEQ ID NO: 77214 - DNA, 208 bp, Glycine max
  Clone ID: PAT_MRT3847_4073C.1
ccgatcaggcgttcaccaaacctcggcttatgttttagaacactgccaatcatacccaggaccagtttatttcacttgcaaccatgcacttaacatccacccataccaaatttctccaaacacatcaatcttattacctatcacacaattacatataactatttctgtagacaaaccacaattaaaaaactttcaactcttacccatc

SEQ ID NO: 77215 - DNA, 335 bp, Glycine max
  unsure (1)..(335): unsure at all n locations
  Clone ID: PAT_MRT3847_40740C.1
ctccaagcctcggcttttgctggttctaggaccccaaacatntcngcagttttggcaatttctaaacgtccccattcatctctaatacaaagacccattttatacaaagtttttttntattatagaaaaacacacttaaggtatttcatttatgatgaaagaagaaatacaatgatgaacttgataggaaacatgactacatgcatataaacttcacattctaactaagctgtcagcgacnagattagcttgaagccgtacaaaactcaccactgggtttggggaaactggaaagaagagattacaactatttactaganttgaaaagtnaatcc

SEQ ID NO: 77216 - DNA, 228 bp, Glycine max
  Clone ID: PAT_MRT3847_40741C.1
agaaaacgtgggttgtgcagctctgaaccacttttttgaacggacatgctcatggcaccactcttctatactaggagagctcggtggtgactcacacccagtggtccccaccgagtttcatgcctcaaatcaatgcgacgaacacaatgtacgggagagtggagtgctccaccagtgacatgacggtgtcactgcaggtacagcagctagcccctcacgcaaagtaca

SEQ ID NO: 77217 - DNA, 202 bp, Glycine max
  Clone ID: PAT_MRT3847_40742C.1
cgcaattttccagtgggttctagaggaccaagggaagagagtcgtttctatccggcacgtcaattaccgtcaaaagcttgcctttttcaatttacataggagctggtacaaagagtgctactctcacgattattccaaatgctgtgcttttaacgatcgcatatcatgtatcagctctcggatttgaagagcacttgatgac

SEQ ID NO: 77218 - DNA, 216 bp, Glycine max
  Clone ID: PAT_MRT3847_40743C.1
tacggctgcgagaagacgacagaagggggaggcgggaagtggtttcctcagaaaccgttaaatcctttcctttctccatgcggccccctagtttccattacaaacattgttctctcccacagccccacacaaacataaattcttaacatcacattcatcagatcgtgtctttttctgaacctttatttatcattttctctagacgggtaccatcat

SEQ ID NO: 77219 - DNA, 1554 bp, Glycine max
  Clone ID: PAT_MRT3847_40744C.1
aaaaaatcaaatcatgtgtgtgttccctccctaatgcacttttctacatgatttttgctaagttgtgttccattattactattatgacactgggtatttactctttccactataaaagcaagtgaagcttcctccacttctcttccacaccaagtcctgctcttcttccagagcaacaacaaacaaaccctttctttctggcttcagtttttgcagtgaaaatggcggtgactttaacatcaaccctctttatggctttgctatttgctgcttcagcttttgctgctcttcagcctagagtacctgaagcttaccttcaaaatggaaactttgaggagcagccaaaccccaaaaacctccagaaaacaaagctcatggggaaatattctttgcccaaatgggaagtcaatggtctggttgagtatgtctctgggggtccccaacctggaggcatgttcttcccagtgactcatggaatccatgctgtgaggcttggcaatgaggcctcaatctcccaaaatatcaaggtcaaacccggtcaactgtatgctctaattcttggggcctcaaggacttgtgcacaggatgaagttttgaggatctctgtgcctccacagactggtgatgttcctttgcagaccctttatagcctcaatggtgatgttattgcttgggggtttaaggccacttctagtgttgtcaaagtgactttccacaaccccggagttcaagaagatccatcttgtggccctcttttggatgccattgctatcagagagttctaccctccaatgcctacaagagttaacttggtaaaaaatcctggctttgaggagggtccattccccattttcaactcaaccaatggtgttttgctcacgcctcaacaacaagatggcttctccccactccctggttggattattgagtcactcaaggctgtgaagttcattgattcaaagcatttcaatgtcccatttgggctgggagcagtggagcttgtggcaggcagggaaagtgccattgcccaaatcatcagaacagttaccaacaaagtctacaacatcacattttcagttggagatgccaaaaatgggtgtcatggatcaatgatggttgaagcatttgccgctaaagataccttcaaagttcccttcaaatctgaagggaagggaacatccaagactgtaagcttcaagttcaaagcaattgcaccaagaaccagactcactttctacagttccttctaccataccagaattgatgactatggttctctttgtggccctgttattgatcaagttatagtgttccctgttgcctaaatattagagttccattccatctgtaccagtataatatgtagtaattgagatttttgcaaatcacttgagcttttcttttctataattacaagatgaaagatattctcaactattattctctttgtaaatttctattttccttttccggggatgcatgcgagagaccagttttaatgtagttttaatttttcatcataaaatatggttgtggtcagagtaacataagatt

SEQ ID NO: 77220 - DNA, 1047 bp, Glycine max
  Clone ID: PAT_MRT3847_40745C.1
ggcattcacgttgtgaagagcaggtaggcgatggatccttctttattccctcaaattcaattcttatacccttttgttttttttctgtttcggttatgtttaattttcgcttttcctattgttcttccaatcccaattaaattaacttatcatctcacaatgaatccttcactcctttcaattttctccccagatcttatctttttggtaaatagataaccgacagtgcaacacacacacatgatatgtgtatcctatgttggatttttcgaattttaattttttgtcattagtatacatgaatatgagattggaaattttagattttgaattttctgcagaggagaaaagaggatggataacataccagagcacatagtatgggagatattgagtaggttaaagaaaacaagtgatagaaattctgtttctcttgtttgcaaacggctttattatttggacaatgcacaaaggacttttgtaagggttgggtgtggaatggatcctgcagatgaagctttgacctgtctatgcacaaggtttcagaacttgtccaaagtggagattacatactctggatggatgtccaaactgggaaaacaattggatgacaagggtcttctcattcttgctaatcactgccctctactctgtgatctctccttgagctactgcacattcatcactgatgttggtctccgttacttggcttcttcttccaagctctcatctctgaggttgaatttcacaccaaggatcactggctgtggcattctgtctcttgttgtgggctgcaagaacctctccagccttcaccttatcagatgccttaatgtcagcagtgtggaatggcttgaatatcttggcaagctcggaaggctcgaggatctctccattaagaattgcagggccattggtgaaggggacttaattaagcttggccctggttggcagaaactcacaaggttgcagtttgaagtggatgctaactaccgatacatgaaagtttatgaccggttgtctgttgatggtggcaaaagcacatgt

SEQ ID NO: 77221 - DNA, 1099 bp, Glycine max
  Clone ID: PAT_MRT3847_40746C.1
tacggctgcgagaagacgacagaaggggacaatatataccttctaaacattctcttgcacccaaaccctggaattaagcacgttatttcattagggttggttttgttgaacagaaaaaaagagaaaaaaaaattatgggaagcgatggcgtgaggaaaccaagattcctatgccttcatgggttccgaacaagcggagaaatattgaaaacacagttacataagtggcctcaatcggttctagacaacctcgatctagtatttgtggatgctccttttccttgccttggcaaatccgatgtagaaggcatttttgatcccccttactacgagtggtttcagttcaacaaggaatttacagagtacaccaactttgacgagtgccttcagtacattgaggaatgcatgatcaagtacggacctattgatgggcttcttggtttctcacagggatcaatattatcggctgcgctgccgggtcttcaggagaagggcgtggcactcacgaaggttccgaaagtgaaattcctaataatagtaggaggggcaaagtttaggtcaccttcagtgatggacaaagcatattcttcttccattagctgtccctccctccactttataggagagacagattttttgaacaagtatggggctgaactactagaatcctgtgttgaacccgtggtgattcaccaccccaaaggacacacaataccaagattagatgataagagcttgaagaccatgatggatttcatcgaaagaattaagaaagatgtctcaaaataagaaacgagtttagacaaccagccagtgcttcaaagggatttttgaaatatttattcattttaacataaattaatagcattgctatttgtattcttatacaaatttgttactgttagatcctcaatgtaatcaattatataagagtcatatttgaatatgtaagcagaggctctctgccaaatttgtgacagcgattcacttccatcttcccagattctttttttttttttggttcattagtcaaaatttattctttgtgcacaacaacaaggcttttgatatcctaataaatagttgatgacaagttattc

SEQ ID NO: 77222 - DNA, 3810 bp, Glycine max
  Clone ID: PAT_MRT3847_40747C.1
ccaccccttccgaccggttgcaagaggataacagaagggggaacaaaaccttagtagtctctcagctcctccttcttcttcttcttgttcctttgtgcttagtccagtaattcagaacatgcccacttggtggggtaaaaagtccagcaagaccaaggaccaacagcaccaacaacaacaagaccaccctcatggcgccgccgccaccaccaccctccttcacttcaattttatcaagcccaagcccagtaagagcttcgacgacgtcgtgagaaactcccctcgtgccagccgcgatttcggttcctccgccgccgtcgaccaaggtcttcccttgcctcgcccctccgtcttctccacccaaagcttcgccatcgaccaaggccttgtttttggatctgcctctgtttccggctccagcgtcagctccagtggctcctacgatgatcaccctcagattaatgcctccagagggcaaggtgacatgaagttccttgtgaggtctaaaagcccgggtcctgggtcaagagggcccaccagcccaacatcacctctgcatccaaagttgcttggtttgagtcttgactcccctacaggcaggcaagaaggtgaatgtcatccattgcctcttccgccaggttctcctaccagtccttcttcttctcttcccagcatgagagcaaatggaatgacggaacacactaccagtaacctttccaagtggaagaaaggaaagcttcttggtcggggaacatttgggcatgtttacctgggattcaatagtgatagtggacaattgagtgcaattaaagaagtcagggttgtctgtgatgaccaatcatcaaaggagtgcctcaaacaacttaatcaggagatccatttgctcagtcagctttcacatccaaacatcgttcaatactatgggagtgatttgggggaagaaacactttccgacccactcctctcttatctggacttgagctaattacgaatgccacctttgtggcagtgaacggctcggtcgttcagacagtggccaatgaactcggaacaggatgacttggatgagccacatgccgcttttcacttgaagtttaagaaatcgccggtttctgatccatcgtctaatcacaacagtaagacaaccacgccgaccccggtcattaagaacaatttgcccaagctcttagaagcccaggccgatcatgtcctcttgcatcgtccgccgcatcgtcacaaagatccccttctacctcttccggtgcaggggggttcccgcctccgctcttcccccttctttgaccttccttctacatagcctccaaaccccatcaatcacccaagcagaggaaatgatagttgcagattgtatatacctcaaaaaccttttggtttccctggcaggccttgtggtctgtggttgaacttcaatctgcactcttacgagtacaaactctatctaaaggattctggtcgattctttatgcatgagaaactagaccacgtgaggtacaagtgaggtgtaggagctctcgatgcaggcattggactggggacaccgtgctgtttgtaacaacaattttattgattactgtaaatccatggtgtttactgtctgtagtaacgtttatgttgtatattgttagttcatggcaggagaaaaaaagagagtaatttttcatatatactctttctctttttttaaattatgtatccttacttgagaaatgatacgtcatacgtgtatggtgtggaacttggttccaaaccatatccagaatgatgggcttcaaagtttaaagagccagattcttttctttttatttggaatatgtctctggtggttctatccataaattacttcaggagtatggtgcatttaaggagcctgttattcaaaattataccagacagattgtctctggacttgcctatctgcatggaagaaatacagtacacagggatattaaaggggcgaacatactagttgatcctaatggtgaaatcaaactggcagactttggaatggctaaacatataaattcttctgcctcaatgctttcattcaaaggaagtccatactggatggcacctgaggttgtaatgaatacaaatggctatagtcttccagttgatatatggagcttgggatgcacaattattgaaatggcaacatcaaaacctccatggaatcagtatgaaggggtagctgccatatttaaaattgggaacagcaaagatatgcctgaaatccccgagcatctttcgaacgatgcaaaaaatttcatcaagctatgcttacaaagagacccattagctcgcccgacagcccataagttactagaccaccccttcattcgagatcaatcggcaacaaaagctgcaaatgtcagcataaccagagatgcttttccttgcatgtttgatggaagccggacaccgcctgtgttagagtcccattccaaccgaacaagtataacttctcttgatggagattttgcatcaaagccagctcttgcagcaccacgagcattaaggagtcctagagataacacaagaatgatcacatctttaccagtatctccctcttcaagtccattgcgacggtatgggccaacgcatcagagctgttttttctctcctcctcatccagcttacacaataatgggacaaagtagttacactttgaatgacatatcatcatatccaatgacatcaaatgccacgtttgctcttgatccttggcatgaaacatctcgatacagagccaatacaccacctggtggatctccaagaatgagactcatttgagttgagattgtaaatagctatagaactaaaatatttccacgtctccccagcatacctcgtggtctgtggttgaacttcaatctggactctgaaacacaaactatcctaaatattctgcgggtccattctttatacttgagaaccagatgacggaagaaatgattctggccctatgctctcggtgcattgcattggggagaccatgctgcttgtaacaatttcttgattattgtaaatgcaatgtgctcactgtgtttgtagtaacaattatgttgtataatgatagttcatggcaggataaaaaataaaaataaaaagtaatttttatatatccaatgacatcaaatgccacgtttgctcttgatccttggcatgaaacatctcgatacagagccaatacaccacctggtggatctccaagaatgagactaatttaagttaagattgtaaatagctatagaaccaaaatatttccacatctccccagtataccttgtggtctttccctctgaggttgaacttcaatttggactctgaagcacaaaccatccaaaatattctgctggtccattctttatacaagagaaccatatacacgagaaccagatgacggaagaaatgattctggccctatgctctcggtgcattggattggggagaccatatttgcttgtaacaatttcttgattattgtaaatgcaatgtgcttactgggtttgtagtaacgtttatgttgtataatgatagttcatggcagaataaaaaaaagtaattttcatcgccactctttccattatgaatcagaaattctatttgagattagatagggaaatctattagagctggcctagaagcgaggggttaggatagtttgtacaagattttgttaccattattgtataccaaaagaaagatattgtacaggagcgtgaacaatttggctgattgcataatggagtcagaagtgtttggttcaaaaaaaaaaaaaaaaaactcgac

SEQ ID NO: 77223 - DNA, 457 bp, Glycine max
  Clone ID: PAT_MRT3847_40748C.1
caatgaaaacacaccagagacattattggagtggcaaagagcatagctaagaaaaaggtataataataataataataataataataataataaagaaacactgcagatttgaacagaggagaagaagaataagaagcagctttgaacggagacttcaataattagatctcgcatttggactctgaaagacacaagcatttccctttcccagcatgaccatgattaattcaaattggcttatattttttttaattgttttgcagatatagatataacaaacaaaaacgccaaaacgagttaacacagatttccacggaaaacgaacgtgcacaagcacaccctctttctccttcactctcttgaatttcgcgggaaagctatgaatgaagcttgtgttgtgtgtttgtcatgtcaatggtggtgaagtggatgagtagtagaagtgtctctttcgctc

SEQ ID NO: 77224 - DNA, 279 bp, Glycine max
  Clone ID: PAT_MRT3847_40749C.1
gctcggaattcggctcgagctaatattatagagagaatttctctaatcaagtatcattgccaaggagcgctcggtgcgatatattatttccttctcattggacaccaacacaaaaccatgggctatgagcacaacaccagcccaaattccgatcagcaagaggaaccctgtgaacccactacgatgggactacggactggccactttgtgctgaagaaagaggcctaacactaagccaacacaaagcacaagacataccctttcaatgcaaaacgtgac

SEQ ID NO: 77225 - DNA, 1348 bp, Glycine max
  Clone ID: PAT_MRT3847_4074C.1
gccagtgattcttcttcacttctacatcaacatcatcatcatcaacagcagcatcagcagcaccagcagcaacttcttcagtattggagtgacgcgttgaatctaagtccaagaggaatgttaacaagattgggaccagatggaaggccattgtttaggcttccaacacagcccataaacacaacaaaactctatagaggagtgaggcaacgccattgggggaaatgggtcgctgaaatccgtcttccacgaaacagaacgcgtctctggctaggcacatttgacacggccgaagacgccgccatggcctacgaccgagaagccttcaagctacgaggagagaatgctagactcaatttcccagaattgttcctcaacaaggacaaaaaagaagaacaacaacaacaagaacaagaagcttcttcgccagttctttcagctattgcaaagcagcatgaaccttctagtgaacaccgtgacgtccccatagaagagtctaatgagaatgattcgggtgacgccacggtgagcgatgaccaggttcatgctactactgagagttccgaaggagtttctcaggaaatggtttggggagaaatgtctgcatggttcaatgctattcctgctgcttggggtcctggtagtcccatgtgggatgatttggatgccaccaataatcttctttgccaatcacacattcctttttccaatcccaatcaacaagaactcaatgatgctgagagacaagaacaaaacactggaccaggttacttgtggaaggatcaggattgaaatttgaagttaattttctatataccttgcttctttctcttcctggttgcatatccatgattatcatttatccatcatccactccttcattacattttaggacactttgatggttccttagttacttacttctcactcactggttgcagatattttcaccacacaacctgtgaaccttgcctactactactcctatattcatttcctttttaacttcttttctgaaaccttctgctgaactaaggctccgtgtatttcaaggccttgcagcattttttttcttttacttgactattttacactatttttgcttttgtttttttttaatattttaatgtagtaagtaaaggtagattggcatgaccagggaagaaggagacggttttgtgatttccttctcggttgctccatccgttatgagctatgtttttcagctccaaggatggttcatatatatatatatatataatcatattacttcatttgtagtttgtacgctatcatgttatgtatcattttttttgttgttatattacatatccagcactttacagta

SEQ ID NO: 77226 - DNA, 385 bp, Glycine max
  Clone ID: PAT_MRT3847_40750C.1
tttcatccatgttaacaacaatgttggcatgaatccctctgcccttgatacctgtggttttgatgaattagctaagaccgatcttgttttcgatgtgggctacagcaacgccatgctatatgaacccgaagaacatacggaacatgtggcggtgattcagtacgggcgtaatgtttggaacattcataaggcagttgttgagtgcactgttgagatgttcttgggtggatagaatgcaagtatatggatcaacataggtgaggagtcattgaatggtgcgcctattatgcgggactatggccttcttgcgtagctcatcgacttgatgaagtgtgaagctgatcgtgaggaacagcatcatctattcctcgcagatgcgaccatc

SEQ ID NO: 77227 - DNA, 250 bp, Glycine max
  Clone ID: PAT_MRT3847_40751C.1
attcatattagtgttagtaactagcatgatatcatgatccaagcaaccaactgcatccacagcatcaattcccaaaccttgtacttcttcactttttctgtatccagaaacacttgaccttgtcttatatacaacttcactgcttcaaagtaacactaatactaatagtcacacattcattctcaacaagtttgcttccacttttgtaactacaatggcttctaacagcatcattcaatgcatcccttct

SEQ ID NO: 77228 - DNA, 561 bp, Glycine max
  Clone ID: PAT_MRT3847_40752C.1
acggctgcgagaagacgacagaaggggacacaatgataatctattcatacaattcttgattaatataataaaagaatgcttttctctttttgcatgactaatctcaaatttgcaaatgtattaactttgcttgttcctgtcagatttgtgaatgttcactgctatttgctcgactagaagtgcttaacatttctggaaaccgtcttactgatgcatgtggatcttatctttcaacaatcttaaaaaactgtacagctctttgtagcttgaatatagagaactgttgtgtcacatctagaactattcaaaaagttgcggatgcattggactcaagatctgtacttgcccatctatgtataggatacaacagcccggtatctggaaatgctataattaatcttctgtccagactttctaccctgaaaaggttttctgagttgaatatgagtggtctaaaactaggcaaaccagttgtcgataccctctgcaagcttgcagggaccttaactttatcaggactaatacttggggggacgggtattggaactgaaggagcaacaa

SEQ ID NO: 77229 - DNA, 1737 bp, Glycine max
  Clone ID: PAT_MRT3847_40753C.1
ttcgggaagcgtttctttctacaattattacgctttataatatttcttcactgcccacagtacttgtcctcgcattccgcttctgcaattgcaatggcttctaaggccatcatccaatacagctcttcttcttcttcatctcatgcgatcatcactacatatgatgtgtttgtcagcttccgcggtgaagacacgcgcaacaacttcactgcttttctctttgatgctctctttgaaaatggcatccatgccttcaaagatgatacacatcttcagaaaggcgaatccatagcacccgagctgctactggccattcaagggtctcgccttttccttgtggtcttctctaagaactatgcttcctcaacttggtgcttgcgtgaacttgcacacatctgcaactgcactattgaaccatccccgagtcgtgttcttccaattttctatgatgttgatccatcagaggtgcggaaacagagtggttattatgggattgcctttgcagaacacgaacgaagattcagagaagatatagagaagatggaggaagtgcagagatggagagaagctctgatacgtgtggccaatatctctggctgggatatccaaaatgagtaagtacaaatttatatgcagtcagtcatattatatccatgtgcatacatttcatcatttcttagtcacgttgttttatcaaacttactatcgctttctaaagtagagttcagagaagttgaggaggtaacatgcaaattgactctaaatttatacatgtttaacgcgaatggtgtttaaaaactttgaaattatcttatcctgtacatatatacattctgttgtggttctgataatttgccattctttattttctttaaattttcaggtcacaacctgcactgattaaagaagttgttcaaaatataaaatatatcctaggtcccaactttcaaaatcttccaaacggtaatctagtcgggatggaatccagtcttgaagaattagaaaagtgtttacgattagagtcggttaatggcgttcgtgttgttggaattagtggaatggggggaataggaaagacaactcttgcccgtgcattatacgaaaagatttctgatcaatatgattttcattgttttgttaatgatgtaaacaaaatttatcaacattctggttcactaggtatacaaaaacaattactttctcagtgtctaaatgatgaaaatttagagatttgtaatgtttctaagggaacatatatggtatcaactatgctacgcagtaaacaaggacttatagttcttgataatgttaataaggatgaacaactatgtatgtttacagggggtagagagactctattacatgaatgctttggtgaaggaagcagaatcattataatttcaaggaatgaacacatattaaggacatatggagtaaatcatgcttaccaagtccggccattgaatcaagacaaggctgttaagttattttgcataaatgctttccattgtaactatattatgagtgattatgaatggttgaaacgtgatgtactatcacatgctcaaggccatcccttggcaattaaagtaataggcaaatctttgtttggtcgaaatgtttcacagtggagaggtacattggttaggctaagtgataataaaagtaaggatattatggatgtgttgcgaataagttatgatgatctagaagaaaaagataaagaaatatttttag

SEQ ID NO: 77230 - DNA, 389 bp, Glycine max
  Clone ID: PAT_MRT3847_40754C.1
ggctagagcatgatattgaacggcgagaatcaacactgttctaatctagacgcgcgtgactcacgctcactctcacgcatcatcgagggtttgcctgatcagctctcagtgtgatatgctagattcatcctcatggtcgtctgtgagtgcggtagtggagatagatcgttcgtgatttaggcagcttaccggtgacttcgaggaatcaatatgatgcgtgcagtggtgtggaggttcacccattggatctcttcactcactgcggataaattcgcttctcctgttgggatactgctggacaagacaagtttggtggcctcacagatggatattacatccatggccgttgtgcgattataatgtctgatcttattgcgcgtctaacagac

SEQ ID NO: 77231 - DNA, 290 bp, Glycine max
  Clone ID: PAT_MRT3847_40755C.1
cccacgcgtccgtagagcgggagctgtagatgtacaagactcacgttcacgtgcatgcgaatgcatagctatagtattgtgatagcgacacctaattcaatggcagtggccgtacaacgacaagactgggactgccatgacgttgccgatattaatcttattggagtagatgcacatttcgctagctgcagttgtagcaataaggaacaggccgatagcgattgccatcagtagcacatgctcaatgtgaatggggactggcactggccctgtacattaacatcaagcgc

SEQ ID NO: 77232 - DNA, 693 bp, Glycine max
  Clone ID: PAT_MRT3847_40756C.1
gaagaatcactagttcggaatctatttgcaatatggagttttgatggaaaactagtgtatgagaacatagtagaagccacagaagattttgacaccaaacatcccagtggggtcggaggacacggaaatgttcacaaagcaaagtcgcacacaggtcaaattcttgccgtgaagaaactccatttagtccaaaatggggaattgtccaatattaaagctttcacaagtgaaattcaagctttgataaacattcgacatcgtaacattgtgaagttatatgggttttgttctcattcacaatcctcatttttggtgtatgagttcttggaaaagggaagcattgataagattttaaaagatgatgaacaagcaatagcatttgattgggatcccaggattaatgccattaaaggtgtagcaaatgctttatcttatatgcatcatgactgttcacctccaattgttcatcgagatatatcaagcaagaatattgttttggatttggagtatgtggctcatgtctcagattttggagcagccaggcttcttaatcctaattcaaccaattggacctcatttgttggcacttttggatatgctgctccaggaatgttatttaatgcatgatagctcttttaatttgctacagaacttgcatacacaatggaagtgaaccaaaaatgcgatgtgtat

SEQ ID NO: 77233 - DNA, 304 bp, Glycine max
  Clone ID: PAT_MRT3847_40757C.1
atagctactggcagtgatacatatagctcttgcaacattatggtgaatgaagattactgcgctgtgccttataacatatcaggctagaagggctgctacgtcgactcgtgatctcgtgacaccttacatatgggtcgcagcggaggatgaaggcatacactctccaactatgatgaggaagatgaaacgttcgagtagtgatacaaccatttgttaacacgcgggtgtagtgaacacataacaatttctcgcacagtactagccggatgcatagaggtagatatctggggcgcttaatgaggga

SEQ ID NO: 77234 - DNA, 248 bp, Glycine max
  Clone ID: PAT_MRT3847_40758C.1
cataatgatataaaaatcaccaagcgttctttatatgaaatgataatacattattctggggtagaactgccgtgggggggggctgtaatcaaatcaaaatccatcgctgatctaacgtaagataatttttccttatcacttacctccctacttgcaatgtatactaaatgttgactatacaacaatataatctattttgacatgtttctatactccaattatttttcatcaactttacactatccact

SEQ ID NO: 77235 - DNA, 275 bp, Glycine max
  Clone ID: PAT_MRT3847_40759C.1
gaaaaccaatatgaagttttttcctacaaaaaccttgatgaaggcataggcaggtcaacaaactataattttcatgttgaatgactgacaacattctaaagttaatttgacacgcataattctattttacattagcagacatatgccatgcagaatctctattaaattaaagatgagatgatgctttcattcatttcaccagataatttaaatgtgatgagtgtgcacaatcattcttattggtgccatcactgaaaccaaattcatgcctccaa

SEQ ID NO: 77236 - DNA, 608 bp, Glycine max
  unsure (1)..(608): unsure at all n locations
  Clone ID: PAT_MRT3847_4075C.1
gtaatttttcctgcaagttaatctgattctgagtttcctcagcattctctgtttctttcttccttcttgcatttccattgcaaaacttcaatatggtatcagatgaacaacaacctctacgatcctcttcctcaatgggcctgtgatcttctcctttgtctcttctcctaatcactctcccatcagcttttccgtttggattcatggcagcaccagttaaagatttcagttaagatccctttcacccactgtttctacatcattcggatggcccaggactcatccttacctcccaacctcttgaccacaagaactacaccacatggagcctcgcaatgatggtagctttttcggtgaagaacaaggtggccttcatcgatggatccctcccgatgccaaccatagctgatcctacatatgctgcatggactcgtggtaacaatcttgtcatttcctggctntacaattctgtntctaaagacatcattagcagcatcttgtttgcaaacacgactaaggaaatttgggaagattcganaacacgggttttcccgaaagaatggcccaagaatgtacaattgagaaagcagctaatgtcattacaagaa

SEQ ID NO: 77237 - DNA, 476 bp, Glycine max
  Clone ID: PAT_MRT3847_40760C.1
gtaaattgaaagtgatgaccacggacttgcaaacttgaagaatgcatatgtcggctactctgacgacttagacatcactgcatcttatggtggatctcactgataaacagatgaatagccctcacgaggatgaccttgatgtggtattaatggatacagcgtcaagattcagatgattgccatactgctggtactcataacactgaccatgaccctgctgctgctcaaccgttaatatacatactgccaaatcatgcgacagactattggactaggttacaaacaaatgcatgcctactggcatcaggcgttgccaaaaactctgacataatggatgactctgtgaaagatctcctatacgacgttctaaagtagtcctactatacaccttgcatgtgtcgaccatccatgctcccttaagttgattggacatttcaatactaacgcgcaatgtgcacggtgcattatagaactac

SEQ ID NO: 77238 - DNA, 212 bp, Glycine max
  unsure (1)..(212): unsure at all n locations
  Clone ID: PAT_MRT3847_40761C.1
ttttngcagaacagggaaaggacttttatcttttataggaagaggaattgcggttcactaaacagtcaaccatgattaacaagtcaagaaaatcatctgttctatgaggacaaaaaaattatgtgacttgaaaaaaaatcttgcaagcttattctattagagcttatttttaaacccaccaccaaatagttttacctaacactgctctcaaa

SEQ ID NO: 77239 - DNA, 840 bp, Glycine max
  Clone ID: PAT_MRT3847_40762C.1
cttgatgcctgcgttgcatcttgtgagagggaagcctttgatttttgaatgtggcccattttgctcctgtcctcctcattgtcgcaatcgtgttgcgcagaaggggctgaaatataggttggaagtgtttaggtctaagcagacatcttggggagtaaggtccttggaccttattcaagctggttcttttatctgtgagtttgcaggggttgttttgaccagggagcaagctcaactcttaacaatgaatggtgattcattgatatatcctaatcggttttcggaaaggtgggcagaatggggggatttgtctcagatatacccggattatgtgcgtccattgtatccgtcaattcctcctctagatttttctctggatgtgtcaacaatgaggaatgttgcttgctatatgagccatagttcaactccaaatgtcttggttcagtttgttctgcatgatcacaacaatttgatgttcccacaccttatgctatttgccatggaaaacatccctcccatgagagagctcagccttgattatggtgtagctgatgagtggacaggcaaactctctatatgtaactgaatggtccatgcacttcttgagttttaggcatggttttgtgaggtaaagcctagttctatcattctactttgttgcttttacaactatcttccttttgtttacatcttacttttgtctggtactctgcgctgtctccaatgtaaactctgtttaccatataccataatgagttatagacataaaactattgtgatatttcagaagttcatgcatgctttggacaatgaaaaaatgttgtaattaggttgatcaaa

SEQ ID NO: 77240 - DNA, 337 bp, Glycine max
  Clone ID: PAT_MRT3847_40763C.1
atcccagcctaggagagagatggtggggaaggatcaggatgtgtcgttgggagcatactatttcccggagagactgactattggaacggatgtgcaaagccaagactacggcacggactaccacgagccggcgccagcgccgttatttgaccatactgagtttacgtcatggtctttttacagagcaaggattgcagagtttgtgggcacttttttgtttgtctacatcaccgacttaaccgttatgggagatgccggggcttagtctaagtgtaccaccgttgggattcaaggaatcacttgggccttctgtggcatgatattcggcctcgtttac

SEQ ID NO: 77241 - DNA, 394 bp, Glycine max
  Clone ID: PAT_MRT3847_40764C.1
cggctcgagcaactcttttcctttttgcagctccctttaacccaaccaatttgccatgtcaagtttggaggaaccacttggtcttgacaagttaccaagcatgaataccattgacaggattcagaggttctcgtcaggttcttgccgtcctagagtagataacttgggcatgggaaactgctggattgaaggacgaagttgcagaacatctaacagctgcaagtgagtcaagtattgcaacttaagttaaggacttgatacattttactgatctatcattcaacatccttttcccctcttttatgttctaatccctgctgttgtatagtcttaaatctgctacctgcctactatgtccagaatatctttctatctctgcgcagcgaagatgatg

SEQ ID NO: 77242 - DNA, 404 bp, Glycine max
  Clone ID: PAT_MRT3847_40765C.1
atgatggcgaaaccgaattcaatttctaaacaaacaaaaaatcaatcaaaacaatttagtttttgaagaaagaaaaaacttacaaaataatagtttcttttttttaggaaatacaaaataactgtttctaaagattacaaatattgaacactttagtctttccaatcatttgagtaaacatttttaggcaccaatttagatcactaatgattttgtcatgaactaaatacacaattcactttttttaatttactcacatagcgtttgaaccagtagttaatgaatagtattgatgagatgtatagaattatcaatgattcaatgtattattattctattttgtatttaccgctaagaaaattttagattcgtgagaaatatttgctataggctcttaacgtagg

SEQ ID NO: 77243 - DNA, 373 bp, Glycine max
  Clone ID: PAT_MRT3847_40766C.1
tcctgaattcccgggtcgacccagcgcgtccggcaccatctgccacgggatcgtggaggtggatcctttgctcaccccacaagagcctcacctgaacgagatgcagaaccatgggtatgagaaccccacctacaaatacctggagcagatgcacatttaagtggcacggagcgcggcatccctggcagaggcatgcacgaagtccggaagatcccacgattccaatcgactgtcaagcagcagcagctgtcacgggctgcgtctgacatcctgaccttctggactgtaggactatataaagtactactgcataactgcaatttccattcttttaaatgtgtgaaaaatggtgatataacaatatatgatatat

SEQ ID NO: 77244 - DNA, 750 bp, Glycine max
  Clone ID: PAT_MRT3847_40767C.1
ccacgcgtccggtaaggggttgttggttcttggcttgggttaacagtaaaccctaaaaccctagaagccgcttaattttttctagacccttttctttttcttttcataaacccccaccccacgcacactatcttacttctctctcttttgcgtttgcattgcttcctgcattttctttaccttccatactcacatcatgtatcgctttgcttctaacctcgcttccaaagcaaggattgctaggagtagcagccaccagattggaagtaggctgagttcgagcagaaactatgcggctaaagacattagatttggtgtggaggctcgggcactgatgcttaagggtgttgaagagctagctgatgctgtcaaagtaaccatgggtcccaaggggcgtaatgttgtgattgagcaaagttttggtgcccctaaagtaaccaaagatggagtaactgttgcaaagagcattgaattcaaggataaagttaagaatgttggtgccagtcttgtaaagcaggttgcaaatgctactaatgatgtggctggtgatggaaccacgtgcgctacagtccttacacgagcaatatttactgaaggctgcaaatcagttgcggctggaatgaatgcaatggacctgaggcgtggtataagtatggctgtcgatgctgtggtgacaaacttgaaaagcagagcaaggatgattagcacatctgaagaaatagcacaggtagggacaatatctgctaaccg

SEQ ID NO: 77245 - DNA, 190 bp, Glycine max
  Clone ID: PAT_MRT3847_40768C.1
agtctatgcccccgaaccttttgatgttggacgcgtattgcacgttgatattattatatacggccaccagatcacatggtcaaccactggtacaattgatccatctgctgaatcgggaacctatgtataggcacttgtgcgaaaacatgatactgaatataatgcggtagttactcagactggctcagac

SEQ ID NO: 77246 - DNA, 288 bp, Glycine max
  Clone ID: PAT_MRT3847_40769C.1
accgggtttccctgattgaattaatggcattcatcaaggtgaaatcaaatcttttcctcctgcacttcctaagacagcgtcacaccaaattacacgtagtgtttacgcacaggttgactgtcaatccgcaaaaaactttttaaccaatatctaacttacccggatgaatctcatgctgagaatcttcgccctggatgtactatactgcagcatgttcaacacctgctgttatataaatgccacgaagtggagcacataactctgtaataagccatctgagaagctatc

SEQ ID NO: 77247 - DNA, 383 bp, Glycine max
  Clone ID: PAT_MRT3847_4076C.1
ttttttttttttttttttttttttttttttgtgttgggtgtttttttttttttaaaacaccattcattaccatagaccattgtttacactttacacagacatggttttttattcagataggaacgcccttttacatacaaagaacctttttaaaaaatagaaaaaaaatctatctattatttataatttatttttctttttaattttaaccgacaacagattacgggggtggtttaccacgggggggttgcttgaaaacaaaactaggtttttgggggggggagcacaggtgggacgaccctggacacgcatgcagacaattgtcccccaaggtggcggaaaccgcgggggcggccttaattatcccggggggggggtttccg

SEQ ID NO: 77248 - DNA, 532 bp, Glycine max
  Clone ID: PAT_MRT3847_40770C.1
ggcgggggcaaaataaacccaacctttttgaaggagggaataaaaagccgcttttagggggaaagggaaatggttttttgtttaacggcccccttaaaacaaaaaggggaataaaaataaaaagttttaggggaaaaaaaggggggccaaccttcgggcttgggaaaaaattttaaaaaaaaccaaaatttttgaatgggcccccccagtcctttttggggggcccaaatcctttggaaaaaaagctgaaaaaggccctttgggggagccccttaaatttttgaccccggaaccacataaaggctcaggcccaaaaggttgggctttttcagcttttttggggccccccccccccccctttggaaaatcggaagcccaaaaagtagggttgtttttaaacagctgcttaaaaaaaggggggcccttgtatgacccttccctcggggggcccaacccccaaatggccccataaaaagcttgcttggccaaagggggggcccttttcggagaatctttttttttttaataaaaa

SEQ ID NO: 77249 - DNA, 625 bp, Glycine max
  Clone ID: PAT_MRT3847_40771C.1
gagaaagagagagagtggcgttttgacttgaaacagtcgctgctgcgtcttcttcttcttcatccgtggcgttagggttttggtcggagtagccgttccccatggacgccgaagctgaccctcctcaaaaccctatcacaagacacaaatgcttggcatgctataagcaatataagaagaaagagcatcttattgagcacatgaaaacttcgtatcattctgttcatcagccaagatgcggggtctgtcaaaagcactgcaaatcttttgagtctctgagggaacatcttactggtcctttgccaagaggaatttgttcaaagattttctctcaacagggctgtcaactttgtctggcactatttgatagtcccgggtctctcattggtcatagagaaacatgtcgcttatctgcccctacttggccaggaacaagtgcattgccctatatagattcccagtttgatgcgcatggcccttctgatgaaaacagtgctggggacaagattcctctgatgaaaaccatgctggcgaaggccctggaggagcagttgccatggactgtgaaatggtgggtgggggaagtgatggttatctggcaacttgtgctttagcgtgtctggtg

SEQ ID NO: 77250 - DNA, 400 bp, Glycine max
  Clone ID: PAT_MRT3847_40772C.1
gcgacgttgacgctatggacatgtcggataacgactcgactcctagcgcatctcgccgtaactcgctcgaccgtgatggtctccgcaaggacgtccacaagctcgccatccagtcgcctccaccgcttgatccttcgcttcgctctcctggcgagcagtctgaagccgcttccgagcaccagtcagagctgggtgtttcggagcaggacaacgaggcctgggttcagaacatgcgcatgatcgaggagctgcgcgcgttcatcaaggtcaagctcgagcgcggtgactttgaggacggcgcagactcaacagaagtcaaggaggagagctcagaagagcgccgtggttctgcaggccctagcatgtcggaagaggagcgcagtttatatcccgttctacg

SEQ ID NO: 77251 - DNA, 1075 bp, Glycine max
  Clone ID: PAT_MRT3847_40773C.1
ggaattcataaattaaattcggctcgagcacccatggagccacacgagtcccgttgtcatccctgtattactcacacacacacaactgctatctgctctctccacaccgtgcagcaattcctctcttccctctatccacccctcccatggcggaaccaatggctgtcgactccaatcccgaatccggtctcgacttcgagtcccctttcgcctgggggaagaagcgaggcatgggaggcaaaaagaaggacgtgcagttctacgagtcattctccttcgacggtgccgagtacgccataaacgacaccgtatgcctccagagcgggatcggcggtggcgagccccacatcgggaggctgatcaagatctgggagacccgcgacaagtccaggaaggtgaaggtgcagtggttcttccgccccgccgagatctgcaagtacttggttgggatcgaagtgaagccgaacgagttgttcctcgcgtgcggcggcgacggcgccaagggctttgccaatgtcaatcctttggaagctattgtagggaaatgcaatgttgtttgcatttctaaggacgttgggaatccgcaaccgtcaggtgaagcaaaggctgattatgtgtactatcgtttctttgatgttgtgcaattgaaagtagtggatcagatagatgtcaaggttgctgcgggaattgaagttaaaaatgtttccaacaaatgagatagtcaaaagcacgttggtgttgtgaaactcggtccaagacaagataaaagttagtgggaatggcaagtaaagtattgaagtagatatttcaggtaaaaaacagagttagcctgaaattgaaaaggtagccggcaaatatgttgatgtaattaagttattaagttctacctcccaccaaaaatcaaaagttataccgtagtagctactgtaattaagctattactactgcggctactgtaagtcatttactgctgcagatgctgctgcttagaattaggatttactttaatctgtagacatggatatggtgtgtggaaggaaaataatactaatatcctttttgaaaaaaaaaaaaa

SEQ ID NO: 77252 - DNA, 643 bp, Glycine max
  Clone ID: PAT_MRT3847_40774C.1
atagaatgcaaatgttatgacctaacatgcctcgtttgcttaggatatatgatttttggatttttctttatcaattaggtgaatttatcatacccatatctattcaattacttgtccttgatgtctcacgatgacaagcctattttatctacctatctcccaaatgcctttgcaaatattcaataaataaaatgcatgaagccttgattttagatgtgtgctttaatgcatgggcataatattatcatcctatgtctagcaatgatttcattatgatgtctttttcttttagttcttttagaaaaaagacagtaggatagaaaacacctgcatctaacccctaacataatataaagatgagtaatgcatgaaatataaatagaaaaagacaataggatagaaaacacttgttgagttgataaatatggagtacatcatacatatctttggctttttaggcctgtcaggccctaactaagagttttagcctttcatagtcatgaggaccttacattgaactgtggatataagaattggtggattagaaggaatggaagaagagaataaagaaaatgatgagagagaagagaggattccctaaggaagagttctcaagctttgggtgtgtatgataatgctctta

SEQ ID NO: 77253 - DNA, 155 bp, Glycine max
  Clone ID: PAT_MRT3847_40775C.1
gggtgacatgacgacttaaaattactaattggggtcatcaattaggggcataattgaaggtgttggccaaaaattcattacacactaacacaagtgattgtaaccccccttcttctggggaatatgtttaaaggtggtttaacacactatattag

SEQ ID NO: 77254 - DNA, 899 bp, Glycine max
  Clone ID: PAT_MRT3847_40776C.1
gttttgccattgtctgaggtatccaatttggtgagggatgttgacatctcatacaagagttcgaatcatctatccaattataatcttccacaagctgatcccatgcaatttctatgtaaccaattttcttcgctcagactgagggacataaattggaatcaatagtatactactcacctcacttaaattttgtttctgttacacaaatctctcctctgtttagaaaaaaaaatatgtaaaaaaattgagaggtgcatgtagggattccaatgcatattttcagtgaaggtttttaaagtacagaagaagtcagagtaatttactctcaatttcaaccaatcagaagttacggaaatattggattttggaaccctataccatgtagctttggtatggagagcaatactgaattttaagtttgggaaaacatctgcttcaactgcaaggtcaatagcaattgtgtatataagtatagaagagtatactctatgcatacagtcataggttaagtaaaagataatgtctcttttgggtttgcctttgctatatttctgacatgataaggaagaagcagagtatggtgcgtgactcatttttctgcaaggatttaacaactcttctagagtaagctttcactttagagagaaaagtaaaagatctcaatcattgataagatcaacagttgatgttacatgaacttgtccaacaaaccatacagttgttaaaatctcctgtcttgatttttttcattaaaaaatgagatgtcgcattttcctctatgtagtgaactaaaaagagtcaaatcctccataaatatagataacaggcataaggttggtgtaagggatggcctcttttgctacatgctgattgtttctaatatatagtttttttttgtc

SEQ ID NO: 77255 - DNA, 303 bp, Glycine max
  Clone ID: PAT_MRT3847_40777C.1
ggcctgtgataggaggaggagatgtcaaagctgttgcttccatttctggtgggagtgatgagttgactgggcaaatgatggcggaagcaattgataaggtaggacctgatggcgttacgtcctttgagtctctctgtgcatttgagaccacagttgaagtggaagatggaatgcatattgacgaagggtatatctggcctcagtttgtgacaaaccctgagaagttgattgatgaatttgagaatgccatagtgctgatcatgggctcataagattccagaaataaaagatattaaaccactg

SEQ ID NO: 77256 - DNA, 303 bp, Glycine max
  Clone ID: PAT_MRT3847_40778C.1
gcgataaaccctttagagcctgagggttaagaaaagttcatatcctacatgggctaaaggggtccctgtggctgttcaacattagtgcgacgcacgtatggcctcaaaggctttgcttctggacctgaaattgctaggggtatgctgctgagtccataccatgccgggctactacaaatgcttgacattactccatcagctgagacgtataatggggataaaatggaattggctgatgctgcattgcctcttcttaaaggagttgatgctacaacacgatgtggctgaagcatgcactggggt

SEQ ID NO: 77257 - DNA, 491 bp, Glycine max
  Clone ID: PAT_MRT3847_40779C.1
ggacggaaaatcatatccaccccaaagggaaaatccaaaccaaaaaaaaggggggaatctggggtctacacaaaaaattccacaggttaaagcaaaaccaaactcgtacttttaaaaaaagggccatcttttttgttgggggggttttggtaatttcttccccccccaaaaaggagtttgacgaagtactaacactaaataatctatggggcctgcaataaaaaaaaagagtattccctctcaatcaaaaaaattaatgggattattcggaaacctccactatacaaaccttatccaatgaacatgcgtttaaggaatcatgtttactacaagagagctcatataaatgggggggggacgaggggacagaaacccattttttgtaaactttttaaacaaaggaatgggcctttgggattgcatcaaatgggagttgggggctttgcttcgtaaacttctttaaaagcccatcgaaaatttatgtaaaaatt

SEQ ID NO: 77258 - DNA, 251 bp, Glycine max
  Clone ID: PAT_MRT3847_4077C.1
catgcctaatttcctttattgaattaaacatgaccctcttgttgagtatgctctgcctaatttcctttattgaattaaacaaacgaacaagcgaaagaaaattaggcagagcatactcaacaagaggggcatgcctaattatcttaagggaatcaaacactcgtgcgctcggggccggcgtacattcgcgtgctcgttacctcggggcttaatacctgaccgtatcctgtgtgcgttccaagtttgcctat

SEQ ID NO: 77259 - DNA, 904 bp, Glycine max
  Clone ID: PAT_MRT3847_40780C.1
catcagaaagaaacacagagacaaggggcagaacttggggagcatatgtcatgcaagagacagagtaaaggaggagcggagggagtgggggtcttccacacatcaagttgaacaattgaagaatgaagaaagaatactacggccaatatgtgcaaacggcaaatccagattaatgagttaggattctatgacttccacaggggaattaatgtgtgatcaccattgagtgcactccaacctttttgtttccactcctcaacccttccggtgctctggcctttggtcctagagtcttttcaatgaagtcaatcgttttgctgtctgttatcttctttccttgctgatccgtgacatgaaatacatccataaaccatcccccatcagaagatatgtaagctttggtaattatgaagtcaaggtctgtcaagatttgcacaacttccagcagaattccaggtttgttaacactatcaaacttgatcagtgtacaatcatggcaactagcattgtccacagagacccttggagggttcattctattgctgaagttctcatactcaggatcaaaatatggccaacaaactttagccattaaaccaacttctccaatcaacgagcttcttcgttttccccttgatttttcgaaggaggggttctcccaatattccaacccaagaccgaaaccttgcagctcccgaattgtcacatgagggacaccacaggtcagagtgttgagggcggagtcacatatagacagagagagagaaaacaaaacagagcactttaggagaaaccttattgtttctcctctctgctttcgacgttggaataccactcaattcaaatctctcttctttctctctctctctctgcccaaaataataactcgaacgaaagcacatgg

SEQ ID NO: 77260 - DNA, 773 bp, Glycine max
  Clone ID: PAT_MRT3847_40781C.1
tcgttgcattaatatctttcatatgatgggaatgaatttctgaatgtggatgaaatacttgaaatggttcaaggcttaatacagccttctttctatctttgaaaagatgctgggtttgacattatgtggaaaagtatgtgaaatgactccattcatatttcactatgtattggagtgaaactttttaaagaagctcaagccttttgggcatgtaaattgttttaaatgtgtcattttctctggcgtgtggggtaaaggttaatgtctgtttaccttttgttgataaaaaggtatctctggaatgtaggtctccaattgctaggcagcacagtgcacatcaccaaacggtacttttaggtcctagctgcataatggtatgtgaaaagtgtgcccaatggagagcaacttgcaagagaatcttcttgctgatgtttggagagtcaaatgacaaatgtgcctatttgatttaaaatttagtagaatctatttgatttaaagtttagtagaattaatttagcactcattgggggtgtaagtaccaattattcttggtgatatctttatggtgtggagaaatgattctaaataagaagtaaatagggtcatcaaattctcgctttataagttgaataaaattgaattgaggcagggatgagttgaacacgtaccgggaaacttcattagtccattgatgttctgatatctcatttgctgactcttgttcccacattcgaagttatctcacggaattgttatttgtcctaagtcaacat

SEQ ID NO: 77261 - DNA, 663 bp, Glycine max
  Clone ID: PAT_MRT3847_40782C.1
gcacaagtgtttttgctgagcgagataactggaaacagggggatgaaaaggaggggccttgttttcttcaatggtacggtgttggcagcatggctgtgccatgcggaccatatggtccctgtcctaatgaacactgtctatggcgcccggactagggaggtgaaatgcgcacgctggaggcttgatgaggaagcacacaccatcttttgctttgataccattcctgaaaagtgcggtgaagcaacaaaggagtacatgcatggcaaacaatataaaggagactccgaaacagataaccaacgagcttacttttatgccaaatacctggaaggacatcccaaggacacattagggatcagcataaagggcaccgtactctctaatatgccatactacaacaaacatggatatggagtggagaaaattaactacaacttgcatgaggaatgcgttaacaaggacaaagcaccgtcactgacctagactgttattaattacagcaagctggcgtctctgggctcttagattatatttttgtgaggcagtacactgtacaaacaggcgcgtatcagaagcatctgagagaatgctggctaccacacatggcagaaattattgctcacggatccacaagatccttccactccaaatgcagtgtcatac

SEQ ID NO: 77262 - DNA, 400 bp, Glycine max
  Clone ID: PAT_MRT3847_40783C.1
cccacgcgttcggtccaataatactgaaattatgctcacaaaggttaagatgccacttcctgatattaaggctgcagtactggctatggatgattcagtgttagatgttgatcatgtggaaaatctcattaaattttgtcctaccaaagaggaaatagagcttttaaagggatacaccggtgataaggagaatttggggaagtgtgaaaagtattttttggaggtgatgaaagtgccaatagtggagtcaaaattcagatgtttctctttcaagattcactttaggactcacaattcagagttttaagaagagcttaaacacagtgaactctgcctgtgaagaagtcccaaacttattcaaactgaatgagattttaatgaaattctttatttgtgtata

SEQ ID NO: 77263 - DNA, 498 bp, Glycine max
  Clone ID: PAT_MRT3847_40784C.1
gaaaaccagcaaagtctttctgtctgtttattttatataccagtttcaagagcaccataaatattgttaggtcacaggaaccataaattattatgtaatgattttattttcagtttttcacttttgtaaccatttacagattagacttaatcccagcaaaatccttaactgtgtaccccactttttcaaaccttcctctttgattgttctctctgaatttcaagtattctgagcacacaaatggattgtacagcctcttgtttccatctccaacaacttcatcaggtgccaacaccaccttctcatcctcaaagcaccaaaagaaagccaaggagaacctgctcacagactgcttcaaaacaactctatgttcagaagaccttaatttatcattgctccaagcttgcatcatgtcccctatgttcaccacttgggtacccttaaaaaggcttatgtctatccacttttcttcatgtgatctcacttgaagccctccta

SEQ ID NO: 77264 - DNA, 292 bp, Glycine max
  Clone ID: PAT_MRT3847_40785C.1
actattgtatttaaacttttccatacaattttatcttgtgggaacatgacgcgatttttattcacatcattgactgaaaacccaactacataccacagaacacagttatcaaaaacagaacaactccaaaaccagcaagaatcccaagagaataaattgggtagactatacacgggaaagaaaacccctatttaagagccatcgactgcagcagcagcgctaggatgatccaccagccttcttgccacggagaagaaagcgaatgttgggcatgtcgccacccccagcgagg

SEQ ID NO: 77265 - DNA, 272 bp, Glycine max
  Clone ID: PAT_MRT3847_40786C.1
cagctacttgaatatatctatcagcaagaacatagtccctgatgaaatcaaagggagggtgcttcatcattccttccctgtttctcttttcctgccccgcaatgtccgattggagcacaaaacattgaagcttctgaagtattggacctggcaatttgttattgttaggccagtatgttccattctgattattgcactccagcttcttgggctgtaccccagctgggtcagctggacgtttagtattatactgaacttttcagtctccatgg

SEQ ID NO: 77266 - DNA, 411 bp, Glycine max
  Clone ID: PAT_MRT3847_40787C.1
acacactattttttatttgtttttaaccgaaacctcaactcatttctaggttcctaacatgtagggcaagaactcttcagcccctagctttccattctagaagatcataaccaaatttcaagggcaatgatcctcaaagcttatggcaaactgagtgcagagaggagaaacaatgagattatatataggaagaatagactaaccttactccaacaaaaacgaagacggccagttgctcgattgactgtagaagctcgtgactggcccaactcactgtgattcactacgggaagaggaccaccattaccttgttttacatacacaccaacctttttttgaggagatgccttgcggacaacttttgctgaggatgcaacacctttataaatgaagtgacctcgtgtagatgga

SEQ ID NO: 77267 - DNA, 274 bp, Glycine max
  Clone ID: PAT_MRT3847_40788C.1
acgagaaaacggcgagaggaaggggaagtttaccgtttattacgaggaggggttgttgcagttgagaaatggggagagcgagaacgggtggtacaggtggcaggacttgacggagcttaacggcagcgtcgttaggatatgggacggtgggttaagtggttcttccgttagggaatcgtggtacaacaactacaactctagctgtatgcatgtctggtaatgataataagaatagtgatgaaaaataatagtccttgtgttggattttaactat

SEQ ID NO: 77268 - DNA, 376 bp, Glycine max
  Clone ID: PAT_MRT3847_40789C.1
cttttctactttgagtcttcttgatccttatgagtctacttgaactcaaacagggcgggtgaagttgctctgctacatttctatccaagtccatttggcatgaaggtcatgattgcacttgctgaaaaaggtatcaaatatgattacaaagaagatgacttgaagaacaaaagtactgttttcctacgaatgaacccggtatacaagaagattactggtctaatccactatggcaaacccaattgctaatacactattgatgttcagtacatataagaagcttgtaatgacagaaatcccttgttgccttactgacccttaccagagagctcatgctagatgtctggctgacaatgttgattagaagatatatgat

SEQ ID NO: 77269 - DNA, 566 bp, Glycine max
  Clone ID: PAT_MRT3847_4078C.1
ctgcatctggctcatcttcaccactaaccagtggtggcggtgctattccatttcatcagacaaagcaaccactattttcacatgaagttgtgggtatgatccaaaagtctcagaatggcgctattccaacaggtagaccttgtgctgtgtctggctcatcttcaccacgaaccagtggcggtggtgttgtcccatttcatcagacaaagaagacactattatcatatgaagttgtgggtatgatccaaaagtctcggaatggtgctattccaatatctagccctcatactgcatctggttcatcttcgccactaaccagtggtggtggtgccattccatttcatcagacaaagcaaccactattctcaaatgaagttgtggctatgatccaaaagtctcaaagtggtgctattcctatatctagccctcgtactgggtctgggtcatcttcgccactaaccagtggtggcggtgctattccatttcatcagacaaatcaaccactattctcacatgaagttgtgggtatgatccaaaagcctccgaatgttttttattcaaatgga

SEQ ID NO: 77270 - DNA, 216 bp, Glycine max
  Clone ID: PAT_MRT3847_40790C.1
ctcacgcgtacggttacagtttgggaaaatcatgtagcacttgaaaggttagtcgcaacggttccaagagtagtcaggtgaagaaatcctggatccctttgccagcaaaaactcgatcagaaagatcggccaaaacggcattgacgcttgaaccaataataacgctgaggacatcgcccgcggtacccgaacaacatagtcgataggagataaagg

SEQ ID NO: 77271 - DNA, 345 bp, Glycine max
  Clone ID: PAT_MRT3847_40791C.1
cggtcgcgtgtttgttattcccaaagccgatacttcctttacaagtctttactctctctctctctctctataataagattcttccctctcccttctctctctctagaacttcctcctccctctgcttctctctttcttagtagcagcgcgattgctgcatcgccctccaacaagagcttgctgctagtgaaccctaacacggtggtaacgagaggtgtccggctgcagctcagaccagccaaggcagcctcaccccgcactactccgcgggtccccccctcagcctccgtacccctaactctcgctcacctagccgtctcaaacccccaaggcgaccctctctac

SEQ ID NO: 77272 - DNA, 297 bp, Glycine max
  Clone ID: PAT_MRT3847_40792C.1
tttcggtgagatcggcactctgaaccatggtggggctctcagacccacctgtcaagaggccacccataagagctcgatggaaccaatgtctatcacaactgtgcctgacctagcggtcccctactgaccgtaaatactctggctcgtttcggagctcatctcggttggagaacctcaaggagctcaatgatgccgacggaaaaacaataccttgaccttgcgaactaccccggctgcccgggagagcgtgactatgaaaactcgacagtgttggacgaatcaacatcctggacaacc

SEQ ID NO: 77273 - DNA, 354 bp, Glycine max
  Clone ID: PAT_MRT3847_40793C.1
aaggaaagcaaccaacaaccttctcctttagagattgaaagtctcaaggctgaacttgctgctttggccaggcaggtgaatgtgtcagacttggaattacagaccctcacgaagcaaattgtgaaggaatgcaaaagagggcaggatcttgcgacagaagtcatcgtcttgaaagaggaaaaggaagcactcacgacagaatgtgacaatctcacgtcttttcagaaacgcatggatgaggccaaagtgaagaacagatcacaattggcacgtgcagatcttcaagctcttgttgaagaaatatgacaccaattggatcatgagaaggacctatacgcatatctccgattacag

SEQ ID NO: 77274 - DNA, 2900 bp, Glycine max
  unsure (1)..(2900): unsure at all n locations
  Clone ID: PAT_MRT3847_40794C.1
acactaaattttatgattttcaataaatttcaactagtaataacaaatgtgttagaaagtgttactgtagcatttttcaggaagaattatcaggcgggatcatcgaaatatctgcctcaacaatggtttccgaataccaacattaataatgattaactgtattgggtttccaactaaacaatcagcgctgtataaggtgtttcaattaccagtagtatgttcctaaccaaaacaatgaaatctacttgcaaaaaacaacaagtgacaaaaatgccatacaataaatcccacgcgtccgcccaggcgtccgcccacgcctccggcatctctcacctttcccttggcgacgccgtgagaaacgaaaagcgaacaaaaaaaaaacagagtggggtgggaggcacacgcacaaacgcagagtcagaatctccaatcttcaatcggagacaaagctagctcgaacgaacgaagtagagtagtgtgctacgaaaaatgtggcggtgcatcgcacgtggtctccgtggacctgcttccaccagatccacctccaatcactcacttggatctcaactttctagattcttctctagtggggcgaactcctcgtacaccgtggtggatcatacttatgatgctgttgtcgtaggagctggtggcgcgggattgagagctgctattggactttcagaacacgggttcaatactgcttgtattaccaagctcttcccaactcgttcacacactgttgcagctcagggtggtataaatgctgctttgggaaatatgactgaagatgactggaggtggcacatgtatgacactgtcaagggaagtgattggctaggagaccaggatgccatccaatatatgtgtagggaagcaccaaaagcagtcattgagctagagaattacggattaccattttcccgaacagaggatggaaaaatatatcaacgtgcatttggcggtcaaagcttaaactatggaaaaggtggtcaagcttaccgatgtgcatgtgctggctgatcgaactggacatgctttattgcacactctctatggccaagctatgagacataatacccagttttttgtggaatattttgcattggatcttgtaatgaatagtgatggcacttgccaaggagtgattgccttgaatatggaggatggaacactacatcgtttcaaagctgcttcaacaattttggccacagggggttatggtagagcatacttctctgcaacctcagcacatacttgcactggagatggcaatgccatggttgcacgtgctgggatccctcttgaggatttggagtttgtacaatttcacccaacaggtatatatggagcaggttgccttatcacagaaggatctcgtggtgaaggtggaattcttaggaatagtgagggtgagcgatttatggaacgatatgcccctactgcaaaggatcttgcatcaagagatgtagtttcaagagcaatgacgatggagattcgggaaggtcgtggtgtaggacccctgaaagatcacatctatctccacttgaatcacttacccccagatgtgctcaaagagagacttcctggcatctctgaaactgctgctatttttgctggtgtggatgttacaaaggaacccattcctgttttgccaactgtacattataacatgggcggtattcccacaaaccattatggagaggtggttaccattaaaggtgacaatccagatgcagtggttcctggattgatggctgccggggaaacggcctgtgcatcagtccatggtgccaataggcttggtgcaaattcacttctggatatcgttgtttttggtagagcttgtgctaatagagttgcagaaatccgtagaccaggagagaagcaaaagcctctagagaaggatgctggtcagagaacaattgcatggctggacaaattgagaaattcaaatggttcattgccaacttcgcaaattcggttgaatatgcaacgagtaatgcaaaccaatgctgctgtgttccgtacacaagaaacattagaagaaggttgtcaattaattgataaaacatgggagagcttccatgatgtccaggtgaaggaccgcagtttaatctggaactctgacttgattgagactattgaattggaaaatcttttgataaatgcatgcatcacaatgtactctgctgaagctaggaaagagagtagaggagctcatgcccgtgaagacttcaaggttagagatgatgggagctggatgaaacacactgtgggattctgggagaacgagaaagtccggttggactacaggccggtgcatttgaatgtattggatgatgaggttgaatcattccctcccaaggctcgggtgtattaatatacttgctaatggatggattagacttgtctcaatgttaaatgacaggaaaaaaatgcaataaaaggtcctagatgggtgattttgatttttgatgataattgttgcattcatcatcaatgctgattgatattcctggcatcctcaaataacaacactctgtatttgcagcagagaataatagcaacccagcaacacagtttcattaactgtttgtattttgacaagattttgcctatttatcatatgcacgtttgtagtttttattttctaaatccctcattcattttaagtttgtttatctaaaaaagcactggatgggaaaaggaaaaatggctttccaaactcacttgttccgttcaaccatgatcacaaaactcttacttgttaccgttgtcatgtgcaactgtttaaattgagtatctccaatgaaaatttcttcatatacaattcaaaaaccaaaaccccccnnnnnaacnnaaaaaaaaaagcggccgctctagaggatccaagctta

SEQ ID NO: 77275 - DNA, 790 bp, Glycine max
  Clone ID: PAT_MRT3847_40795C.1
ggggcggaggccggctgcgggcggtgctgcggggcgggggccggggcggggagagggggtggggcgggggccgcggcgccgggactccattagcagcggcgcgaggcttcgctttcctccagagcagcgacgcgggtgccgccagcctcgcctgttgccgcgggagcccggcgggaggagcgcggaagggagccatggctctggacgggataaggatgccagatggctgctacgcggacgggacgtgggaaaagaagaggacttggctgcttaagacacactggaccttggataagtgtggcatccaggcagatgccaagctccagttcaccccgcagcacaaactgctccgcctgcagcttcccaacatgaagtatgtgaaggtgaaagtgaacttctctgaccgagtcttcaaggctgtgtctgacatctgcaagactttcaatataagacaccctgaagaactttctctcttaaaaaaacccagagatcccacaaagaaaaaaaagaaaaagctagatgaccagtctgaagacgaagcgcttgagctggaaggacctcttatcatgcctggatcaggaagcatatattcaagcccgggactttatagtaaaacaatgacccctacttacgacgctcatgatggaagccctttgtcaccaacttctgcctggtttggtgacagtgccctgtcagaggcaatcctgggatacttgctgtcagtcagccagtaacatcaccagaaatactgggcaaaatgttcaagcctcaagctcttcttgataaagca

SEQ ID NO: 77276 - DNA, 756 bp, Glycine max
  Clone ID: PAT_MRT3847_40796C.1
atacatgtttgtcgtctaacagaaaatggcttcaactgtagtaccatatatgagtttctatgcccacacttcatctggcagaatgaacaaattttccaatgtcaaattgctaccagtgtcaagcacaaggaatagaactttcagctacagtgtaaaggctatggcaggaggtgaagcgagtttgcagaagtcaaatcagcaccagcagcaagtgcagccaaagatgaaggtgccacaaggttcacctaaagtgctgctgaaccagtttcctgtagcaaggactgtgcagcaaatgatggatacaatggagaggatgggggaggatctcttggtttatggtagaacttcacctgtgatagttgcgggagatgatgaatacagtaaggggaagattccttgggcaataaaggaaggccaaaaagattacaaaatgagattcaacatgccaggaatgaacaagaatgatgtcaaggtatgggtagaagagaacatgctggtggtgaaggcagagaaggcactcgaagagaatcatgaaggtcgagcaaatggcaatgaagactggcctgccaatagctatggtagatataaccacaggatagccctcccagaaaatattgagtttgataaaattaaggcacaggtcaaagatgggattctttatgtaacaattcctaaatccagcacctctgcaaaaataattggcatagatgtacagtaactataagctcataataaagtttgttcacggctacattt

SEQ ID NO: 77277 - DNA, 498 bp, Glycine max
  Clone ID: PAT_MRT3847_40797C.1
tgtagcagtaccgcctgcttggggggggggggggggagaactatagaagcggggcggcgaaccgttagagaaccctgaataaacgcgacgaagcgcataaagagggcaaggtgcggagctggagtgcaccaaaataaaagcatacgaatgagaacaccatggctacgcagggcaaatataagaggagagaaaaggaagtctcgggcaggccacgactggcaatgtcaacacctgcaattggtgggaagcggagtctagaggctgttgttagcggtagcgcggtgccaaggaatttagtactgactggttaggtaaacggcgcgataacccagctgatgaggaaagctaggcgttgcgcactgaagcctaagttgccctagagttggggattactgttaaacccgagcactggaaaagtcgcattgggaaaagtaagtgcatagggtaaaaagtgggtccctagaaaaaggcggccaggtgtttaaagccggccagtgt

SEQ ID NO: 77278 - DNA, 561 bp, Glycine max
  Clone ID: PAT_MRT3847_40798C.1
ttttgggttaatctttttttttttttttgggggcttcattttctctccacttctctgtttctccatccacctgctttaatccaggctattcacttgcaaaatgagttctaattctaaaaatcagatccaaactaaacaagctacacctatacatgtccccctaccgcctcaaagaatagcatgtaatttcttaacatactatttgtaactagtaagaataagaatgcaatgactattgaattgaatgaggcagttacattttcagcaagcgtagtttttcacactgaatattgttgtcatttgaatcataatcaaaataacagactaatatgtagggtagtcaattttcaataatcccttctcattataatcacacaattcataacaaaggttgcattctctagacctaatttaacaagatcgagcatctaaactagcacaacatttcagaaagagactagaacaatcatacatatcataacagtataagcagacttcagaattgttcataccacatgtaacaacagcgcaaattgcttcttcctgagctccaacaacctc

SEQ ID NO: 77279 - DNA, 288 bp, Glycine max
  unsure (1)..(288): unsure at all n locations
  Clone ID: PAT_MRT3847_40799C.1
cacgcgaggccactgtctgctctgcccagcaanagaacaattctttacgggattggctcgctccgattgggcggggctagttctaaactctcagagggtcaactccgtntcttgcctagcaacagaagctttgcccgcacagccttgactcgcggccccagggcggagccagctggcgggagctggctctgctcagccagtgtccgaagagttgccagcttccgttccagagttcccttgtccgattggtcccggcctcctgggatgtggccaagcctccctaaccca

SEQ ID NO: 77280 - DNA, 1009 bp, Glycine max
  Clone ID: PAT_MRT3847_4079C.1
ggctcgagaaaaaccaaacacgatgaacaaataaaaatgtcgagaataaggtttggagaatcattgtgagcattttggtttacaaaaacaatcatcaatcatgggaagcgatagaaaatcgaaacgagcttcaccctcccaacgtgaagatgagaagagaagcaagaggcagagaacggtagaggatgaggaaaggaagaagcggaaaagggaaaagaaggagaaaaggaaggacaagaaatctcaccagcattccaaagaaaataattctgataaggggaagttgaaagataagcacagaagcaaacatagcaaaggtgatgaccatatggaattccaagaattgtcaaatgatgactattttgcgaagaacaatgagtttgctacctggctaaaagaagagaagaatgtgtttttctctgatcttttggctgagtcagcgcgcgtgttgttttctgatttcgtcaaagcctggaacaaaggaaagcttgattcaaattactatgaaggcattgcaaccggacctcgcacatcccataactggaatatcaagaagtagctttagacataagagcagtcatctggatccgatctctatagagcttttgattagccttcctttctaaccacaagcttgaaacagtaagtattgatgttttttttgttttctttttttatgtgtgtaaatgagaatctgcatcaatcttcaagaattagttgtttgtggtgctaaaaggaaaaatggtactagaacagagaacagatgagttaaaacaaaaagcttaggggattgtttgcagtggcggataggcatgccactttccctggctgtgtttccgtgactcaatgtgactgattctggatgatggataaaagtagggcagttttttcttgttactgaaagatttataccagatcatttatgatcatatatacctgttgtgcatcatggtaatgagggtacaattttttcctataatctctttttcccaactattgttatccttac

SEQ ID NO: 77281 - DNA, 760 bp, Glycine max
  unsure (1)..(760): unsure at all n locations
  Clone ID: PAT_MRT3847_407C.1
gcacgcctatcttgtcttttacttttctttctttgtgttttgttgcacctcttaaggggttaggttatcaaaaacaaacaaaaatcttagccgcagaggcagaggaggagatggagacgatgatgatgaggtgcgtatcgattccgagttcaattccaaaatcaagaccttctattagcttgggtttgggaactcccaagttgttcaattcagtttcagtaagggtagccgtgaacgtgaatggtcggggaagaaacaaaggtttgagttgcaacgccatgttcggtctgggcgtgcctgaactggtcgttattgccggcgtggccgccctcgtttttgggcccaagaaattgcctgaagtcggccgcagcatcggcaaaactgtcaagagcttccaacaggctgcaaaggagtttgagtcggagcttaagaaggaaccggattccaccgaaggggactcatctgagaaatctattgtagtcagtgagaagcagcagcagcaggacaatgaggtgtctacttctaaggagactgtatgagatattatatgatatgtagatgtcaaattttcgccatgaaagaaactattctgttagtttagtattttttggctgtctgagattccattatttaaatcatgaccaagctttcaaataaaaagattaaaaaattggatgctttgttaaacaaaaaaaaaaaaaaaaaaaaaaaaaaaaaaaaaaaaaaaaaaaaaaaaaaaaaaaaanaacccacgcggccg

SEQ ID NO: 77282 - DNA, 677 bp, Glycine max
  unsure (1)..(677): unsure at all n locations
  Clone ID: PAT_MRT3847_40800C.1
gaaggtgaattcctatatttatcagaagcaattcctattagatagcttggatcttagctataacaatctcacaggtaagctacatagagaatttgctactctgtcatatataaacctttcgtacaattcatttgacttctcgcaagaccttgagtcagagtttccagactattgttattttggggaagactcattaattagttaccacatgccaaatttcacatcctgctaccttacacatatcaattctgtccaccaaaccaatcctcgaactaaaaaaggcaagcctttcgtgttaattgttcttcctatcatttgcttcattctagtggtacttctgtcagcattatatttcagaagatgtgtgtttcagaccaaatttgaaggaaaatcaacaaagaatggaaacttgttttccatatggaactatgatggtaaaattgcgtttgaagacatcattgaagcaaccgaggactttcacatcaagtactgcattgggactggtgcttatgggtagtgtctatagagcccaattgccgagcggtaaaattgttgcattgaagaaacttcaccaaatggaatctcanaatccatcttttaccanaagttttcacaatgaagtcaaaatgttaacacaanatccgtcatagaaacattgtaaagcttcatggcttttt

SEQ ID NO: 77283 - DNA, 191 bp, Glycine max
  Clone ID: PAT_MRT3847_40801C.1
gttattgaaaataaataaaataaattattccttattttggttcatactaaaattatcaatttttatacaacacattaaattgactaggcccatcccaaaaattttctagttggattttgctcaaaaagcatttgaattttgatttcaccctgataaaacaatggtcaccttgaaagctcttttactaggat

SEQ ID NO: 77284 - DNA, 1148 bp, Glycine max
  Clone ID: PAT_MRT3847_40802C.1
gtagccattatcataagacagaagggggggttcatcagtcaagacacactctacgctcaccctgcagtatggtctaagtcatttgatgtcgacgttatgacatgatattgttcatgattcaccatggcaactatgagaggctgtaatcgatttgaaggatgaaccactggacttgtctataatttttgaaggaggaaagggttgtaacagcagatttttgttccatcatcatattatctgaacttctggtagaaaatggcagctgaagatgataggaatcttgtcgaaatcatggaaaccctgaatccaatagatgttgctaaatacatgaattttgttggtgccccccaagctggtgctatagctacattttcaggcacaactcgcgacacctttgaaggaaaaacagtcgtggagttgagatacgaagcttatgttccaatggcaatacgctgtatcaagtcaatctgttcatctgctagagcatcctggaacatacattctgttgctgttgctcatcgtctaggcacagtgcctgttggtgaaacaagtgtcttcgttgctgtctcgtctgtccaccgggctgatgcgctggaggcttgtagatttttgatagatgagataaaagcacaagttcctatttggaaaaaggaggtctattcaaatggggaggtttggaaggagaacagtgagttcctagagaggaggtctgagcttggtaacaagaatgcagcttgctgtgggaaaaaggcagaaattaaagagcacaacaaaaagtcttgctgtaggaccaaggttcgggctgatgacgaatgtagctagaactagtatcaatgttggggatcaaatatacaagagggtaattgcaattgttgtagtttgaagaatatgccccttttcctccctttgcatttgtccaatcagttgataagattgtattttagctttgaagtcaataagtttgcctattgagatagataggctactttgatatctcattctgccctttttttagtttattgtgaacaaaggtgataatgacatattgacagcaagagttttattagaagttaattccaaaacgtatattttttgtataaaaaaaaaaaaaaaaaaaaaaaaaaaagcggcacgactctaccagagac

SEQ ID NO: 77285 - DNA, 266 bp, Glycine max
  unsure (1)..(266): unsure at all n locations
  Clone ID: PAT_MRT3847_40803C.1
tagggtgttagtgaaactnttttataaagggcagcagcannattcngaaacaacacaaaacacaacaaanatttacaagcaactatggcttcaagcaatggncgaaaagcaactgagatcttccaaggacaagctatcttatacagatgcatgtttgccttcctagattccangtgtcncaaatcgattattgngttggnntnncngacntaatncacaagcatggncaactcntnacttcntcngcgttggtgncaattctgaat

SEQ ID NO: 77286 - DNA, 351 bp, Glycine max
  Clone ID: PAT_MRT3847_40804C.1
agtattaaatataaatatatcatacagcaaaagattcataatacacagttaggaagaactaataaatatataccaagcaggcttttgtgctcattgatccaaccggagaagcaattgaggaactaaaaatggacaaccgtagctacaacaaatggggctgagagaatttgctctttcttagaagagaacaaattacatgcggattgctcatctagcatcgaagccgaaagcttgaatgccactcaattctagaaaacatgcggaaatagagggtcgataccacggaagacagccttcactagatatttggtttggagtcccttagaaggtagtttacagatgactatactc

SEQ ID NO: 77287 - DNA, 509 bp, Glycine max
  Clone ID: PAT_MRT3847_40805C.1
tgaagcctgtggcaccgaaatcatctcccagaccgtcgcgaaggtcgacctaaaagcgcgccccttcaagtactggttacaccccatgggtgacgaggaggagatcgaggaggaggaacacaccgctgatgctctgatcatcgcgaccggcgcaaaggctaggaggttagatcttaagggcgaggacaagtactggggtaacggtgtatccgcatgcgccgtatgcgatggttccctccccatgttccgcgagcagccactggtcgttatcggaggtggtgactcggcagtcgaggaggccttgtacctcaccaagaaggcgagcaaggttactgtgctcgtacgaagggaccagctacgtgccagccgaacaaacgcccgccggttgacaacgcaccccaagatcgagatcctgtacaacaccagcgcgagcgagatcaagggcgaggagaagaagaacggtctgatgacacaactagtggtcaagaacaatgtcacaaaggaggagc

SEQ ID NO: 77288 - DNA, 369 bp, Glycine max
  unsure (1)..(369): unsure at all n locations
  Clone ID: PAT_MRT3847_40806C.1
gagaagagaacgcggaagaagaagaagaaggaacggacgcaggaanaaaccggaccgagcancgaaacgggagcaagagcgaagaagaaaagcgaagagngcggggagaagcagcagccacagcagagagaaggagaaggagaagcagagagagagccgcacgncgcngaaacccnggcacgcgcaccaaaacgacgccgcagcngagcggaagcnccaccaggaggagcccncgcacgacaaggccagagacnacgacaaccgcacgccgcnccacgnggcgncgcaccacggcaggaacgacgncgccaccaggcgcaaacgaggcggcgccgacgncaacgcgcaagaacgcgggaaaaacacccc

SEQ ID NO: 77289 - DNA, 351 bp, Glycine max
  Clone ID: PAT_MRT3847_40807C.1
tgctttgcacagggctaggatgaacagcacgctgactgatcgatattattgaacatgagcgctcacaaaaagtgcaggcagcatatacttctcataatgagggactcaagatacctcatgcagaggtcaagcaaacaatgtctatgatacacaacttttctttgaggtgcgtgtggagccgtgcgtggtcccacgacagacttaaatatatgaatggattattggggtgcacgcaaggcatccaacatgccgggactaggcagaaaggtgccatctaccgcagttgatggagggacgggtcccgacgtatcaccgaagagtgctcagacacaactctgtctacccgatgaa

SEQ ID NO: 77290 - DNA, 487 bp, Glycine max
  unsure (1)..(487): unsure at all n locations
  Clone ID: PAT_MRT3847_40808C.1
gttgagtatatgattnngactgctttctttattctgttcttccaaaaaacatggcgcgtggacccaaaaagcatttgaagcggttggccgcaccaaaaaaatggatgctggacaagctgggcggcgtttttgcgcctcgtccaatgtgcggtccgcacaaattgcgcgagtcgttgccgctcattctcttcctgcgcaaccgtctcaaatacgcccagtcgtacaacgaggcgcgcatgatttgcaaacaacggctgatcaaggtggacggcaaagtgcgcactgaaatgcgcttcccatgcggaatcatggatgttatctcaattgaaaagaccaacgaaacttttcgtttgttgtacgatgtgaagggacgatttgtcatccaccgaatccaaagtcgtgaaggccagtacaaactgtgcaaggtgaagaagcaggcggtcggtgacaagcaagtgccgtacattgtcacgcacgacgcacgcac

SEQ ID NO: 77291 - DNA, 394 bp, Glycine max
  Clone ID: PAT_MRT3847_40809C.1
gaagtgcataactattgtaaagagccatagcgatactgaatactcaatggagactgagatccatagccttgatacctatgtacattcaacactacagtgactactgggtgactttgctaccgccaccgccatggcaattaaaagggatctaccattattctagcctacacccttttgatactcggactgacagaaacgtgctgacgaatcatcacaagcctctctatccaaatacctgcgtaggagcatctgtattgaacatactctctcataaacaacctctataaccactccgggagtcttactctctggctgcagctacgtaacagggtacatgttcaccatgcacgctaacacttctacagcaccgcatgcttctgcaggaaacactgcg

SEQ ID NO: 77292 - DNA, 322 bp, Glycine max
  unsure (1)..(322): unsure at all n locations
  Clone ID: PAT_MRT3847_4080C.1
gcnctncncttntacgtnagntcggnattcngctcgagntgcaannntgagaggnaggttagcatgnntcatgtcntncngagngcatagacttggattcncngagcnnatcgtnggagcatagaanancgtntccatcagantcgcnnntcaacattcctcattgatatngacntnnccntctcatcagggacntgcgacnttgcnnanncccttnaanngncaaanggtacgcacnggcgnatgaatgnntntccttnggtnattnagggngatggataanattggaaaccnnatncnatngnnnngggnntgcnanaac

SEQ ID NO: 77293 - DNA, 128 bp, Glycine max
  Clone ID: PAT_MRT3847_40810C.1
aaaaactgacggcaacatgatgtgatgtgaatgtgaatgtaatggcggccgcactagatgattcaggcttacgtccgcgtgtatgcgacgtaatacctcttctatgttgtcatctaaattcagttcag

SEQ ID NO: 77294 - DNA, 418 bp, Glycine max
  Clone ID: PAT_MRT3847_40811C.1
atccgggatttgccagtgttatcactggtatcagagcaccgatctggtgccctgagatctgcgattccagatgctgcgtatgaagaccaggattatggcgcgaaactctaaagattgggagcaagagcgtgaggagatgaggattcgattggagctggctgaagctctggcgaagaaacacgaggaacaaatcgcagagattgtcgcgcaatttggccaaaatcgagatcgtgatcgcgagggaggtccaattcttgaaggaatcagcaacagtggtggtcatcttgaggatatgaatcgaagggagaagtagcgcaagctggagattcgatttttgctggagaagatgcgtttggctcttagctccgattggagagatattttctattgaaagatgtcactgaagatgaaaagatgc

SEQ ID NO: 77295 - DNA, 342 bp, Glycine max
  Clone ID: PAT_MRT3847_40812C.1
caaccaaatgtaaaagggaaatcgccttgagagaatttaaagaagcattccatgccccggattgctcaccgaaaaaattgatcgggacccgacacaaccagtggggctaaacggggcccttttatagcccgtcctggttggtggggacctcctcgccttgcttccttcgggccatcctttccttatttttttttcggacctcggcggccctggccttctgggccttctcgaccttgacgattttgttccccatggggtcaaactggccctcctcggcctcctttcgctggtaaattcgggccccggaaccctgaccgctttagacccaggcgagaccggaag

SEQ ID NO: 77296 - DNA, 308 bp, Glycine max
  Clone ID: PAT_MRT3847_40813C.1
cggataccacgccgcagcgcgggcctctgagcgggcgctccccaccttttgttatgcagccaccacccaaggagcactcacggctgcttttaccgaaggattcggtttgttaagaggtcaatctgcagaactactcatcacttcatatcggccctcttaactatcaactttcccaatggacataacctcagcgcctcagttttgtacaggaggttcaacccccgtaggcgattttccatcctgaacagtaacattcgatgccactatctaagcaacatcctctccaccggagttgccagtgtgtttga

SEQ ID NO: 77297 - DNA, 404 bp, Glycine max
  Clone ID: PAT_MRT3847_40814C.1
aattcggctcgaggcgagcggccgccctttctttttttttttttttttttttttttttttttttttttgtgttttttttttttttttttctttttttcaagggaggggttaaaatcggcccgggaaagaaggctccccagaaaaaccacatggttttgggaacccgggatttcccccaccccagttttccaatttcccgtaaactacattcctaattaaagcaaaaccggtgtgggccaaacattttcctttttaagggggaagaacctccctctttgccccaataaccaggggttctatgatccggggtcctattatttgtttacccccataggaaccttggggatgttcccataccccataacgctatttctccgcttccctggttttggcttttcgtcccc

SEQ ID NO: 77298 - DNA, 201 bp, Glycine max
  Clone ID: PAT_MRT3847_40815C.1
agccttcggttttgttgaaggcccgaaccattcctgacttccaaatcgtcctctgaactgggtattagggccaaaggattattcaaaccgtttataacctggttccttccaaagtttccttaaggttacttgaaccccccggccaattttattcgggtaaagccattgtttaaaggcttgggggccccaaggccttgaact

SEQ ID NO: 77299 - DNA, 184 bp, Glycine max
  Clone ID: PAT_MRT3847_40816C.1
ggctgggttccacggcgatgaaactgctccgatcttcggatacctgggcgcggcggccgccctacaattctcctggatgggagcggtgtacggcacggccaagagcgctgtcggagatgcgacaatggtcgccatgataccggagctggacatgaaatccatcatccctcttgctatggacgcc

SEQ ID NO: 77300 - DNA, 206 bp, Glycine max
  Clone ID: PAT_MRT3847_40817C.1
cagcctatccaacggatcaaagatgtcatcaagatgatcaacatcatcggagcaccaggtctactctaaccattaatgttactcaaatgggtgtatgcacgatacacaacaacccttgtacctgcgatcataactcctggggattctgctgggatgtatggtacaatgactatcatggcacccttttcaaggctgattaccctcct

SEQ ID NO: 77301 - DNA, 380 bp, Glycine max
  Clone ID: PAT_MRT3847_40818C.1
gaaaccaaaccaaccgggttttgatacaaaagcgggccctttccacttcccccctaacagaaaactcctttctggaaccggtaggggctaaagagggggggggggccctttttcgggtatacacgttgtgtcccaatgcgcggagaaacccccccagaaggacaggcccccggataaccaagataacatctgggccgagcgggcccaaaaaatttacaggtctggcccaggggggggaatacagtaacagccacatcctttttatgtagggggaggggggaaaaaacttgggggggaaaacccaggggggtgccccctggggggcccccacataggttttcaccgccccccaaaaagagacaagggcccgccctgggggg

SEQ ID NO: 77302 - DNA, 466 bp, Glycine max
  Clone ID: PAT_MRT3847_40819C.1
gtttttcttttggttgcatgttcaactcgaatacaacatacatacagatacctcttcttcttcttcttcttctgcttagaaagtcaaaccaatacggtgagtagaagcagaggacacacgatcatggaggttggacctgacggggttgccatcatcaccatcgttaaccctcccgtcaattctctctcctatgatgtattgcgcagttttaaggagaattttgatcaggctctacagagagacgatgtcaaggcaattgttgttacaggtgcaaagggaagattttctggaggttttgatatttctgcatttggtgctcaaaagccggaagagcgtccaaagcctggttggctatcggtagaaatcatcactgatactatagaagcggctaggaaaccattggttgctgccattgatggccttgccttgggtggaagcttataaattgcaatggcatgcaatgctc

SEQ ID NO: 77303 - DNA, 338 bp, Glycine max
  Clone ID: PAT_MRT3847_4081C.1
caacttctttttacaaaactcagacacgccattcggcattataaatgcgataaaacgacctcctgaatacatccaacacaagcgatatacgacgaaacccagggaaacaaacaagaaaaacactagacatgccaaaggaacactaagaccagatcactggagaaggaacttctgcaaccaaaaagcagagaacctggggtatctcttcaagctggtcacgacatccacatatatgaacccgaatcgaactgagaaaccagaagcccattcaaaactggccgaaaaagaccatgcataacagccctgcaaacgaacacccaccttgaccgctcgaagaa

SEQ ID NO: 77304 - DNA, 317 bp, Glycine max
  Clone ID: PAT_MRT3847_40820C.1
cccactcgtccgctgacgcgtggatttttttttttttttctatcatcacataatccaggagggttctaaaatcatgaaattctctaccactcaaactattcttatattgtaacctatatcacatgatactccaaacttcaacaaacatccatgcgtcttaatactaccacaaccttcaacttaatatcacatatctctattaattctcttccaaatataagacttccataacctataactatttttagagaatttgcccctttaataatttaagtactactacgtactcaacctattctagacactgtcattactcc

SEQ ID NO: 77305 - DNA, 338 bp, Glycine max
  Clone ID: PAT_MRT3847_40821C.1
caagaacttcggtgtcctcctccgctacaactctcgtaccggtacccacaacctctacaaggagttccgcgatacctcccgcactggtgccgtcaaccagctgtactctgacatggctgctcgccaccgtgctcgcttcgccagcgtgcagatcatggacgtgaaggagatcgctgctaaggacgcccgccgcgccgccactaagcagttccacaactccaagatccgcttcccgctcacccaccgcgttcttcgtccttctctccctcgtttcaagaccaccttcaaggctgcccgccctcacactatgttctaaaggtaaagctcgagttattgtt

SEQ ID NO: 77306 - DNA, 331 bp, Glycine max
  Clone ID: PAT_MRT3847_40822C.1
gtgaaaactaaggaataatttaccattgccaacagtactagttgcaattgtttctctcttcttccttcaatccagacaaaagagctggagaattttggtactccggacttcactatatacaatgctggacagttcccctgtaatcgttatactcactacatgacatcctccactagtatagatcttaatcttgctaggagggaaatggtcatcctcggcacacaatacgccggggaaatgaagaagggtcttttcggtgtcatgcattatctcatgcctaagcgccaaattctcttcctacactttggatgcaatattgggcaaagatggg

SEQ ID NO: 77307 - DNA, 962 bp, Glycine max
  Clone ID: PAT_MRT3847_40823C.1
cggactctttttctgtacgcgtgggcggacgcgtgggccgcaacagaaagttgaaactatggcgcggttgatcacagtggtgcggtgcacgatggctatgctactgtgcaccgtggaggacgcgtacatttccgcagtagcaacctgcgaatcaactctatgagaaaaaaaatggcgccaaacgggaatggcaacatttaccattgccaacagtactagttgcaattgtttctctcttctcccttcaatccagacaaaaggtataaggccccccgccagataagtgccctatcgttgaaagccttaattaatttatacatataatgctgtacataatatacatacatccctgatgaaagtggaggaaaaggttccccccaaaatagtgcatgttagtttagtttagtgtacaaaagtggataactgggtgggtgacaggtgtatccgccccactcctgaagagctggagaattttggtactccggacttcactatatacaatgctggacagttcccgtgtaatcgttatactcactacatgacatcctccactagcatagatcttaatcttgctaggagggaaatggtcatcctcggcacacaatacgccggggaaatgaagaagggtcttttcagtgtcatgcattatctcatgcctaagcgccaaatcctctccctacactccggatgcaatatgggcaaagatggggatgtggcactcttctttggactctcaggtatagtatcagccgatcaccggttgaaatcggtataatgtggctccacacagctaccctaccatatgttccttcccctcttactactactcagccatactcaatactccactgcttgttaattatcaactatgttgtatgcttacacatggatgttttgtgttatggctacttgtgtctccatttttctacaatcctaatggatccctttggtctcttttttac

SEQ ID NO: 77308 - DNA, 343 bp, Glycine max
  Clone ID: PAT_MRT3847_40824C.1
acccactcgtccgtttacgcataaactgttacacaagcgttctctatcacgcacgccctaacaaaaacaacgctaatttatagtacactcaagctcactacgttaagagtagcacgctagcaccaaccaacaatagcgtctctgacatcctaatgtttcttaatcaccacattgatcaccggcgcagacgcaccaccacccccttaaacggtgcgacctagacacctcaatcattgaccatacacacctttcccaaaagactcttattcatcacgaccacacctatataccaacttcaacgaatggcccacataaacctaatgtactccaaacttactgaact

SEQ ID NO: 77309 - DNA, 640 bp, Glycine max
  Clone ID: PAT_MRT3847_40825C.1
acggctgcgagaagacgacagaaggggacccattacgtacattcctagtgagcaaatactatgttagatattatcgataagttcagtctcttccatttattcccagaaaaagttatgccatgattgccatcccataaaggaagctaaatggataacaacagtatacagaatattatcaaagctaacgcactagatatcaagcaaaacaaaataaacttgttataattgaaaagaatattcaggcgactttaatttgtagaacaagctcacaattatatttgattagtaaaacatttgatctctatataaaaactaaatgatcgacctaattatacttttggtcaaatattttaaggataagggattttgattcctttagttttaattattccctttcagttttttaattgttgaagctaagtgtttatatctaataattatattcacgtatcattgagttatataaaataacaaaaaaaatattatttttttaaataacaaataaaatgtaacacaaactattttttattttcatttaattatttttaaaatttttcttgtacgaatctacccaaattaacaatatcacactcctattacatctgttttaattattagatgaaaatgtaaaataataact

SEQ ID NO: 77310 - DNA, 473 bp, Glycine max
  Clone ID: PAT_MRT3847_40826C.1
ccacaaaagctttttttttcctacaacaaaaaaaggggcttaacttaagctcagtctttacagttgggtcgagaccattgaagatcttcccccatttcatgggtcatttttgaaaccacacttacaaagttaaaaccaagttttttaaccacaagaaaatgaggaaatgcctttgaacaagataaaggactttctatctaggctggaataacatctcaagcttgaaatccggaatcgattccattctctctcaacaaccttttcttttattaaacatattttttgcctctgatagcttgacccacctatctcttcctgttttacttatgagagaaagaaggattccttcttgccattccaagttcagagcatctggcagctcctttcctagggaaatagccactcttgtttactttcggtcttcataagacttttcaattcccttgagtacatgcttttctttgccagtggac

SEQ ID NO: 77311 - DNA, 443 bp, Glycine max
  Clone ID: PAT_MRT3847_40827C.1
ggaaaaccttttaaggaataaaccttattttttaggaccctgtttacagggttggagcaaaagggggccctggaccgggaaatttaacaaaaaaaagggttcttttcctcaaggggggcacctgggccaagggagggggaaaagggaaaaaaaaaacaattgggggaattttcttccttggaaaggcccctcttttggggtttccttgccccctttgaaaactcaacaaaacgttggaaaaaatgggttttggcgggggtgaaaaaaacaattccccccggttttgggtgggaaattcccccccaccccccttgggggggaagcaaaaaaaacggggcttggggggttatgtcccttgggggccccccaggcccggaaataaaacccttcttttggacccaggaggaacaaaaagcccttgacatggaaagcccggaaaaccc

SEQ ID NO: 77312 - DNA, 259 bp, Glycine max
  Clone ID: PAT_MRT3847_40828C.1
ctgtctcttaactttgatactatgctcacggatttgatctgtttcgcgtacaggaactcatacgaatgaatactgcactgggcaagggagcagcgagtgccctataagaatcactgaaccctgttgatgaccgagtggttggatagcggaaggcttctcgttagcctgagaacagcatatcactcctatatggagatgcagagcctgatagaccccatcatgcctaaaagaccactgagcgctatcttcgtgttccttg

SEQ ID NO: 77313 - DNA, 195 bp, Glycine max
  Clone ID: PAT_MRT3847_40829C.1
gttgacaatggcactctcgtgtctcacactcactggcaacccttcttccatcatctgcaaattcaaagcgttcctacctaccggtgcccacgcccttgaaggcaactaaattcggaggggcggccaacttggcggacaaatcggccggtttaacatccccccaccccaacttgggttgggtaatcggctccccct

SEQ ID NO: 77314 - DNA, 698 bp, Glycine max
  Clone ID: PAT_MRT3847_4082C.1
gccatccccacacttcactctatcaaatctcacaccaacaattttcacacaatcacactattattagctacatttagaaactgaaataaggaaaaactttgagtcagcatctaaacaacaactaccagttgcagacttgaagtttgttgcagtggtaaacttactacattggaagtatacttgtgtgcgttttagagcgccagtgcaatgcctccatacttgcctcttcgctgggagagtaccggggaacaatggtggtatgcatctcccatcgattgcgccgctgccaacggccactatgatctggtggtggagcttctccacctggataccaacctcctcatcaagctcacttccctccgcagaatccgccgcctcgaaaccgtgtgggacgacgagaaacacttggagaacgtcgcgaaatgtcgctcgcaggttgccaggaatctcatgctgcaatgcgagacaggaagaggacacaattctctcattcgcgccggctacggcgggtggcttctctacactgctgcctcagctggtgacctggattttgttcgtgaattgttggggaagtaccctgcgctcgtgtttggtgaaggagagtatggagtcactgatatactgtatgctgcggcgaggagcaatagttgtgaggtgtttgagcttctgcttcattctgctctctcgccgccgcaaat

SEQ ID NO: 77315 - DNA, 301 bp, Glycine max
  Clone ID: PAT_MRT3847_40830C.1
gagacgatacaagggggacggccaccctaccgaggagaaagtagaagaagcgggaacgtaaaactccaaaacgtggatatagaaaggcccgctaaagaaaaaaaagccaaaagaaagaaacaatgaacccgtagacgaagggaaaaaatagaaaaaagagaaagcacaagtaccagtagacacagaaatcttaaagaaaaggagcaagaagagatagcaaaccagcacacccaaggaaccagcatccaaattacaaccctcgagcatagaaagtacacccccgaagagaacaagagaggca

SEQ ID NO: 77316 - DNA, 1601 bp, Glycine max
  Clone ID: PAT_MRT3847_40831C.1
cttacgcgtccgcccacgcgtgcgcccacgcgcgggctcacgcgtccgcccacgcgtccgaactcagccacagccacaacacacaaacacaaacccttcgttcctctctcgttcccttcttcaattcgatcaaacacagaatagtacttttttattatgatggccgtggcccgaaaggaaatggaccggatcaagggcccgtggagcccggaggaggacgaggctcttcagaagctcgtggagcggcatgggcccagaaactggtccctcatcagcaggtccattccgggccggtctgggaaatcgtgcaggctccgatggtgcaaccagctgtcgccacaggtcgagcaccgggccttcacgccggaagaggacgagaccataattagggcccatgctcggttcggtaacaagtgggccaccatagcccgcctcctctcgggccgcaccgataacgccatcaagaatcactggaactcaacgcttaaacgcaagtgcgcgtccttcatgaccgccgatgaagccgccgccggcggcttcagcccgaggccgctcaagcgatcgttcagcgccggcacggcggtgcctcctccaggaagcccctcaggatccgacgtgagcgagtccagcgctgctcccggcgtggtctctgtctctgtctcttccttcacaagtgtttcgccccgtgccggttcggccggttgtcgaaacggcgtcgtcgcaagacgacgccgatgccgacgccgaggatgctggacctactacctcgctgtcgctgtctcttcccggggtggagtcatcggaaatctctaatcgcacctcgacggttccggtgatgccggtgcacaccgtggctgcggcggctccggttccgttaccggcgccggaggttggattaggagcgttgaatttgaatgcggagtttatggcggtgatgcatgagatgataaggaaggaggtgaggagttacatggagcagcagaatgggatgatgtgttttcagggtatggaaatgatggaagggtttaggaacgtgtcggtgaagagaattgggattagcagggtggattcgtaattattattattattattattattatgacctaattagtgttttcacaaaatgaggtttatgaagaactatgatcaagggaagagaaaaaaaaaaaaggaagctgttttcctttttttattttatttttagggaataataatattggttagtgtacagtgggaacgggacgagagaagccaagagtagtagcctggaatggaatgatggaaagtgaaatttcatggcaaatttgaaatttctttggcttgtttctgagcctctttggatgatcctgtgcttcaggtttatttagtttggaaaaaaacataaatgaggggttagatgcgaaaaaagaaagggttggatttaaaaatgaatggaatatcctcaaattttcaatattaagttcacattttattttcatatccgcagaagcataatgtagatatttgttttcgctaatagtgtttgggcgcaacaacagaaaggaaaaccagccggtatttggtttgaaagtagtttttgtctgttgttctttcatggatct

SEQ ID NO: 77317 - DNA, 1162 bp, Glycine max
  Clone ID: PAT_MRT3847_40832C.1
aaattcctgaatattggatcggaggccaaattaagaaagaccactgaaattttaaatgaatttgttttcaagctaatcaacactagaattcttcaaatgcagatttcaaagggagattctggtagcaaacgaggagatattctgtcaaggtttctgcaagtgaaggaatatgatccaacatacttacgagatataattctaaactttgttattgcggggaaagacacgacggctgccacactttcttggttcatgtacatgctgtgtaagtatcctgaagttcaagaaaaagcagcagaagaagtgaaagaagcaacaaacacaaaaagaattagtagctataatgagtttgtgtacagtgtcacagatgaagctcttgaaaggatgaactatctccatgcagcaattactgaaactctcagactttatcctgcagttcccgtggatgcaaagatttgtttttctgatgatacactacctgatggatatagtgtaaataaaggagatatggtatcttaccaaccttatgcaatgggtcggatgaaatttatatggggtgatgatgcagaggattttagaccagaaagatggcttgatgagaatggcatttttaagccagagagccctttcaagtttacagcttttcaggttagtagagttttgctcagcatttgacatttatgcttattataagcatctaagtatataagctttggagtgcagtgtgctattataggcatatgttaataacttggcacacacacctgagacaataacatgaaatgcactacatgcactggcccacgggtttgcctacgcgtccggtttgcttatagacagatgaagatatttgcagcagttttgttaggctgtttccgcttcaaattgaaggatgagaagaaaaatgtcacctacaaaacgatgataaatcttcatattgatgaaggtcttgaaatcaaggcctttaatagatacagggattaaaagattgttggaacaatccaaactctagtgaaaacctcaaagtagtttaacaaaagagaatgaaagtgtatttgaaagtcaaagatgagttgttgacaggttattgttttcaactaagttaataatgtatattgttctatgttattaaaataattattaagaagtgtttcgatagcta

SEQ ID NO: 77318 - DNA, 1786 bp, Glycine max
  Clone ID: PAT_MRT3847_40833C.1
cccacgcgtccgcccacgcgtccgcccccgtccgcaaaataactcaccaacaaccgcaaacacaaacacagacccttcccttccttcctccctccctcattcccttcttcaatttcatcaacacaaccatcaatttcatcaaccatcgcataataatagtattatcatgatagccgtggcccgaaaggacatggaccggatcaagggcccgtggagcccggaggaggacgaggcccttcagaagcttgtggagcggcacgggcccagaaactggtcgctcatcagcaggtccattccgggccggtctgggaagtcatgcaggcttcggtggtgcaaccagctgtcgccccaggtcgagcaccgggccttcacaccggaagaggacgagaccattattcgggcccatgcccggtttggtaacaagtgggccaccattgcgcgcctcctctcgggccgcaccgataacgccatcaagaatcactggaactcaaccctaaaacgcaagtgcgcgtccttcatgatggcgggtgatgaagccgtcgccgtgagtccgaggccgctcaagcgatccttcagcgccggcgcggcggtgcctcctcccggaagcccctccggatccgatttcagcgagtccagcgctcccggcgtggtctcggtctctccttcgcacgtgtttcgccccgtgccggttcggccgattgttgaaacggcgtcgtcgcaagacgatgccgacgatgccggacccgcgacttcgctgtcgctgtctcttcccggtgtggagtcggcggaaatttcaaatcgcgcaactacggtgccggtgatgccggtgaataccgttgcggctccggcaccggttccggcggaggttggattgggagcgttgaatttgagtggagagtttatggcggtgatgcatgagatgataaggaaggaggtgaggagttacatggagcagcagaagaatgggatgatgtgttttcagggtatggaaatgatggaagggtttaggaacgtgtcggtgaagcgaattgggattagcagggtggattcgtaattattatgacctatttagtgttttcacaaaatgaggtttattaagaacttcgatcaagggagggaagagagaaaaaaaaaaaagaaggaagctgttttcctttttaatttttatttttagggaataataatattggatagtgtacagtgggaacgagacgagagaagacaagagtagtagcatggaatggaatgatggaaagtgaaatttcatggcaaatttgaaatttctttggcttgtgttctgaacctctttggattatcctgtgcttcagggtctatttagtttggaaaagacataaaaatgaggggttagatggagaaaaaggaaagggtaggatttaaaaaattgaatgaaatatcctcaaattttcaatattgagttcattttactttcatatctgcagaagcatgatgtaaatatttgttttcgttcaaatccaaaattagcaaatagtgttttagtgcagcaacagaaaggaaaaccggtgcttcgtttgaaagtagtttttgtctgttatccttttatggatctgaaagcagttagttaatcagtttactgcataatcttgcaccggattttttgcaacctaaaaattggggttaagctctcctggagtgttttagccttttaggaatcagttgagaccgtttatccagatattttgaatatttgaacctcccttcgacacacgtggtgaataaaacttataaattaaaattatattatttg

SEQ ID NO: 77319 - DNA, 325 bp, Glycine max
  Clone ID: PAT_MRT3847_40834C.1
gaacattaattgaattttcttaatataagggaatccgaaaggttgcacgaaagcaacccctaaatccaatcttgttaaacaagacaaacggatttgtccacaggaggggaatttttttttcgtctgatcaagcattagggccaaattttttcattaacaaaaaccaggttcctgtccctgcaatacccaacccaaaaaccacaggtggcccttcccacacctttttgctccaaccaattttttttttgaacaccaaatagtgaaactttgctggcaacacaaagctaaaaataacacattcacttctccccaccaatgacaaaaa

SEQ ID NO: 77320 - DNA, 174 bp, Glycine max
  Clone ID: PAT_MRT3847_40835C.1
gggattatggtgagcgaaaacgggcacgacccgcactgaccaagaacccctggtgctcccagtggcagtggagaggcaccgcgcagaaaggcaagcaaaaagccgcccatgttcgggccaacggcaaaagcacagagcgttcttcattttctccccctccccatataagaggga

SEQ ID NO: 77321 - DNA, 255 bp, Glycine max
  Clone ID: PAT_MRT3847_40836C.1
aatgggaacccttgggagagcgatctacagcgttggtaactggattccatggactggctaagccattcctcgtctcggctatctcctccttggcggttactacgtctacgagcatctgtctatctatcgacttctgatcgacatatctaacaagggtcctagtggttggtgcatgtgtatcagtcgcggctactaccttcgtcattcaagacgttcagcttatcctctgctcgtcgatttagtatggacttgtcc

SEQ ID NO: 77322 - DNA, 540 bp, Glycine max
  Clone ID: PAT_MRT3847_40837C.1
tggaaaagattatgagcattatgccaatacatgcttcaaagcttttggagacagagttaagcactggattaccttcaatgagcctcataactttgcactccatggttatgatttaggcattcaagcaccaggaagatgttcccttttgggtcatcttctatgtaagaaaggaaaatcatccactgagccatacattgttgctcataacattctcttgtcacatgctgctgcctatagaagctaccaactacatttcaaggaacaacaaggaggtcaaataggaatagcactagatgtcatttggtatgaacctataacagaacttgatgaagacaaagacgcagcagcaagagctatggacttttcacttggatggttccttgacccacttttctttggaaaatatcctctctcaatggagaaacttgtagctaagagattgccggagatttctgatacagcctcaaaatttcttgtgggatctttggattttattggcataaatcactacacctcagtctatactcgtaacgacaggac

SEQ ID NO: 77323 - DNA, 547 bp, Glycine max
  unsure (1)..(547): unsure at all n locations
  Clone ID: PAT_MRT3847_40838C.1
ttgcangcacgcgtacgtaagctcggaattcggctcgagcggggggaccagcagagccgaggccccaggaccacctccgacatgaccatgcggacagcatccacgagacaaccaagtacttgagagagacctggccagaggataccgaggacaatggcgccagccccaatttctcccaccccaaggagtggttccacgacagggatctgggccccaacaccaccatcaaactctcctaggccactccgagccccaggacacaggacggacaccctggcacccagaagaggcgttctcttgctcactgacccagatccagctcacacccctgccctggggccctctgccccaggagaaagggtctttcttctccccagccctccagcttcctgtagtgcctggggtccctctatgtccccggacacttggactgctcccctgggccgaccactctgttcccactttttcctcccacaactatccgtcctcctccaatcaaccactcactgggccacccctgtttcctttccatagtgaccaacgcaac

SEQ ID NO: 77324 - DNA, 274 bp, Glycine max
  unsure (1)..(274): unsure at all n locations
  Clone ID: PAT_MRT3847_40839C.1
tgctggntcanantcntcagaagatnttcctgaaaaggaagatcaagaaaaacccaaaaagattgatgccagattgagacnaagaatagatcctcaatacaatgaggttcaggctcagatggaaacaaattngtttaaattgtcncgtgangatgntgaaactcctaaaggttccatgtnggatcttaaaanttcncaatctaaaattgcattccccangaacacagttggagggaaccatncggngagtgtctattggccaatnttntgacag

SEQ ID NO: 77325 - DNA, 244 bp, Glycine max
  Clone ID: PAT_MRT3847_4083C.1
acccacgcgtgcggaagataaagaggatcacaaggctcttttcttaatttctccaaacatccatggcttggttgtttcgtatttttttaaatgctatgtatcaaaatgttttttttcgtaccctatcacaagatttgctataataaaaggtggtcattactctttttatcacatgtttattcgtgaggtctaatcttctagcatgaatcttctaacccctcacacttactcaatctaaacaaaa

SEQ ID NO: 77326 - DNA, 132 bp, Glycine max
  Clone ID: PAT_MRT3847_40840C.1
cgtacagtatagctaggaattcggcctcttacgccaagattggggggcgatccggcaaacagcttgagaagaggcgccagtttctgacgaacggtgatgctggttttgttaacatgattccaaccgaaccca

SEQ ID NO: 77327 - DNA, 355 bp, Glycine max
  Clone ID: PAT_MRT3847_40841C.1
acagatgaggacacacatcatggtgtccatcctccacgttttgtggctggagtcttgcactatgatgatcataaggatcatgtgattcatatccgacacgttccaatgctgttcttgcatcactggctgaacacagggctgcctccactgctgattgcgctgaataagttacgcgcctgccctgtctcctcaccttgtgagactcattcctccggggatagctcgctatattacgacacatgctaccatgctatttgtgcgcctcagatccaagctgttattgccttcttgcactggatgggaactataccgggacactcttttattgccgctgtacatcaatgccatgctgaca

SEQ ID NO: 77328 - DNA, 369 bp, Glycine max
  Clone ID: PAT_MRT3847_40842C.1
ataacctactatattcaactcttatgagcatcaacagggactctcgtggactaaccaaattccaagttacagattctatcaaagctagctacctattgaaaactcttcttttatcatttgggcgttgcaagagataaatgaaaatggacatatacgagccatttcagcaagttagcctgtggggggacaactttaaacttgatggcggtctgaattcaattgcttccccaatgttaatggttgacagtactagtgtggagaacaagtctgaggatattcctcaggaatcaagagagccttctggttctggagccgatcaagaggctacaaataaagaagttaacaagatgctaagacgcctagctcaga

SEQ ID NO: 77329 - DNA, 231 bp, Glycine max
  unsure (1)..(231): unsure at all n locations
  Clone ID: PAT_MRT3847_40843C.1
agctgccaatacggctcaagcgcgaacccattttcagcgctttttatttttacggnccccacnaaattgctctctttatcataagagagacgtcgctcacactcccctcctctttatttccccaaaacctattcctcttttcatcctttgccatcccacaatcttcatcaacatctgcgcaaacaactttaacctactcctattctacacctcaaagcatactaccccctc

SEQ ID NO: 77330 - DNA, 454 bp, Glycine max
  Clone ID: PAT_MRT3847_40844C.1
ttgggcttctggcccatcacctgccctgcagcctctcaaacagtgcagatgcaatgtagtttctagagttactccagataaatcatcaaccacaacaacaatatcatcctgttggtttggacacaaaccaataacgtagcatagctataaacctgacagaggtgggtgggataggggatccatcaagtgaagggaagcatagcgagggactgaaaagcacctacgtggggcagggcaagaccctggtaacagtaagatacaggatgctcaccacttatcaaaggctacacagccaggagctctagagatgttcattgtagtcattcattttcaataaccaccgataaataatataggtacccacacagatgcctaaggtttgctatttatcaaaagattaagagaaaacttacacatcccacttgtacttttactgaagcgatatggagaaaaa

SEQ ID NO: 77331 - DNA, 469 bp, Glycine max
  unsure (1)..(469): unsure at all n locations
  Clone ID: PAT_MRT3847_40845C.1
ggctctggaacctttgggctggatgtatgtgcattgcgttgagaagatgatagtaaggggtacctatgataantcaatcaagcaaagctaccttacagtgttttgcaaatacgtaagagtagttactgcccggccgtctcatccctctaccccgcgtctcctattatctctacatctcatctcctagtatactgatcgcaccctgcgttctgacatacgaacggcaatcttctaccgacaaactggcggtattacactcatcactcctgctacgataccaatcagtacaccggcgtgaacaatgagtagttctcaatgggtaaacagaaagacgttatctctatccgtggcgtacactctgtaacgcagtctgcataaagggaccgcgaatacactactactgctctttacacatgaacttaccaccactcgttcaacgttactctcccgaagttccaagacctgacct

SEQ ID NO: 77332 - DNA, 624 bp, Glycine max
  unsure (1)..(624): unsure at all n locations
  Clone ID: PAT_MRT3847_40846C.1
tttcttttttttttttttttttttttttttagcattggcatcattatcatttaaaataacaccaaataggctcagtacatttatagaggcatgtaagctagtctaatctgataataggcatgattctcctctttaagataattcttcacattttttccatttacatgcacatcatattcctcctttgatggggcaatgcttttgaacaatttccatgtggctagtgatcgaatttgggcaacttcaaaggggagagggggggnnggttttcttttttttattgactatgatattgatacgagttgttttagttgaaactacaaaaaaaaaaattatcagtgagcacacacaagatgagtattcccttcctaacataatttgttttatactaaaagatcaaatgggatttgaaatttggaccaattaattaaggggacttcaagtattcatgtgtctataagttatgaattagagttttacaatttgaaaatcattgggtaattcttttgcattgacattcatctaatgttgctttcaaagttgaaatctttatataagcaacaagattcccttagttagcaataaaagggaaattttcaccagtaaagggaagaacccnaaaaa

SEQ ID NO: 77333 - DNA, 249 bp, Glycine max
  Clone ID: PAT_MRT3847_40847C.1
ttcagaggcaatcacatccccatcctggactgaaaatggcagaacaacttctaattcctttgccttgcctgagtcagatgacaggccaccaagaaagaaatttaatacatctacttcttcaactaaggaatgtatagattcagaaaactttccttccttcattggtgatccaatacctgatgatgaagctcagaaaagatggggatggcgttatgaattaaaggttgttgacctgattctttcagtatg

SEQ ID NO: 77334 - DNA, 162 bp, Glycine max
  Clone ID: PAT_MRT3847_40849C.1
tatcaggcgagaaaaggtcaccatcgacaggccgtcggcgggggctgcgcagctgacgacggtggtgacttcgaccactctccaaacctggatctatgcgaacttggaaagcgctaattagaaagccgcttcgtctatgagcatgagaagggtcgacccagt

SEQ ID NO: 77335 - DNA, 1357 bp, Glycine max
  Clone ID: PAT_MRT3847_4084C.1
ctatagtctctcctacgggttaagtactcgccacaccagaaagaaagaaagaaactctgcatgtctgacacaaatcgcttctctctcactgtgtgatctaagacacgacacaaacgcatcctccttctctctctctctctctctctctctctcttccttgctgaatgaacatggttttttctctgtccatggctccctccaccctcatctcttctgctgatgccgatggcttcccttcatttcttcccagagaacttcacaccattcaagacccttttgccagaaaattcgccttgcgcattcagaggctacccgtgcctgttaggttctcagaaaatcccatcatgagtagttgtgtgaagccactggtgcagaccaaggaaaccccagttgttcttctacatggttttgacagctcatgtctagaatggagatatgtattaccattgcttgaggaatctggtattgagacatgggccattgacattcttggttggggtttctctgatttagaaaaacttcctccttgtgatgtggtatccaagcgtgatcacttctaccagttttggaagtcttacatcagaaggccaatgatattggttggaccaagccttggctctgctgttgccattgactttgcggtcaattatccagaagctgtgaagaagcttgttctgattggtgctagtgtatatgcagagggaactggaaagctagcaaccttacccagagcagtagcctatgccggggttaatttattgaagagccttccgttacgcttatatgccacctatttgaccttcacaaaaatttccttcagcaccagccttgattggactaatgtgggccgtttgcattgtttcttgccttggtgggatgatgctactgtggattttatgacaagtggtggttacaatgtttctccattgataggaaaggtaaaacagaaaacactgataatatggggtgaaaatgaccgcatcatcagcaataagtttgcagtgcgactccactgtgaattacctgatgcaattatacgccaaataccaaattgtggacatcttcctcatctggaaagaccagattctactatcaaactaattgttgaatttgtgcaaagagagagcaagacattaagtcaatgtgttgcacaagtatgaagattgaaaatcagttggtgatatatagaactaattaagaatgctccttccctatttagaggaagatagaagcactgttgctgcagtagccttatattgttaatatcatatgtctcttatattatatactgatattgactcttttaaatgttaaatgagtttcactttaattgttggctcagtgaaagagaaagaag

SEQ ID NO: 77336 - DNA, 491 bp, Glycine max
  Clone ID: PAT_MRT3847_40850C.1
ctaatcacattagaagaggtgaagcagatatcatggtggttggtggaactgaggctgcaatcatgcctagtggtcttgaaggcttcattgcttgcagggctttgtctcacaggaatgaaggccccaagaaggcttcaagaccatgggacaaagatcgtgatggttttgtgatgggtgaaggctctggtgtgctggtagaaccttgaacccaaaattttcttttacaccatatgcatcttttgctagcaattctaaagcaatatggcttaacaagtttttgttttaacttacttttgttcacctaatgacaacttgattctctatcaccggaaaaaaaaaaaaggtaatggagagcttggagagtgcaacaaaaaggggagccagaatcatagcagaatatttggggggtgccataacatgtgatgctcatcacatgactgatccaagagctgatgggcttggagcccttctgtcgtcttctcgcagccgta

SEQ ID NO: 77337 - DNA, 263 bp, Glycine max
  Clone ID: PAT_MRT3847_40851C.1
tgttggttctagtgtgtgattgtttgttgttgtaggtcggtgctcctcctttggtggtcttgggttgggtttggtttttcttttaacttgaaaatgctttcctccggtggtaccttggtttccgaaacctcttccaattccgccaccgcttccgaagccttcaaaatgtccccaaccttgacctccccttaatcaaccacaaccaaaaccttgtccatggaattgccacctgttaaggctaattttgaggttcctaaaatggt

SEQ ID NO: 77338 - DNA, 200 bp, Glycine max
  Clone ID: PAT_MRT3847_40852C.1
gcacatttataagttttctcaagtctatgtatacatccttttattttcctccatcagaggtgcatcacatggggctccattttcacagcctgagagatcacttgagctgatcatgtacgtcttatatagaggtccactaccacaagagttttgatatgcatatatatgtcaagttgtgttgcttaaaaagtgattttttg

SEQ ID NO: 77339 - DNA, 406 bp, Glycine max
  Clone ID: PAT_MRT3847_40853C.1
gtttttctcactcgtctctaattttcctttcttgtgcgcgctgttaaagcgccggtacagcataacatatccactggtcatattctcattatgtgattgacttgtgtccaccacagcgacccatctgcgacactacaggggataagcgagttggcccacttctaataggggttcagcgctacaagactaaccttgaaacgctcctgactagttcaatcatccctagcttatatgtggagttcatatcttcttggacccttaaactttctttgattgccaggggacaagatgctgttgctcgaagatctgctattctgacgtgatctggatatgacttctgctacccttggataacgggatattacccgccggcacattgtgccagaggtgatagttgatgatgatt

SEQ ID NO: 77340 - DNA, 545 bp, Glycine max
  Clone ID: PAT_MRT3847_40854C.1
ctcttaccctgatgtagagcaccacattctcccttccaagctcttcctcaaagtccctatcacccgttcttgtgttgatggtattagaaaatcaatgtctactcattataggactagaccttccgatactctctcttccattgcaaattcaatatatgggggtttggtgtcccctgatcagcttagggaggctaattccataggtgatgatccttcagtgcttgatgtgggtctgaaccttgtggtgccacttccatgcacttgcttcaatgagagtgataactctttgccttcaatttacctttcctatgtggttcagccaattgatacattggctgcaattgcagctagatatttcaccacttttactgatttgatgaatgtcaatgacatggggactacagctatctctgatggtgacattcttgttgttccaatacctgcttgtgcatcaaattttccaaaatatgcttctgattatggcttacttgtccctaacggaagctacaccatattactgctggtcactgtgtgcagtgtagctg

SEQ ID NO: 77341 - DNA, 294 bp, Glycine max
  Clone ID: PAT_MRT3847_40855C.1
caccagaattcaatcccttacaaaaatcacgggggatatcttcttaacttctacatcgttctatacaaattccaacaaaaaaactatatacatataattccagcaaacaagtggaaaaaatcaccatatcctacttaaactcgtccagacaacgctgtggaaaacatttctttctcattaacaacctatttaatctccatttggttacctatgttaaagcttttaagaagcccttcacaaactcaatgtattatcactctggcctggatgaatcttctgtggcagctttttgca

SEQ ID NO: 77342 - DNA, 307 bp, Glycine max
  Clone ID: PAT_MRT3847_40856C.1
cgggggtctagtgtgtgattgtctgatgtcgtcactcaatcgtcttctctggatgatctgcgttggtctttgttttttatatcacctgacaatgtctagctgcggtggtaactgtggttgccgaagctactgcaagttcggcatcgggcgcgtacgctgcaagatgtacccagacttgagctaccactgagtcaaccaccaccgagaccttggctatgggagcggcacctgataatgctcaatttgaggatgctcaaacgggtgtgcccgcgtaaaacgatggctggacaagtggactaacctgcta

SEQ ID NO: 77343 - DNA, 410 bp, Glycine max
  Clone ID: PAT_MRT3847_40857C.1
gacaaaaactgactgttgaacatagacatttaaaccaaccaacttagtgaaacttccaatgaaaatgaatacaagtagaaaaaaagaaagacaatataacagaatagtctgaaagtgaaagaaagaaaatgtatccaccttgcgcagggggagcataacagccctgctacaagggttgttttccttcttcttttcttgcctccaactttgacaactcttataacactcccaattctagccatgactttgaggcagccacatctaccactcttgatccacacacccaattcaccaaccatgaggctctcccttctttggaagagtcctatattaacttcaccagagcatacccttcatttggcaacactagtcaagttgatcgaattcgtgaccaagaatatcaccacttg

SEQ ID NO: 77344 - DNA, 454 bp, Glycine max
  Clone ID: PAT_MRT3847_40858C.1
ggggggaataaagtttgaattaaaattcaaggttttttagcacacaacaattttgacagcatggaagggtcacatttttaacaagcccgactttttaggttaagtttattggtttttggccattacaaatgccccattgatcgggtccttaaaattaaaagttgaattttttttccaacaaaacaaaaaacaccggacacattcaaggttacaacactccgctccatagtctcggtgaagggcttcatatttatatatatattttttgggccactttgggacgggatttcatcgaacattgttttaggcccgcttcaacttctgcttttgcatttttccattgcttttggggcaagcccaatcgcttttgatccctttattattcgcagacgcttgggtgactcaacaaacatttcccatggggaatcacccacgagcattccatcaccatcct

SEQ ID NO: 77345 - DNA, 621 bp, Glycine max
  unsure (1)..(621): unsure at all n locations
  Clone ID: PAT_MRT3847_40859C.1
gttgacattgtgttggcacttttcaaagaagccctttcccttgtttttagaagaaactggctacaccgaagaaaacgttctccttcgagaagcaaaagcaggaattttgaaaccagcttttacaataatagctgatcatgagatgggatgccttttgttattgattcgtggcacgcatagtatcaaggatactttaacagctgttactggaaatgtggtaccatttcatcacactgttgttaatcaggggggtgtcagtgatttggttttaggttatgcacattgtggaatggttgctgctgctcgatggattgcaaagctcgcaactccttgtctccttgaagcacttggccactaccctgactataaagttaagattgtagggcactctttgggtggaggaactgccgcaattctaacttatgtgttgagagagagaaaggaactgtccgtcgctacatgtgttacatttgctccagctgctcgtatgacatgggagttggcagagtcaggcgatagttttattacttctattataaatggagctgatttggtacctacattctcagctgcttctgagatgactngcgttctgaggtgacagcatcagcatggataaat

SEQ ID NO: 77346 - DNA, 357 bp, Glycine max
  Clone ID: PAT_MRT3847_4085C.1
aaacaaagagaaaaaaaaacccttagccaacacaaccatcatggccacctctgctattcagcaatcagcattcactggtcaaactgctctgaagcagctcaatgaggtcggaccgcagaaccggggcgcccggcaagggtggacctaccaggcccggaaccgtcaaaagggctcctaaaagcattgggaagggcccggccggtccaaggtcctggggcccatgctcgaagcaaattccatcataccggacgggagattacctggggacctccggagggaacactgctgaattatcagtggacccggaaaccttggccaggaaccgggagctggaggtgattcacagcagatgggcaa

SEQ ID NO: 77347 - DNA, 274 bp, Glycine max
  unsure (1)..(274): unsure at all n locations
  Clone ID: PAT_MRT3847_40860C.1
attacaaaggatttttaaaagacatacggttgttgagatatataaacacccagacccagtctaacataatagcttagaatacagcgagattgagctaaagaaggtgccttgattcaaaaaagtcatagaaagacttaccaatacgcatgatctggaagcctacacctacttaaacttataccncctatgagttagggggatacactaccagacctattgattctgttcgaatatcgagacctatctgtcggacctagtgggtgaaaagatccct

SEQ ID NO: 77348 - DNA, 967 bp, Glycine max
  unsure (1)..(967): unsure at all n locations
  Clone ID: PAT_MRT3847_40861C.1
aagaactgctaagaaaaattagtgaaaatcctgatacagatgaaagtaatctggacttgtctgagttctcttcagggtatgaatccgagtctgggtcagagcttgattcagtctctcagaagagtgacttaaactgccaagacttagattccaaaatatcatttcttggggtaagtcagaggaaaaacatgaggagtcagtctcttgacaacagaataaaacttgtggatatgatgattgagaggttaaaatgtttgcaagaagatgaactctcttctcttgccactatagttgcaacttatggtttgaacgctgccttggctgaagtacagaattccaaaccgcacaatccaggctctgctattgagtattcatcctcttcagcaactaattttccatctagaagaatgtcatcattgggattgggaaaatcagccttggatgtgatgagaaagaagcaggatgagccagaactgccaagcctcgataagtttttagttaagcacatgacaaaacttgaaagagaggtttgggaagctaaaaaagcccgaaagaatgagacagaatcagtcagggatagctctcgtaaatctgttgatgaaactccaccggagatggtacctgatttgggaagtattctagtgaagaattattcaaaattagagaaagacatcaaggaggcaaaaattaagtcaggaaaggaaacaccagcagttccaagaggcatgccaaacagtcaaaaggatcacatagaagtaccaagcttagataaggtccttagtgaaacatgtctcaagactagaaagggaagttcaagaagcaaaaaacagaacaatcaaggagacagaagcttgaagaaaaagctgatctagatcaaacaggtggaactgactcaactttctttnttgatgaagagcattagacaggaaagaaacataatttcaatccagagatcaatttcggggaa

SEQ ID NO: 77349 - DNA, 399 bp, Glycine max
  Clone ID: PAT_MRT3847_40862C.1
gccttgctgactgacagattgagacctaaatttgatgctgaatatgatgaggtggaggctcagatggaaacaaagtcgcttgaagaggctgtagatgatgaaggaactacgaagggtttcatgatggatcataatattactgaacttacaaaagccctagccaaaggcacaattggaggaaccattctgtggagagatctattggcagatggcttgacagaaggcagtgttagagcgcggggcgctcagcagcgcactggtctgattaaaggggtgatcacagtggtggccactgatggtactcctgtgaatacaggcatagctatgaactgtgctatgaataggcgttccagggggcgtgccaacactgatatttacactgactgctatcaagactgt

SEQ ID NO: 77350 - DNA, 360 bp, Glycine max
  unsure (1)..(360): unsure at all n locations
  Clone ID: PAT_MRT3847_40863C.1
ggggggggatggttttttttttttttgtttttttttttttatgtcaatattaattttatttgtctttcctacattgcaggaacaagttgaggcggatcaaataagacaacacccttaattccatagagtaaaattgttttacagaaatatggtattgttggggggaccacatgaaatggtgttatttaaaaggaagacagttacaaaaaacaaagagtgcgaaaaaaaaaaaaagaccaacccataaacccttattaaaacaaaaanttcgagcgcacttcccagataaccaaccccttccaacaatccgggagctctacaagagggggccacccaggatgaaattaaagggatatgatt

SEQ ID NO: 77351 - DNA, 121 bp, Glycine max
  Clone ID: PAT_MRT3847_40864C.1
tcccaaatgcgcagagagtcctatccttgcctctgtaagcctaaaccacgttcattgacgcaactgtctttctactagcatgctcactgtaagttactgcgttacgaatgtatttctctat

SEQ ID NO: 77352 - DNA, 304 bp, Glycine max
  Clone ID: PAT_MRT3847_40865C.1
ttgcccccactgtcacttatcgctcttaacacaaaaaccccaaaggccgtcgcggcaacgccgatactcgccgtgccggaagccaaattcgacgccaataccatcacttgcccctagatgaacagggccgctggtgctttaatgaaatatgcaaagaaggctgatgacgcccctaacaagccagctagacctcccagcgctttgctcgttgtcaagatcgaggacaaagagcgatttgagatggaacatgcaaacaacaaataccgcttgtgtagacagaaaagctggctgcgacaacatgtga

SEQ ID NO: 77353 - DNA, 424 bp, Glycine max
  Clone ID: PAT_MRT3847_40866C.1
gccacgcgtacgggcatttatgacttgtataatggcttgactaacctattcacaaccctggctgatgcatcgtcttacgcatcagcgaaagacataactgcgcccgccaatgcgtacaccaactggcgtacgaacttgctggcattgaaccatgttttgaacaacaacaatataaactaccctgtaagaagcattggcgggagaatttgcaagagatcaatcagctcgataacaatctctctagctatggcaaacgccaagaacaactctgacagcacaagcaatatcacaagcgacaattctggttccagatagaattcgttacacttaccgtctcttctaccgcgtattaatgcgcgaaatagagtcggttcatgttccggctcaggtccatcgtgtaatttgttgcggaatagatcttcct

SEQ ID NO: 77354 - DNA, 339 bp, Glycine max
  unsure (1)..(339): unsure at all n locations
  Clone ID: PAT_MRT3847_40867C.1
gcacttcgccggagataatgctgccgccgttggttaattctccggcttccctccggcgccggtgataccaataccatgcaagagaccctcctcactctccctctctcccaccacgaagacatccacattcgcgccaagaagaagaaaccgcaacagcatcatcacaaaccgggaagcgacaacagccaccccactcgcgtatcgcggcgcgtgagcccggcggtgtctccgtcctccggcggcgagaagtccctcccgaacggcgacatctacagcggcgccctgtcggngaacgcgccgcacggcaccggcaagtacctctggtccgatgggtgcatg

SEQ ID NO: 77355 - DNA, 873 bp, Glycine max
  Clone ID: PAT_MRT3847_40868C.1
ccacgcgtccgcaataatctttccacacacgataataattatatatatatatatatatagtccatcccacaaataacaactcgataaggccacaataaacccctttctctcaattttcattcaacaccatggcaagaaaaaccaagtccattttcttcaccttcttattatgctcttgggtggtggtagtagtagcccaagaggtagcaattgcaaaatccgaaagtgaagcattaggggaaccggaattagaaaaaagagaaacacttgaaatcatcattggtggtggtggtggtggtggttaccctgctccttctccttctccatcttcccctgcatattgcccacctcctccaccaaaaccactgagccggttagaaaaagcgcgtcgagtgcttctcaagttcaaaaccctaatctatgatccagactgttacacgcaaagctggaacgagaacaccgacacgtgtgatttcaacggggtacgatgcgccacatatccaaactcagaagagaaagcagtggctggacttgacctaaacggagcaaaactcagcactaaagacggttgcaatttgcccctcacgggtctcgtcgacagcatacccgagttaacattcttccacgttaactccaacaacttctccttcaccggtggcttccccaacaacatcacgaccttccctttcttcttcgagcttgacctaagtaacaacaaagtcagtggccagttccccacgcaagcgattcagaacaaccagttagtcttcctggacctcaggttcaaccagcttaccgggccgatagacccgaaactcttccagaggacctcgatgtgatctttgtcaacgataaccagttcaccgggtgcct

SEQ ID NO: 77356 - DNA, 361 bp, Glycine max
  Clone ID: PAT_MRT3847_40869C.1
ccacgcgtgcgatatacgtatgcataggtcattttactgagaccatctatctttatcgaacccacagcagaggaccggcagaggttcgaaccatattctgcctccttacgctcctaggggtatctgcaactggccgcttcctgaaccattttccctcaatgctttcatgatcacatagatgaccttcatctcccccacctgatgaccatcaagagcctctaagttcgtgcaaaaacacaagaagaacccctcacgaaccaactgaaagagcagctaggaaccctacctttatccacccctgttctgccaacattcataatgacaataattacaaaaccttctttttggggcatcttaatgg

SEQ ID NO: 77357 - DNA, 491 bp, Glycine max
  unsure (1)..(491): unsure at all n locations
  Clone ID: PAT_MRT3847_4086C.1
tacggctgcgagaagacgacagaagggtatgtacatatgctactaaattagtttacaaagataattagttcttaaggccgctcagagatgaatgcttccttctcagattcatcacccctggtattttagtcatgaattcttcaattcttcactcttctttaaatgtatgagtgctataatatttttcgtatgttcttctcggtccatatatacctgagtgctagaatatttcgtagaaaaaaaattaacagaaccatgaaattttgttttagataattagtccatggaatagtaggtccttatccaagcttgccaaacataacaaccaaatatcttagatattttatagtatctgataaatgaatttgtcttagtagttgaaagctaagacattccttgcatgacactttacaaaacatgggaaatttattagcaaatatacgataggtactcagaatagtacaccacanaaccaaaactaatgttggata

SEQ ID NO: 77358 - DNA, 291 bp, Glycine max
  Clone ID: PAT_MRT3847_40870C.1
ggactgcactcctaattgtcatggacggggactactacggatcgctcatggctgacgtagatgtcctttaatgcataggatgatacaccctggcggtcgggttattggaatacctcgccgatacaattcttatcttgtatcatttatttgaatacgttgtcttcattgtgtacttatatgttgactacaacactacttttctctacataagggactcactggataccgccctcttaatcgaagacaatagtaaggttcatggctccggtggaaagtggtactcgttatgga

SEQ ID NO: 77359 - DNA, 276 bp, Glycine max
  Clone ID: PAT_MRT3847_40871C.1
acctcggaattctggctcaagattcctgccaagcttatggtctaggtcttattgacaactcaccgactcaatgaagtggctgagcgagattcacctcaaacacgaccctaactatgcaaacgcttctgacccgcatggcctgaagactccgtcgttgttccagaaccaccgtccccatggtcacgatgaaaaacccatgcctcccactggaacctacggaatcaagatccccctgaccgaagcaccgggtgcatacccggaaaaccctctccgact

SEQ ID NO: 77360 - DNA, 425 bp, Glycine max
  Clone ID: PAT_MRT3847_40872C.1
tttcacaccacacacctaaaatagcatcacccttctctactctatacttttcgctctctatctctacatagtttctttttcactctcccattcttcttttttaagcaacaacaacctcattcctcggatcctaagaaaatgggaaccagagtgtggtgttgtttcatgacgttctttctctctctcaatgcttttgcaataacattggaagatcacaacctcaatacgactgcccagggatgacatcaagtgcaccccatgtggccaagttccctctccgtcgtcacccttttctacgtcgtcagcagtttcaaccaccacttacttgccctccgtctacgtagacttcaagctccggttgtggtggagcttactattactattcgccggcaccctgtaaataaatgcaactattctaccccgcc

SEQ ID NO: 77361 - DNA, 613 bp, Glycine max
  unsure (1)..(613): unsure at all n locations
  Clone ID: PAT_MRT3847_40873C.1
attctagtggctgatattgcttctgcttcctttgttgtagttgaagtcgctcccctcattcttctttcgttgctacttctactgtttcttcctccgatccctcattgccgcaaatgactcctcctgctagtgttaggtgaattccctcgcttcacatgcatgatcgcaccttcaactctcttcttcttcttcttctccatggctttttttcaaggttttggcgccgtggagttcgttttggtgaggattctgattaaagagttttcttttattctttcggagaagcgtctctgtctctctgttgcggtggattcttaaaatttgctaaatctttttttttctttttctaatctctattagtatcatcctgcgtgtggcttgtgattggaatgcttagatttatattttttgttaccaaacagagacggatctctacctttctatttcttttgcagtagcatcaccgtatcatcagcttcagcttgctttcaccaaaacggctttactatttggtgtgttccatgtcacaaaaaacgaaaggagatattccttttacccactcctcgtcagggaagatctgaagcagcgctagcagcacacgtnctctaatgga

SEQ ID NO: 77362 - DNA, 725 bp, Glycine max
  Clone ID: PAT_MRT3847_40874C.1
cccacgcgtccgacgacggaaaggggacgacagaagtgggtagtgtgtagtcaccaaacaaacatggcgaaaaaggcaaaagggtctcactctgcctcttctgcctctgcatcttcttcgtccgacaaactagtgctgaggattaaatcaaatgaggggaccaagagatcagtgcggcaaactaattcaagaaagaaacttaaagcaaagcaaaagaagaacaaacaaaagtttgatgctatgaaacccaggaaacctcctacagctttcttctacttcttggaggattttcgtaaagaatttcaagagcagaatccagatgtaaagtcaatgcgtgatattggcaaggcatgtggagagaagtggaaaacaatgacttatgaggagaaggtacaatactatgatatagcaacaaaaaaacgtgaagaatttgatagcgcaatggcagaatttaacaagaaaatggaaaatggcgagtttgacgaaactgatgatgaatcagagtttgatgagtaaagccacccttatttttcttactaggttggatctgtattaactgaaactacttggactaacagttgtacattcagttatcatcagcttttttctgtccttgctgatacttataatttctgtgtgtcatatgttaaatatatttgttgtatttagatgtttaatatggcaatttgggttctgtcaaaaaaaaaagaggcaatttgggccat

SEQ ID NO: 77363 - DNA, 523 bp, Glycine max
  unsure (1)..(523): unsure at all n locations
  Clone ID: PAT_MRT3847_40875C.1
attcggctcgagttttcacccccagcacctaaaacagtgatatgtacgacctaacagctagctagctgcatgaactgaagaaactgagaagttaccccagagtgccataactcaaactgatacagagaaaggctgaacaagaagggttagtttcagagtcatcatcaaagaaaaaagagggaaagaagagtttctgattaactttcagtaacatggaatggattattggactttggactctaatgggttttcttttatgttggtggtttctgtgtgtgagaaaggagaatcagaatagtaaggtgaagaagaagaagggtaaagttccaaaaggaaacactggttggcctctacttggagagacccttgagttcattgcttgtggctacacctccaaccctgtcagcttcatggaaaagcgcaagtctctgtatggtagtgtatttaagacgagcattttgggaactggtgtgattgtgtcggcanacccggaagtggacaaggtgatcngcnnaacccgggg

SEQ ID NO: 77364 - DNA, 467 bp, Glycine max
  Clone ID: PAT_MRT3847_40876C.1
ggctgcgagaagacgacagaagggggattttagttttagtattttagtttgggtgaaattgcaggaccctgtgtagtgtgtagtctgcagacaaacatggcgaaaaaggtaaaagggtctcactctgcttcttctgcctctgcatcttcccgcaaactagtgctgaggattaaatcaaacgagggaatcaagagatcagtgcggcagactaattcaagaaagaaacccaaagcaaagcaaaagaagaacaaacaaatgtttgatgctatgaaacccaagaaacctccgacagctttcttctacttcttgtaatgtcatctcaaaagcagatgggattcattctatttagtgcatttttacttttcaagggaggattttcgtaaagaatttcaagagcagaatccagatgtaaagtcaatgcgtgatattggcaaggcatgtggagagaagtggaaaacagtgactta

SEQ ID NO: 77365 - DNA, 518 bp, Glycine max
  Clone ID: PAT_MRT3847_40877C.1
tggactgagtagaccgtatgaagtacctgtgtcggcagatgcatacctagggcggcggccgtcacttagtcggtggtcgtcctttgttttttttttttttttttttttttttttttttattaggctttttttttttaacctttattcctaattaaaattgctattttttcccccgccaaaaatttttgagaaaaccctccttggtagccgtcccacataaaaggctagttgttaaagcagtgcgaccctacaatgtaagagattgccggggagtaaaggcgttgccagtccagatgttaaccctgcggctataatatgccctgtccaaggctcctgttgcttactacaaatgcaaaagactttcctaactaaagggactcatgtgggggggcccctagtgtaatagccgtggatcgacccttgattggaacaaaaagccatgttggctgtcacaagaaaatgacacatgatgggtaaggagctttcatgaaatgatttgcctgatacgcgttttaaac

SEQ ID NO: 77366 - DNA, 192 bp, Glycine max
  Clone ID: PAT_MRT3847_40878C.1
ttgggaaaaaaaaagacaaaatcttttataaagacattatttgggaatacaaagcattcaggattttcaacatgagtacattatcttacatggatgaccccattggctcactctgaaaccacttgggactagctataactgggtgctaaaaaggggggtagcagcaaccatattggtgagggcggggtttac

SEQ ID NO: 77367 - DNA, 281 bp, Glycine max
  unsure (1)..(281): unsure at all n locations
  Clone ID: PAT_MRT3847_40879C.1
tgcaatcaaaatgtgaagtttttnattttctagttttctcctttattntctntntcttntctcaatnaaaggnaacatatgatantaaatgcncaatggnggatggggtnggaattagtaggaaaaataagaatatatttancttgaaactttgcaaggnggaaancaggtgggaatngagtgcttgatggaggctgaaaaagttgttataaanncnattgaagggcgangtagccanannagtgatacaatncagtgtgcttnttgctcctccgncaaaa

SEQ ID NO: 77368 - DNA, 1899 bp, Glycine max
  Clone ID: PAT_MRT3847_4087C.1
gcaagggtttaatctggaccttattaggcgaatccctctagccaatgtgattcataggccaacacagccttatcctctctattcccactttaactccaccctacatttttctcttcaccggctacaccacaagtggtttttttagttggtcacttgcacatcacaatcaacctcaccacataaaaacccaaacccaaaccccacgcgtccgcggacgcgtgggacacaacacaaaccattcaatttctccttcatggctctcctcacatcccaacctaaaaaccccattctccatcgcttcaccacccttcactgccctcttccacgcttacatagaaccgttcttggtcttggctccttctctcacaacagtgctctctccactaaaaaacttaactttaacccaacgcaaaccaaaatttcccttcaaaacaacccctttacctataatttggcagtgacagccaaagccaatgccaatgctgcatttggagaaggtttcaaggaggaaggggcatcgagacacagaaagattttgttgtcagaggttgaggtgaagagagagaggagagttttctttggcagaaaatggaactctttggattttggcactgctggaattgtgttggcaatgcatctcctttgcgtctttgctccattccatttcaattggccagctttttgggtggctgtggctctctatattgtcactggcctttttggtatcactctttctttccataggaacctttctcacaggagtttcaagcttcccaaatggcttgaatacttctttgcctattgtggggtcctggctcttcaggggaatccgattgattgggtgagcacacataggtaccatcaccagttttgtgattctgagagagaccctcatagcccaactgaaggattctggttcagtcatatgagttggctatttgataccaattctgtcctagaaaggtgtggagaggcaaacaatgttggtgatttggagaaacaatccttctatagatttctccgaagcacttaccttgcccacccttttgctttgggagcccttttatatgccgcaggaggatttcctttccttgtttggggaatgggagtgaggattgtttgggtttatcacataacctggtttgtaaactcagcttgccatgtctgggggaatcaagcatggaacaccagggacttgtccagaaataattggtgggtggcgttgcttgcatttggtgagggttggcacaataaccaccatgcttttgagtactcagctagacatggacttgagtggtggcaaatagacatgacttggtacgttgtgagatttctccaagctattgggttggccactgacgtcaagttacccacagagagtcagaagcagaaaatggcattcaatagtgattcaattgccacatgaaacacaataaatgataaaaaaaaaaatgaaaataaaaaggattttagaggtactcgttgatggcacaaaagttttggtagggaaattgttcttttttgggtcttactttcagccatcatcgatgctggatttgaccatgtatatgggactagaaaataatgttactatatattgacacacaagaatatttaattattatccttgcatcttcctttagttattatcttattatactgtgattgaaagtcagtcattgagcttcaatgagaatcaattttaaaatttcttacatactataaaatctctattaggatctgttcggtagaatagaataaaaaaaattgagatgtaagtttttactgttcatttttttttatccagataggcagaacatatatttgaatggaaaagttttagactatctttgtgataaaaaaaaaaaaaaaaaactcgagactagttctctctctctc

SEQ ID NO: 77369 - DNA, 102 bp, Glycine max
  Clone ID: PAT_MRT3847_40880C.1
acgctctctcattcatgtcccaactgtacgacggacgacacgttgagtaacggcaaccaagccttcgccgcacggtgggcgtagtgctttgccttctgaagg

SEQ ID NO: 77370 - DNA, 195 bp, Glycine max
  Clone ID: PAT_MRT3847_40881C.1
taatttgtaaaggaccatacttcaatctttgtgtacccattgttgtattggcaacaagtccttgtataagatgtctagttctttaaaaaccacttattgaaaaaatcacccctgtccttcagtctgaattttatttaaagaaatcaccgaaatctgcaccttcctatcttgtaatatttgcacaactacaacttt

SEQ ID NO: 77371 - DNA, 460 bp, Glycine max
  Clone ID: PAT_MRT3847_40882C.1
ggtgatgttccgccagccgatccacgtcggcgagctggtcaccttcctggccagcgtcaactacaccggcacctcgtcgatggagatcggcgtgaaggtggtggccgagaacatccgcacccaggtcgtgcgccatgccaactcgtgcttcttcacgatggtggcggtcggcgacgacggcaagccggtgccggtgccgccgctgcgtccgttcaacgccgaggagaagcgccgctgggccaatgcccaggcccggcgcgagctgcgcaccgagatggagcagcggctgcgtgcggtgcgcacccagccgcccgctccggccagcgcaggctgagcggcagcctcagggctcgatcgccaggccgcggatcggcgcaccggtgccgaccgggccgatgcgccgggcctgaccgctcttcagatcgatccggtagagccgggtgcggtcggtgcgcaacgc

SEQ ID NO: 77372 - DNA, 168 bp, Glycine max
  Clone ID: PAT_MRT3847_40883C.1
cggctcgagcaagacatgatgaccttcttgcaagaactttctgaaggtccacctatgggttaaacgctttagaaacattggtggaagaggaacctcgacagctagtcccaaaattactgtacggtatggctcgctccatgccagaagactatgcgactgaaaccaaca

SEQ ID NO: 77373 - DNA, 589 bp, Glycine max
  Clone ID: PAT_MRT3847_40884C.1
tgacaattgggttgtggagttatttattcatgctaataaacagcagttggcatttatggttgggcctggtatattgtcacttttctgtttcttaagggaactctctatgaaccttaattctatttcaaagacgacagatgatcccctgcaacggctacttgattttgctcaaaatgacaaccagagactgctgacatttcataaattgggatgtgtaagactctcatggaaagaatgtgatgaagcctattgtctttttgagagggctataaatgtgagtcatatacattttgctgcgggttgaggtatactggactctataaagggtgagaaactggcatcttatgataagatcagctcatatatgtcttctgatactccactaggatggatgtacgatgaaagatcactatactgtgatggtgatttgaggcggcaagacctagagagagcaactgaactggatcctactcttatatatgcctacatagtataggactgcctctttatggaagtcaggaatgttcaaggtgcactggctgatatctaccggattcttggcttgaaactttcattagagtgcttggaa

SEQ ID NO: 77374 - DNA, 2962 bp, Glycine max
  Clone ID: PAT_MRT3847_40885C.1
ccacgcgtccggccaaacaaggatgtaccatcgtttttttccataagaaaatatcgttggtatagcttaaagaagtagctaagaatgtattcaggggtgaaagggttgttcaacagaagccagaaggtgaagggaacggtggtgttgatgcgtaagaatgtgcttgacatcaacagcataacgagtgtgagagggcttattggcaccggcatcaacataattggctcaacaattgatggtcttacttccttcttgggtcgttctgtgtgtcttcagttgattagtgctaccaaggctgatggaaatggaaatggggtagttggaaagaagacctatttggaaggtattattacgtcgataccaacattgggagcaggccaatctgcgttcactattcattttgaatgggacgcagacatgggaattcctggagcatttttaataaaaaattatatgcaagttgagctcttcctagtgagtttgactcttgaagacattcctaatcaaggaagcatgcactttgtttgcaactcatgggtttacaattctaaagtttacgaaaaggatcggattttctttgccagtgagacatatgttccaagtgaaacaccaggtccattagtgacatatagagaagcagaattgcaggctctaagaggaaatggaacagggaagcgcaaggaatgggacagagtttatgattatgatgtttacaatgatttgggcaatcctgacagtggtgaaaactttgctcgtccagttcttggaggatctctcactcatccctaccctcgtaggggaagaaccggtagaaaaccaacaaagaaagatcccaacagtgagaaacctggcgaggcttatataccaagagatgaaaatttcggtcacttgaaatcatctgatttccttacttatgggctaaaatctttaactcgaagcttcttgcctgcactcaaaactgtttttgatataaatttcacaccgaacgagtttgatagcttcgaagaagtgcgtgcactctgtgaaggtggaattaaactgcctacagatatacttagcaaaattagccccttacctgtgctcaaggaaatcttccgcactgatggtgaaagtgtcctaaagttttcagtacctgatttaattaaagttagtaaatctgcatggatgactgatgaagaatttgcaagagagatgattgctggtgtaaacccttgtgtgattcgtcgtctacaagagttcccaccacaaagcaagcttgatccctcagtctatggtgatcaaacaagtaaaatgactatagatcacttggagattaaccttgaagggctcacagtagataaggcgattaaggatcagcgattattcatattagatcaccatgacacatttatgccatttttgagaaggatagatgaatctaaatcatcaaaggcttatgccactagaacaatccttttcttgaaagatgatgggaccttaaagccattggccatcgaattaagtttgccacatccaggtcaacaacagcttggtgcctatagtaaagtcatcttgcctgcaaaccaaggtgtagaaagtacaatttggctgttggcaaaggctcatgttattgtgaatgactcgtgttatcatcaactcataagccactggttgaatactcatgccgtgattgagccatttgtcatagcaacaaacaggaatctcagtattcttcaccctatttataaacttctatttcctcactatcgtgacacaatgaatatcaatgcacttgctcgacaatcacttattaatgctgatggctttatagagaaaacctttttgggtggaaagtatgctgtggagatatcttcgtcaggttacaaaaattgggttttcctcgaccaagcattacctgctgatctcatcaagagaggaatggctattgaggattcatcttgtcccaacggccttcgtcttgtgatagaggactacccttatgctgttgatggactagaaatatgggatgctattaagacatgggtacaagagtatgtctccttgtactatgcaacaaatgatgcaattaaaaaagaccatgaactccaagcatggtggaaagaagttgttgagaagggacatggtgacttgaaagacaagccttggtggcctaaaatgcagactcttcaagagcttattcaatcatgttctactatcatatggattgcttcagctctccatgcagctgttaattttggacaatacccttatggtggttttatcctaaaccgtccaactcttagcaggagatggattccagaagaaggaactccagaatatgacgagatgacaaagaatcctcaaaaggcttatttgagaacaatcacgccaaagtttcaggctcttgttgatctttcagtgatagagatattgtcaagacatgcttctgatgaggtctaccttggacagagggacaatccaaattggacctctaatccaaaggcaatagaagcctttaaaaagtttggaaaaaaagctagcagagattgagacaaaaatctcagaaagaaaccatgatccaaatcttagaaatcgaaccgggccggctcaattgccctacactgtgcttcttcctaccagtgaaacagggttgacttttagaggaattcccaacagcatctctatctaaatgagtgtggctcaatcgtattgtacttttacttttgaatatctcatatacgtacgcaagcttatgtttattttagggtgatgtttagtaattgtgtttgtttgagtaatattgtatttagggtaagatttagtaatatgggtgatgttcagaatgctaattaataaataagctctttagcaaactactagcttgttattgcagttgacagggaattgtttcttctcccttcagctgttttaagttctattctatatttgagcattgtagtatttgcactgtgttattggtgtc

SEQ ID NO: 77375 - DNA, 308 bp, Glycine max
  Clone ID: PAT_MRT3847_40886C.1
accttgttaattaaatcataatgagatattcaataaatgataagaatataccctcaaaatattgatattcaaacataacctattttaaagcctacactctcaatggatacaaaaaaaaactctaaactcgcaatccattaatcaaataagcttaccaaacatcattcgggccttatatcctgtgggaattcattcatcttaggctgatgacactagcggccccaaaatccacgtccgatgcactcctttttgatatactgtgaagctagaactgtcctcaagtgttagatgaacactgcactgttaat

SEQ ID NO: 77376 - DNA, 155 bp, Glycine max
  Clone ID: PAT_MRT3847_40887C.1
ggctcgagaggctctgcattaggggagcacacacacctggctagcactaatcaaaccactcacaagaccacaggagactagggtcatacgaaacaacttgcaacctaggctaatcgttacacatgaccaactactgctgatgcgacgaagcccga

SEQ ID NO: 77377 - DNA, 325 bp, Glycine max
  Clone ID: PAT_MRT3847_40888C.1
aaaacgcacttttttaacactcccataacatctaaaaaatccgccacttttttaaattcacgtggacccaactcacacccttacactcaaaaccacacaatgcatttgtcaaaacaaaaccacatcaaattatttaaaaaaatcctatcccaatctatcccgacttttaatacaaaccaatcttaaaacatttcacttacaaacatttaaaccaacattggccctcatagagtcatagtacaattatgttgcccttcgcctttgcgaataacaaccacctttataaaggacaaaccaaagaccattccttcactacatcaatctt

SEQ ID NO: 77378 - DNA, 309 bp, Glycine max
  Clone ID: PAT_MRT3847_40889C.1
gtcagatccgagcgtaggctaactagaaacaaacgacaggctgaaaaccatttttctccttaaatctgaaactatcttcattttcatttcaacgcaacgtttttatgggtattcacttttcgggctccaagcgagagccgcggaatcgtcaccagcgtaaaatttgggcgaattgccccagagttgtgtcactcaaatcatgacctacatggatccgccccaaatttgcaagctcgctaccctcaattgcgcttttcgcggtgcttacttcaacgatttcgtatgggagtacaagctgccgaccaaata

SEQ ID NO: 77379 - DNA, 452 bp, Glycine max
  Clone ID: PAT_MRT3847_4088C.1
ctaaagtgagacgtgcagtacctgatcatcacttagaaccttcatcatccaatccccgaagatcagatgctaactaccctgtggatgttgatagaccccaatcaagcaatgcaacagctgatgagaagagtttgaaccaagcatccagagaatcttcagcaggtgcattgaaagagcgagagaatatggatcgttggaaaactgatccttctcagccacgtatttctaataacaggacatcaactgataggccaccaaaatctacagaaccatcatcaaatgggttatcagtaacaggaactatgcaccaagagcaagttaagccctcttcttagcttgttggataaagagcccccatctggaccgcttttctggacagcttgagtatatgcgtcagttttcaggattagaaagacatgaaagtgtactcccctttgtacatgccactgaaa

SEQ ID NO: 77380 - DNA, 322 bp, Glycine max
  Clone ID: PAT_MRT3847_40890C.1
cacgagccgcgccctttttttttttttttttttttttttttttttttttttttttttttttgtatattttttattttttttttttattttaaattattaatttgtatatttatattttatatttatattatttatatttatatatgctttgtattcaagtttattttccgcataggagatatacataaaaaatgaagacaataaaatggggggtgactcgttcaatagccttagacagtcatgaaaaaagaatataggcaaaatcatgtgggaaacaatcttccaatcagcagcctgaaataaataacagattaaatcaaag

SEQ ID NO: 77381 - DNA, 668 bp, Glycine max
  unsure (1)..(668): unsure at all n locations
  Clone ID: PAT_MRT3847_40891C.1
caatatgtcaaaacttctgaagaaggacgattgcatatgcctcagaaggagtaccagatatttaaggatagggtaatgaatagattgactggtgaggaagctaaccattccatttctcaaataatggaaaatgacgattcagaagatcagaccataaatgtgcaggcagtaaagaagggtattactgcaaggaatcgtatggaaatcaaggataaacctcagttcaagagaaaaagagctaagggcccgaacccactttcatgcaagaagaagaaaagtgaaaaacaaaatattggccctttgaaggaaacagatggagacaacacagtgaagagaagtaggaaaagaaagaggtcacagagacggaaaatgccaacagaaacaggcagttaggtggatcttttttatatatacagttacaaataggaatttttagagagcttcttgactttactgcttctgttgagtggagagaaaagcaagttttacttttgatccatgctgacatgggaggggaaagtgtatctagattagttgcatgttgaattttatactgtttctattttgctggcgatcgtatttttacttaactatggatgcccaaatagccgttggtcacaaaattgcttctgatatttatgattatgatctaaatgnattttactaac

SEQ ID NO: 77382 - DNA, 783 bp, Glycine max
  Clone ID: PAT_MRT3847_40892C.1
ttacggctgcgagaagacgacagaagggggaatatgaaaggtgggataatgtcaggaaaaggaactcttacttggataaatggggactcatacgaaggaaactggttaaatggcatgatgcatgggtttggagtttatacttggagtgatggaggatgctatgttgggacttggacatttggtctaaaagatggcaaaggaaccttttacccgagaggtagccgtcttccttgggtgcaagaaatttacctcagtgccttgagaaaaagagggttgctgccagatttgagaaaacagaaacaggtgagagatgtcaaggtaccagagaaccatatgtcaagtcatgtttcatctgataagtttgcaaaaggaaacctgttaaatctggaagagtctaatagaagaaatgtctctctcgaaaggcgttggagtcttgaggtgtctattgagaaggtgattggatatgattcagcattaagatttgcagaatctgtaccagaaagtagagatggagaagttgatgcaatgatcccaattttggaacgagagtacatgcaaggtgtgttaataagtgaggttgtgttaaataatatgttttcatcaatgtctagaagggcacggcgacttcaaaaaaagcttgtcaaagagattaaaagacctggtgaggcaatcattaaaggtcacaggagttatgatctgatgctcagtttgcagcttggaataaggtatactgtgggcaagataacacctataccgactcgaggagttagagcatcagatttt

SEQ ID NO: 77383 - DNA, 675 bp, Glycine max
  unsure (1)..(675): unsure at all n locations
  Clone ID: PAT_MRT3847_40893C.1
gctgtccctgaaagtgtgncagctaaaattgagctgccagattccttctataaactttcagctgaagaggtcagaagagaagctgaattaaggagaaaaaagattgctgattctcagcttttaatcccccagtcacttaaagaaaagcaagcaaaagtttccaggaagagatacacaaaaactattatcaggattcaatttccagatggagttgtacttcaaggtgtatttgctccatgggaaacaactattgctctctatgagtttgtcagctcagcattaaaagaaccaggtttggaatttgagctaatgcatcctgtacttatccaacggcgcgtgatcccccattttccgaaagcaggggaaaatgctaaaacaatagaggaagaagacctagtaccttctgctctaattaagttcaagcctctggaaacagattctgttgttttcaccggtctcagaaatgaattgcttgaaatcagtgaaccacttgtaaatggttaagcaatttattttgtatgaattatatctgttctactttccagagttttttttaattggtgtggatatagatataattttttctactcatttttaactgatattttctatgaaactatataatactgtgatacatctcaatacaaataaatcactgtgatgattgatgaagca

SEQ ID NO: 77384 - DNA, 1943 bp, Glycine max
  Clone ID: PAT_MRT3847_40894C.1
gctgatattatctgcttgagattttcttcttgcaattgttgttgtcttgtctccagagctgaaatggaaagaagggttgtaattattggagcaggaatcagtggccttggtgcctgcaaataccttctagagtttggatttaacccaattgtctttgaagttgatgatggtgttggaggactatggagacataccatggactccaccaagctccaaaacaataaacaaatgttccagtttatggattttccatggccatcttctgtgaaagaagataatccaagtcacaagcaagtgctagattatgttaactcctatgctgaacatttttccctcattccttacgttaaatcaaactacaaagtcattctcgattattatgtttgttaagattctagtgaagaaatgaagtcttgggtattgtgcggtggtaaaggaagtcctttttgctatgatggggaacttggcagtgttgctgtgcaacataccaaaaatttagccattgagatgaggaaattctagtctgatggtatttgcattaggaaagataatggtattcaaaatgtttctaaagatgcccaagaaaaacgctcttgaggttctctccacatgtttgtttagggtgtatcctgacaacttctgtaacaaactaaaagaaggatcctgatcaatggaaaaagagttacaataataggctcacagaaatctggtcttgatctagcagctgaatgtgcgaatgcaaatggagtgaagcatccttgcacagttatccaaagaaccgcacactggtttcttccagattttaacttttggggtgttattgctggattcttgtacttcaatcgctttgcggagcttttagttcacaagccaggagagtccttcctatttggccttgttgccactctgctttcaccatggagatggggaatttctaaacttgttgaaactactctaaaatggaagctgccattgaagaagtatggaatggcacccaatcacagctttcttcaggatctctccacatgtctgtttgcggtgtatcctgataacttttttgacaaactaaaagaaggatccatcattatgaagggatcgcaaaactttagcttttgtagagaaggtgtaatcattgacggagaagctaagcccctggaatcagatattgtattttttgccactggatacaaaggtgaccaaaaaatcaaaaacatattcaaatctccactcttccaaaagtacatcattgggcaagcaacctcaacagttcctctctacagacaaataattcaccctcagatcccccagttggcaataataggatatgccgagagcccatcaaatatatttgcctcggaaatgaaaagcttgtggctatcacatttcttggatggaaacatagagttgcctagtataagagagatggaaaaggacgtgaaattgtgggaagacaatttgaagcaatatggtgggaaatattattggaaaacatgcattgctcattgtggcatatggtatcatgatcaattgtgcaaagacatgaagcatgaccctagaaggaagaatggccttttttcggagttgtttgaaccatatggccacgctgattacgcaggtcttactcgtaaaagataatttgcaagaaattattaagtttgtttggttgttgcatctcttccataatgagaatttgtatgggtcttggattacaccggtacttgcatgttaattttttattagattttctttatcactatattattggtacgaattaggttgggagaggaaattctaattaaagtggtcagtcttggttgttgcaaaaaaaaaaaatttttttcttgttgaggccttactctttgcataaagaattatcatttttgatagattttttttttaatcacaatttttctatcaataaagtttgaacccgagaccttgcg

SEQ ID NO: 77385 - DNA, 429 bp, Glycine max
  unsure (1)..(429): unsure at all n locations
  Clone ID: PAT_MRT3847_40895C.1
tcannaatngancnnntatnacnctcnnngcnacacgctgancagtnacagacngngnncncngtagtntncnagnngnnnncgtngatnanganncgngcaanantngnntngctanngcatgntggnacnccgaccgnnncntgnncannngnactngngaagacnttgnccgnagnngancntcantgncnatgnnccncaanacancnnangncnncatantgtcagtcantgatngnnagngacanngngtcagncgaaanntnnccaacnagngnnnganccngacaannagntnnnagcntnncggnagcatntnncgnngnnatatngtcganagnngtnnaacncacgtnatganactanaagaagtacaacagtantngnanncntnnctaggncantgngnangcngtngcagatcnc

SEQ ID NO: 77386 - DNA, 283 bp, Glycine max
  Clone ID: PAT_MRT3847_40896C.1
cgtgaagacgaccgacggaggggcacgagtgaagagcgaagaaaatggctcccacgggtgtaatctttttggctgtgttatgcttctcagcactgtcactgagtcactgtcttgccgaggataatggacttgttatgaacttttacaaagaatcatgccctcatgctcgagacatcctcaaagaacaagtcatgcttttctacaagcgccacaagaacactgatatctgctggctcagaaacatattacatgactgtgctgctcaaacttgtgatgcttcact

SEQ ID NO: 77387 - DNA, 382 bp, Glycine max
  unsure (1)..(382): unsure at all n locations
  Clone ID: PAT_MRT3847_40897C.1
atcactattgtacctctctagaagagtatataaatctcttctccagatcttgcatgtcgaggagtgatctcgatcatatgacgtactattactatatgaatatgcctggcactgagactcagaacacttggtattattgttaaggcataatgattgacattctgcttctgttccgtcaaaggattcttggtctgggagatcaccaacttttatgttggttaagttcaggaacatcacgtccttcttgtcgatacacgatgatgttgattttctaacacatcctttgtcttggatttctccggcaggccggcgacggaatcctggtaaacatctgcaaggctccagattcagattcaaattattnttgttacagaagccgaag

SEQ ID NO: 77388 - DNA, 223 bp, Glycine max
  Clone ID: PAT_MRT3847_40898C.1
ggttcattgtcaagttagagaggctaagagatcattgctaaaccacggccttgggcatggtattcttaagtgtatcgcaaaccataccgctatgggggtcctatacccggggccgaggttcattgtcaagctagtggcgctaagggatcattgctacaccacttctatggacgtgatgggctccaggacatggagatattgggtgctctgtgggacgaagacc

SEQ ID NO: 77389 - DNA, 596 bp, Glycine max
  Clone ID: PAT_MRT3847_40899C.1
ggaactagttcaggtcaaaaagggtgggcatattccaacacctaatattgaagaaaccatgactgagaaagaattatttgagtggttacagaatgcagtacatgcgggtgcatttgacaattttagtagcactgcaacagagagcccatctcccaaatctggaaatggaatgaaaagtcctggcagtagtagcgccggtgccagtgctggtgctggtggtagtagcagcaagagaaagaaaaagggaaaaaagcaatggtgataaccatgtaatgttatatctcattatggcggtattgccttgaggacttcgaatgcttgaaaagcatttaagtttcaaagccgatatctgttaatgaagccccaaaaattgagttgtagccacattgtacagcgttatttttcccaaagtgtagatattgttgtccaataaattttctggtatccctttagcctttttaatacaagttgtatcaagcagcaatttttaacacccatagcccatagtatcccctcctagtcccccagggggccccattgcccccttaaatttcccgtgttttggttaaattcaaagttgtgactttttgggggtt

SEQ ID NO: 77390 - DNA, 433 bp, Glycine max
  Clone ID: PAT_MRT3847_4089C.1
ggctcgagaagaagccgaatggtagtcaaactgtctgacaacatgcggaatgttactacttccatgttttttgttcgcacaagaagttcatatggagtgcaaccactgattcacaccatgccaatgagttcaggtggaaaaaactgtagataccattcatggacttcagaaatcagaacatacgcttacaattttgacaaaatgctggtgtaatttcaatttgttgaactgctgctattcgtattcagtgctcactagccaatgaaatgtgcatcctgcatcactacaaaattcgttttgtattgttgtgtacactgaacattgttggagtatcatacttttataaatagtacttgtaaggaaaacactgaaaagcatagaatcatatcaattaaatgaaattgcacgagaccaacatgcttacttactttac

SEQ ID NO: 77391 - DNA, 886 bp, Glycine max
  Clone ID: PAT_MRT3847_408C.1
cttttgaccctgctagaaagaaactctcaagcaatatccagaaccaatgaagctgctctcttattctagcttacttgggactatccttagtgcaatagtctcggggatagttgagagggacataaatgcttggaagataaagcgtaacaaggatgtcattctcattgttctaactgcactagttgggggagtgattcgtcctaatattcaagtatggttcactcgcatgaagggtccactttatgtgccacttttcaagccatttggtattgcatttgccactacttttgcagtttgcttcttttcaaacagccttcattatggaagtgtgataggaacaactgtacttggaatggggcattatacagtaatgtatggacaactcagagaaaatgaagaagagacaagctgtgacgaaagctctgattctttggacaagatggtaccccttttgcaagaaaagatggaagtgtgaatagaacttcgaaagattctagaggcagaggaattcacctatttttcagaatcttcctccctttcgtttgattcgtttcaaacgattgtgatacaaatacaagtctctcccatgttgcaaatattttaattgtaattaactccaactgtgtatatataaatcatgaaacatgtaagtagcatgcaaaaaaaggtggtcgaatttttatttgagatctttatattttcgttgtacaaaaaatttctctgtaaatatatgtaatacacgtatctcgagctttactgtactgatatatgtgattcacaagttgtttttttggtaaatgggttatgcacaaattgttgtgggatgattcaaatttccaaccgtgattatataaaatgaacgcattaaatcagcccaatattttgt

SEQ ID NO: 77392 - DNA, 1487 bp, Glycine max
  Clone ID: PAT_MRT3847_40900C.1
ccgggccgaccgacgcgttctcccacgcgtccgcccacgcgtccggttccagatcgcaatgctggcatcccttcaactagtggggttgattctgatttaacttctgaagatgaagttgtccgtttgttgaactgctctgatcattatgcagcactgggattcacgcggtatcaaaatatagatgtttcaatactaaagcgggaatataggaaaaaggcaatgttggtacatcctgataaaaatatgggtaatgagaaggctgcagaagcctttaagaaacttcaaaatgcatatgagattctaatggattcgttaaagcgaaaagcttatgatgatgagctaaggagagaggagattttgagtgtatttcgtagatttaatgatgcttctcgtaagaatggtaggcatggattctttccttcacgatttgcacggtctgatgcagatggtgaggacccatttggtgattcaaggcgaattgcctgcaaaaggtgtggtggctttcatgtctggatacacaccaagaaacaaaagtctcgggcaagatggtgccaggattgccaagattttcatcaagctaaggatggtgatggatgggttgaacaatcttcccaaccatttctttttggcttattgcagaaggttgatgctccttcagcatatgtgtgtgctggtagcaggatatatgatgccaccgaatggtatatctgtcagggcatgagatgtccagcgaatactcataagccaagttttcatgtgaacacaaatttaatgtccaagcataattctggcaaaggaactagttcaggtcaaagaggtgggcgtatgccaacacctaacatcgaagaaaccatgactgaggaagaattctttgagtggttacagaatgcagtacagactggtgcatttgacaattttagtggtactgcaacagagagcccatctcccaaatctggaaatggaatgaaaagtcctggcagtagtagtggtggtgcgggtgccactgccactgccagtggtagtagtagcaagcgaaagaaaaagggaaaaaagcaatggtgataaccatatcatgttatatctcattatggcagtattgccttgagcacttcgaatgcttgaaaagcattaagtttcaaagccgatatctgttaatgaagccccaaaaattgagttggagccacattgtacagtgttagttttcccaaagtgtagattttgttgtccaataaattttttggaacccctttagcctttttaatacagccttgtaccaatgatccttctgcacatgattttcctgttcaagttcaagatgcaattttgagcagcaaggatcaagctgagtcttttaagcacttagacgaaaatgtcatgcgtgaatcctaacctatcagggcaaaggaactcattaatgatagacctaagacaacaaattgtatcaagcagaaatttttcaacaaccatggcatatagtataccatccc

SEQ ID NO: 77393 - DNA, 269 bp, Glycine max
  Clone ID: PAT_MRT3847_40901C.1
atggctgcgagaagacgacagaagggggaagggaaattttgataaagaagaagaaaagggttttaggttaggggtttggggaaaatggaaagtgggagaattagtagtgagaaaaatgcgattcgaattgagaatccatttagtttgaaagtgggtcaggtgtttacaggttttggtatcggctgcggagtcggcatcggcgttggccgcactttatatttgggtgcaatacctatgttgaatcaagtaatgagtgccaccagaggtgc

SEQ ID NO: 77394 - DNA, 244 bp, Glycine max
  unsure (1)..(244): unsure at all n locations
  Clone ID: PAT_MRT3847_40902C.1
gggggggggggggggggaggnnnnaaannanaagcggagaggganaangcagagnagccgaacngcagacagaagcgaccaccnaccaagcaggagggaaaaaagaaaagaagcagccgggagcggaacacacccangacaagagcaaaacacgngaacggggggggggggaagacangaccacnnaaaagaaaggaggnnngncnaacacaaaagaccagagggcacgaaaaccagcacagac

SEQ ID NO: 77395 - DNA, 541 bp, Glycine max
  Clone ID: PAT_MRT3847_40903C.1
ggccgcccttggttgtttgtttttggtaaattacatgggaaaggggattacatcttacatttctggggatggaaccaatatttcaagagccatgaaatgaaattacatggctcatgaaaatcggtacctcacccggtagtggtagatgaaattctctgttcccagtaatttacctaaaaaaaaaaaaaaacgggggccgaattctaaggttacttacgcccccgtactaaattctggcccttttcttgggggacctccattttttcattggggggtggtataaaagcttggcacaggcaaaaccctggctgttccctagttaaaattgttgtaacataaccctttttcacaaaatgggataataaagaatagggcggaaacgctggggttcctaaagagtggcccaacctaaattgagaggggggcgctccctgtcccgtttcaataaacgaaaccggtggggccggctcccttaatgaatacccctacgcgcggagagaggcagctcccgctttttgcgccttggtgcttttttttttca

SEQ ID NO: 77396 - DNA, 255 bp, Glycine max
  Clone ID: PAT_MRT3847_40904C.1
gtctgaggggggtgcagatgactctgctgaggagggggacctactggatgatgatgataatgaagatcggggggatgaccagctggagttgatcaaggatgatgaaaaagaggctgaggaaggagaggatgacagagacagcgccaatggcgaggatgactcttaagcacatagtggggtttagaaatcttatcccattatttctttacctaggcgcttgtctaagatcaaatttttcaccagatcctctcccct

SEQ ID NO: 77397 - DNA, 2036 bp, Glycine max
  Clone ID: PAT_MRT3847_40905C.1
cacagttaaagaagcaacattttttatgataaatatcttagtcccatttgacaaaagcaaagtaaacagtagaaatacatgctctactccagaaaaaaaaattctggaagactttgagcctgtgaagactctgagtagaagtatcacaaattaacgtgtgtttgattctactaattgatgtgaaatcaggtatctatcactaacatggacatagtacccttgtaaaggaaaatctacagaatcaggccatgagttctcaggaaaatatcctagacgatatgttagccacaaaatggttgttggaaagagccagaaagtaggtggtttggcaattcaatatacaattttcttggagttcttcctcgtcacgtcgttcctcaatcatgctggtaaaagcatatcaggccttgaaaagcacagaggagggcccatataaaagccaatttacattaacatgtcaaccagcttcacagatacttattctcaactctcaaccattaaaagacttcaaataatagaaaataatataattaggcaagtaataatgtcagagttccataaattttctgccggcctagttgcataatgagacctgaaatttgtctcccttccatcaggctgctataaatcttgattacaagaacaaagggaagtgaagagaaaagtttaccatgctgaaaacgactggagccactgagaattatttagctgccagccaccaaaagatgaagcacgcatatctacactctcaagaagtttaaccccatggcataaaattcttgtcaatgcaaataatcttgattattatctgttttctgatctactgtaaggacccatggcagagaattgactctcctcttaccccagacagccaagatcagtttaccaaaaatctccacaagaacaaacaccgtctttgaaatggtgaaaacgatttgtgtctcttacataaatttctcttccttccaatctgcttattactttaatcacagcatggcagtcatcacagattctcaggttcttaatcacttgaagaggttgtcctggacttgtgttgagtagtcctaatactactgccaacttctcactgtgcccacacaatatctgctccttatcctgttcctccacatcttgcaacacaaagttagtcttagggaggtaaccagacttcttcatctgcatattcaatttatccaacttctccaaaatatctttcatttgtggatgtgattggtcaccagcaagaagcatgtgtactttgtgtccaacttcaatccaactatacccagggtttttcctcaatcccttgcttttcatcacttcgcgtattctattttcttcatcccacaagccctttgaagcatagatattggacagaagaatatagttcccagggttggttggttctaagaagaaaagcttctccgcagcaatctcgcctaaactcaaattattgtgaactctgcaagaacttagcaaggctccccatacacaagcatcaggttcaaaaggcatttccttaatgatagagtaagcctcttcaagttttccaacacgactgagaagtgtcaccaagcaagcataatgttccattttaggttcaatgccatgttcttcggacatactattataacaacgccacccttcttcagtcaggccgttttgcgcgcacgctgataaaacacatgtaaatgtaaccaaatcaggcttctgaccactctgcagcatcatatgaaacatttccattgtttccttagccttcccatgcattgcataccctttcataacagcattccaagaaaccaaattcagggccgacatcttatcaaaacaacgtcgggccaactgaattctcccacacttggcatacatgtctatcaacgcactacctacatatacatcatcaaaaatcccccttctgagagaaaagcaatggatttccttcccgtgcatcaatgccgagatattcccacaagcaggaatcaagctcgggattgtcacagcattaggctccaccccataagcctgcatctctc

SEQ ID NO: 77398 - DNA, 153 bp, Glycine max
  Clone ID: PAT_MRT3847_40906C.1
cttatgccctagatctgtagactcagctggtaatctggtggtagcacatgttgtgcatcctacgctgattccactatttgtcggatttattattgtcttcggaattctaggaacacttgtagtaggccttgccactctacgccttcacattag

SEQ ID NO: 77399 - DNA, 175 bp, Glycine max
  Clone ID: PAT_MRT3847_40907C.1
gctcattgtggctgacgctgatgaaatgctgtcacacggcaataacgatcacagctactacatcctacaacggcccccatccaaaattcatgttggagtgtactctgctacaatgccggactcaccccttgacattacaaggatgtccatgaatcagccagtgagaatcctgtta

SEQ ID NO: 77400 - DNA, 466 bp, Glycine max
  Clone ID: PAT_MRT3847_40908C.1
cacctcctttccctctacaaataatgttgatgaggagtaacaggtgtcctttcagtttgaacagctgtggattctcaaacaattaaggagatcagggatggctccttctaggaaatctagaagtgtaaataagaggttttctactgttcgtgaggctgcatctagtaaagacaaaattacagagaatgctagcaaaaataggctgaagaagagaaaattggctgacatgttagggccacaatggaataaggaggagcttgagcatttctatgaagcttaccgtaaatatgggaaagattggaagaaggttgctcttgcagtgcataatagatctgtggaaatggtagaggccctgtacactatgaatagggcatatttatctcttccagagggtactgcttctgttgttggactgatagcaatgatgacagatcattatagtgttctgggaggaagtgacagtggt

SEQ ID NO: 77401 - DNA, 280 bp, Glycine max
  Clone ID: PAT_MRT3847_40909C.1
ctaaaaacatgtgtgttaaaaaaaacaagtgtttttccaaggaccagagcgccctcttattaaaaaaaacacttttttccacaaaaaacactcttctcccccaccccaaagctatgagaaaaccccccccctttgtgattgaaccgaccaataactcttattacgcactaccccccccgtgggtgaccaccggaatcttgggccgacccccgaaatcccccccccttcctctatgcggagcagttttacagatagggagaaatattagaacatggcgtta

SEQ ID NO: 77402 - DNA, 558 bp, Glycine max
  Clone ID: PAT_MRT3847_4090C.1
ctcagactcgtattccagtttaagaagcgagtgaaagagtgtatatcattactcgtttagaaaaaggtatccagaaaggaagaaaaaaccttcaaagagcgcatgcctagcatggagataggtggcgaaaaagatcagttcaataaatatgcttgtgcatgtgctgtagtcgcttccatgatatccatcatatttggatatggtaaaatattcaattccatcttactctttacctcgccttgttgctctctttatattattcaatttctactattttgttctctctgcaaaaaaaaaaaaaacaagatatatatggtccatttattatattagaaattacggtatatatattatggaaaccgttattaatttattggtagaggaattccatatatattttggataattatttacagtgaatagtaatatggagacaattttctaaaagtgaaataagtatagatcattgatactaatttctattggaatttcaaaagaaaaaatctgtaggcttaccaaatttaataagtcttttcacttagtatattttttaattca

SEQ ID NO: 77403 - DNA, 199 bp, Glycine max
  Clone ID: PAT_MRT3847_40910C.1
aagacgacagaagggggagaaagcaatgggcattgatagcgaatacgtgatatctgacaaggcctatgcgaaggtgggaatgcttgggaacccgagccatgtctactccggaaaaccaatagcgtaaacggtggccaattctttggcaacggtaaccttgggtccttcgacccagttattcttcaaacccaaccccttc

SEQ ID NO: 77404 - DNA, 578 bp, Glycine max
  Clone ID: PAT_MRT3847_40911C.1
gtttcctataacaacttgaagagatattttcaaccatccatacgtcgattttctcaaccataaatcaagtaactctctccatatacaacagcacttttccaaggtttaccacatcttgaagcagctacgtacaaagcaccatgagttctaaaagcataaatattcaaaatgctctttgttatactacaaggcctgctccacggtgcaataactccaactcttcatcctcagggactcaattgccaactattcaaaaagtcttttcaaggaggtatgagaagaagaattaaaaggaactatcttcactggagacttattatttcctagtttaccctaatttgttggttcatttgtttattatgtaattgattatataggttctgtgatgatgagtaatatttttcatgtaccacgactctcaattaaaaaaatgttcagcggcttacccaaaaggcaggcatacagttgaagatgaaaaaaaaaagacagcacagaacagaacatgatgcaaggtcatccataatatagcatgggtattaccatgatgtgtttgtacaatttgccagcttaaacttgtt

SEQ ID NO: 77405 - DNA, 146 bp, Glycine max
  Clone ID: PAT_MRT3847_40912C.1
gttacacatactacccatatttttacatgctgctgggttaacacaaactgcttaggttattttcggaactacttaaaggcgctcatttcaaaccgatgcaggctgatgtacctgggcactcaagtcttcgccaatctcgggattag

SEQ ID NO: 77406 - DNA, 141 bp, Glycine max
  Clone ID: PAT_MRT3847_40913C.1
cactctgctcttggactttacacatcatgtttggaacagtatagcgttctactcaatacttgggtaagaggttgcatcttgaccctgtgaaggaaatatgacaagccattattatatgaacagggtgggggaaaaaactaa

SEQ ID NO: 77407 - DNA, 210 bp, Glycine max
  unsure (1)..(210): unsure at all n locations
  Clone ID: PAT_MRT3847_40914C.1
gtcatactttttcggcacccgtctaaanaacgttaacacgacaaccttaaacaacggaagattccacgcgctcttgaacttccggcaaaaagaagacggcgccgcagccgccgccgaagaaaaaggaagtgaaagtnaaaccctccggagaccggctggtgtggttcccgantgcggngccgccgnagtggctcgatngaagcatgatcg

SEQ ID NO: 77408 - DNA, 418 bp, Glycine max
  unsure (1)..(418): unsure at all n locations
  Clone ID: PAT_MRT3847_40915C.1
gtncnacngtnccncnnnnnnngncccgcnntncnnccgcgcanccgngcanannctngncgcgtacaggtctngngcnncncgcgcaanncnngtgctagcngnttntcgancngngccgnnnnccnnctccngngcnncnngnntntgantngcacnncgngttgccacgncncnnncgtccccnggcgctnnngnnacgcccnancngngctgcanctgctntcgngnctgngntgncnggnntntnncnnngnnttcnnganntcnnngcgcgantgncnnttgtgcatngcngcgcnnggcgnnncgtcncgtgatctcgngnntcncnncgtngntcntggccgncnncccctgcncgcgcggtngcnacnngtgtnttccangnngcnngngggggnncattctncgtgtc

SEQ ID NO: 77409 - DNA, 315 bp, Glycine max
  unsure (1)..(315): unsure at all n locations
  Clone ID: PAT_MRT3847_40916C.1
gaaaaggtaatcgcggcccgaaccattcgatgaccaccggtgactcttgataccggaccctatccgtactttttcattataacaccctccggttggccaccataacggggcccccatatccgatgggcccagacgtggcgcttgcactgataaactaaaacaagtgctccttttcccttactcaaccgtcacaagttctgaattataaagacaaccatgccatcaaattacatnggaagacggaaattcttttgttctacgtgcaccacgcacgcttttctcttattatgaaatctcaacagagaatccgacgag

SEQ ID NO: 77410 - DNA, 289 bp, Glycine max
  unsure (1)..(289): unsure at all n locations
  Clone ID: PAT_MRT3847_40917C.1
ggtttttacacaaagtgaaactgcgtggctgtgtacgtatatataatagatatgatagaatctcaaggtaagcaaaatattaaagaatatggacaaaacacatctcattattaagtccctaccagaggtaaatatggacaaaacacgcctctgcgcttgttgttcttaatcatagtatagatcagttgtgttaataacatgaatatatatgcatagatttatgtaaatattgactccatgcacatgactaaatgatgcttttatagtttacatttgtcttanaaaaaaa

SEQ ID NO: 77411 - DNA, 431 bp, Glycine max
  Clone ID: PAT_MRT3847_40918C.1
cccacgcgcccgtttatttgtacggttttagagacacacagtacattaatgggggcgaagaggaccaacaaattcaaaaaatctttataggcaacacaaacccaaacgattgggaaagctataccaaaaatgattactacgaatcaagtcggcaccaccggccaacaaaaactaaccaatgccatgcgagaccaggagcatgcacggactcaaaaaaagacacaaaaagggcccccggaatacaggacccaaacctacgggcgcgcgaaagccacgtaaaagcacaactataacaccacggagaaacaatgcacagacccgcctcctgcaacaacgagacaggcaaaaccaaggccacacccaacacaagccgcaagcagaacatgcaaaggcaggcagcccgaatgagagcaaaaacgcccgtaacgagc

SEQ ID NO: 77412 - DNA, 478 bp, Glycine max
  Clone ID: PAT_MRT3847_40919C.1
tccctcctcctacacatgatgaactgagccctggacgcaaccacgaacgacaagctgaaaggactgcatcataatgaggcaagacaaaatggcacaggatgctagaacaaatactgcaggtggaaccaacaaaagatgctccacttcaatgaatgagatgagttccacattggtgaccgtgtacatggaattgatgccaaattctatgactgcgcatattctacgaagaatgatgtggattattagtgtgatttctgacagataaataaataacttgagcttccttgagaggcgctgtctctgcgggctgtgctctgtaactagtatctattgcctggaatatccacgatgtgaagcgacacaacatcagaatgcccctacgggctcgagagcacgcgactacgtcgactaatcgctctaatccaccctcttgcccaccaggtgctccaactcactaggatgctacgctacagggagc

SEQ ID NO: 77413 - DNA, 2931 bp, Glycine max
  Clone ID: PAT_MRT3847_4091C.1
ggctcgagctcgagccgaattcggctcgagatcaactgcgatgcagcactacccttgcctgacccgcggatagactgatcttgtaaacaacaagcgcatatcaggcccttgtcatcagaggggtgagatagaaaaagatgataatcgaggatgaagcatctccgtcatcaggcggcagtataatgaccagcactcttgctaggtcttggagccagattgtgattcgggcgtgaatggtggcttcctggggctatcagaagtagtcaagaatcaccatagatttctgagaatcagatcaggtctactcatcagtcatggatagcagcaagaagagggccctcatgagtaatgaaagcgcaaaacgtatataaagcataagcttctcaactgctaaactaagtttgttaataaaatgaagatttctggagcaaatgtgactgggtgtggggtttgccagtttgtgtatggattttaagaataatccaagatgaggcatctccgttattatgtgccggtataattaagccagcactccggcttggtcttgtagccagaatctgattctggctagaatagtagtttgctgaggctttcagaagcagtcaagaatcaagatagatttctgagaatcagatcaggctctactcattagtcatggatagcagcaagaagggagccctcatgagtaatgaaagcgcaaaagatttatcagtcatgcatcagtacaagaagaaccaaccaaagttaagttctaccccgcgcaagagacgtgatcaatcccactggcttatctgtaggggaaacaacagttgtcaaacagttcatgcaagaacaaaactgatgaatactttgattggaaaagggaagccacatgaagctcacggccgtcttcaacaacttaactgaagaagggcataagccaactctcataacatacacaaactcttgtggctgctctaacccgccaaaagcgtttcgattgtgctgcttcggttcgtgctaaagttgcagacaatgggatgaagcctgattcaatacttctcaatgctatgatcaatgccttttctgagtctggcaaggtagatgaggccatgaaaatctttcagaaaatgaaggagtatggatgtaaaccaacgactagtacttataatactctcatcaaaggatttgggattgctggaaggccttatgaatctatgaaattgctagagatgatgggtcaagatgaaaatgtgaaacccaatgatagaacatataatattttcatccaagcctggtgtaccaagaagaaactggaagaagcatggaatgttttgcataaaatggtggcttctggcattcagcctgatgtcgtaacatacaacacgatggcaagggcatatgctcagaatggtgagacagacaaggctgaaaggctaatattgaaaatgccgtacaacaaagtgaaacctaatgaacgaacttgtggcatcataataagtggttattgcaaggaaggcaatatgccagaagccttgaggtttctatacagaatgaaggagcttggtgtgcatccaaatccagtagttttcaactctcttatcaaaggatatctagacactacagacacaaatggagtagatgaggcactgacattgatggaagaatttgggatcaaaccagatgtagtaacctttagcaccatcatgaatgcatggagttcagcagggcttatggaaaattgtgaggagatattcaacgacatggtgaaggccggtatagaacctgacatccacgcatatagcatccttgcaaaaggctatgtgcgtgccggacagccacgaaaagccgaggctcttctgacttctatgagcaaatatggcgtacaaccaaacgtggtgatcttcactaccatcatcagtggatggtgtgccgcaggcaaaatggatcgtgcatttagactttgtgagaaaatgcatgaaatgggaacttccccaaatttgaaaacttatgaaactttaatatggggatatggagaagcaaaacaaccatggaaagcagaagagttacttactactatggaagagaggggtgttgtccctgaaatgtcgactatgcaactggtggctgatgcttggcgtgccattggtttattcaaagaagccaacagaattcttaatggttcagaagaagaatctgagctagatcaagaatttgatagtgacaagatacaagtgcaaagcttggagagtatttataagaaacagaaactcagtgcttctccctctaatctgcttcaaatacctgacgtagtggtgactcatccaacaagaacaactaatggaaacataagatgcagaatggtagtcaaactatctgacaacatgcggaatgttaccacttccatgttttttgttcgcacaagaagttcatatggagtgcaaccactgattgtaagtaggcagcagattcaaaatcaggttgttaggccattccttgactgttgcagagtagtgtcaatactttgttgaggtgacttaccactgtgatgaaacacaaatcctttctgaatagatttggttgtttccatgacagtacaccatgccaatgagttcaggtggaaaaactgtagataccattcatggacttcagaaatcagaacatacacttacaattttgacaaaatgctggtgtaatttcaattgttgaactgctgctactcgtattcagtaatcacttgccaatgaaatgtgtatcctattacatcactataaaattcgttttgtattgttgtgtacactgagcattgttggaaaatcttacttttataaatagtacttataaggaaaacactgaaaagaatagataccatattaatcaaatgaaattgcacgagaccaacatgcttacttagattacatatgagaagagaccattattaaattcatggct

SEQ ID NO: 77414 - DNA, 210 bp, Glycine max
  Clone ID: PAT_MRT3847_40920C.1
cagtaccggggccggaattaccgggacgacccacgcgttcggcgagctgtggggcgcagcccagatggagcgctaggtgaacctgcataggggccctctcgaagttcgtgatggcagaagatgataatgacgggagcctgaatgcccgccgaagctctatgtctccaagacgaccccagcatgctggggcggggagagctgggtgccata

SEQ ID NO: 77415 - DNA, 543 bp, Glycine max
  Clone ID: PAT_MRT3847_40921C.1
actaaggaccttgcacatatatttgttagaccaaaagaaaaagttatttatttgaaaaataatattatattaattattttaaactaacaaatgtatgagcaaaaaaaatagtgggagaaaaaaatgtatagggggctaaaaccatattctagaacaggctaaacacatttcaggaaaaaacatcgttgggtttgccataaaagaacctctacatagattggttggttgagcattacatacaagggaaagggcatttagccgaatgggggcataacctactcatgatttgcaacagaaccatctttgaggtgaaaatgtttttctcttttggggaactttgtcaaacctttcccagttcccgtcacaccaacctttccctggggatcatccggcgatttaaaaatactctcccggttttttccagagaagaaaccaatcttctttgcctttcctttggttgactgaaattgctgccaagccattttgccgcttttttggggggacttcaaggtgcctccctccgcttctttgacttaggggcat

SEQ ID NO: 77416 - DNA, 663 bp, Glycine max
  Clone ID: PAT_MRT3847_40922C.1
actttctctgagactagatgcttacttgagctgagagacgatgctgaatgaaagtatagatagactgacatgtgcagctattcttagagattcatgcatactgctagcagcaattgttccttcgccttaataggtgattactgacattgtgttaacatggcgtatctttgcaaatgtactcccttggctatctctggaaatcatctcaagtccacgccttagataattgatgatatcaaggctgtcgcgtaccatggcgatgtaaatgactatctccactctattacgtttgtactgtgattacaggtattacacagagcagctgctgcaatgtctcggtattctcttcgttgaacgtattcctacatcttcacgcctgcaaaagctcccttgagggccctttattctctggcggaggctgcatatattccgacgcactgatcattgataacctcttcgagaagccacaatgttgtagatgtccccaattacaggcatgtctcccgcaataacagcttcgacagaatattcctcttgaagtcgcagcctaaatcatggtgcaaaactttatcccttcacattgcgcctgttgacgatcttgagatatcctgtagtgagataccgcaccctattgctcctaagagttcgtacagggcgtatcga

SEQ ID NO: 77417 - DNA, 272 bp, Glycine max
  Clone ID: PAT_MRT3847_40923C.1
gatgaatattgcgaacaaatgtgacttaaaaagaccataatttacccactcctaacaactgaataattaaagtgtggggtccatattcaataccctacaaggaaaaaaaagtacccaatcattttattttaaatattccaaatttagtaatagacatatattccaggccaaaaaataaaagtttgttgttactaaatttgtagtttttatatttttagtatgagtttttttagtaataagttttacaatttaattaataaattttattactt

SEQ ID NO: 77418 - DNA, 316 bp, Glycine max
  Clone ID: PAT_MRT3847_40924C.1
ccacgcgtccgcaaaattagaaaataaaatccttcttacatggcttctcgtttcgatcaagctcttcttttgggaattatatttgttgcatttgttctcacttcaggacccgcaacagttgcacaagactgtggtccactgaaatgcataataggccataatgatttttgtatgcaatgttgtaggagagaagggtttgggtctggcatctgtaataatgatgggaaatatactcgctgttcttgtacgtagtgtaaatttataaaattataataaaatgggtgtttgatctaaaaaaaaaaaaaaaaaaaaaaaa

SEQ ID NO: 77419 - DNA, 419 bp, Glycine max
  Clone ID: PAT_MRT3847_40925C.1
cccacgcgtccggtactctacactcacgcgtcaagcatataaaacattgtggctatatgggggcttctggtatgcagttcatgcaacacaagatacagggacacctaactgcagtactgatctccgacgaggctgctgatggtgatggaaagagtgatagacttgaagcaggagatcctgcttttgctggacaaatagcacgtgataggcaaaggatggtttataaagctatatagtacgaacttgagactgtagcaaatgctgaagatcatatgactacaagacactgctgcagtagcaaacgggtagtagtcaaagatcatgataacatacattgactactcatacatggcggatatctacgagtgtttgtgctctgtataaaataaaggattgatggtgaaatatgaatgaaattc

SEQ ID NO: 77420 - DNA, 171 bp, Glycine max
  Clone ID: PAT_MRT3847_40926C.1
ctttttcccgggtcgaccgacgcgtccggccacgcgttcgcccacgcctccgaatcactgagtctagcatctactaatctcaatcggggagcatcattcatgactgcttacactatcaatgtcgataaatgctctaactctccaactgcgcacgctctgtcgctgtgtgag

SEQ ID NO: 77421 - DNA, 188 bp, Glycine max
  Clone ID: PAT_MRT3847_40927C.1
aaggcgcaggaggccaccctttctgcctttttcacgtgccctggacgacccaaacactacggcgagagagaaatgtcgcctgcaccaactttaccacttccgagtatatcagggccaagtcagagaagacaagggggcccgacggaggaactacaggatctgactggtagccagagaccattggccaa

SEQ ID NO: 77422 - DNA, 236 bp, Glycine max
  Clone ID: PAT_MRT3847_4092C.1
gaccgaaagcgaaatcggaagcgtgatcgttcgtttaaacgtacgttgacactgatggagagactaacttctaggacatcttctcgcaaatccgcgccacgcgcagcgacatgcacatcgacgtcaacgcaatcgccatcacctgccccaacacatacgacgagagctaagcagatagctccgcaactggagcctgaggacgagggagaggctcaagggcggaataagtcgggaac

SEQ ID NO: 77423 - DNA, 496 bp, Glycine max
  unsure (1)..(496): unsure at all n locations
  Clone ID: PAT_MRT3847_40930C.1
ttcctggtttggaaaacctttgccaagggttttttaaccaaaaatcattttgcctcaaactaaggccggttggttggaaagttttggtaaggaattaaagggaatnntgggtaaatttccttttttcctataaattatcctcttcccaacctttttttccgaagtggtattggtaaataatntnntaattttcttccggtcccccannaggggattggaatccaccanatttccaaaaaatttttttggttagaaactttaagaagggccaatcccccttcaaggcctccctcttaggctagaattcttagtcagtgccggattattaagtttccttaataaccataaagaaagggccgccaaggtccacctccaatggtgaattctttttcctacctattccaccgtcaccaataaaggaggaagccctttatcattggacccatgggtaaactagaatataatttctgcatagtgtcaacatgaaactatatat

SEQ ID NO: 77424 - DNA, 238 bp, Glycine max
  Clone ID: PAT_MRT3847_40931C.1
acggctgacgacagaagggaaccacaggagagctgcaggcagagatacaagaacaaatatataataagttcccaaaatatgaaccgaacacctaaaaaaaatattgaatgaaaagctaacaccactataacttcattcaagtcaggggacacaattatattgcaggcagattgactgactcaccatttaaggggatgactctaaaatgcattatacgtataatcatgggccttgttta

SEQ ID NO: 77425 - DNA, 633 bp, Glycine max
  Clone ID: PAT_MRT3847_40932C.1
atgatgatgatgccaatgccgaactcagtgatagtggcagtgaagtatcagatgatgattttatcgacaggaacccaaaggatatgattgatgatgatatgatggtgagcgttgaaggttttgattttaaccctgacttgaacaaaatgtctataacccccagaaaatcttttaaacatgggtttgagacacagttgaatcaatgtaagcgaatgccagctagaatcagaccatccactagtccggagtctctgtgatacctatctgcttgtgatcccttttacgtaaaataggaaatctgtcgattttgcagtgttcattacaggaactaatcagcatagtggtgtcctaaaaaatagggcattgatattttttgggccgttgtaattttggatgagtcctatacaactacttaaaagtaaagtgtgaaattatagccgttgatttaagtaattctgcccattagagaagcagagacaaattcgtaatgttcatacagtattcattttctactgtgttaaagtgagtaggagcagcaaactttaagattcgttccctgctatattgtaagtataatttatgttttgaggatacgctacatgaaatacagtatttgttgagttggaggaccaa

SEQ ID NO: 77426 - DNA, 464 bp, Glycine max
  Clone ID: PAT_MRT3847_40933C.1
gagaaaatatgtttaattgtatcttcaagataaaaacccataggataaacccaaagtttaaaacatgatctagtaagttaatgctgtatgtctttttaaaattatgtcctctttttatagttatttctaaatttttttagaggtagcttgttacatttattttttttcaataggcaggccaacatatgagttctcacaccctttggcacgtgttcctcaaagtgctggttattgggtatgtcctttggtgaaactattttcttctatctgtatttcattagttttgtgaatttatatccttgctgaatccagctctcatatataattgtggatctactgatttggtgggggatacgaggaattatcaatgacttcaggaaaagaaaattgaagcttgcttctattgcatacttcatatgtacagtggatcaatatctcatttaccaactggctatatgtggagt

SEQ ID NO: 77427 - DNA, 327 bp, Glycine max
  Clone ID: PAT_MRT3847_40934C.1
cggggttctagtgtgtgattgtttgttgttgtaactcgttcatctgggtttgttgttctgtgtttgtgtttgttttttcgctcagctgaaaatgtcttgctgcggtggtaactgtggttgtggcagctcctgcagggtgggcaccggctgcagaggctgcaggatatacccagacttgagctacactgagtcagccaccaccgatatcttggccatcggagtaggacctgtgaatgatgaatttccagatgttgaaatggctgtggtagctgagaacgatgggtgcaagtgtagcccatgctgctcctgcaatccctgcacttgcaa

SEQ ID NO: 77428 - DNA, 2702 bp, Glycine max
  Clone ID: PAT_MRT3847_40935C.1
ctttgtcaagtacgcccttgatcacgctgcctgcgcggagctccggtaccggcatccgaccccccccccggtgcccgtgctcccggcgcagttgtccttctcgaaacgccggcgtggcgcctccgcggttcggattcccggggcgccctcttcgtagccgcaattgctcttccttcgcgaagaagaggtaacagcatctgacaccagcgccagttaccgttttccacgcgctttcttccttctcgaaacgccgtcgtttggctaccacacatatatttagcatcactgcttcgaaccttctttttctcaccgacgcagtttccggttttaaggaagcatgggaaaggttcaggtgagtgacaaggaagaattctctcaaatggagaacaacgatttcagtgattcgcagttagttcatcacttcagaggtgtgcttgttgcagtgacaacgggtgatcgagagaattacgatgagctcgtcggttatttgcacccgaagaagcatcttaatcctgatgaggttgctatacttgtgacgactttgaaggcgctttctggagcagtgtcctatatagattctgttcatcatgaatccctgctctttgctgtttcgagaatgagcctctggaattatggaattgatattatggatgcactgctggaactcatcatatctttggctgcttccaatggaaaatacatcgattggtgtttggagatgcttgtgaaaaattttgtgccgcctttttacctcttagattctgtgaggcaggagaacggaattgaaagaaaaaataaagttctgtcacgggtacatgcagcattgaaagaaatagctgatttggtgcctcttgcacccttgcgactatctccaatagttatccagaaaatgccgagtgtcttcagtaaggaaactgagattgtcatgtatgtcgagaatatgttgaggctggagagtggtgcacttggagaaactgttggttctaccatgctgcctgctcttgtggataggttgctagagttggatgtggaaattggatgggatggaatcctgcaagaagatgctaaaggcatatttgaaatggagttagaagatgttactgaatttgcagatgaggatgagaattgtgatagtatgcctccgtcagagttattaaatagaaaaaatttgcaaggcaacttggttgttgagaaattagatagcctaatggtgctggcatttttgcaccttgaatcctgtcaaagcagtggccgtttgactgaggtattcgatactctactagcttcatttcagagaaccgtattgaatgcgtacaagtcaaaatttacccagtatgtgatgttctatgcatgtgcactggaccctgaaggatgtggtgtgaaatttgccatggttcttgctgatatgtttggatgtgatgttaatccccctattactaggatgagtgctgctgcttatcttgctagttatttgactcgtgcaaagttcctttcagctgcattggtcactaacatcatacaaagcttggttgattggtgttatgcatattgcaagttacgtgattttgatatgaacccacgagcacatcaagttttttattctgggtgccaggccattatgtatattctgtgttttcgcatgagatctttgatggatattcctaggcttaaattgcagctgcttaatatgcccatggaggcaatcttgaaacataaattgagtcccttgaaggtgtgtttgcctactgtagtagtggaatttcttagacaggcaaaggctgctcaacttttcatggcgtcagagtcatttgtttttgatgatatgcttgagtctgatctttccaaggcttttggcgggattgatagacttgacatgtttttcccatttgatccatgtttgttgaagaaaagtgaaagctacataaggccacattttgttcgctggtcaaaagtcagaactacatatgatgatgatgacaatgatgaactcagtgatagtggcagtgaattatcagatgatgattttatcgacaggaacacaaaggatatgattgatgatgatatgatggtgagcgttgaaggttttgattttaaccctgacttgaacaaaatgtctataacccccagaaaatcttttaaacatgggtttgagacacagttgaatcaatgtaagcgaatgccagcaagaatcagaccatccactagtccggagtctctgtgatacctatctgcttgtgatgatctctttacataaaataggaaatctgtcgatcttgcagtgttcatgccaggaactaatcagcatagtggtgtcctataaaatagggcattgatatttttgggatttgagtcctatacaacgaggggagttacttaaaaggaaagtgtggaattatagccgttaatttaagtagttctgcacattagaggagcagagtcaaattcgtaatgttcatatagtatcatttttttattcacatcttgtactgtgttagtgagtaggagccgcaaaccctaagattcgttccctgctatattgtaagtataatttatgttgaggatacgctacattagataaaatacagtattttgttgagttggaggacaaaaaaggtgtgtgtatagtctatttttttcgtgcgaagtctgaattcccccgtgggttgtgtacagtattcgaatataattcctaaatgccttgg

SEQ ID NO: 77429 - DNA, 552 bp, Glycine max
  Clone ID: PAT_MRT3847_40936C.1
ccacgcgtccgcgcaattgttcactcttccttcgcgaagaagaggtaacagcatccgacaccagcgccagttaccgttttccgcgcgcttccttccttctcgaaacgccgtcgttttgctaccacacctatatttagcatactccttcgaacctcctttttctcaccgacgcagcttccggtttttgcttagggttttaagagagcatgggaagggttcaggtgaataacaaggaagaattttctcaaatggagaacgatgatttcagtgattcacagttagttcgtcacttcagaggcgtgcttgttgcagtaacaactggtgatcgagagaattacgacgagctcgtcggttatttgcacccgaagaagaatcttaatcctgatgaggttgctatacttgtgacgactttgaaggcgctttctggagcagtgtcctatatagattctgttcatcatgaatccctgctctttgctgtttcgagaatgagcctctggaattatggaattgatattatggatgcgctgctggaactcataatatctttgggct

SEQ ID NO: 77430 - DNA, 576 bp, Glycine max
  Clone ID: PAT_MRT3847_40937C.1
atccacgcgttcgatttgaaaatcgttctatttcttgtatcaaatttgttatatgggagaaaacaatggaaagtgtggcattctaactttatcttttaaaaatttattttttatttttttttttaaaaaaaaaaaaaaaaaaaaaaaaaacccaaaaaattaaatattttcaaaaaaaaaaaaaaaaaatttaaaaaaaaaaaaaaaaattaaaattgggggggggttttttataaaaaaattatttttccgcccccttgcggggaaaaaatttttttttttttgggggaaattaaaataaatggcgggcctttaaaaaaaaattttttggaaaaaaaaaatttttcccccccaaattaaacccaaaaaaaaccccccttttttaaattgtttgatttctggggggaaaggaccgaaaccccccttcttaaatttggggccccccaactggcggtttgaaagggcccctctttggggcggtaattaaagaaagaaagggggggccccccccgggaaggggcttttttttttgccccccccgggcgccttttttttttttttaaaatactttttttt

SEQ ID NO: 77431 - DNA, 215 bp, Glycine max
  Clone ID: PAT_MRT3847_40938C.1
atccgtatgcggtgcacatgtgattttgatgagcgatatgcctagaaacagagtgatgaaattcaacgtcctcgttttcttcgttgctactactgtggtagcatggcacttccatgcgtactatatgttccctctacgaatgaacactgactatggtgcccgtactgcacacgtgaaatgctcaagttggacgctcgctgtggtagcacacatca

SEQ ID NO: 77432 - DNA, 211 bp, Glycine max
  Clone ID: PAT_MRT3847_40939C.1
agaagatattatctccataagaactagaaaatacaccataagcaataattggtaatataaaccagacagagtaaaatactgaaaacccttctcaactcagaccccttcatacttaaaagaagaattccctagaaattatgaataaaacactactgacttatctactaacccagaatcatttaccaagaacagggctcgtgaaataatccat

SEQ ID NO: 77433 - DNA, 640 bp, Glycine max
  Clone ID: PAT_MRT3847_4093C.1
tcgctcaagaaaaaaaaactcgtgctttcttatgcccagtctaacgacggatggagtcacgttaaaactaaagacggcgtggatgtatcgaagagaaagacagacgatagcagccatattctcgttcgcggacaaggattggttcccgggacagtagactctattctcgacaaaatttcaggagatgaatatcaaaaggttattgatcctatgttgacctcgttcaagctagttgagcaactcgaagattgctacaagatcgtgtatcaaactaacaaaatgccttctcctttgactgatcgagactttgtaacattccaacacaaacaaatcgtgtcgaaggatcttgccctaacttgcgccacatccaccactcacccctccgttccagttgacaagaactacgttcgcggtgaagtcctgcttggcggttacgtcattgaacgagttgatgacacccaatgcaaagttacttacgttgtgcaagtcagcttaaagggatctgttcctacgttcgttacgaacagtgcatccgtagatcaaggcttgactgttctcaatctccgaaaggccatggaaagcgcttaaacatggcttgaatcgtattgtagtttagtaaatattaatcttttagcttaac

SEQ ID NO: 77434 - DNA, 467 bp, Glycine max
  Clone ID: PAT_MRT3847_40940C.1
atggggaaaatactaggagaccttatggtaccatatccattccgagatacacgttacagggaaaaactagtacttgtgacaagtgacggtccaggtgaagaaaatgataatgaaaaggacgacaacgtactcagctgatgacagatagacactgatcattcggtcgttagagaacataagcgtctgtatgacgttcccaatatcggtactagacacatattcactgtcgttcggattgccggacaaatagttgggcctccgtcattgaagccgtattcagaggtctggcatgatcagtgagaggttgactattggtaactgacggcctgggacgaaatctttaaaggctctcagtctgaagaagaactccacttgagatgccatgatgcatggcaaatgtttaatgattaggacaaatgtttacattagcaactgattgtagcaccttgtcatccatgaactgactg

SEQ ID NO: 77435 - DNA, 378 bp, Glycine max
  Clone ID: PAT_MRT3847_40941C.1
gagacaagaatcttttgctgttttttctttcttttctcttcttctatattgcactattgcttatgcaaaacaattttacatatttcaggacggaaaagagagcgagtttcccttgatagatgagactagtgcaacacaacaacaaaacagtatcatcatggaagtgcatcatcttcaaggggttgttgttgataaaagcactgatttcttcccagttgaacaccctatggagccaccagatgaagatcgtcccgtgaaatgcccaatgcccgagtcttcggttatcaatgatgaaaggatgcatgaaaagagatttgcagaaagctcaaagaagagagtggagacaacccgggccgtggtgaatggagaatgaacacc

SEQ ID NO: 77436 - DNA, 501 bp, Glycine max
  Clone ID: PAT_MRT3847_40942C.1
gcaaaatcactcaccattgtgtccctcaatcttatagtaaaaatatattgtttctttcatctgttttccataaaatcacacaaaatcatcctccaccataaagtctttcatctgccaccataaagtctgtccctgaagcaaaaaagaaaatgtctattcgaacaaatcgctttaaagcagtggatagagtgttgaaggatctggagagagtagaaaaagaagggaaattgaatgatttgaagtctgagttgaacaagataaaggaggtgtttttgaaggtgaaggagaatgaagaagaactccacaacttcatcaggaggaggacttgcaaattattaaggactattgtgacaaccttggtcctgaatccaaacgtatcttctcatctctcttgcagtttcctgaaaatgctgttttcaagagaagggaaatctctctctggtgggatcagtctcattattattttccgtatttagaggaagattttaatcgtcttttggg

SEQ ID NO: 77437 - DNA, 237 bp, Glycine max
  Clone ID: PAT_MRT3847_40943C.1
gctgaatttactggcccgcgatggctctgttttactcgactaggaagttgttaacactgagaattggagccagatcctagcacttaagtgactattcttgggattaatggagacgactgtgctgaggcagagaagttagccatccattgtggaggagaatggtgatagagatctcattggtgtcacatgcttggactgaagaccctatgcaggactgatgaggcatgcaaaagaaga

SEQ ID NO: 77438 - DNA, 250 bp, Glycine max
  Clone ID: PAT_MRT3847_40944C.1
atcggtaattatggagacctagctcgcctgactgcttttggtggcaatccagacatactggatcagcccacgtcgtccagccgtgggggaagaggccgcccccggcgcccccgagctcctagccatatacccttccctaccctatgggatgcgaataatgtccatgtccccaaaagaccatgaccctcatcagactcctcctctaatagcgcccaccctattacagatgccccccggctcatgccacccc

SEQ ID NO: 77439 - DNA, 306 bp, Glycine max
  unsure (1)..(306): unsure at all n locations
  Clone ID: PAT_MRT3847_40945C.1
aaaaccgctccggcgtgnctctngcgaggctttcaagagcagcagtacaattcggcgtcgntttgaatgtcaccaaagnaaccnctctcctgctgcntgcaaatctntgctccttctgcnaccaactgtggattgtctgagacgnntgctgctgctcctgctggaggcctctntccacaagcttctccatctncccaacaaggagcanangnntcnactaatggtcntggcnaatgaagtattcccagcacagnacccagnancaactcaangggaagacgcnntcggcantatggcaanttcgag

SEQ ID NO: 77440 - DNA, 464 bp, Glycine max
  Clone ID: PAT_MRT3847_40946C.1
ggaggacataattcacctgtcctagcttcttatcatcttacatttccctgtagccactgggacatatgtggtgttccttcctagctcctggctcctgctcatgcctttgctgggtatgggcatgttggggggaaggtcattgctgtcagaggggcactgactttctaatggtgttacccaaggtgaatgttggagacacagtcgcgatgctgcccaagtcccggcgagccctaactatccaggagatcgctgcgctggccaggtcctccctgcatggtatttcccaggtggtgaaggaccacgtgaccaagcctaccgccatggcccaaggccgagtggctcacctcattgagtggaagggctggagcaagccgagtgactcacctgctgccctggaatcagccttttcctcctattcagacctcagcgagggcgaacaagaggctcgctttgcagcaggagtg

SEQ ID NO: 77441 - DNA, 1203 bp, Glycine max
  unsure (1)..(1203): unsure at all n locations
  Clone ID: PAT_MRT3847_40947C.1
agtggtcacgactcagtaaagaagaattcatgagcttcacgatatcgtcccaagacaacattaaagagngggtggattggttctaagagattagagtaggggcctaatactagattaggcagtggtggagaatctgggtgctttgaccaactatactggcacaatgagagtccacttaaacagtaacatgtgtgataatgatctctacgtttacccggtttgtctctcagtccaccctcttgctcctgcatcaagcaaattaataatgcaaatttcaacaaattgaagctagcaatggaagtacatagatagaattggttaaaagaaattaattaccaaaaggttaaactttgtttttaatttgtctgaaaatgaagtcaactgataatgcctttttgttttagcaaagagtcaaatgattcaactaacattttgattatgtcaaagttcatacagaaatttaaaatttctaacttgtcatccatctttatgtttacaaaacatgtcagatggatcgagatgcaatcaataaagctaaacttttatttcaagctttcaaagaatcaacaaggcatcttaagagagaaactagaaatactaggatcatgacatgaaacaagtagacaaaatgcagacctgtgcacataagagaatatattgttgtaaagcaatactgtgaaaacgtggttcttgtgctctccactcattaacaaatttataagcaatatttttaaaatcagctgagggcgagcctggtgcagcggtaaagttgtgccttggtgacttgttggtcatgggtttgaatccggaaacaacctctttgcatatgtaagggtaaggctgcgtacaatattcctccctcataccttcgcatagcgaagagcctctcgacaatggggtatgctagttatttatttttaaaatcagctgaactggattcactagtgcttagcgtccaagacggaaaatgcgaaattgagatggcggagatctttggagacgtgattatcgcgttgaagctccaacatgaggttttgggcgttgcgaggaatggtggcgaagagttggtaaatctgaaacacctgcgactctaccatccactggtcccgctgactcgccgtcggacacggcgccgccgtcgccgacgacggattcgtctctttctcgctctcttcactcatggtatcaaccagaaactacgcc

SEQ ID NO: 77442 - DNA, 428 bp, Glycine max
  Clone ID: PAT_MRT3847_40948C.1
agtagatctctctataagccttggattggacgcttgtgatgaaccgtatacgagaccaggcatacctgacgactttcacagagtcctaaaacccggggcgctcggccgcatacgggactctagcatcagggcctgatctcaccgcctcaactacctactacaggcaccagatctctatccagagctatgcctatccgtagccgttggctgactccaaccaggctgaggccaccggcacagccgacgataccggctacccgtgtcttactagataggatctacggcacgagctgaccgcagctggagaagctcatgtgacgcaagtgcatactcttcagacgcgtcaatcccggcgacgactcgtacgatctagtaattgacgatcttatcggcgggaatcgaatccggagtctctctcaaagaagaga

SEQ ID NO: 77443 - DNA, 716 bp, Glycine max
  Clone ID: PAT_MRT3847_40949C.1
cggtccggaattcccgcggtcgacccacgcgtccgggggattgcttcaacccatagagggatcgacgcagcttacacacaagaccatactccccctgagcaacaaacccaggaggttgctccatgtagatctcttcctcaaggtcaccatgaagaaatgcatttttaatatcaagctgatggagaggccaatgacgcatggcagccatagcaaggaacagacggacagtagtgatcttagcgactggagagaaagtgtcacaataatcaaggccatatacctgagtataacctttagccactaagcgagccttaagtcgatcaatctcaccattaggcccaactttaactgtataaacccatctgcaacccacagccttcttgccaggaggaagggaaacaagttcccaagtaccactatgttcaagagcctgcatttcatcaatcatagcctgtcgccatccaggatgactcagtgcctcatgaatattagaagggacagaatgcgaagatagagagaaaacaaaagaagaatatgaaggagacaaacgatgatagcttagaaagttatagataggatgaggattacgagaggatctagtacctttgcggatggcaatgggccagtctgaatcagagggatgagaagtggcaggatccatggcttgaggattgattgaagaaggatgagaatcaagaggagaagcttcagatact

SEQ ID NO: 77444 - DNA, 402 bp, Glycine max
  Clone ID: PAT_MRT3847_4094C.1
ctcactcggccggtgtatgtgaatggggcagcgaatagggcctgtatcaagaactggatcatagaggatacactggtggatacgccggaccacctgatcaacctgcgtatcagcgtgtatctaggggcgttccacggcggcatcaacagcggcgtcttcaacaacgtctccctagaggactacatcgtgcgcgacagctgctaccaccgctgctacatggtcctgggccagatttaggtgatccatgacgagattcatgaagatgttcaaacagctatacaagtcgctatacatctcgctttctatgactcctaggatgacaccatggatagcgtcatggagaggcttagggagtgggttgttgataacaacattgcaatcaaggtcacgctgaggctcgtc

SEQ ID NO: 77445 - DNA, 181 bp, Glycine max
  unsure (1)..(181): unsure at all n locations
  Clone ID: PAT_MRT3847_40950C.1
aaattntggcgggaaaaaagacacgaataatgaccaacaaaaaataaaggattggcggggcgtgcacaatacccgtaagggacattatttaacagcttaacctaaagctaatgcttagtcttgcactaaaagtttatctgactttagacttaacccgattaactgagaaaaaaaaaatata

SEQ ID NO: 77446 - DNA, 285 bp, Glycine max
  unsure (1)..(285): unsure at all n locations
  Clone ID: PAT_MRT3847_40951C.1
gtggtatggaacagaccagttttctatttcagcanacttctaaggttggttttnctantcacaaacattcctngangnattattacacnatgcttgccttgaccattncanatattggatcagnnggtgntgtatnaggtaagnttncaagcaggtacaaaatcctnacaangncaacgnnncttntncnngaagtgaagganctcganaggtgtttgtcataggngnangtacacacatcagaanggcaagtatnctcttatgagtggtangatgtctggctcc

SEQ ID NO: 77447 - DNA, 1566 bp, Glycine max
  Clone ID: PAT_MRT3847_40952C.1
cagaaatagaatcatctctctgtctagggtttcattctttttcagctttatttgttctgtagatccatctagcttcggtgctgcaaatggacgtcgcagtcactgccgttcggtcaccgctgatcgtcctgggaagtccggtcaacgggtccgcctcagctcggttgggttccacttttgggttttccagaaagctatgcttgaattcagtatttatcccgaagcaagttcgtagaagagggtttgttgttagagctgcatcctcatctccggagtgggatgatgccaagatcgctcctcttcagctggagtccccaattgggcagtttctttctcagattttgaaagatcacccgcatcttgtgcctgctgccgtcgaccagcaactccaccagctccaaactgaccgcgatgctcatctacaaaaccaacaacagccttcttcacccactgatttagttttgtacaggagaattgctgaggttaaggctaatgaaaggaggaaagctctggaagagatcttgtatgcattggtggtgcagaagttcatggatgctaatatttctttgataccctctgtaaccccagatctgtctggtaaggttgatttgtggccaaatgaagatggaaaacttgagcagcttcactcagcggaagcatatgagatgattcaaaaccacttggctctcattttgggcaaccgtttaggggattcaacatctgttgctcagatcagcaaaatcagagtaggacaggtctatgcagcttcgataatgtacgggtactttctcaagcgggttgtccaaaggttccagctggagaagacaatgaagattcttcctaatggagcagaagagaatagcattcatcgtactgttgtagatgattcaagaatcagtggtggagatggccgttctcatgttatgtctcatcctgaagtatctgcctggcctggtggtgatgtcagtcccggtggatttggctatggtataaaggcaaccaggttgcgtaactatgtgatgtcctttgatggcgatacactacaaagatatgcagcaattagatccaaagaggctgtcagcatcatcgagaagcacacagaggcattgtttggaagacctgaaattgttgtaacacctgagggggcagtctctaaggatgaaaacatcaaaattagctttggtggtttaaagaagcttgttttagaggctgtgacttttggttcttttctctgggatgttgagagctacgtggactcaaggtaccattttgtgtttaactgagtaaagctttgtatgtctatcttctttagagaccacaggtgggagccttgtgcattcagttgtccttttgatttctgtttgctcccatacatcacaagatacagttcatacttcatagtgtgttggtactgactgatgagtttaaagtccaaatattgtttcactaattcctatgtatatactatagtaatagtggctctggatttcatcaataaagggaagcttattttctagtttaaaaaaaaaaaaaaaaaaaaaaaaaaaaagcggccgctctagagga

SEQ ID NO: 77448 - DNA, 442 bp, Glycine max
  Clone ID: PAT_MRT3847_40953C.1
gacattaacattttttttgagagattattttttcccagttcctttcctgttccaaatagaatgtgtttgcctcttgacctgtgtagttggaacatttgtttttggtccgggcaaatgtttctgatgactagcatatgctgtgggggaggcaaactgcactggctcggtggcgggaggggtacagtttaacttgttccttaccacctttttgctaaacgtggggcatggggtctcccatataagtttatagcgtccagtccttcgcgggcaaaaatcccttccggcacttagtgagaacgggggccgggggaaaacatggtggtttgctggggcggactcacttctggtggatcccttcaccatcaatatttattttgccttgtttcgaggggaacccttactcctcggatgactttaaagaatgaacagagagtagaacctg

SEQ ID NO: 77449 - DNA, 2306 bp, Glycine max
  unsure (1)..(2306): unsure at all n locations
  Clone ID: PAT_MRT3847_40954C.1
gtaccgccctggcaggttacccggtcccggaattcccgggtcgacccacgccgttcccgcgtcgcagtcacttgcctctccggtcacccgcctgatccctccttcccgaagacccggtcaaacgaagtcttgccttcagcttcggtctcggtctccacctttcttgggtcttctccaagaaagccaaccggtctcaagtctcatgtacttgtacttcccccaaaaccaccatagccaccatagccatagggttcccgtagaatagaaggngcttctagtaatgtttatgaattccgctgcgagaagacgacagaaggggacattcaatcccccacgcgtccgcccacgcgtccgcccacgcgctttggtttaatctctctagggttattttctctctcttggattccattcctgcgtcttcatcagagcagccaatggaagcggcggcgacggcaacggcaacagttctcgcaccaccgtcggctttcctcggaagacagcgagcagacgacagaaggggtccccccggaattgaatagaaatagaatcgtcgattttctctttctctgactctagggtttcattattttcttctgtagatccatctatctagcttcggagctgcaaatggacgtcgcagtcactgccttccggtcaccgctgatcatcctccgaagaccggtcaacgagtctgcctcagctcggttcggttccacttttgggttttccagaaagcaacggttcagttcagtatgtatccccaaacacaagcacaagcaaggtcgtagaagagggtttgtagttagagcttctgcatcctcatctccggagtcggatgatgccaagattgctcctcttcagtttgaatcctcaattgggcagttcctttctcagattttgaaagatcatccgcatcttgtgcctgctgccgttgaccagcagctccagcaactccaaactgaccgcgatgctcatcaacaaaacgaacaaccttctgcttcaaccactgatttagttttgtacaggagaattgctgaggtgaaggctaatgaaaggaggaaagctctggaagagatcttgtatgcattggtagtgcagaagttcatggatgctaatatttctttgataccctctgtaaccccagatctttctggtaaggttgatttgtggccaaatgaagatggtaaacttgagctgcttcactcacacgaagcatatgagatgattcaaaaccacctggctctcattctcggtaacagagctggagatttaacatcaatagctgaaatcagcaaattcagggtagggcaggtctacgcagcatcagtgatgtatggttattttcttagacgagttgaccaaaggttccagttggagaagacaatgaaagttcttccaaatgcaacagaaaaagagaatagtgctcatcaaactacaatggacaatgcaagacccagtattgaagaggacacttctcaagtgatgtctcatcctgaagtatctacctggcctggtggtgatgtccgtcccggtggatttggctatggtgtaaaggcaaccaggttgcgtaactacgtgatgtcctttgatggtgatacactacaaagatatgcaacaattagatccaaagaggctgtcagcatcatcgagaagcacacagaagcattgtttggaagacctgaaattgttgtaacacctgagggggcagtctctaaggatgaaaacatcaaaattagctttggtggtttaaagaagcttgttttagaggctgtgacatttggttcttttctctgggatgttgagagctatgtggactcaaggtaccattttgtgttgaactgagtaaatctttatatgtgtatcctttttagatcccaccaggtgggagggaacctcgtgcattcagttgtccttttgagttctgtttgctctcatacatcacaaggcatagtttatagtgtgttggtactgactgatggagtaaatttgaatgtaacttcggtgttaagtacaaatatttttcacctgtttgatcagtgacattggaattggttttcactattaaaaggatatcttaaaattagatatttgcacatttgtttgtccttcgttatcgtgatttttgttggagtattaagtgtgaaacagatatagaccaaaattcaaattacaaatgactgttgttggagcactttataataagtatggctgatgtaaaggaaaagtggctgactacaagatttctttgttagatgtatattttatcaattttttgaccaatggatggatatacacatttcatgacc

SEQ ID NO: 77450 - DNA, 233 bp, Glycine max
  unsure (1)..(233): unsure at all n locations
  Clone ID: PAT_MRT3847_40955C.1
accaggcaggagttgatgcagcattagatgcattcaaggctgacaaggcatatccaatgaaaaaattgcaagagatccttccagatatgataaggggatcatcaaaattgttccacaatgtagagactgcaactccagcatatatggaactggaagccttcaaaacgctagcttactgtaacaatgtaagggatnnctaactgtttattaccnnccattcnnaactgggcgaa

SEQ ID NO: 77451 - DNA, 248 bp, Glycine max
  unsure (1)..(248): unsure at all n locations
  Clone ID: PAT_MRT3847_40956C.1
tcggcatgatagttcagtgtctacaatagcatacaaatatggacacccctnttgtgccacagttaaatcgatatgcaattgcacacacacacactcaatttctattaacgttttttattattcagtataattttccattatccagtttcaacggagatgttaattttcaccattaagctcacttttagcaacatacttataaggaccgattggtccatcaacatctttattcttaacatgcttaaata

SEQ ID NO: 77452 - DNA, 273 bp, Glycine max
  Clone ID: PAT_MRT3847_40957C.1
acgcgtccaacggctgaacacagaatggtacagctgccacaagaccacatacgggtacagctgccaaaagaccacaaaacggtactgctgctaaaatacgacatccaggagaagaatacagagttgggtttcccactaacgacatatgctatcaatgtgtaactttacatcaatcttatcggttaactggacatttacctcctttatactcgataagttttgctataactcgttttgtagtttcatgtttactgcttaatatctgtgtttaac

SEQ ID NO: 77453 - DNA, 2302 bp, Glycine max
  Clone ID: PAT_MRT3847_40958C.1
ggtttcagaagctaatcgcaggggaaaaagaaagaacaaacattaatatctcgagtattgagtttcggaagcgcttacgacgatcaacttcacgttttttcctaatgcagcattgtccttgaacttcaggtaaaaaatagcagaacattttcatggttcaaggatgtccaatccagcttcaaaagccacttggacacctgggttccatagagtatttgttgatttatgccttggagaaatgctgaagaatgagcccgggtcaacacgaattaccaaggcaggttggaggaacattgttggatccttttatgcgaagactggtgtgagatatgacaagaagcagtttaagaatcactatgattctaccagaaaactatggaaagtctgggtcaagttgactgaagatagcaacatgaagtgggatccagaaacgggggcatttggtgcttccgaggaagactggcaaaattatgtaaaggcaattccagaagctgcccagtttcagtctaaggaaatccagtttaaagacaaactggatatcatctttgatggagggaatcgaattgaggaagtgaaaaggtgggccagtctcaagtggcagaatgattcttcaactacatctcccttgtgtggaagagagcgagagaagaaacgcaagaattttgatagggattgtgaattagatagtacgattgtggttgactattcgccaacaccaaaagcttcttggtcacctgcataccataaaatgtttgttgacttatgcatcgaagaaacattgaaggggaacaagtctgcgacgcattttaccaaggagggctggaggaatattgttggatcctttaatgcaaagactggtatgagatatgacaaaaaacaaattaagaatcactatgattcaacccggaaactatggaaaatctgggctaagttgactggtgatgacaacatgaaatgggacccccaaaccaatacttttggtgcttctgaggaagactggcacaattgtataaaggtattcagggcattcccagaagctgcacaatttcggtttaaggaactccagttttctgacaaattaaacgtcatctttgatggagctatgccaactgaggaaatgataacaaggcttaagaggcagaatgatgcttcagctacattgcgtggaaaagagcgtgagaagaaacgcaggaatgttggtcgggattgtggattaaagagtgccattatggttaatgccatcccaatcagtacaattccaagtgagcagagcatgtccagttcatcatataccaaggtcaaagccacgtggactcctacactgcacaagatctttgttgatctatgtatgcaagagacattaaaggggaataagcctgggacacattttacaaaggaaggttggaagaacattatggaatcattttatgcaaaaactggtgtgaattatggtagactacaacttaagaatcactgggattctaccaaggaacaatggagaacctggtgtaagcttattggcaccagttacatgaaatgggatccatctgaccagaagtttgaggctagtgaagaagattggaccaactatttacaggaaaatccagaagctgcacaatttcgctataaggaactaaaattcactgaccaattggaaaccatctttaatggaactactgttactggagagactgaacctgctgtgcaacaaaggaaaagtgacgatagtgttgttactttccctttacacataaaagagcctgatacagacaacttcgacgagaaaactgaatgtcattgtgatgttgttgcgtcaagaaatggtgtgagtattcagaagaatgctagtgcagtttcatcaactgaaggtaaacgcaattatagtatcggtgaatgcattgaatgccttgatagaatggaagaaatagagcaaggaagtgatctctacatgtttgctttagatgtattccttaagcaggaatatagggaaatttttctgcagttgaaaacgcctaatctgaggatctcgtggttgcagcggcttcagtcttgtggtccacctccagtctagggttttgtcatacttgcatagttttttttttagtttgtagttcttcatagaatgtggtgtgcttaggcaatggtctgttccttacaatatgacgatgatataacttttcagggggtgatttcccaaacgtgactgcacttggaagcttaaaaatgtatatcaataactattgacgcattaatgtaatggctgataaatagaagaggaatctcttaatattattttgacgtt

SEQ ID NO: 77454 - DNA, 589 bp, Glycine max
  Clone ID: PAT_MRT3847_40959C.1
tttttttttttcatggatatcctgatctctacatacataaagttttaacataggtacatataaataatatgtacaatgtgcattagttaaaatacaattattcaaattcagacacatgggacatggcctaattgaacaactactaacaaatacatgcacaattttctcgactcctaaatcatccctacattgcgaagccaccttttctatgcaataccacggttgttcttgggcactcttgaaagccacaccaacaaatgtacagaagacacttatcttcttagcctttgtacatttttccattcttcaatcagctagaaaacaccctgagacgattggtgatcctctgacggcatatcggacaattggttaacctagatccacagtctctacaagtcatgtgaccacatccaaatgccaaatcctttttattggtcagacaaatagcacaagtcatttggtttctctcatcatccatgaaagttggcatattgctcagaacgcgagctgttggcacaagccgggaatatggaggctgaagaaggtcttggaactattttatttgatcttcctgttgcacgacttttgg

SEQ ID NO: 77455 - DNA, 276 bp, Glycine max
  Clone ID: PAT_MRT3847_4095C.1
gccatccctcactctcctccaagccatcgtccccgtcccagcctccccggactccaggggcaaaagctgcagcgtcgagatggtgaaggggcgcacggggcagcgcgtgaggctctacgtccggggcaccgtccttggataccagcggtccaagtcgaaccagtacgagactacgtcgctggtgcagatcgagggggtgaacaccaaggaggacgtcgcgtggtactgcgggaagcggatggcctacatctacaaggccaagaccaagagcagcgg

SEQ ID NO: 77456 - DNA, 265 bp, Glycine max
  Clone ID: PAT_MRT3847_40960C.1
cacccgttccttttggggtccttgcaaagcgagcctatgaatcagccaaacaggctgcccatgaaagtctgaggcgccaaaatcctgatggtgacaaggtggcctctactaacggtactacgtcggcagaaatgatgacaccttagacaaagccggtgacggagggcttaaactattcactgatgggaacgggtatgaaggcacgcacatggctgtctcttacatttatgtagggaagacccatgccgcccatgtgaccctgatg

SEQ ID NO: 77457 - DNA, 1424 bp, Glycine max
  Clone ID: PAT_MRT3847_40961C.1
ggccggagtttaagtttatcttccaagttcacgtaccatcgcttttataaataccctcatccagtttcccttccaagttcgaatattcaattcaacaccttccctcattctcttctccaaacacgacacaaacattaagaagaagaaacataccacgaaatgtacggacaaagtagctatgagtccgatttggcccttttggactccattcgccgccacttacttggcgactccgaggagcacaaattcggagccccgaatgttagttcgggtaacactccagcgtactctcggagctcctgtttcagcaggttgtacccttgcttgagtaacgattggggagaacttcctcttaaggaagacgattcagaagacatgcttctttacggtgttcttcgcgatgcaataaacgcagggtgggtcccatctctcgatgcatcctcaccggagagtttctcgtcgggtttcatcccggcggtgaccgtgaaatccgaaccggatctatttccggcgccagagcctgtctatattcctccggcggctcagaaggctgagccggcggtggttccggcgaaagggaagcactaccggggcgtgcggcagcgaccgtggggaaaattcgcagcggagatccgcgacccggctaaaaatggggctcgggtttggcttgggacttttgagacggctgaggacgccgcgctggcttacgatcgagccgcgtatcgaatgcgcggctcgcgggctttgttgaattttccgctccggattaattcgggcgagcccgaaccggttcgagttacggcgaagcgggcttcagcagaaccgtgttcttcgtcggagagtggatcttgggtgaagaagcggaagaaggtggtgggttgagaacggggcacgtggagagcagttgttggtgaagttagttctttttctttgttttttctttgtctttcgatcgagacgttcggcgcattggtgtagccgaggatgcccttgagctgctgctcggaggcttcatcgccgcgttggattctaaaattggtattgtgtttattaaatacaaaaaatccaatactcttttgtaattatgtaaggtgcgtgtgtagtcctatacccatcatccaactcaatcttgcaacagagaaaaaaaaaaggtgaaagatgagacaggtgattttagtatatcaaatttcaaatggtgagtggtgaacccaccacgggaagaaaaaaattaaaagatgatgatgagtgatgacagaggtgaggatatgtaatttagctttgtgaatactaccaaatttgtttgttcaacattatgaattatgaatgggttaaatgtgacaaatgagttgaggccttaaaatcatgatccttgaggagcaaaagaaaatctaatcatatgtacctgttggaatgaacaaaataaa

SEQ ID NO: 77458 - DNA, 574 bp, Glycine max
  unsure (1)..(574): unsure at all n locations
  Clone ID: PAT_MRT3847_40962C.1
gctcggaattcggctcgagcccaaaacaagcatggcagcaactgaaaaggggctttcaactgccttgaatcatggctatgggacaaaatccttcctttgcttcttcctcaaaattaccgtcttattacgtttgattggccttttgctggaactgtgaaggatcagaatctctatgaccctgtcaagtattcctctgtggaaggttttgctgatgacttgatcactctgctgaataaaatggacctcaaagctgtcacttttgttggtcactccatgtccggcatgattggttgcattgcttctgtcaaaagccctcaactcttcaagaccctcattctcgttggtgcttccccaagttatcatcttattcttttcttaaacttttacttattagtttgttttgttacccttgctttgatctcttggatttgttcaacttcaattgttccttactatgaacatgatcagttaaaggaggctattgctagcntaatactttaagtggaggtgtgaacttcgaattgtcttttgacccgnngtcgatcatgtcaagctggttgccctttacttctgt

SEQ ID NO: 77459 - DNA, 632 bp, Glycine max
  unsure (1)..(632): unsure at all n locations
  Clone ID: PAT_MRT3847_40963C.1
ggccccggcnntcttgccttcccggggccccctttttggccccangaccgggcccggttttgggccggtttgcctccctgccccgacttngtttcggttgggggggcccggggtttccttaatctttctggcccttgtttttcccttggccccttttccgccccttggccccccccgaagggcgcccccggccggcccgacctctcattggtctntgggagaccctggtttggggggccgggctgctcggcggcccccgggggtgaaggcggtcccccgggggggaccatcttccccctttcgggttggttggctgcggccctggtgcgccctttcttgggcctctggcctgggcggtggggcggtcggccccgggactggttcttccctttccccctcccccgttttggtgcgggggggtctgggggggcccttttcttggcccccccccccgcccgggcgcccgtcttcgccgggctcccttccccccctggcccccccccggcccggcgcccccccgccccgcggggggggggcccccccccccccctggggttttccngggnggggccccggcccccggggccctcccgccgcccccccgacccccctctggcggcccgccggggggc

SEQ ID NO: 77460 - DNA, 245 bp, Glycine max
  Clone ID: PAT_MRT3847_40964C.1
tcgtctattctatcccgcgggagcatactacctgtcttcatctccaaacaacctcaaaaacattcatcaactttcactattaatccatccatcattaactcataaaataaagttctatttttttatctttgatttgcttctaatccatcatttaagtacctagttccttagattcccttctcaaacaagctaaaaaactttaaacttaatttgaataactaattaattcttttcctaaatttttt

SEQ ID NO: 77461 - DNA, 365 bp, Glycine max
  Clone ID: PAT_MRT3847_40965C.1
cccacgcgtggggccactcgttcagcctcgcgaacgttctgttagtgcaacaacctcagcatttgatataattgatgctggtgcacaatcttcagaaaatgttgcttacatgtgataacagaaaaaaccgaacaggattgatgccagattgagacaaacaatagaccctcaatatattgaggaccatgctgatatggatacaaagcctgattaaaaatgtctccacgactacgataaactactaaaggatgcatgatgtatgttaaaatctaatacactaaaattgcactttgcaaaggcacagctgtctgaaccattctgggtccagatctagagggggatctttcgacacaggtcaatgttag

SEQ ID NO: 77462 - DNA, 1564 bp, Glycine max
  Clone ID: PAT_MRT3847_40966C.1
ttgctactgttatgtgtgtgattctgtagcaccatgtccgaaatgggtcactggccttttaggtatggatcattgtcatgcaaccgatgaatccgagacatggagaacacggaggaaaattttcaagctgggcaagactgctccattaccgtcttcaaccaattatagtactttgagtgatgtcacgaatgcccaacagaacaatattctgccttttcgtgtgatgtctccatattccatgttgccgaatcagacatcaatgtcaactgcaacacatacatgctccccagtcaattccatacctcaaaatcaatcctcttcgccaattacaatgcgtacgtgctcctcgatacattctagcttccagaaccaggtatcctggccaaataatgtcccctccattgccaccaactttacaatcccgtctggtacaaaccgtggtagatatccagagtcaggatctactttggcgagaaacagataccagtctcaatccattccacagcactcgctaggcaatcgtgcaatccaaagggtgcgacaacatggagttagcactttagtgcctcagttccattctcatacattgtttaacggtttaggcagtgttggtgttgggagcaccatgccaatgaaccattctactcatgatgcttctggtggcttcagtaatcatgtgaatctagcacagcaatttgccggatatcatgctgcaacaggattttcaaatgataacagaacttcttacggacaaaatgcttatgtcccccaaaatttatggtaccctaatccttgctctcaaccgaataacctcagctctgtcagcaattacgctactgctcatgaaacccaagtatcataccaatcaaatggtagccagaatttttatgctgttcaaggtaacaatgctccttcaagtaataatgtggctggtctgagtagaaatgaaaatgtttgtggaaatgtaacccaaagtggaactacaaggcaatattcttgccaacagaaacctcatgatgtgagtctaattgaatctgcattgaaggcagataggattgagcatagcaaacaaagcattccttatcagcaaagttcaggatctacgaacacctgtcttggctcagtcgatgatatcaagcgctggctttttggcgatgaaaactctttcctggttggagccgatgatgctttagcatcatcatcagctccatccggtcttggctcagtcgatgatatcaagcgctggctttttagcgatgaaaacactgtcccggttggagctgatgatgctttggcgtctgaactgaatacgccatctcctgatcttagcacatttgatgggggctcattctttgattttgaatcctcttgggaatgtcgtgctcgtgtctagttatcgatgatgatgaatcttcaaggtaacgagacaagagttctgctacttgctttataaatggaagaactcggaacctgctagtgttagatatcagtggctattggctacatatttgtcaatacttatgacttactgactctgaggatctcataagtgattagatttttt

SEQ ID NO: 77463 - DNA, 495 bp, Glycine max
  unsure (1)..(495): unsure at all n locations
  Clone ID: PAT_MRT3847_40967C.1
ctgagatcgacctcgcatcaagtttaggttatggctgctatcttagctcggaaatcactgcttgctcttcgttcgcgccaattgtgaagaaaatgtgtcttacataaatgccttctgtagatctgcatacccattcaattgatcaactgggttactaatcaaaattgcatagacagaaagatcagcagaccaaatgtttccactcccatatctcttataagatttccatggattcctaaacgacttgcaggattgggaattttctagaaaggataaagcacgaccacaaaaggaaaatgcttcatcttctcgaattacgggatctgtgggtgtggagaaggcatcaaaaggagataccatttcttttgataatgcaagaaattctccaggacagtatgatttatcaagaattaatcatttgcatagtagttntgttcctgaagatgtcctgatgctgcttccgagaaagactgggtacgagtttttaagcagaaa

SEQ ID NO: 77464 - DNA, 932 bp, Glycine max
  Clone ID: PAT_MRT3847_40968C.1
gcataaaatggttagatgataaaccgaaacaatctgttgtttatgtttcttttgggtccgtggtagtactcaacgaagagcaaatagaggaaatagcttatggtttgagtgacagtgaaagttacttcttgtgggtactcagagaagaaactaagcttcccaaagattttgcaaagaagtcagagaagggtttagtaattgggtggtgctcacaactaaaagttttagctcatgaagctatagggtgttttgtaacacattgtggttggaactccacattggaagccttgagtttaggtgttccaatggtcgcaatgccaaattggtctgaccaatgtacaaatgctaagctaattgaagatgtctggaaaatgggaattagagctagagttgatgaaaaaaagattgtgagaggagaagtattgaagtattgcataatggaaataatgaacagtgagaaaggcaaagaggtgaaaagaaatattatgcaatggaaggctttggctgcacgagctgttagtgaggaaggaagttctcataaaaacattgcagaattcgtgaatagcttgttcaatttaaaacagggaattgcaaattatcctgattaaaccaagcagtttgtttgtatactatatatggtgcatctttgtagaaaatgacacctttgtgggtcatgatgaagaagttataatttaaataaacaagtggaataaatttggatgttcacaaactgttatgaatgggaagctacgtgcgcagtctataaggaaagtatgcaacctgctgcatgaagcgaagttagttaggaagtgtcaatgctgttaggattctgttaagaagtttctgttaaagggttctatattctgttaagaaccttgccttataaatagcttgtaataaggtgttcaaaggaatgagaatatacgttactt

SEQ ID NO: 77465 - DNA, 375 bp, Glycine max
  Clone ID: PAT_MRT3847_40969C.1
tttggagagaatgctttctttttttatagcttgatgaatcatttaacaagatctacgcgaaatatacctaataataattaatgctttacaaaatctggatatcaagaatgtatttctaaaaaatttcatttctaaaggtaatctgattctccagaaaacaaaaaaaaaaaccttaagaacacccccctaaacaaaatgacccggaattcaaaatgggtgaatgggggggttctctccaacgtcaaatcacaaaagcacccacattttataatatttttggaagaacattttttattccccggattggtccgccccgaaacaacaaaagggaatccgccttttttaagtttaccacccccccatggggggcaaaaa

SEQ ID NO: 77466 - DNA, 561 bp, Glycine max
  Clone ID: PAT_MRT3847_4096C.1
attaacttaacacgattttcaacatctgatatttttttataatattcttttacttttattttataattattttatacttttattttaaaaaaaagtatttttttttgttttttttaaatatttgaaatgttgattttaatttttataaaattttaatactactatgttattaatccttatatttatatttactaaaaggatgggattttagttcttcgttatgaacaaaaggtagaaattagaattttattaagtttttatagaaaaaagaaaactcacggtctaacattctactgtaaaatatttttacttttgagggaaaaaaatatggggtacttactattttatcacctctatttagcatatggtcgaatagaataaaattaagggtaaataatgaatttagcccttataatttatatttgtttataatttgtttttgcacgattaaaattatttatttagtccacaaatgttaaatgtcatcacaatttggtctaatagttaaaattcatttattttcattaccgaatatagcatatgggggtcatactcattcat

SEQ ID NO: 77467 - DNA, 273 bp, Glycine max
  unsure (1)..(273): unsure at all n locations
  Clone ID: PAT_MRT3847_40970C.1
ttccaaccaccttnatagcnttttccaatggttncttnaagatccganttggtccggagtaaacatggcggcnagtggcagtnccttttncaagaatcactagcttccttcgcaaccaacaaccntgcttcncaaccttctcgntcnttctntcttccnntctgctccttcaattttngtntcaggttcgagntccatggngagttttgaagcanaaggagggaaggggtgtaagnttcnttnttccgcgcgtntgacaggacgacaatgggg

SEQ ID NO: 77468 - DNA, 519 bp, Glycine max
  unsure (1)..(519): unsure at all n locations
  Clone ID: PAT_MRT3847_40971C.1
ccacgcgtccgtccacgcgtccgtagtcatcgtctccagctggtggcttgctcttccccgccagcaccagcacgcagcacgcagccaccacaccacccgtcacgtcactactgctccttcctttgtcctctcctgcctcacgtctcacgccagcagaagcgccaaacaccagcagcggacgaccacgccaactctaggtctacgaggaaggaggggggagggaggagcancgcagcggcagccgatggtgtcgatgagctcgacgccgcaccctctggatccgtccgttccggccgtcgtggggggcggcaaggaggaggaggaggcggtggagtcttgtgccgccgccgcgcccttgccgccggttgggatcgacgacgacgaggagggcccccggagagtgcgcaagccctacaccatcaccaagtcgcgcgagagctggaccgaccccgagcacgacaaggttctcgaggcactgcagctttttgaccgtgactggaaaaagattgaagcatatgt

SEQ ID NO: 77469 - DNA, 476 bp, Glycine max
  Clone ID: PAT_MRT3847_40972C.1
ctcacatctagagctagttctgccttactagtggatgcatcagccatcagacataggttggcttcttcctcactgtccttgtcagataaggaatcgttcagctactctcaagtgctcatgaggcttttctttttggaattgaagaatttcttcttcttatccattggcttttcaaggtcagtacattctgacttgaagtgccctcgtttcgtgcacttatagcagatgattggacttttctctttcttgtgcaaggatcttttgtatgatctattgaacctagaggagttcttatttttccaattttttttatctttctggtgatcagacttagctcattatcttctttattagagtcatcatcgttagattctttttctgaagcatacttaacaacaaaggccttggatgatgtctctttgaacacaaagttgcgttttggtctttgatctacaagggatagcaatttccctttc

SEQ ID NO: 77470 - DNA, 876 bp, Glycine max
  Clone ID: PAT_MRT3847_40973C.1
gaagaagttacctctcattggtatctcaaactaatgccacatttggaggagttttctcatactgcttaccaacaacagaagctggttcttctgggtcattagttatgggtaatgagtcttcagttttcaagaacgctaatcccatcacttacaccagaatgctttcaaatccacagctttccaacttctatattctcaatctcactggcatagatgttggtggtgtggctttgaaggccccattaagctttggcaatggtgggattttgattgattctggcactgtgatcacaagactgccctcatctgtgtacaaggctttgaaggcagagttcttgaaaaagttcacgggtttcccttcagcaccagggttttcaattttggacacttgtttcaatctcactgggtatgatgaagtgagcatacctaccataagtttgcgttttgagggcaatgctcagctaaacgtggatgcaactggcacattctacgttgtgaaagaggatgcttcgcaagtttgcttggcacttgcaagtctttctgatgcatatgacactgctattattgggaattatcagcaaaggaacccaaagggtaatatatgataccaaacagtccaaagtgggatttgctgaggagtcatgcagtttcgcttgaacagggaaatttgatagtataatagacgccattatggaggatgcaattcttcaaaggagacttaagcaacagcgtcagcaagcaaaaccttcctgttctttttcaattttctatttggaccacatatatacgtaactatatttgccatataaagaattactagaataatttgacatttatgaggtttttaacttgataaatcattgtattttaaactat

SEQ ID NO: 77471 - DNA, 359 bp, Glycine max
  Clone ID: PAT_MRT3847_40974C.1
atgccatgcccggccggaataatggcccggctcgacgagcatactaggtcgggggccgcccttttttttttttttttgagccactgtacatttatcactataacgaaatgcctaagcattctaaactggtacaccaaatgatccttgacaggtacgaccttacccagacactacctaaccaatcaccaacaggtgcggtgcttggcgtacacggctaaacattgcagacagccgcattaacaaagttgcaagctgaatacactggaacccgtagttacaacggcagagctcggcttccatatgcaacttaccgatgcattcctgtgtccatccctcaaggagagcagtcgaccagtcga

SEQ ID NO: 77472 - DNA, 133 bp, Glycine max
  Clone ID: PAT_MRT3847_40975C.1
ctatcaatcgatcaaatgggccttagaacacggtgggctagtttctgatgaagatgatccatacagacctcaataggatagacgcaacgcctctatgatacgggtcgaagggccgatcgagggggttgaaagc

SEQ ID NO: 77473 - DNA, 345 bp, Glycine max
  Clone ID: PAT_MRT3847_40976C.1
ctgagacaatggaatgaaacctcttctggcctctttgctaattctctctcactacatccatcctcggaaagacagtaacaacctttgcacctacgatcatggattaacaacgttgtaccactatggactggttgagacacctttccttcagatactgcttcagctccatcacgagcacgcccatgattgacttccctgtcccggttcataacctcgaccgctacggctcgtaatgcggtcctggggcccactcaggccaatgataagcccacagagtgtggcgctgggctcctgctgggccaagagccaactgtgaacgggctagacactgcattctacgacgtc

SEQ ID NO: 77474 - DNA, 334 bp, Glycine max
  Clone ID: PAT_MRT3847_40977C.1
cagcaagattatctatgtaggctttaaagactgatccaagatgtatctcgatggcttttaagtatagttgcgggctactgatcctactgctattggtcttgttgtgttcataagctcttccagctgaaacgattatcgaaaatttatttgttttctgtttgagagctaaacttcttatgccttatttactcatggtaaatattctatatagtgtatatggtcaacattgccagttttgttcccacactctcaattttacaaaatgaggcattaattatatttgacctttcttcattgtataatttttattgaacatacactgggccgcctgcta

SEQ ID NO: 77475 - DNA, 440 bp, Glycine max
  Clone ID: PAT_MRT3847_40978C.1
ttcacgcgtacgcccacgcgtccgcggacgaattgttgctaactgtagtttccaaatctatgggtgccgactatgcataggctcggatacaaacatgtctcgtgctaacctgtggcaaacctgctaatcttcagcgtccaaaatgcgaggcatagaagcttcctatagaaggccctgcctatcgatctgaggatggattcatggctctatggctcttggacatataagggcgtctgctggcatggctataccaacctggcgcacaaaattcagactaacttgatgaatgttggacatatcggatgaagagagagcaggatcggacgccaaagcatcctcactgtgattggacaggaccaccgcactcatatacactttatagtaaacggattgtcccagagcataccgatacaacctgattgtgctggtgatggaacacc

SEQ ID NO: 77476 - DNA, 134 bp, Glycine max
  Clone ID: PAT_MRT3847_40979C.1
ccttgcttgttcccgccattactttctattgttttctgagcctaattgcgtcaaagccccccctggaatccagtttcttgggcccctttggagattgtaacttcaaagctttagggaaaatgattacttttttt

SEQ ID NO: 77477 - DNA, 371 bp, Glycine max
  Clone ID: PAT_MRT3847_4097C.1
ctcgagtcctaatcgcctcgatatccgataaaatgtccttttaatcctcaaaagcacaaacccctactgagtttctttcaaacttacagaggctcaatctcattccctctaaactaataatcaccattcttctccaccaaatcccacactatatcatcttacaatcactctcttcttcaaatacctctccaattcctgtaatttccatttaatctgaattctcaacttctcttctattcttattcctttttcgattttcctaaatacttctcctcaatcctttcactccctgtcaattctctttccttctcataaacattccattcaccttttcattaatatattcataaattattcaataccttaacaac

SEQ ID NO: 77478 - DNA, 533 bp, Glycine max
  Clone ID: PAT_MRT3847_40980C.1
tcgttcgcgtgggcttagtcaacaccaaaaaccaaactgaaactggaacaatagagcatctttcctagttttgtctcaaatcaaacaactctgacggaggatactgctattgctccgcctgaatctccatggctgatccacagccgctgcttctcaacgattccgagccaactcaatttcaaaacacccgaatcgcctcccttgacgtctttcgcggcctctctgtttttcttatgatatttggggattatgctgcttccatcttccccatcattgctcatgccccctggaatgggattcacttggctgatttcgtcatgcctttttttcttttcattgctggaatttctcttgccctcgtttataagagaaggcctcatagaacccaagctacatggaaagcttttgctagagctctcaacctctttgctcttggtattcttcttcaaggtggctattttcacggagttacttccttgacttttggtgttgacattcaaagaattcggtggctgggcatcttacagaggata

SEQ ID NO: 77479 - DNA, 286 bp, Glycine max
  Clone ID: PAT_MRT3847_40981C.1
tcatacgaaagctcccaaaccgactaaatcgctcatgttttttcatctgaacaatagtaacttggacgcctacttataatcgcctgcagacctctaacactctctcttctatactcccaaatacttaccctctaaaaattactctcttacaaaactactccgcatattacctcaccaatatcaaccaactctaatacttcaccttcacctacactaaagtatactgcactctcctcattcagatctcaccacacatattcacaacattaaaatatctctattaatt

SEQ ID NO: 77480 - DNA, 884 bp, Glycine max
  Clone ID: PAT_MRT3847_40982C.1
cccacgcgtccgcaaaaaccaaactgaaactggaacaatagagcatctttcctagttttgtctcaaatcaaacaactctgacggaggatactgctattgctccgcctgaatctccatggctgatccacagccgctgcttctcaacgattccgagccaactcaatttcaaaacacccgaatcgcctcccttgacgtctttcgcggcctctctgtttttgtaattaactagctcttttctttctttctttctttgctttctacccaataaattctatttcttcctttcttgaatttctttcagcttatgatatttgtggattatgctgcttccatcttccccatcattgctcatgccccctggaatgggattcacttggctgatttcgtcatgcctttttttcttttcattgctggaatttctcttgccctcgtttataaggcctcatagaacccaagctacatggaaagcttttgctagagctctcaacctctttgctcttggtattcttcttcaaggtggctattttcacggagttacttccttgacttttggtgttgacattcaaagaattcggtggctgggcattttacagaggatatctattggatacattgttgcagctttatgcgagatctggcttccagctccacgatggaaagaattaggtttcgtcaaaagttactactggcaatggtttgttgcagtaatattgttggcactttactctggattactgtatggtctatatgttccagattggcagtttgatgtatcagccccgacctcttcattgcctcctattggtggtggtgatatttacatggtgaattgttcagtgagaggtgatcttggacctgcctgtaattctgctggaatgattgat

SEQ ID NO: 77481 - DNA, 1736 bp, Glycine max
  Clone ID: PAT_MRT3847_40983C.1
gcggtgtcctctccctccctcttggaccagaaccattataatgcgttccatttcttccacaattccagagttcgttcttccgcatttcttctctggccatgaccatcgatactgatttcttgaccaagaagaagaagcaagtttcggtgcaacttccgagtttgacatcacctgtctccactgtgaggttctgcgatctcaattttggccgcttgcaaccttcggatgacgaattggatcctcacaatagatttgagtttggcaatttcgttgcacgacaagccctgcttcacgaagagtattggacagcagcgtggctaagggcagaagagtgggcaagtcgaacagataaacttgatgaagattcaagaaaatgagagtgacactatttagaaatatggtttaattggatcaaccgattgtgtcatatatactccatcactcgccaccatcacattcgtgcttccgtttctcaccactcatcaaattgtacactatgagtcttgatcactgaataaacgtgagtcttgtagccgaggctgagagtgctttgatattggttcgtcatggggagtctttgtggaatgagaagaacttgttctcgggatgttgcagtgtacctttgaccaacagaggtgtagaggaagctattgaagctggtcagaggattagctatatacccattgatatgatctttacgtccgcactcattcgtgcacagatgaccgctctgcttgcaatgactcggcactcccagaagaaggttcctattatcatccatgatgagagtgaacaggcaacaacttggactcaagtttacagtgaaaaaaccaccaagcaatctattccagttattacagcttggcagttgaatgaaagaatgtatggggagttacagggtcttaataagcaggagactgcagaaagatacggaaaggagaaggtgcatgaatggtgtcggagttttgacattcctcttcccaaggctttatattggattttctatgacactgatatcttgctggggattgaaacatatgaaatttctacgggagttgatactgaaaagcatgtgttgtagattgagcctccactaaaatcaggaaagcacgtgatggttgctgctcatggaaactcattgaggtctattataatgtatcgggacagattaacttctcaagaggtcactagtttagagttatcaactgggataccattgctttacatatataaagacgaaaagtttaacagtagaggaagtcctgtggggcctacagaagctggtgtttatgcatacactcagaatttagctatttacagacaacagttggatgaaacgtctaattgttattgatcttgcatttcaaggatcaaaatggcataattctcgatattcattcttggtggatgactctcaggatactcatatgctaaacgtcaatttgaaaattattggaaggaattgaccaatccatgatagttttaaatctgcaaactggatggcgagagcgagacgtaaaagccctgaaaattttatgtactgtagctacccgagtagtcccaaaacaattttggttagagagaatgaaaaacaggattagtaaatggcaatgttagtctagaacttgtttgtgcctgaatggaagtgaacttatagctatagctgccatttttggaacttatatagggaattgaatttacggtaaatgaatgaaaacaatgaattgaagtaaaaa

SEQ ID NO: 77482 - DNA, 789 bp, Glycine max
  unsure (1)..(789): unsure at all n locations
  Clone ID: PAT_MRT3847_40984C.1
gcagtttcttgtcttctctccattgaccatgtctgctactttcaaataccaacctacgggacttcacggtccgggcgcgccgagatcttcttctagaaatctcgcaaggttcttctcaatgcgattcgcgtgcaactctcgccaccataaaatattgcatgcttccgtttctcacccttcatcactctccatttctcacgactcatctaccgagactgagagtactttgatattgattcgtcatggggagtctttgtggaatgagaagaacttgttcacgggatgttgcgatgtgcctttgaccaagagaggtgtagaggaagctattgaagctggtaagaggattagctatataccggttgatatgatctttacgtccgcactgattcgagcacagatgacggctatgcttgcaatgactcagcaccaccaggagaaggttcctattatcatccataatgagagtgaacgggcaacagcttggactcaagtttacagtgaaaaaaccaccaagcaatctattccagttattacagcttggcagttgaatgaacgaatgtatggggagttacagggtcttaataagcaggagactgcagaaagatacgggaaggagaaggtgcatgaatggcgtcggagttttgacattcctcctcccaagggcgagagcctggaaatgtgttcacagagagctgttgcatattttaaggattttattgaacctcaactaanatcaggaaagcacgtgatgggtgctgctcatgggaactcattgagggctattataat

SEQ ID NO: 77483 - DNA, 248 bp, Glycine max
  Clone ID: PAT_MRT3847_40985C.1
caacacaaaagggaatttattgctatcatttaacacaaaacttcattcttcttttctataacaccctccaaataatttcatattattttaacaattactttcataccttccaacccactctctttctatattcttacaacattactactaaattcactctttttctttcgttacatcaatatttaaatcaaattgttttttcagacacatcttgccaaatcctaaattcaaacatattccctatttac

SEQ ID NO: 77484 - DNA, 329 bp, Glycine max
  Clone ID: PAT_MRT3847_40986C.1
cccttgattcgggccacttaatgtttgaaagacattgggtgattacaaatgtggaagagctcttccctcgcgaatatcaactgcggaagccaaatttttggtcattggagtgcgatttctcaaacctatcaacgggggtggctaaaaaatactacctcactggcgccgaagataaaaccaggaattattataacaaaactttacgagcgcagccatcagatggtcctagcatttgctcatgaaccgcaagcttggcaaaatcttcacagctgatcactgcgaggttcaatgcacgttccttaagagtacaaccctctttgggggctgtc

SEQ ID NO: 77485 - DNA, 583 bp, Glycine max
  Clone ID: PAT_MRT3847_40987C.1
gttggaggtacatcaagaggctgtctatctacccaattaagagcatccttcgtaaagtgacttcaaacttcaggttcaaatctgaaggccacagaaatggacttcttagtctttataaggacatggagtcttgtggggaatatgcagatatccaagtcatgtggaaaatgattgaatcttcctcacctcaatatgcttgctgccacaagaaaaggatcaataggtcttcatattgggtggtctgtttcaggccaacatgaactgttttttgagtggtcagtttctcttggtgggatgagttcacatgttttaagtatgataggtgggtgtataagagaagggaaatcaaaattttcctcatgtcagttccatttcttcagcctctataccttccatcacatcattaccaaaggaagtcaaagtgaatgatcaaagtctatatttgaatctcttgtagaagccagtatctgctgagtttagtctatattttgggtctgggtctagattttgttttctagcatacaagttcaaatgaactttattttgcaaacttaagttttaaaaacaaacctaatgttgtttt

SEQ ID NO: 77486 - DNA, 166 bp, Glycine max
  Clone ID: PAT_MRT3847_40988C.1
gactctcaaggagcatgtgatcaagccggtgatcccggagaagtaccttgatgagaagaccatttttcacttggacccctatggccgttatgtaataggaggtcctgacggagatgctggtctaacggtgcggaggatcatcatcgatacttacatgggatggtgt

SEQ ID NO: 77487 - DNA, 366 bp, Glycine max
  Clone ID: PAT_MRT3847_40989C.1
ttttatctatggcctataccacagccctatgtttctaaaacttgcaagctgcacgcatatatatggagatgaagggattatatgtgcacctaaacccaacaccaacaattaatcataatcttaataaccagatccaccttgcctaccagcctaagaacacgcatataaacaaccattccaaacagtggtggtggtggtggaaaccacaacaacaaaggtcagaatcagaaccaaaaccaacaaccaccgtaactacaacaacctacgaaccctttcttgctccctaacccgcaacactatcaacagcaggagcaacaacaacaacaacaacccatctctcaacatttcagtcgactccagtgagct

SEQ ID NO: 77488 - DNA, 285 bp, Glycine max
  Clone ID: PAT_MRT3847_4098C.1
ggggatgcaaaagggatgataaagggctgtgaagagcgatcgacagggattcgatagaagggactcgcattgagacaatggctgcacctgtactgcagacgtgacacagaagtattacatcactggagtcacgccatcataacgatgactggactccccacgcatgtcctacgtatattggaccttcgcttgtcatgtccttcgatccgtctgcgtcgtgagatggccaacgtcatcagcttggcgcacaccaaggtcatcatgacctcccattaggtcctcctc

SEQ ID NO: 77489 - DNA, 523 bp, Glycine max
  Clone ID: PAT_MRT3847_40990C.1
ccagttggaggccacttactcggtggtatgatagttagtattttggaaacaagtttataggttgatagggcaactaaagtggatgttgccagtgttttgttagggaggcactagtttcctaagtttttggatgatatcacgtaattttcgtgtatatctaaataagtatttttacatgtatcgtatcttatatatatattttaaaataattgaaccacggtaaccaccctattggatgcgtatcgtatttgtgcatcaacatgtaacatatgcataagcttgagggagaatattaaagatatgaaggttgttgttagtagtgggcctaggctagggtttgggcttgtactggtagttctaaaactcggtctttttaatggtataaataggtgcatttgtatttgtgcgtgacatcttattatcaatctcaaaatacattgtttgccatgatttgttcttacctcttttcctcgtcttaaccctaaaggttcagcaaagatgaaatgttatgcgcatgatagga

SEQ ID NO: 77490 - DNA, 316 bp, Glycine max
  Clone ID: PAT_MRT3847_40991C.1
ggtgaaggccttgacccgttcccaacccattcccggtcagaaccttacccttcactggactggttttcggaaaaaccgggaactttcttaaaaattctgtggcccccaaggatcctgcccggaaccttttccttttcaaatacggccaaggtctcttttcacaaggacggaataaagggtggctgggatgtccaattaggaacctctctttttccgtggccttccgaattatgcttttggcgctggcggtttccctttttgggggaatccacccaacctttctttggaatttgaaatctaaattttgaaggcacaa

SEQ ID NO: 77491 - DNA, 285 bp, Glycine max
  Clone ID: PAT_MRT3847_40992C.1
ctgaattgtattgaaagaaatttcatgctgcatcttatattcttaaaattgttcaaattttaagaatataagatgcagcctgaattatattgaaaataatttgaacaattttaagaatataagatgcagcctgaattgtattgaaaaaattgttcaaattttactattggttttggttttaatagccattgtcttcatagttatagtgaatatattactagcctatgtcaaaaagtagctattaccaccaaaacagccaaatgtggcgttcactgtgtctgattt

SEQ ID NO: 77492 - DNA, 531 bp, Glycine max
  Clone ID: PAT_MRT3847_40993C.1
ggctcgagacagaacttggtcaatggtgcggatgcatgtgttcaaatttggacctgtctctgataacataacggctcgtactccacctttgaagtggaacaatgttgggggcatataccctaattactatgtgcaatgcctctagttctggacgacccacaacgctgccctgaccctaaaggtcatagcgctattagcacagcgcgagcacttgggctcatattctggcacataacaattcctatgcactcaagaaaaccgttgatgtttctcgatcgtaggatactacaacgaatcatccctacctagcatcaggtgcgcatgtgggtgtgatgtcactgggtagtgctggtctagggcttctccgtagtctcttacagcacattttcgtcttgagtcgattgctgacaggaacgttcatgcacgtgcatgggccaggatctagcacttgcacggttcgtgcatgctcttttgggcgacatttgctccgaatggataactggcacttaagtgctgcacacagggattgat

SEQ ID NO: 77493 - DNA, 280 bp, Glycine max
  Clone ID: PAT_MRT3847_40994C.1
ctcggaatctggctcgtgggctatagctctaaccgcaacttttcagctctttcttcttgcgagaggatgaataggaaccacaagaatgccttatgggatccaacctctcttgtagggcatgactcatgggagacaccggcctgacctcagacgctctttgatgacaccattgtgtaaataaaataactccctcggcgagggggggggcgcatctaccactatcttttaaccaaataaaggcagtttcctgatatgctttccaccttaccaagacgggata

SEQ ID NO: 77494 - DNA, 894 bp, Glycine max
  Clone ID: PAT_MRT3847_40995C.1
acaggctcgacctcaaaaacataattaagcattaacattccacaccttttcacacacacacaaaaaaaacaaccctctaaaatctaagcctcaaagagtgctaaactttgttacaatgaacatgttaggccttagagacctagttttcatagctccaactccttctcaacttcaccaccatcaacaacaccaacccatttcagcagaacaccattcaaacctccctttgccttcacaagcctctctcagtgttggtcttggcattttccctctcctaacagtgccacacaccaatgatgttcaagttcaggttcaagactgtgccaacaacaacaacaacaccaacaccaactattggaacctgaagatgtgtggtgccactgaagtgaattccacaagaaaaggtgttatgaacatggaggatgagggaagcaataagcaaatgatggagagtgaggaaggtgggggtgagtttagggtgtgccaggattgtggcaatagagccaagagagattgcagcttcagaaggtgcaggacttgctgcaagggacgtggctttgattgcagcactcacgtgaagagcacgtgggtccccgcgtctatgagacggggtggtggtggtgatagtagtggtggtgatggcaacagcgatgctggtgcttctaagaggctaagaactttggggtcatcaaagaatgttgctgctagtgctacctctcatagttccacttccaatgctaccccaacaaagagctttgataccagttcttgtcaacaagatgctggtttcaaacagtctttgccacggcacgtgcgtgcacctgcggtttttaggtgccatagagtgtctgctattgggagtggtgaagatgagattgtttacatggccacagt

SEQ ID NO: 77495 - DNA, 238 bp, Glycine max
  Clone ID: PAT_MRT3847_40996C.1
ttataattaacataaataatatatatatatatatatatatatatatatatatatatatatatatatatatttattaatttcactcctgctttttttttccctgtcttcacctctcttctagactttaatttgataaaccttggaggtgtgcgtgtttgtgtatgattagaaatttgatgacttgtgaagcactcaagcttaataatgtgtgtcgtgtaaatgaacaatgttttcagtc

SEQ ID NO: 77496 - DNA, 235 bp, Glycine max
  Clone ID: PAT_MRT3847_40997C.1
gaattccggtccgaccacacccgtccaaaaggcaactccaggttggtcggcattcctgtaagcggaagagcaggcggttcctggcccgggggttccttcggttaggcctgggcacaggcccctccggcaaggcggttcctgccccggcggcgatgggggtaaggccttcccacaagcggttggtggcccactccaccaccccgcggaacgatggtcctttcaaaaagaacaaccc

SEQ ID NO: 77497 - DNA, 502 bp, Glycine max
  Clone ID: PAT_MRT3847_40998C.1
taagctaggaattcggctcgagtacggctgcgagaagacgacagaagggccggctgtacttgaaggatacaacgatgcagattggaacactctttcagatgattccaaagcaaccaacggctatatatttagcatagctggtggggctgtttcttggaagtcaaagaaacagactatcttagctcagtccactatggaatctgagatgatagcactagcaactgctagtgaagaagcatgttggctgagaagcttacttgcagagattcctttatgggaaagaccgatactagttgtgttgatccattgtgatagcaccggggctattgcaaaaattgagaaccattattacaatggtaagaaacgacagatacgtcgtaagcacaacactgttagagaattactctcaataggagctgttagagtggatcacgtacgcactgatgataaattagcagatcctttgacgaaaggattagctagagagacagtccataacact

SEQ ID NO: 77498 - DNA, 502 bp, Glycine max
  Clone ID: PAT_MRT3847_40999C.1
tgaatgctcgaacatactacttgataaggactttgctattccgtttgctacacactttaattaattatacaagactgttactggtgctattgtgaatattgcggaaaaaccatgcgaacgcgtcattactgatggacagcctgatgagcatgggttcaaactggggtctgagaaccttacaacagaggcattggcacaaaagtctggctcactatgaatgacttctggtattgaacgattgtgactgttgaagacaacccacctcggttgtgataatcacctaagagacagcctcgcatcaatagctgatccctgagaatggatgttgattacacaatgctgcagcttgtggatgcatggtgatcaatcatagcatagagcttgtcatagaccagtctacttaacagacgagtatcaagaagtgaagaaagaactcgttgacatcttatccgtcccaccatatggatgagtatattagaccagtatgacaccacacactcta

SEQ ID NO: 77499 - DNA, 249 bp, Glycine max
  Clone ID: PAT_MRT3847_4099C.1
tcctctatagcggacgccctggggttttctgacatgaacaagtacaaccttattggtgatcttcctaagaagtcttggcccatgaaactgattcagatgaagcagataatggcttgttcttacactaagggactcatgggcccacctgataactctattaagcaaaggtgtttgctcatacaagttatgccccagaacccctgcaaggctcaaaattgtaacgtacaaggggtctttttggggggagag

SEQ ID NO: 77500 - DNA, 923 bp, Glycine max
  Clone ID: PAT_MRT3847_409C.1
cgacagaagggggaccatatacaatcttagtcttcttcttcttcgtgcgtcaacccgccatggatcatgtcatcaattggatttcccttgcgtcttctctgtcagagttccaacccactatcgatcggatcgtcaatgggattgtgtcccagacaagttgtttagcgacaaagattaatctaatagttgaaaaattcactgggcataaatttagcggtatgagtaacactagtgttgaaaattacgcccttctcattgattggggttcaagctttcttcacagtcttcaacacaccaaggatcttgttatcaacaggggttcaagctttcttcacaatcttcaacacaccatgaatcctgtcgtcaatgagttggtgtccctgataagaagtttagtgacaaagattaatggagatttgttgttgcgtgttgctggtgctgttggtgtagcagtggcaactattgttgttgtccggttgctttggacgatgatttctgctgttggttggttgctttggacagtgatttctcctgttgttaggtttctttggaaggtgatttctcctgttgtttcattgccttggaaggtgatttctggtggtgttaggttgctttggaaggtgattaaggcgattttcggtggtggtaaaggagggaagacaatgaaggctccagggagaaactatcgcatgttcagaaaagactttgaacttaaccctgcaaattacttccgtaacttgcgcaagtagacaagcagatcaagtactatttattacttattacttagggcattactatgtctattttatttgatgagattaaggtgtagttcggttatgaatttagcccaatttgtatgtttcaaaacatgttgccaacatgaacaaccccttgaagtaacacgaagtagctagttttcccgt

SEQ ID NO: 77501 - DNA, 313 bp, Glycine max
  Clone ID: PAT_MRT3847_40C.1
cgacggggaaacttggtttccttgcgcgaagctttggcattcccccaatcgcttcatcctcatttacttaaccctaaccccacacttttacatactgggtatgttaaaccggcggcacgaagatggttaaaatttggaaccccgatgggctggagcgagggagcgttgaaaacccccttggcacaacaggcttggaccttaaacgggttattccaacccaattgggaattccgggttacaaacaaacccttttcaccaaccagaaccttcttttgggcaaattccttgaagagattcttcgattcaccgacat

SEQ ID NO: 77502 - DNA, 749 bp, Glycine max
  Clone ID: PAT_MRT3847_41000C.1
ctcctggaatagatcaggcagaatcttattcagatgtggccaagaaggatggaagcatttctaaaaatctgataccctctttgaaagaaaaagttcctgtcataaagcggaatcattctatcagtactgttaagactgcaaccacagctggagcaaaaggtgatggcttggattcagtatctaatgcacagaacaagttgcagacttctgtgcggagtactgctaagattgaactcccagttgttgaacctccatctgatttaaagagaactatagagaagatagttgagttcatcttaaaaaatggaaaacaatttgaggctgttcttgcagaacaggatcgacctcatggaaggttcccgtttcttctgccatctaatcgataccatacttactatctgaaagttcttcaaactgctgaagagtctaagttactaggcaagggccaccagaagcacaatccagcaggtcgtacaggggacaataatactgctgtacatgaagatagagacaatctttcacatggatctatggcttctgatctaccatatgacatggaccgaaaagaaaagttccagatgattattggcagtctaagaaggatggtcaagatccaattccaaaagagcaagctcaaaacacaattagcatggatgcagcagcaactgcagctattcttcaggctgccactaggggtattaaaaaccccaatttggaagctcttaccaagacaatcagtggtagtggtc

SEQ ID NO: 77503 - DNA, 141 bp, Glycine max
  Clone ID: PAT_MRT3847_41001C.1
ggctcgagcttaccagttgacgtcttgctaaccaaagcctcctggaccgcacgcccgaaggcacgcatgcaggggcagcatttgcaacggcccaacgccgtcgaaaacgacggagccccttgccatgcccggaaggcatgg

SEQ ID NO: 77504 - DNA, 216 bp, Glycine max
  Clone ID: PAT_MRT3847_41002C.1
ctcgagccgcgctacccaaccataacggaatctcgactccgagagcgcacacctctaacaggtccaaggtgcagcggagtcagcttgttgttatggggcgcatcatgggaaggggtaataagaccaaggtatgaaggtggatggacgaacgttcaagctggatgctccagcgggagcaaacgacgtcgtagaggactactccggtcacgttttggt

SEQ ID NO: 77505 - DNA, 381 bp, Glycine max
  Clone ID: PAT_MRT3847_41003C.1
cccttggtaacacccccctatacgacataggaccgggggggatatttaaactttttctgcctttttccccaccctctgcttaattacaagttcaagctggtgaaatcttggattagtgctcccactctcctatctggtataggactccgcgggtagacttttctatttctggcctttctttcactctcttcttctcactgatccgcattgccgaccaaagtggtcttacttgaaaaacacttgggcgttggtgcaaatgttggccccgttactaaccccggggacaacaggctcactgagaaaacaacttctacttgcagaagatcggacatcctggttggtgattatacaacagcagcccaatttagaaagacccccacc

SEQ ID NO: 77506 - DNA, 573 bp, Glycine max
  unsure (1)..(573): unsure at all n locations
  Clone ID: PAT_MRT3847_41004C.1
gatcactgctaatgntagtgttcacaatactctctgcttgcttcatttttcgtgatcccatgatattctgcacaatggaatgtgatttgaggtggtgcagaggaagagaatggagggatatcttggcaatttcggagacagcagcatctcggacgctctgaacatcactggccaagtggtcgtaagccgcatgaaaagcatcactccaaaaacgaggtaagccacttcccctgccactcttgctttgagtatacacatcccacatgcgcctcaccactttctccctctcctccacttccaggacatcgaaatcgttgagagtggcagaatcgaagtcacggttgaggttcccagctgaccatttgagagtgagagaagcagtgaacatggaccaaagagcaagaagaatgatagcacccaacacccacaacttgtactgtcccttacctgcactttggggtgtgccatcttcatctttcatcttcccttcaataatagagtgagtgcgtttgctttggtcactactcaccactctccaccccccttctgtcgtcttctcccgtacgcacgctc

SEQ ID NO: 77507 - DNA, 749 bp, Glycine max
  Clone ID: PAT_MRT3847_41005C.1
tttcgggccggaattcccgggtcgacccacgcgtccgccaccaccatttctctacggctgcgagaagacgacagaaggggacacgttaacatatccaacccatttcatcgctcttcacataaacttcaagcgagcaaacaaacaactagcaagggaagaaagaaactacagaaaagaaatggcttccacttctgcagtttcaatggctatgccagtaacttatgctagccagaagagggtggtgcctagctcggatgcattcttcaagccactgcctctacggtcttccaaggcagtgacagcatcaaaactcaatggaaggtttcaagtgagggcctccatgaaggagaaagttgtgacggggctcaccgcagctgcattgacagcttcaatgatggttcctgatgtggctgaggctgccgttacaccttctctcaagaacttcttgctcagcatcgcggcaggtggagttgttgttgttgccattattggtgctgtgatcggtgtttccaatttcgatcccgtcaagcgtagctgatggagttctgaggcactgtgttttatttatttttttgttacctcttatcatgatatgtatctttaatgtaatgttcttcagaaatgaagtgaaccctctgattgtgtactaatatgtgactcttatgctccacttgagcagaagcttttcaatgcttaaaattgtaatttttgttttgacccattatagaaatagttaattacgtgtttta

SEQ ID NO: 77508 - DNA, 462 bp, Glycine max
  Clone ID: PAT_MRT3847_41006C.1
ggttccatgcttagaatagatttcaatatcctgtttttgtttgccttggacaaattaggccaccctagtgaacgttttttgtgtgtatataacaatctagccatttgtgaattgcggttttaaaagtagaaattagaaggttaaacacttaaaccagtttggttttagctttgaaacgctttgaagtaacaagtgcatttttctatctttgaaaaatttaatcatcaacatgatactccttattttaaagcgtgtaacacatgttatttagatatctaatcaaaatcttttcaataatattattcatattattagatatttttttctctttatcaaattattcatcttatctcattttttttcccactgttcctatttctcctggaacggcggaaccacaagcaaaagagaatgtaatttccatgtgttacactttgcggattaatccatctgtttgtatat

SEQ ID NO: 77509 - DNA, 291 bp, Glycine max
  Clone ID: PAT_MRT3847_41007C.1
gttacatcctatttgatacttttttttttgggtaaaaaggccaatactcggaacagaacttttttaaggtgaaaataaaaacggggaattcacgcgtcccaaatatggaagctctttttatgcacaggtttttgattggtgggacaataacaacaggccaattccctggcactttaaaattgacgaatttcttttcctccccgtctgaatctgggtggccttgggctcacttcaaatcgtgccgaatttgcccgatgaaaattaaaaaaaaatttggacccttgcgttgaa

SEQ ID NO: 77510 - DNA, 280 bp, Glycine max
  unsure (1)..(280): unsure at all n locations
  Clone ID: PAT_MRT3847_41008C.1
tggtatggngaagaaaacacaaccagcgcgcaggggtatgtaaaaccctaccgggggggccacaaaccgaaaagcacgccagctggccataacatcaccaccactgagggaagagacaaaactagcgcaacaacgcaatctagaaagggagcagaccgcgaccggcacaagagaaaccccaagcagacgcctaatgcaccgcgggcggcacctgaggacaaggcgagaacaaggtcacaaccccaccatgaaacgcggaacaacccggaaaagcaagaag

SEQ ID NO: 77511 - DNA, 492 bp, Glycine max
  unsure (1)..(492): unsure at all n locations
  Clone ID: PAT_MRT3847_41009C.1
ctcgagccgcaggtcaagggtataatgcanattatggcactgctgatgttggattgctggaatccttaccctggcatttatggcatgaatccaggttatgaattttgggcccaacattgtgcctcggactctggttccatcgttcacatctgcagaagagcatggttgaaaattgtaatccccggatttggcttctctgaagtgagaaggtgcattttagaggataaagtgcaattactatcattgattagaaaatcaatggttgaaaattgtgataaaatcaaatacatatttaacaaaatcatttttttaactcatatttaaaaaaatctaaaattaattataatctcaattgttaattttctaattaatgtctttattacactttatattctaaaacgcacaatcctcacttaagaggagccaaatccaaggttcacatacacatcaactctggctgtccgaagagcaggggcgtacaagcttaccaaa

SEQ ID NO: 77512 - DNA, 423 bp, Glycine max
  Clone ID: PAT_MRT3847_4100C.1
cgctaattcatagaacttgcacggttgacatagacctctctttgtttcccttaccttggtctgcatctctcgcaactctggacctcaccgagtcatgcgcgcgctgatacagcaacctccgaacactgaatagggattcgcatggtatgacgagcgcttcggagctatttcactccagaaggcatagatggggacgaaacgctctagagctaaggctcgacaccgaactcaacggcaccgattttcatacagggccactaccaacttcgccgtctacgtcaccatacggagcgtgcatatgatagaatagatgggaggtatcatgggactgtcacaagcgagagcgttgattatgaagaaaatgtgagaagtagtcttataggaagtgacagtgacagactacccgtgggtgaggttcttgca

SEQ ID NO: 77513 - DNA, 4275 bp, Glycine max
  Clone ID: PAT_MRT3847_41010C.1
ggctcgagccgcaacttctcaaattcatgactttgtcttgttcctagccaaagaagcaatgacagctcatgatatatcttctgatggagatggaataagccaaaagatgaaggagttctctgttacttttaataaagttacatgcaatgaagcaagtttgctgcagttcgttcttgacctgtctaatgttctagccaaagcaagtgaatttagatttaatatccttggttataagggtagagaagctgaaactaatagtcctgattgcatagataagattgctctgccagaaaataagttagttcaagacaattcacccacggggccgtttcaaaatggtcgttcacatattcttaatccctgttctgatcctgagattcctgatgatggaaatttggccccaggctatgaatcaaatgccacgtcacagaagttctcaatggaggactttgaagaattgaaattagagaaagagaaggcagttgttgatctgtcaaagtgtgttgaaaatcttgaaatgacaaagtctcgattactagagacagagcaacatctagctgaagttaaatcacaattggcttctgctcaaagatcaaacagcctggctgagacgcaactaaaatgtatgacagaatcatacaggtcaattgaagcacgcacaaaggagtttgaaactgagcttaatcatctgcgaatgaagacagaaactctggagaatgaacttgaagatgaaaagagggctcatgaagaagctttggctaagtacaaggagctagaagaacaactacaaaggaatgagagctcagctgctgataatgacattaagactaagcaggagagagacttggaagctgctgctgaaaagttagctgagtgtcaggaaaccatatttcttcttggcaagcagttaaaatcgatgcatcctcaaacagagccaacggggcctccttattcaaaggctgaaggcttcgcagagcgtgaacctaatagcccaaattttcaggatcaagcagagatggacagtgctagttctgcatttgtgcaaagactgggtggagagtcccccttacatttttctaacagtttatacagtccatcagataatgagtcaaactttccagccatatcttctgtacagaatccaaaccacaggcctacaaagtcaacctcttcgtcagcttcttccactcctacaccggagaaacacaaccgaggtttcagtagattcttttcatcaaaaggaaaaaacggtcattgagcatgcatgaccgatgggaattcttgacttaagggaccacacagcaatggcatttggaaagcatcaaggttcaatccgcttcatgatttaacagaattgagtttttaggaggtttgtgtagttaaaggacaggatgccatgaatatcgggtgattcttgtatctaatggttgtacatggtaaacatgtcttttcttcttttcctttccattgttttgttctctgttctgtaatttaattagcaaacattgacatagcctctgaactattacaggatatgttgaatattgttgtatttcacaaatttatgcagcataccttgattctttaccaaagacaacttaaaataaaaaaaaaaaaaaagggcggcgctcgcgaactagacccacgcgtacgacggcgagaagacgacagaaggggacaaaaccgaacccaggcacaaaatccatttcactcttcataaatagagaaagagaaagaaaggggaaaacactgttttcactgaccaattatcttcgtctctctctcgattcttccaaacggtgcttcgatcggaaaccctaactttcacttacgtccgtcaatggagcttcgttctcgtcgacgcctctccaatccttcagtttccgggaaggagcaaccacctggggatgatgctgttggggaagatgaaactactactggcaagggcagtaacaataaagataaaggtgttgctgttatatcatcaaattcagatatagtttctggtcctgattcagattctgattacgaagatgaagaatttggtgttggctccttacctgacttgaatcaagatccttcaagcattagtttttctagtggagaagattatgcttccgattcatctgatggtggcaagtctttgtacaaaaggggaaaggcgctgctgtccagagggaaaagaaaaagtttcaacactgaatatggggaaccgagtgacgtggttagagtagcggagtacaaagatgatgatgctcaatttgcaatctttcaggaactatcagttccgtctgtttctaagggtactaagaggaggaaatattcaagaaaaggaagaaaaggagattcaaagtctgtgttgttgtggaatgcgtgggaagaggagcaagagaaatggattgataggcatatgttagaagatgttgacttggataatcatagtgaggtaatgaatgaaactgctgacataccctctgatctgacaatgcctttacttagatatcaaaaggaatggttagcctgggctttgaaacaggaaagttctgcaagtaaaggtggaatacttgcagatgaaatgggaatggggaagactgttcaagcaattgctcttgtcctcgccaaacgtgaatttgaactaggttgtgaaccagatcaatccataccatgttcatccagcctgaagcctgcgatcaaaggaacgcttgtcatatgtcctgtggttgctgtcactcagtgggttagtgaggttgatcgctttactttaaaaggaagcaccaaggtgctgatttatcatggggcaaatagagggaggagtgggaatcggtttgcagattatgattttgtgataactacgtactctgttgttgagagtgagtacaggaagcatatgttgcctccaaaagagagatgcccatattgtggaaaattatttttgccgaataagttgatgtatcatcagatttatttttgtggtcctgatgctgttagaacagaaaaacaatcaaagcaagctaagaaaaagaaaagagaagttaccaaggggaagaccaagagaagttaccaaggggaagaccaagaaatctgacagtaagatatcaaagagttctaacacgaaaaaggaagaggaaatgtggatggatgaagaagatttagatgcacctgtgcgtagcgataggtcaattcttcatgctgtgaaatgagcggaatattggacgacagaaaggggaagcgcagttcgttccacgttgttgttcgctctgtgtctctcactctctctatatttgcatcattcatcggaaatggctctcgaggttgctgttaaggctgctgttggggctccaaatgttctcggagattgtccattttcccaaagggtcctcttaactttggaggagaagaaaatcccttacaaactccacctcatcgatctcagtaacaaacccgaatggtttttgggtgtgaatcctgaagggaaggtgccagtggttctttttgatggcaaatgggtggctgattctgatgtaattgtggggatactagaggaaaagtacccagaaccctctctaatcactcctcctgaatttgcctccgtgggatcaaagatatttgggtcttttgtgagttttctgaagagcaaggatacaaacgatggaactgagcaagcattggttgctgaattgagtgccttggatgaacatctcaagacccatggtccatacattgctggggagaaagtcactgctgttgatctgagtttggcaccaaaactgtaccatcttgtggtagcactgggccacttcaagaattggaatattccagaaagtttggtacatgtgcacaattacactaagctgctgttctcccgagagtcatttgagaaaacaaagcctccaaaggaggaatatgttattgctggatgggcgcctaaggtgaatgcttgaagtaattctaaattatgaggcatctgaacatcagatatgtgatgtactgtgactgaacctggttaagaataggatggcgaactcatgatgtttaagagtattgttacccttttaataatgaataaacatgtagtttgttggtgtttttattggtgatgtgacaacagttgtcactagtagtacatagtgttttagattttaatgtcggaaaaagatcctctcaaattaagaaaaaaactggatgaaatgtcaagcttacttttaatgttagataaatttaatttataaaggatacaaaaatgtattaacggtgaggaaaaaaaaaaaaaaaaaa

SEQ ID NO: 77514 - DNA, 420 bp, Glycine max
  Clone ID: PAT_MRT3847_41011C.1
ccacgcgtccgaagcgctgtttcaacaacacaggtgactgaaaccaactatggcgtcccctgatgcagagggctacctctgtaatcctagtgttccaactatgcgctatcatgggtaagaacctccctttcctatctctcttattatacctactcaggctacaacgcagaccctggacatgctgttccacacgataccccaacttggttaactatcactctaaagtcccggatgatagccagacacctactgttaatacttgacactcgagagaaatgaaagtgagtagtgaatagtgtacaatgtatttaagggataaaaggggaggactctgcgaaaaactaattgggcataccaaaaatatcataattgatctattttaccgctcttttacgagaatatctctgcacactcaactta

SEQ ID NO: 77515 - DNA, 409 bp, Glycine max
  Clone ID: PAT_MRT3847_41012C.1
gtggaatctgaagtgaaaggaaaagaaaaaaagatctttgcattaaaccctaatcctaaaaatgggtaccttggcggaaggttgcaaggggagtttccctaccaaccatatggatcttaatttgggtttattggtaaagtgatttccacccttaatttaattcaaaaagaaaggcattggcacgccttggttaagtcttcaagccgtactggtaaatccctttcgcttctttggtccttttttgcttggcagcaccacttaaatttcaacatgaacattttaagcccgcgttggaagccaccaccgatcctttggcttttgtggcggatttgttcccgaagaatttcaaaaatttccgaacataccccaattgggatccaccagaagccgaagaaaaagggagccccca

SEQ ID NO: 77516 - DNA, 335 bp, Glycine max
  Clone ID: PAT_MRT3847_41013C.1
ctaatgtgcaagttggaactggcagaagagagattcaaaagggacatagatcgttgagaccttaacttacgtatgattcaatgtcagaggaaatggcaagtgagaggttttactctgtatcccagaggttgcagtcagatgaagcaaagcaagatatctatttgaaagttaacaaacctcttaccctcaggtttgaagatgttgtgcataaaataaaaattagcaaagggaaaggcttgttatgctacaacaaagaggtaagttctgaggagacactggtcttgaaagggatcagtggtgttatttttccaggtgaattgttagtcattttaggc

SEQ ID NO: 77517 - DNA, 391 bp, Glycine max
  unsure (1)..(391): unsure at all n locations
  Clone ID: PAT_MRT3847_41014C.1
tgatgctattcttagccttttcagtgatcaggtacgcgttaaccttncaaaaggggacatgaggagggcatacaggagacattgaagcaccagtgggggcatgcaaggcagtggatgctgctgggaagaagatgcttagatgcatagagcaagaggttgtttttatgagggtacagtgaccagggcatgctgaggatcaggactggagggatggatgtggacaatgacctgtaggtaaggaaggataattgcaaatgctgactcattatactattcgaggctgagccactcgctattggaggttgaggattgccaaataggcttagatcgctcctggtgctactgatggaggactagattgtggttgctgtagtgagatgtgttttcacgg

SEQ ID NO: 77518 - DNA, 381 bp, Glycine max
  Clone ID: PAT_MRT3847_41015C.1
aaccttttatatttttttctttattattatctactcttctttttttttgccaaaaaaaaagaaaaaaaagagcattggccatgaggcctcttcaccctcagccactgggggaacccgggcttccttacaatggccaggggccacctccaatggggggagaagactcctccacgctggctcaaccagtgccataaccgggtcccatagggggaaaggaatgcccaccagagtgccctctaagatgcacaatgttacctcccggaaaggaatattgccacctttgggggaaacatctcaataatccttggcacaaaaaaatcaaaccatttttcaggcggaggggtccaactacactccccggcgagtagggaattctggggg

SEQ ID NO: 77519 - DNA, 467 bp, Glycine max
  Clone ID: PAT_MRT3847_41016C.1
cggccggcctttgtttttatggtgttgagagctactaaagtccatgacgaccttattgcgtactatgacggcataaccttttacttatgagatagctcgctggtgcttccatcattcctattgatttcttagtgggccaccacccacacagcgtaatggtctatgcatccaaaaggggcaactgacacatgactattggacgtatgatcgctaagggagtgatgcggccatgggatcattccgtgactatacctgtgctggtcatatctactatactactaaaaggattagatgttgaaatgcaattgatggcagcgaaatacaaatcttctagaggggtagttgcttggactgttatgaggaacgtttgcactgagtgaaactacgcttctgtgggcgaaccatggcatcctactaacagtgacagtagccaagatggaacgactgtcaccaatttaggcatgagt

SEQ ID NO: 77520 - DNA, 642 bp, Glycine max
  Clone ID: PAT_MRT3847_41017C.1
gaagaaaaaaaaattaattcatcgctttaataaattaaaatacctttttgcatgcgggttgatacaatcagagaaatgcaggaacaagttgattttctccacatccttcgtgtaggaaatgttgtggctgattggttggcctgtttcgggacttgtaaccctggcactaaggtcttctttgaggacttctaacctttgagttatgggggctatgtttgttcatggaatatgtaaatccttctgtctgtggtgcaagcggcaacaccaacactccacggggatcgaatgacacgacacttgaagatgctggacccttgttccctgcagcttgcaccacaaattaatggacccttgctccttaataaattagaataccttattgcatgcaggttgatacgatcagagacatgcaggaacaagttaattttctccacatccttcgtgtaggaaatgttgtgactgattggtgggcctgtttcgggacttgtaactctggcactgaggtcttctttgaggacttctaacctttgagttatggtggttatggtttgttcatggaatatgtaaatcctgcacataaatttcaccagacgactatcgctaaaattccctttgaacagtcttcagatacaaaaaattact

SEQ ID NO: 77521 - DNA, 125 bp, Glycine max
  Clone ID: PAT_MRT3847_41018C.1
gccaaagcatttcactataagctacctgcagagaagatagcatcaactatcaaatatagagagttcttggtgccttaacattggtagtaggagacccatgaacccaacaaaatattttatcatac

SEQ ID NO: 77522 - DNA, 812 bp, Glycine max
  unsure (1)..(812): unsure at all n locations
  Clone ID: PAT_MRT3847_41019C.1
cgaattcgagcctcggtaccccgggggatcccctctagagtcgaccctgcagaattgcannattgaagnnttgaaacannactaactnnttgatagacaanntaatacaannncatcatggnngatataatanngttatgcaagaaagatgtnntggtaagatgccacttcttatataacattataagatatgacaaaaagaagaaaaatgaacaaattgaaaatatatttaaaaaggtttgtgacaattattaatcaaatggaacaagataaatgaattaacatggagaaaaaaaaaccttagtttaatatatgtggcattaataggaaaaaaaccaacaatttacgaagtcagagtcattaaactgagaaacatacaggaaaaaaatgtataaaaaactcattccaatgtaaatcataattttgggaataattctatgagctttgtttgaaacaaaaatgacttgcataccaagttgttcatggctgtaaacaaacttccaactcttgcttcttaaaacttaactgctcaagcaaaaatccaaaaattaaaaaaataaatacccattatagtacgattaatatgatgaaattgagaatgaatggaaagagaagaccacttgagaataaacaaaaaagaaaaggaaaaaaaagtatacgcgaaagattaaatanttggtttatttggataaaaaattaattagccaaccgatcaatattattgcaatctattgcctcgtgctctctgccaatatcaaaatagagtagaaactctttaaattaatactcagtaaattaataaactttttaaa

SEQ ID NO: 77523 - DNA, 356 bp, Glycine max
  Clone ID: PAT_MRT3847_4101C.1
ttattttttttttttttttttttttttttttggtttttttttttttttaaaaggaaccttttttcatcccaagggaaaatgtccaccaactctaccaaactggggaaaactttccaaagggggcggagggccggaccaagggggaccaacacccatgtgcggcaagaacagaacaggggggcccccccccctggggggattcccccataagccttgggcattctaggctaccccacagccgcaatgctgagccacgagcgggggccaccataaataaccgagagacccgcaccattgggatccccccttccccaaggggtgcctcccaggggggggccgcttcacccttgggggcc

SEQ ID NO: 77524 - DNA, 464 bp, Glycine max
  Clone ID: PAT_MRT3847_41020C.1
ctgaaaccccaacacccaaaggaataagtgattggttcatggctgaaagtgatataacagccatgaaggagacgctccgtgcgcaacagcaacttctgcagaagctgtatgcagagttggatgaggaaagagaagcctcagcaaccgcagccagtgaagccatggacatgatagtgcggttgcaaggggagaaggccgcggtgaagatggaagcgagtcactacaggagaatggcagaggagaagataggtcatgctgaggccagccttgaagtttttgaagagcttatgtatcagaaggagatggaaattacttctcttgagtatcaagccctggcttataagaacaaacttctcacgttggggtctgatttcaatgctagtgattttgaattcgatgaggacctgttgttgagtagacatgatcaacaacataatggagaaaatggtcatgctagtaacgcg

SEQ ID NO: 77525 - DNA, 110 bp, Glycine max
  Clone ID: PAT_MRT3847_41021C.1
ttctgagatgcagaaccttcatttaaatgcgttttgatactaggcggtgtaatccaatttatccacccttgactaactaggatcaggtccttgttgaattgcgatgacta

SEQ ID NO: 77526 - DNA, 297 bp, Glycine max
  Clone ID: PAT_MRT3847_41022C.1
gcccccggaaccgacccaatttgggattaaaaagaaagttcccggggacaagatttgataaagccccctttaacaggtttaaacaaattccccttaatttccggggggatttccccaggggaccattttttcttccattcttgaatttcccggggggaaaaatcaacgggggaaaacttcccgactttacggggtaaacagttagaaaacctaacgtgcttttcctggggcggacagggtgggttttttttaacccaaaaaaaatggttctttggaatacccgggcgttaaactttt

SEQ ID NO: 77527 - DNA, 454 bp, Glycine max
  Clone ID: PAT_MRT3847_41023C.1
cactgcgtctggtggggctttggttgccaaaggagatcttggcgcttagcttccttttgaagagggtccacttttgcaggaagagattatcaatttgtgtcgtaacatgggaaagggtgttattggggcaaccaatattcttaaaagcattattgttcacccaacttcaaccagagcaaaggttttggattttgcaattgctgttccagaagggtctgatggaataatgttgtctggagaaacagcttattgaaagttcccacttaaagctgtgaaagtaatgcacacagtaacattaccgactgaaacttctattccaagtggtcaaatgccaccttatattggtcccatgttgaaaaaccacattagtgaaatgtttgcataccatgcaaccattatgtctaacacttttggaaccttaactgttgtctttactaaaaccggtttcatggct

SEQ ID NO: 77528 - DNA, 370 bp, Glycine max
  Clone ID: PAT_MRT3847_41024C.1
atataactagaaaccgtgcgatcaaaatgaaggaccctgttttctatgttgctacgatctgggtagcatgacaatgctatgcgcacataatgtccactctccgaatgaacactgtcaatggtgcccatactactgaagtgaaatgcgccagtcgaacgctatctttggtagcacacgacatcataagctttgagacccttcctacagagtgcgtgtgcagatctgaggaataccttcgtggcgaactgcatacatcctactacaaagcagtttaccatgaaccttactttcatgccaaaggcctcgacgtgcatcccaaggacacatgtgtgctcagaatatatggcacggcactttataatattccata

SEQ ID NO: 77529 - DNA, 291 bp, Glycine max
  Clone ID: PAT_MRT3847_41025C.1
ctaaattaggttatttggggcgcattaaatggccgtaatccccaacaacgttcaaatatacctaaatgctgattccaaaaatactggatacatgcatggcatgaactcaaaaaaaaaaaactggcatattacatacaccgtcctgatttcatttgtgaacattgtcaaaacaaataccccaaaactctattcctaccctctacacattgaaaatgtcccagaacaaaacccgaggagtctaccacaccaaaatattttcaatggagttcgttcgttcgccccttccttgat

SEQ ID NO: 77530 - DNA, 220 bp, Glycine max
  Clone ID: PAT_MRT3847_41026C.1
aagaggtcgtgaaaaaaaagcactagggggattaaattttaaaactacatcctttgtttgaccacacaagtacacatctgctctttggtgaaagctacaccaaaaaaccttttaagatactgaggtacctaaggtgctttggttttgtttgagaaaagggaatacttggcctcctttttttgcattttaacaggggggatggggaaaattggaacaaagg

SEQ ID NO: 77531 - DNA, 529 bp, Glycine max
  Clone ID: PAT_MRT3847_41027C.1
tttctttttttttttttttttttttttttttttttttttttttttgtttgataatgaaacactaatttgatatttaactgagatgtattacaatggatgggggggttcataaacctaaagcacaaaaccctattttaatatgaaacataaccttagctaataacttgggaatttttttctttttaagaaaggaaatatgaaaaaaaatgctaaaaggtaggagggaaataaggaaccaagggataatcaaagactataaaatatgaaaaaaaatttttcatatttactatactaaaacataccttcatccaagtcaagcacaaacttctttggctccatttcctttgaagagggcctcaatttactctttaagaacaacaggataagggctttaaaagctcctaaaaaaattaaaaaggccactagggacacaggcaccgactgggggaagatgcaagaagcattcttggaaaaccgaaaatggagggaaaaaacaaaggtggggggcctgatttttaaatataaacca

SEQ ID NO: 77532 - DNA, 1812 bp, Glycine max
  Clone ID: PAT_MRT3847_41028C.1
gcgttaacaccaagttatttatttccacaatccaatttattacagacaaacaaagcaacaacaaaccatagaaaatactaatctttgaatacaaaaaagaaaaagaaaatattagtcaccattattctaacccttcctatatgacagcgtagggatgctttgttcgttcctaaagaaattatggggatcaaccttggtctttatttgaaccaacctgtcgaagttatccttgaaatactccactccataaactctcccttcagcgtagctgtttttaccattggggttaatccccaaatcaaggtccttataattgtagaaagcctctctagggttcttggagacaaaaagaatcataaacttgtgaagttttcttgtcaagtttatgtagtgatctgctacctctttccctggcttattccaattcgcttggtattggatcttccaaaggttcccagctcgatgagggaaaggagatgctgttgaaggaatctcagccattcttccgccataaggattgaaataaaatagtgtatcctccaactcaatcatcttcttccaaatcccttcaaaaccctctatggaaatcggtttcttcacatagtcagatttccttttcaagtagttgagtgatcgtggttgtctctcaagcaaaatgtcaagtgaggatgcaatgtctatgttgtcccaaaacagcacagatcgaagccagctcgtttcgatgcaatcagattgcttcaaacccaattgaggaaacttgtcattcaagagagaaacaaggcttttggagtcaccaaggaatagagctatgaacctagctcttacagtctttgttccatttcgtgtaccgttcacaacgtccaagataaccctaaggaaaagatcgttgtcgatagttggtgcaacatgctgccaattgtaaactatatcagtggcattttgctctaaggttctcccaacttggaaaacagtgacaatttctggaactcgaactagctttattttgtaggcaagaacaacaccaaagctagctccaccaccacctgtgatggcccaaaagagatcttcacccatggattttctatcaagcaatctaccttgaacatcaaccatttgtgcatcaataacattatccactgagagaccatattttctcatcatgttgccatagccaccaccacttatgtgtcctcccaccccaactgtgtgacaaacccctgctgggaaagcatgggttttactcttctcagcaattctataataaacttcaccaagtgttgcaccagcttggacccaagcggtttcagtgcctatgtcaacctcaatggttcttagattgaacatgtcaaggatgaagaatggaacctctgccacgtaagacacaccctcatagtcatggccaccacttcggattttcatttgcaagttgtgtttttgagcacaaataatggatgcttgtatgtgggatacatgaagtgcagttattatgaggaatggcttacgggttgtggaggtgttgaaacgaaggtttctaatgtaggcttccaatactgaagagaatgaggtgttgtttggtgtgaaaattgctgaagttatggggtgagaaggctcagaatggttcacgaggcaatgaagaaaagtgttgttagctgaatttgcagctgaagctgaccaaagcaacacaacaatgggaaataataatagttgtattctatgagaagaaaggactcccattttggcttatcccaatgatgagatgttatcaatataaaaaagcggacgcgtgggcggacgcgtgggcggacgcgtggg

SEQ ID NO: 77533 - DNA, 562 bp, Glycine max
  Clone ID: PAT_MRT3847_41029C.1
ggcaaatccacctctgcatcgccatgttgccatccctaatcttcaatgatgttgggaatcattcatttaccagttttcctttcaaatagttatggaaaatgttgattcttgagaagatcaagatgactactagctcattctaaataatgctttgccaactaattttctccgctacaggccccatctggcttcttcttcttcttcagccttctctccatgttcttagaatgaccaagatattattcattgtctttgggactgcccaaaagctagggaagtctagagttgcttaggctttctctcccccaaggctttcttaattccaaccctctcctttggctaaagcatagcttttagctccaagggggattctctatgttgtagcattatgatggaattggaagtggcgcaacaacaaatttttttatgtggacaagtgggttactcaacaagtcatttgttggatttatgctttgcacaatgatattgttttggctatgcaagattctgcaagttgagagatgttgctctctacttacccaaatggacttgcccttttctt

SEQ ID NO: 77534 - DNA, 270 bp, Glycine max
  Clone ID: PAT_MRT3847_4102C.1
aaccccaatttcgggttttcatttcattaaatcgcctttaaacaccccgtttttttggtaaaaaacaagaaccccggggccccaaaaccttaaagttccttaaacttaaacccaactaaaattcctgggcttaatcttaaaccctaataaacgcctttaggcccttttttttccagccttcataacccccgtaaccaccacgggggtaacccctttttgttgtttttttcaaaccttacggaccctggggcggacccttgggcggccccc

SEQ ID NO: 77535 - DNA, 1349 bp, Glycine max
  Clone ID: PAT_MRT3847_41030C.1
tcagaaagggatgcgagaagacggaagcgaagaaaagagaagagaagaaaaaagaagaggggggcgaagagaagaagatggaggttagtttatcctcaacatcatgtatacccttaagctcgaagttgaagcataagcatggccttttccactctcaaattcccattcccacagcttcaaccaaaaccagaagaacaaaacctttgtccatagttaacgcctccagacaaaccttgtcctccaactggctcgtttctccacacgatttttctgcatccaccgcttccccatggcttcccagattcgaagagctcgacgccaccaacatgcttctccgtcaaagaattatttttttgggttctcaggtggatgatatgactgcagattttatcattagtcagcttttgtttttggatgctgaagactccaagaaagacattaagttatttataaattcacctggtggttctgtaactgctggaatgggaatttacgatgccatgaagttgtgcaaggcagatgtgtcaactgtttgccttgggcttgctgcatccatgggtgcatttattcttgcttctggtacaaaaggcaagaggtattgtatgccgaattcaagagttatgatccatcagccacttggaactgctggtggaaaagctacagaaatgagcattcgaataagagaaatggcatatcacaagattaagataaacaagatactatcaagaattacagggaaacctgaagagcagattgaattggacactgatcgtgataattttatgaatccttgggaagctaaggaatatggtttagttgatggtgttattgatgatggaaaaccaggattggttgcaccaattggagatgcatctccgccaccaaaaactcgggtatgggatcagtggaaaattgaaggaagccggaaagcgaagaaaaatttaccctcagagcacaagtttttgcagaatgcatccaaaggaagccagggaagtgatggtgataagggcactgtacaagaaggcgaaacacccgttgctgtataagttagggggagaataattgtattgcttctatactcaatagatctgttgattttaatttgttaatcacctcatccaaaagataaaaagggtttttctcacttagacatagaagctcatattctacgtaacatccatactgtatattaattatcttaaatttctttatatgcttcgagtgttggatgccttaatgaatatgttttctcatgggggttggttggtttacgtgtttaattggcatgccttggaatgaaacttctgatagtgcttggaaagtaatctgtttgtacaatccctggccgc

SEQ ID NO: 77536 - DNA, 287 bp, Glycine max
  Clone ID: PAT_MRT3847_41031C.1
aattgaatacaatgggaccgggctggtagggcaacaagggggtactgtgactcggctctccctctctatgggcggtaaaaatcagccaccaaccctgttgaactccaggggaggtggctcgctgcatttatttaacggagatgcttgcatggaaagaaccaaacattgtttactcccgaaggcatgtcactgagggggcgagccattactgttgtcgtaacggccggaactaaacaggttacgaaccctggaagaaagctcgatctcgattgtgccgtaggcctcaa

SEQ ID NO: 77537 - DNA, 251 bp, Glycine max
  Clone ID: PAT_MRT3847_41032C.1
atctgctattcatggtgctgctgcatataggagatgaaattgatggttgagagatgtgatgctgtgattgtcctaatttttgtgtctcgtcttttcttacctatgatttattcttttttttttttggtccaatatagtcttcccatttacaaacaggtgtgatttattgcatggttggatttgtattgattaagaataagttgtatacaaaaatattaacaaataatatcttctgaagcatcttttgcagt

SEQ ID NO: 77538 - DNA, 1572 bp, Glycine max
  Clone ID: PAT_MRT3847_41033C.1
gcccagaacacctggtaccgagtcccacaggtagggagggtcctgtttttataactatggatagaaccttcttaaggctaatcaatgatataattttggaaactgacaagacaattgaagttagaggctgttccctttgacttgtgccatttcttctctcaataaacttctattgatgccccgctccacgttccattcttcagtatcctttgtagtttgaaccttcctcacactcccacttcagaaaccaatcaaagagagagagagagagagatgggtagagctccttgttgtgacaaggcaaatgtaaagaaaggaccatggtcaccagaagaagatgaaacgctaaaggattacatagagcaacatggcactggagggaattggattgcgcttcctcaaaaagttggtttaaaaagaggtggtaagagctgtagactaaggtggcttaattatcttagacccaacattaagcatggtcaattctctgatgcagaagataaaataatctgcagcctcttcgctagcattggaagccaggtggtccataatagcatctcagttgccagggaggactgacaatgatataaaaaactactggaacaccaagctcaagaagaaatgatggccatgaatccttcagtactccaaaggaagcctcaacaaattacccttttatccatccttcaaagttcagcatcatcattcagagacagcaacaacatctcatactaccaccctcacggttccttttcctactcatcatcaagtcttgtgagtggtaacaactcttctgctaatgctgattccttgtttcaagcacaagagagtttcatggaccccaagtgccaattcaaagatagcagcatctttgtgtctggaggtgaagccacagccatggccacggccactagttgcagctcttctgatgggagctgcaacaaccagataagccatgtcatggagcctgcagagtttggtgatgcaagttttgttggtggggccaataatcacatctacagtggggaggaagatgataataatactcagaagttgatgatgttctccaatgctggtggtagtgttagtgggtggacaggcaaacaaaatggattattgtgggaacaaaatccattggattatggtcttgaggaaattaaacagctcattagcactaataacagttgcaacaactttttgtttgatgacaagaagacacaagaaagagtcacgtactactgatcgatgatgatttcttcagacttatgacttgttggactcaatttgtttgtgcttttgtgggatgggtttttagttttagtttttactttttagtattgaatagaattgaaccactttctttgtttgaaagtacatttaaagttttctttttgcagttactttgccgaggtaaccctacccattcacattcaaaccatacacatcccctaaggaagataaagaaaaggaggaacgaggaacctttgatatacttaacaagagttccctatttgtaattcttttatcttccaaacatcatcataaagaagcttgcagcagcagtccactaat

SEQ ID NO: 77539 - DNA, 559 bp, Glycine max
  unsure (1)..(559): unsure at all n locations
  Clone ID: PAT_MRT3847_41034C.1
tcctcctctttttgttagccctactgcacacttgaacaacatggtgacccgccgtcagctctcagtgatagcctccattgtggctgttgccagcgcacaatgtcctgactatctcgactacgcggaagtaccgcatggcccttactcttcgggaagatacaatctttcgtatcaacgccctgaaccagcatgccggacattcaactcttccgttgtggaagacgcgattactcgcgtgaaaggagacatcgcagacccggatctgaggaggttgttcgagaacacataccccaacacccttgacacggccatcagatggaaaggcacagctgagggaagcgacgaggagttgacctttgtcatcacgggcgacatcaacgccatgtggctacgcgattccgcgaaccagatgcagtcttacctccctcttcttgaggcttcgtcttcctcggactccatcgcatcgctataccgcggtgtgatcaatcttcaggctcgctaccttctcacatctccatactgtaactcgttccagccgncagtggagtctggcattgag

SEQ ID NO: 77540 - DNA, 286 bp, Glycine max
  Clone ID: PAT_MRT3847_41035C.1
ggtccgagacgacgacacaacgggacaacatacatattcttcaggtcactatatctatggcaatgttgtaccaatttaagaatgctcgtgtcttttttttcctttgtgtacatctcttcactggggagagcgcccacacacataccaacctaaattatacataaatgtgaaagaatagaaaattaaaagctacattaggcacacattcacttttcatccccttcatactcatactttttaatctatttcttcctttcttaacacataccactaattttttgctctc

SEQ ID NO: 77541 - DNA, 680 bp, Glycine max
  Clone ID: PAT_MRT3847_41036C.1
ctctctctctctcaccgaagaccggaaggagcggagccgccgagccgggaagagccaccaccccatcttcctcgcctccgcttccgaagggtgagttcctccgcgcatggccgcccactcccctccctagctatttctggctttgtggcgagccgtggtcgtccgtgctcgcggcgtatatatagatccgcctccccgttggtcgagtagatccatttgtgttcgttccgcttcggttcaactcggtctggcgctagtctcgcgtcctcggtgattagatccgtgcctccttcctctccggtcagagatggcggaccgtgctaaccacccgtctgtcatgcagaagtttggtggacagttccaccttgcctccagcttctctgagggtgttcgtgctcgcaacatctgcccttctgtgccatcctatgagaggcgcttcaccacaagctgctacatgactcagaaccttggcatcagtgtccccatgatgtcatcttctccattgtttgccaatgcaccacctgagaagaaaggtgtcaagaactttgcaattgacttcctcatgcgaggagtgtccgctgcagtttccaagactgctgcagctcctattgagcgtgttaagctgcttatccagaaccaggatgagatgatccagggtggcaggctctctgagccctcca

SEQ ID NO: 77542 - DNA, 177 bp, Glycine max
  Clone ID: PAT_MRT3847_41037C.1
gcgattcttccgggcgagaaacagatccttaaacataaagtggaacgagacactaaactccgtaccgacgcggattcggatgagggtgaagatatctttaaatgcaacacagaagatgggaaccatctgtattcatctaataccgcaagtggcacccgagaggaaaaataccttgtt

SEQ ID NO: 77543 - DNA, 492 bp, Glycine max
  Clone ID: PAT_MRT3847_41038C.1
acgagaaacactcttctgtaagttaaaatttattgaaaattaaaattttacggatttcatgttttatttaatgaattcttcatgattatgtacttttcaatcaattctaacatagtaaagaatgtgttagagggtgcattgtgagtattccttatgcaatctgaaaaattggaacagaagacacctacatcaccccgaccattactttcgtagatgggactcattctattctttttctcctaagaaattcgttagttttccttgttccaatggaagcgaggggtagtcttcagtcctgtgctgaatcagtaggttcaggacacgttagtttccctcaacccttaatgccatttgttaactttacaaagcacttgtctaatggttagtttgactagaaaggtcaacttgttcacccccaaaatggtggcattaactttgccatcactataggaccttaggttctgaatgaatataggtcatacgtggtgtcta

SEQ ID NO: 77544 - DNA, 2019 bp, Glycine max
  Clone ID: PAT_MRT3847_41039C.1
tgcatgatagctacttaacacaaactagcaagtagcatcaagcatcatggtcatacattatacaaggcaacttctccgttaatttcctcacacatccctttctccctctttctctttctctttctctttctctccttccttttcatcactcacttttcactcccaagtcccaaccacaacccctcctctcctctcctcgatcagtgccataaatcaattctttctttctatctatctctgtccacaattctctttatgtcaacaaacctaaaactaaaacctgcttgagagagtagggaattaattaattaattttctttcatttcatcttttaagttgatctgtgaaaatggcttcatcttcctccaacggcagttccagcggaagcaagagttgggacatcgacggcgacctcgccggtttcggctacaaagtccgttcatcggagctgcaacacgtggcagaaaacatggagcgtttagagaacgtgatggacattgtgaactcatcaaccaacaataacatatctcagctggcctccgatacagtcttctacaacccctccgacataggttcctgggtcgacacgcttctctccgagttcgaccaaacggcgtcgttgccctacgatttctcggattttctcgatctcgacacggatcagaatcaaaaccacaaaccaacgctggtaacaatggaagaagactcagggataagactcgtccacacgctgatgacctgtgcggattccgtgcaacgtggtgacctcgcattcgcgggctccctcatcgagaacatgcaggggctgttggctcacgtgaacaccaacatcggaatcggtaaagtcgctggatatttcatcgatgccttgcgccgtcgcatcttagggcaaggcgtgtttcaaacgttgtcgtcgtcctcgtatccgtacgaggacaacgtactctaccaccactactacgaggcctgcccttacttgaagttcgcgcacttcacggcgaatcaggctattttagaagctttcaacggtcatgattgtgtccacgtgattgacttcaatctcatgcaggggctccagtggcccgcgctgattcaggccctggcgcttcggcccggtgggcctccgctgttgaggctcacgggcattgggcctccctcgtctgacaaccgcgacacgctccgcgaaatcgggctcaggctcgctgagctggcgcggtcggttaatgttagatttgcatttcgtggcgtggcggcgtggcggctcgaagacgtgaagccgtggatgctgcaggtgaatccgaacgaagccgtggcggttaactccatcatgcagttgcatcggcttcttgcttcggactccgatccaataggttcgggcatcgaaaccgtgctgggttggatccgaagcttgaacccgaagattatttccgttgtagaacaggaagcgaaccacaaccaggaccggttcttggagcggttcacggaagcgttgcattactactcgaccgtttttgactcgctggaggcgtgtccggtcgaaccggacaaggcacttgcggagatgtacctgcaaagggagatatgcaacgtggtgagcagcgagggaccggcgcgagtcgagaggcacgagccgctggctaagtggagggagcggctcgagaaagccggcttcaagccgctgcatttggggtcaaacgcgtacaagcaagccagcatgttgctgactcttttctctgctgaagggtactccgtggaagagaatcaaggatgcttgactttggggtggcatagccgccctctcattgcggcttcggcttggcaagctgcgccgatgcaggacagggaaacgctgcgtttccgagcaatgagtttcaagaaacggaaaaattgtttaattatagtagtaactagtaaacaagagtgatgtataatgtaaatttttctctctctatcaaaaaaaaaaaaatttctctttctttttttttcttttctgtttttttttaaatggtcatttttgcg

SEQ ID NO: 77545 - DNA, 197 bp, Glycine max
  Clone ID: PAT_MRT3847_4103C.1
aactctagcaatcaactattttcacatccaatcataccaatctcaagctagtttacatttttactacttttttcaatcttctccatacacttcacacaatcctcatacttcactctacacctttactccttatttctccctcacaataaccccatactacaatccatataccatttcaaactcactacaatctacta

SEQ ID NO: 77546 - DNA, 1310 bp, Glycine max
  unsure (1)..(1310): unsure at all n locations
  Clone ID: PAT_MRT3847_41040C.1
gtaataacttcccatcatcatgtagtgtgtatgtagtacgaagcatccaccaccgtgtgttaccttgttctctcttctcttctccatgccactgaaagcttgaaacccacatagctagccatcaatggaatacagcaattgggctgaatctcttcaaaccgaaacccctctcccttctttcccacaaccctcatcatcatatcctcctacctattacccctcttaccctcaaaaccctaaccctaacccttcttcttctcttccccttaaccctcccggggttgatccccaaaccccattgaaccctattagctatgcggctcatgaacccgttcctggtttggtctacgctcagagccttgttggggatgattcatcttctgggtattgcttggaccataattgggttgccagagaggctgttaggcaatttggtactgaccctactctttatgcacctggcatctctttgccacccaatggctcagaacagttggctatggcaaatcctagctctttgtggtggacaaataccacaactcaacctcatgtcaatggaacacctaagaaaaaccaaaagaaaactaaggttgtgcaacctgcattttgcgaagtttgcaagatagaatgcaccggcaaggaagtgctggaccagcataaattaggaaagaagcacaagaagaacgtggagaaactaagggaatcattgacacctacccaagttcaaccatctgggtcatctaagcctttaataggaccccaattaccgtatgataagggcaaatccaccagtgggaataagagtaagagaaaaaaagttgaaactgcagaggatttggagaaaaagaaaatgaaagttcttatgggtggggcagcagcttcagcagttaagatatgtgctatatgtaacgtggtgtgtaatagtgagacggtttataactatcatcttgcaggacaaaagcatgctgctatgcagaagaaagcatcgggtcatacacaatccaatgccggttgaattttcccttttttttaggaacatcacttgttttagcaactccattctgcatttgaatagaatatcatccattgcttaatttttagtttgaatatgaaatgtgcagagtatatatacatttgtgcattgtattagcagtttagatgcctccctctttcctgttttttttctttttcttttggactattagtgaaaactatcaaatgatcaaaaagattttttttttctgttaanaaaaaaaaaaaaaaaaaaaaaaaaaaaaaaaaaaaaaaaaaaaaaaaaaaaaaanaaaaaa

SEQ ID NO: 77547 - DNA, 255 bp, Glycine max
  Clone ID: PAT_MRT3847_41041C.1
ggaaagaacataatgtagcccctgcatgggagaaatgcggcgggcttgtaaagaaacttctcgacaaacaccctcaaatttcggaccatgaggggggccgccaactaaaacattgtgtccaccacagtggtagtgccggaccgctccagaagacaatacacgatctccgcttcggaagctgaggctctatcaagagcattgagatactggaactgatccatgccaaagccgtgatgcctaaagcagacccttcca

SEQ ID NO: 77548 - DNA, 276 bp, Glycine max
  Clone ID: PAT_MRT3847_41042C.1
gacaccgcctgcaccaacaaagaatgggaaaaagaaataccaaaacacaaaatgcaccctcctcttttctcctttccctttttatctcttcttcactctcacccttatatttttcttcaaatccagaaacaaaccattctcatttcatttgataagaaacccttttctcttcaaggctcttcggaagccgtgtgcttttttatttcttttaaagcacatctagatctgcggtgtaacattgaccatttgaaaatagatgctcaatatgttccatta

SEQ ID NO: 77549 - DNA, 407 bp, Glycine max
  Clone ID: PAT_MRT3847_41043C.1
cccttgtatgccgcccacgcgtgcgaccacacgtgcggaattatggattcctggttgcacgaaggcaatgactatgccatgcaatccagacccgagatgcgatgcatggtgtgtggaatggctgaagcgtaccaaagtttcattgagagatcatccgtgtgactggatggactggcactccaatgcaggatgttcaggttacaattgattggtttatttcctttcaggaatgtgtaaccaggacctattgtgttttaaatccacaaaaaccttgtgtgataaacacgtggatggggaaactgactctcacccagggcactacccgaagtgagaaaagaatgcctctgtctatagggggaggagctagggcaaagaatgctattgtcatgaatatgccaaatgctgat

SEQ ID NO: 77550 - DNA, 610 bp, Glycine max
  Clone ID: PAT_MRT3847_41044C.1
aaaaaaaaaaccccccaaaacgggaaattttcaaaaaaaaaaaatttaaaaaaaaacccaacctggagcaaaaaggggggcctttgaggggggggggaaaaaaaccctaagggggcccggggaaaaacctaacccccaaaaagggggggaaaccccaaaaacccccaagcaaaaaaaacaaggggccttttcttttaaattttttgggtttcttggccttttgggggaggccatttaaaaggggccccccaaattttgtaaaaacgggggttgggggccgttaaaaagcccgggccccaaaaaaaaaaacccctattgaaacaagggttggttcccaaaaaacccgaaaaaaaccttttgggggaagaaccaaattttaaaaaccccttttttggcctgggagcactagggaaccaaacctgggtttaaaaaaactttgtttcccccatgaaatggggaaaccccgggtacccacgaaaaaaacccctggccccccccctttaaggggggggaaagggccctttctttgccccaccttttcaaagctaaaagggggcaaaaaaggctgggggactaccccaaactttgggaaaacccgcccttttttttt

SEQ ID NO: 77551 - DNA, 334 bp, Glycine max
  Clone ID: PAT_MRT3847_41045C.1
aaaaaaacaaaacgggaagactgacttttttttaaggggatggaagggccccccccccctcaaatttaaacatgggctcggtgggggggaccagggcccattctttttattatcaaacaaaatttattttttggttattattaaaaaagagggcctaatcctaaccccataaggcttggtatttatgccactttaacccggggggggccttgttgaaactcaggggtgcccaaaggcccccaatttctttaattcttaaactaaaaccctttactttttaaaaggttgaaaaaatggccaaaacaccttgggggaattgccctaaacacatcct

SEQ ID NO: 77552 - DNA, 871 bp, Glycine max
  Clone ID: PAT_MRT3847_41046C.1
caacgatagtaaaagcagaaaaggtaaactttgcttctaaatctagagttaatttggagttgatttttaacgaactcagggctgagaaatcgaaaggtatcaccattcccaactctgtaaccaataatactagactggggagcgttgaaactggacaagttacaccaccagcttattataagagcaatgctaataccagtagagattttgggatgccggcaaatcaagtgggtcaacagcatggaaaccaatatagcaatatttcttctgcaggtgctgctcctggttcatatacatcatgcaccaactgtggagtctctggtcatagctctgcactttgcccaaatattagaaatgtacctggacattctgcaggagggggctttgccaacagggcatctgcgggattaggtggtggtggtggtgcttctgtcgaatgctataaatgtcatcaaagtggtcattatgcaagagattgtcctggtttcagtgcagcacctccatcatcatatgggagcaattcaggtggtggtggttctggcgaatgctttaaatgccatcaaactggccactgggcaagagactgtcctggtctcagtgcagcaccttcatcatatggaagcgctaatgcaatgcagggaagatatggggttgctcaaaagcaacaatttggaggatattgaaatttgttggagttcgttttcattttgtttcaagtattttatcatgtctttgaatatataagcaattttcgtcttaactgttaacttctgtatatacaggaagtgattatgtggtactgaatgctacgtttctttatgcaaacaccgtgcgacgtgcaaaatcatataccagtatatcttttatttcc

SEQ ID NO: 77553 - DNA, 306 bp, Glycine max
  unsure (1)..(306): unsure at all n locations
  Clone ID: PAT_MRT3847_41047C.1
cccgggctgtattgctgctattggggcacggaatcagaatgagtggcaccaacttagtcttaaacgtcatctgaatctcagttncgcaggcttacgactaattgtgattgattggtgtgaaaaggatgaaaggaaagagtgactttctttttaatattttggatcctaaattttagaagctgcatttgatctttgtatttcggagctatcaagatcggatgtcaatccatccagatctttattgttgaatccccaacacctattataatgtgtactcattctcttgatgctgctgacttgagctcc

SEQ ID NO: 77554 - DNA, 591 bp, Glycine max
  unsure (1)..(591): unsure at all n locations
  Clone ID: PAT_MRT3847_41048C.1
ggctcgagctcattttcctcttctttttcacttgctttttcaacaatctcctttcatgtttgtttcaagcttcaacaatcaagcgcgcccacaagaaaatgatgaaacttttccgttgggttttgaaattaagtagtgactttgatagttttgtgtagactgtactaaagggagagagaaacataagtttaagatggcttttgtttgagggtgaaaaggggggaatttgtgaccaaaaattataaaaagaagagggctttttcagctagtgaaggttggttttcttctacattgattgaaaggggttctgtaatggaagaagggttagggcataactcaggttctcctcatggtcccattgataagtccaagattctggatattaaacctctgaggagtttgattcctatttactcaatgtcttctcaagctccacctgctggccagtatccttctgggttgtctccgatgttcccatttggtgcacctcagcaaactccaactggngtgagcgacaggggtgctgccacacctgctccattaagggcatataagaacccactaggggcaggagactctatttcacaatga

SEQ ID NO: 77555 - DNA, 217 bp, Glycine max
  Clone ID: PAT_MRT3847_41049C.1
gctgaactcatctaatgcacttgtgataagcctatatactgtgctctcgctctactggggaaggattgtggtcttcaacttgcaaagggagaacgtggcactataagagcctgatcagaacggcctcgcacactttgaggctggtgatacacgtgccatggagtatgtgatcctactatactccaatgactctgttggattcaacatcgttgatgtc

SEQ ID NO: 77556 - DNA, 326 bp, Glycine max
  Clone ID: PAT_MRT3847_4104C.1
aaaaaaaaccccactttacaacatggttacgccaaataaaagggggggggaaattctaacgaaggggcgaaatacaacaacaaggggggggggcccaattgctttttgggttttaaaaaaaccagccagcgaacaaaaaaacaaattccgctgccataagaggattcccaatttttaaaaaatctggagagatccccggaaaaaaaaaaagccggcatactgtttttcccctgccattaaagaatctggggagcccccaagagagattcaaccactcaaaactgcgcgtgtttgcccattatgaggcccacatgccctgtattggg

SEQ ID NO: 77557 - DNA, 511 bp, Glycine max
  Clone ID: PAT_MRT3847_41050C.1
cccatgtttccgcggacgcgtgggcgaaggatcactaaagagaattcttttttaatcattctcgaaaatgccaccgacttgggccttagtgccgcttttgcttctgttctttgtccatttcattgatgtcggattcgctcgttgttacaaagcgtcaacaaaatacaatccgccggcggaagaaacgacgacagaaacgacagaattgacaaccccaacggaatgccctgcgccggtgtgcccatgcgaatgtcccaccgaagaaacgtctgaaacgcctccttcgacgggcgggggagggggcactgacgacgacatcgtgacctcgccggaaggagaggagacgaccacgcccgtcttcggttgtgttccgggcccgtcggggccttccggtccaccgggcccagcggggcaaaaggggccccagggaaaatgcggcgacaatgcgagcaaacgcaaaagggaagcagcagtgccgaacgagtttatgacgaatttggaaccgaatgtg

SEQ ID NO: 77558 - DNA, 456 bp, Glycine max
  Clone ID: PAT_MRT3847_41051C.1
ctccttaaggttccttttgaatccaagggtggcctttgttgtataaaatattttgggattaacccatgtcatcaagcttcaaggggattgacaaacccttggcatcactctacgatcttaaatcaagaaagtttcacttagtcacataccaaggttgacaatccattgccatccttcaatggggcacacaatcgatcccaaagccttatgttttcttgttgtgcaaaataatcgaagcttttttaaaaaaaaaaagaaaagggaaaaccctaggatcaatatttcgattgattgattaaatgtcaaacagctccattatcgtcacccaaaattgtcaagtgattaaacaaaacatatgctctgagggagtccccgaagagatttgcaaaaaaaaatagaatgaggttgcatgaattctcacgtcttccaaaaagagatagtcaatctgtgttttcc

SEQ ID NO: 77559 - DNA, 211 bp, Glycine max
  Clone ID: PAT_MRT3847_41052C.1
ccttcggtctcgaggtgctatcatgcatatccaaggtgcgacaacagaggggtcatctctatagtgatgcatgtgcttttgttgagttcttccttactgcattacattagacttgcctggttgactccgggtaggttttcaaattcaagcaccaactgctgcttcaaccctttcacccaccctattctttttgtacacaaatattgttctt

SEQ ID NO: 77560 - DNA, 445 bp, Glycine max
  Clone ID: PAT_MRT3847_41053C.1
tttgaacacagatatggagagagagataaagagttagggtaggtggttagaagcggcggaggcgtagaaaaagaagattggaatcaaggggacattgggaatcgaaccaaagccacaagaacatacaaaacaacagaatgattgggtttttgtgacggcagctaatttcttgagaaaatatggacttacaggggaatacgaacacaacatagagagcaacaatgccaccctgtctggccacaggtgtcatcatgagctcgagagtgcaaggatgaatggattggtgggtaagattgaagcaaagactggagatccggaagttggtagggagactgagaaggtgattgtagatatgcaagaggcgacactgagaatgcgcagagtgatcagaaaaggaggactggaagccgggggattcgacgacgaagcgaaattgcggagagag

SEQ ID NO: 77561 - DNA, 505 bp, Glycine max
  Clone ID: PAT_MRT3847_41054C.1
cggattcgtgggtttgaggcgcagcactttccaagctccactaaatttgtttttttgtgaataacagtcagcaaaaacaaagcaaaaatggacgccatcaagaagaagatgcaggcgatgaagatcgagaaggacaatgccatcgaccgggcggacgccgcggaggaaaagtgccgtcaaacgcaggaacggttggagcgtgttgaggaggaattgcgggacacgcagaagaaaatgatggcgacggagaacgaattggacaaggcgcaggaggacctgacggctgccaacaatttgttggaggagaaggagaagaaagtgcaggaggctgaagccgaagtggcgtcactgaaccgtcgcatggttctgttggaagaggagttggacaagcttgaggagcgccttaaacttgccaccgaaaaaaatggaagaagcgacggccaattgcgacgaatcggaacgtgtgcgtaaagtgatggaaaaccgttctctgcaagacgaggag

SEQ ID NO: 77562 - DNA, 499 bp, Glycine max
  unsure (1)..(499): unsure at all n locations
  Clone ID: PAT_MRT3847_41055C.1
ccccaaaaattttgtaaacgaaaaccaaanttggtgtttgtttttcttaagaatattattatttttaagaatattgttatgcttgaataactaatatctttggacaaagacaataaaaaaaatactttttttttcatgtttgatatattttgttgcgtccatatgatgaagtatttacccagttccattatcagaattagcatgaattaccatcttttcgcggcactgttctggattccatctggtgattgtgtgctcttcaatggtgtagtttgccaaacataatggagactcattgctgctaccatttctattgacatacaaaaccaataagatttttgcaacacctccaagaagtcgagttgtgcaatgaacatcagaccatactctcaaccttccatttagatctttatcttctccatctgataaaacaagcacaccatactccgaatggacccgagctggatggtgacgatagacaacgaaatctgcaccatac

SEQ ID NO: 77563 - DNA, 475 bp, Glycine max
  Clone ID: PAT_MRT3847_41056C.1
tggctgcgagaagacgacagaagggaacatgcagcaggtaacgtgtcaaaacattatttcaaattaaataaaatatagatgaaaaactacttggccgttttctattgttgctgaaggaacctggctagcaggttcagtcattgccaacgcgtacaacagaccgtgtttgaaaaattgaaacacgtgcggacccaactttaaatatctccttcgaactttccattttacaatgttaaatttggacaaataaaaaagataggaaaaataaattattccacaattttttaaacaaaaaatataatcaatatcaaataatttgataatttcgaatagttattgagaacacatacattaaagagaaaattttacataatctcatgtaagtggctaatttaggtcaattttagtctctttttctaattcagtcgaattatatttaattggattgaattcaattttttttataattcaattt

SEQ ID NO: 77564 - DNA, 390 bp, Glycine max
  Clone ID: PAT_MRT3847_41057C.1
ggcaaggaactatgaaaaaattattttgttgggaccccatgtaatttttttaggaaaacacaacctgggccaccccaacaaaaaagggggggagggggaggactattgccctaccaaggcttattaatattccctaatgaaaaaaaattgttgaattcatgcaaaattcgataggatacctatccctatacaattaaataagcccttacggggggatcttgacccttttttcggcgttttactttgaatatatcccccatgcaagacgaggcgtgaaaatgtaacacccgttgaatcccaggactttttggggggcaaaaacgggtcaaaacccagtttataagggggttttcgggtttagcccaaaaaaatccttgaacagcaatcccg

SEQ ID NO: 77565 - DNA, 217 bp, Glycine max
  Clone ID: PAT_MRT3847_41058C.1
agaagtgtaatttgttctaaaaatgctttactactgttgtggttattattcaccaaaaaaatatccgcggggaagttttactaccggggggggcaaactttttaaaaccttaagaatttttttaactcccaacataattgatggttgtcgccttggaggcattaccaaaacaacttgtgcagtaatttctttggatgggtggccttattcccaattt

SEQ ID NO: 77566 - DNA, 110 bp, Glycine max
  Clone ID: PAT_MRT3847_41059C.1
ttcctatattgagtaaaagaagaacattattccagtgatttctcttgtcacataaaagccatctaagaagaattacaagatcatcttcaccacaacaagatgagttcagg

SEQ ID NO: 77567 - DNA, 209 bp, Glycine max
  Clone ID: PAT_MRT3847_4105C.1
attaggaaggagttgtagggcactgctctaccaaaagggtagaggtaagtttgtggcactcacttactatgctctgaaaatgtgagcactctgatgtcaaacttatctactacactataatccttgaaatgccaaaagtgactgcctatcccggtctactacaattgggatatatagctaccggagagcttgtacttctgactgctgtc

SEQ ID NO: 77568 - DNA, 2167 bp, Glycine max
  Clone ID: PAT_MRT3847_41060C.1
ttttaggtttttaaccggaggatggagcggttgattggggagatgaagattggagtgaacgggggagggtgggtggaggaggctgtgaggagtatgcaggaggatgagacgtgggttgaagggtgtaatgggaataataataacggttttggggttgggttggagttcgggaagaacaaggttttggagatgatttttacgaggagtggtgatgtttcggttgtcggtatttgcgggattggtgggtccgggaaaaccactcttgctagagaggtctgcagagatgaccaagtgagatgttatttcaaggagaggatcttgtttttgactgtgtcgcagtccccgaatgtggagcagctgagagagagtatctgggtacacatcatgggcaaccaaggtttgaatggcaattatgcggttccacaatggatgccacagtttgagtgtaaagtggaaactcaagtacttgttgttttggatgatgtgtggtcactctcagtgctggacaagcttgtgttgaaaattcctggctgcaaattccttgtggtatccagatttaacttcccaacaatttttaatgccacttatcatgtggaattgctgggtgaacatgacgccctttctttgttctgtcaccatgcttttggacagaaatcaattcctatgggtgctaatgtgagtttggtgaagcaggttgtggctgagtgtggaaggcttccactggctctgaaggtgattggagcttctttgcgagaccagaacgaaatgttttggttgagtgttaaaagcaggctctcccaaggccaaagcattggtgaaacctatgaaaccaatctgattgatagaatggcaattagtactaactacctgccagaaaagatcaaggagtgcttcttggacctgtgttcttttcctgaggatagaaagattcctctagaagttttaatcaatatgtgggttgaaatctatgacatcgacgcagctgaagcatatgccattgtggttgagctttcaaacaagaatcttctcaccttagtacaagaggcacgtgtcgggggcatgtatagcagttgctttgagatttctgtcactcaacatgatatattgagggaccttgctcttcatttgagcaaccgtggcagcattcatcaacaccgaaggctagttatggctacacgaaaagaaaatggactactccccaaagaatggtctagatacgaggaccaaccctttgaagcacagattgtttcaatcaacacaggtgaaatgaccaaaatggactggtttgatctggattttcccaaggctgaagtgttgatcattaatttcacatccactgaatactttttgcctccctttatcaataaaatgccaaatttgagggcattgataataataaaccacagtacctcacatgcccgccttcaaaatgtttcagtttttaggaatttgaccaacttgaagagtctctggcttgaaaaggtttccatccctcagttatcaggcactgtcttgcaaaacttgggcaaattatttgtagtcctctgcaagattaataatagtttggatgggaaacagttccctaacctctctgagctcactcttgatcactgtgttgatctaactcaatttccctcaagcatttgtggaataaagtcactacaaaacttgagtctcaccaactgccacagtttgagtcaactacctgttgaatttggcaaactaagatcactagagatcctccgtttatatgcttgtccatatctagaaacacttcctcctagcatgtgtgacatgaagagattgaagtatattgatatttctcaatgtgttaacctcacatgcttccctgaagagattggtagattagtatgcttagagaagattgacatgagggaatgccccatgattaggtatttaccgaagtctgcagtgtcattgcaatctctgcagcttgtaatttgtgatgaggaggtacaagatatgtggagtgatgttgagatgtccaactcaaatgttcttattcaagtagcagaacaacactatgatctagactggcttcaagagtgacccatgtgtgtctacgttcttgggatgttttacttcccaattctttgtacttgtatattcttgttcatagcctcaattctgaaaaggaatttttctt

SEQ ID NO: 77569 - DNA, 148 bp, Glycine max
  Clone ID: PAT_MRT3847_41061C.1
tgacggtggattttgtgttcttagacagttaaaggaagaaatcgctttatctggggggcgcaacgatatttgtagattacagctaatataatacaacctctttaaactctctaactcaaatccaattcctactatatatatttcaata

SEQ ID NO: 77570 - DNA, 373 bp, Glycine max
  unsure (1)..(373): unsure at all n locations
  Clone ID: PAT_MRT3847_41062C.1
ccgaaccgaaattcccggatcggcccgcgcgtaacacacaaacttcaccnccataacaataccttccttaatctctcctacttatctcttaataaagcgttccattattaccattttccgctactttgtanaaaccaaacacatatcctcgggtttatcgtatctcaaaaggttatcatctacccctgtagatagagatgcttactacaaattctggtgcgatgctacctcttctacccccaatgggtcagcattgttgaagaatgaacgccaacaacttacctcttagatggtatagttcgcatcatcaaactcctaatactacgagactatcaatggttgctaaaacaggaccagtatttctcaaaccaat

SEQ ID NO: 77571 - DNA, 236 bp, Glycine max
  Clone ID: PAT_MRT3847_41063C.1
acgtataaattaaattataaggacctggggggtttgaccaaacacacggcaggtttaaacctatagtcaaaatggcctattgtgacatggaaattaagtatctaggtggtgaatgttgaaaggacccaaccaatctgaaaaactagactagagtggtttctttctttctcaatcacctttggcctgctatatacatacgaatcggtggggaaagaacaatttaaacaccagttatg

SEQ ID NO: 77572 - DNA, 367 bp, Glycine max
  Clone ID: PAT_MRT3847_41064C.1
tgggtttgtgttgccacttaatgttgcatctgccaccagagtctcttgggtggacatgtataacaccgagaacaacacttctagggctgttggataggctctagatgagcctgcagcggtggcttcagacaccggctcacctcatgctgaagctgaagctacaccaaagccactacctattggccccaagagaggtgctgaggtgaagattcttaggacggaatcgtactggtacaaacgctccggttcagtggatgctgttgatcatgacctcatcactcgataccctggtgaggttcgattgaacaaagtcgactatgccaatgtgtcaacaaacaactatgctgtggatgagatcgtggaagtg

SEQ ID NO: 77573 - DNA, 324 bp, Glycine max
  Clone ID: PAT_MRT3847_41065C.1
agctgtttcatcaaagaaacagaagaaaccttttcttttcgattccgacaatgcgggcaccgcttaagagggtgggattcgcgcacaactacaatgtggagatatgctgtgacaatgattgcttcctgaggtaaaatttctaatgcacataggtgttgcgtatccacaacattgtttatggcgtacgcttctacacgctcctataatacgacgcattacaactacccattatctaaaccctattgctcaaagaactacgtactcagacgtcacgtgttttcaaaaccgatttcgcgctctaccagtgcgtcgacgccttcacaa

SEQ ID NO: 77574 - DNA, 365 bp, Glycine max
  Clone ID: PAT_MRT3847_41066C.1
ggaggacgaagattaaattattactgggtactgatatttaggccttgcggatgctattcattttatattatctgtgttggtagacattatacatttttgaaacgctttgacttgctataactttgccatccttgcttcttgatttgaggtaaagcttcgcctgagatatcatggcttacaactgctctttctaacctattcaagctctgttcctactatatggatctgatgtaacaaacggtagtgtcctttctaaccgatgccaccctacctacgcgttcatactacatcatactttttatatagctggccctaacactaattgactggccgctgatatacaacgtggtgactggaaaaaccct

SEQ ID NO: 77575 - DNA, 1352 bp, Glycine max
  Clone ID: PAT_MRT3847_41067C.1
tcgagacgacagaaggggaattatggatttatacagaccctcatcctccgccttgactcgaccaatttcctaacccttgacctgtcccctttcgcttaaccaccatctcatttgcagctgcaatagcgaaataatgaaggaggaggaatcaatagtggttctagttgaggacgaagatgatccttcatcgacgcttctggatctcacgagttactagctccacgaccttgacttggtcaaagtgccatcgcgttcggcgtatcagaactcatcctcgttgggcaaagagatttcaactgtttcgggagtcatgtgtcctcctcacacctccgattttgacacttccactccctccaagacgcttgcaacttcctcaaagacaaagactgtgatatttgtggcattgagatcacaaatgatgctctccccgtaaatcaacacccttttactaagagcactgcattcctactcggcaacgaggtacgcctctttctcttactcttttgcttcaatttctaattccactctttactcttctactctcactttttaatttctctgtagggcactggtctttctcctaaggaaattgagatatgcgactttttcgtctatatccctcaatatggcggtggcactgcttccttgaatgttactgtagctgcttccattgttctccatcatttcggagtttgggcaggttttactgagagatctcgtgatggaaataaatttgttgtggctgagagacccgtaaaacagggtggacgtaattactgcactgaaacagaggattctatcattgaagagcggaaagctagaagagaaaatgctgccaatggtttctttgatgagactgagagtggcaattcatcttcaaacctccttgatgcattatttgttgatggttgatggaaaatgtgtgattactttacagtaatgattaattgatctttgggatcgtaggttgagggcttaaatgcttaagttgcaacagaggataacgaataacttctctacttattggggattggaagaaaactgattactgattattacatgggctggctttatatatgtatgtaccatttgaaaaagagctattagccgggggaaggttgctactgagattaggtgtttatattgtaacttatcagtgagtttgctgcaattgccacccgtgacagggcatgaagttgttaaagccaatattgttcttgtaacatcaacacggtactgccatttgctttactgatgatgattatcaaagcagcttaaatgataaatttgtcctcctgctaggtatggaaaaatcagtcaaatgatgattatcaaagcaaatggcagtaccg

SEQ ID NO: 77576 - DNA, 641 bp, Glycine max
  Clone ID: PAT_MRT3847_41068C.1
ccacgcgtccggaaagccttgttccgccaactttactgaatctgcgtgatgagagccagacccaggagaaaaatgggaagaaaaggtaccaattatgcaatgttgattgtttcttttctctcttgtcaccttaaataaatgagggacgatggagtttcatggtcgtactcgaatttttctaattttgattttagtataccgtgtggctctggctctgtctagttgtgagttgaccataaacttgaaccaagtccacccctctctactggcaagtgaaatgagtgataaagtaaagggttagcggcagattttatgttaatgacaagtcaatgtcaagtcaatgtaggctgtgtcactgtgttgttcaattttaattaaatcccagcatgcatgctagtgttgtgttctctttgttagaattaatttttctaaggtaagcattttttggttggtattttatcttcttaattaatataaagtaagtaaaatacccagtctcttgagctcttttactttaataattaccccaaaaaaaaaaaaaaaaaaaaaaaaaaaaaaaaaaaaaaaaaaaaaaaaaaaaaaaaaaaaaaaaaaaaaaaaaaaaaaaaaaaaaaaaaaaaaaaaaaaaaatttgggggggg

SEQ ID NO: 77577 - DNA, 156 bp, Glycine max
  Clone ID: PAT_MRT3847_41069C.1
taagatcaaaaaaaaaaaaccaaaacaacgatgagagagaacatagggttcaagttcagcattccgaaagtgtttagagttacagagatgcctctggtttcatcagggtcataggcttagtcatagagactcactcgagcagtggctacatcggtc

SEQ ID NO: 77578 - DNA, 288 bp, Glycine max
  Clone ID: PAT_MRT3847_4106C.1
tcggcggccgcttctactttttttttttttactttatcatttttaatttttaacccctgaaaaacccccaaagccactgggacaatataactccccaaactccacacaaaaacaccaatccactcaaacccaatgcaaaccattcacgaacgcacatattacgaaaacaatcattaaacttaccaagcccataaaaaccacataggatatcactaaacgacaccaaaccccactaacaacacaaggacccaagacaaacggagtctatacaaatccacaggacaccca

SEQ ID NO: 77579 - DNA, 356 bp, Glycine max
  Clone ID: PAT_MRT3847_41070C.1
gtctaaccgcacattctacaggggaaactctgaccattgaataaaggccggttgtacaattatgacttgtgtgagaaatacgcaggcgacttgggggacttttgggaacccatacttctctgtgtgaccgagaagcgatcatcagctggtcagggccttctgcatacatggatgaatgctagtgctcatcatcctgaggcatgatgtggcttttaatacaaacaagctgctgaaactttctaatcggatcaaaggagagaggacagagatgtgtgggaggccatggagacaggaatggggaatgggggtatcacttcaaatgataaaccactaatgcatactacatcaaagaaagt

SEQ ID NO: 77580 - DNA, 253 bp, Glycine max
  Clone ID: PAT_MRT3847_41071C.1
ttggaacctttggctgatttagtgcttgaccacgctcacgcgaagcgccactaaacgacgttatatagacctaatgacggtacgtacaggcatcacgatctaatcgttcactacaggcgtgtgtcacctggctcatgtctaaaagaaggtaaagaaatccaagatgacaactccgaatgatgatgcgatcgacgcaggaaagtaagagtaatcctcagacgtagaggttcgatcccactagaaatcattcgtc

SEQ ID NO: 77581 - DNA, 985 bp, Glycine max
  unsure (1)..(985): unsure at all n locations
  Clone ID: PAT_MRT3847_41072C.1
tctcgagccgaatcggctcgagacggctgcgagaagacgacagaaggggacactaatttaattgaccattttatccgctttgtatctctcagtttatcaaaactcagcacaaagttagtttgaaaagaaatcctaccaacaccccccatttaccttagcctatcgaacttacttctactttggtccattctcatacctcaagaaaagcaaaaacagagtcctctgtttactctgtttttcccactctacatattcctacacctatttgtgtatgtcaactaatttataaggttaatgtcttccaataagaaaagtcttctcagaaccgtgttcacagcaaacggaagctgtggttgcagcaaaacaaaatcctctaaagtgcacgagccaacaccaaagtcgaaaacaacacacattcaccaaaaggaaaacaacaaccttagtagcatggcttcttccaccacttccccggagcaagttgatgaagaagagttcacttccaccacaatctccgaatccgagacatttcacgatcacaacaacaacaacaacaacaacgacaacaacaacaatattgtactcaaacgaagccccctggtgaatagcgtggcgattgagaaggactcttcgaatccgtatcatgatttcaggcactccatgctccaaatgatctttgagaaggagatcgagtcagagaacgaccttcaagaccttctgcaatgctttcttcagctgaatgcgcagtgtcatcaccacgtgatcgttaaggccttcaaggagatttgcaaagaagcgtttcctcacaaggttattaccacttctgtcgtgtctgaaccatctccctctcaaagagccccctcattgttccaaagaccaatgaaggncgtggcaatatcattatgcacacaaggcgtgcttgtagtactttaaaagttacatgactctgatttaattccnatattntcatgattcactcttttaaaaa

SEQ ID NO: 77582 - DNA, 135 bp, Glycine max
  Clone ID: PAT_MRT3847_41073C.1
ggcaagatggtctggactggagcttagaaccagcaacagtctaaattggcggcaaggatgtctgcttgaattatacaaaagctcggtttcccatctaaatttgaggattgtcagattcacaatatagttggctct

SEQ ID NO: 77583 - DNA, 259 bp, Glycine max
  Clone ID: PAT_MRT3847_41074C.1
ctcgagccgctcgagccgattcggctcgagcgccggcagcctgtccccctccctctgctccggcgacatgctcctcgacgcactcgtcgcctgttccggggtgactctcaaagccgtcgccaccgcactcgacatccccataatctccgggacggtgagggctgaaggcgatttggattttaaggggacgttgggggtgaagtaaaatgttgcggtggggatgagtgggattcggttggagtttgatttggtatttggg

SEQ ID NO: 77584 - DNA, 352 bp, Glycine max
  Clone ID: PAT_MRT3847_41075C.1
cgaacatttttgctaatgccaaggctggcatggacaagaccaaggccactgtccaagagactgcagaacgagtgacagcgcgtgatccgttgcaaaaggagttggcaacccaaaagacagaggctaagatgaaccaggcggaactggacaagcaggcggctcgtcagtataacacggcggccatacagagcgagaccacggatgtgcacatgggacatgcccaccacaccaccggaaccgggactggaaccgtcacgtattgcaccatcggagaatatggtcagcgcatagtggccgatcagacgtcggcaatgcctggccatggaatcgagcagaccatgggccatgtcac

SEQ ID NO: 77585 - DNA, 468 bp, Glycine max
  Clone ID: PAT_MRT3847_41076C.1
ggctcgagcgcagcagagggaaaataagcctggaaacgatggaagatgatgacgcagcgattgaggtgaggaaccatgtttccccagagccagaggtggaggattccagttgctgttgcccaatttgcttgggatcattccttcaactttcctacctcgacaaatgttttcataagttttgcttcaattgcattttacgctggaccaaggtggttgctagcaagcaccgttctccaccttcttctgtaaaatgccccctctgtaagactgaaaatttttctatcatatatgtagttgatgggagttgttttcaacgtcattatgtaaatcaagattttgagaatagttttatcttatcaagagctcacagatatagagtacaatgctattacactgaacaaggttttgtagatgacatattccatatatcacaatattggagatctcaaaagtactatcagccaaact

SEQ ID NO: 77586 - DNA, 464 bp, Glycine max
  Clone ID: PAT_MRT3847_41077C.1
gctgctagaagacgacagaagggtatctgtcattaatatttctctttcttagagtaattgtttgctaatatattcgtttttttaattagtaacattggtactctaaaactaattaatgtaataaacattatatattgaattttataaagagaaataaatacaattttaaatttaggtattataaatgagaacggaggaaatatttattattttgtgttcattaatttatttatttttgcaacttttcagtaaatcccaaaatattctcacaatattaagtccttttctggattataaataatccttaattatctattttttaatatgaaaaatggctatatttcatttaaatatgaatttagacgtaacggttagtactcccatcatttttataaaaatcaatttataaactgggctcagtccctatctttaagaatcaatctaagacgtctctttcattaatt

SEQ ID NO: 77587 - DNA, 246 bp, Glycine max
  Clone ID: PAT_MRT3847_41078C.1
tgcctgctcaagtacaagtgctacactcagactgtcaaatgttgcagagagcacaagcgtgcagcggcgtaagtgttaccctaatactaataagctgaaagttatagcggggtttggaagttgttctggagtggcagtgggtagcgagagaaagaaaaggaattggaaaggttagggttcggattttggcgagctctatgtccgacgaagcaatgagtgctcattcaaaagtgactcagaaagtat

SEQ ID NO: 77588 - DNA, 250 bp, Glycine max
  Clone ID: PAT_MRT3847_41079C.1
tttttaatcaaatgaaatgtccatagcatagtctatgaaacaatcaaatgcactaaacatcgggcgctcaccacgaaaatgcacaataactcagtttgtgtgtagacatcgctcaccatgaaccttcctaaaacgcaatcagctcttagcaatcatgtacaagaagaattatataggccttgtcattcttacaccacccgcaatgagaacgtatgatgttgtccttagttaccacatctgagtggcaacc

SEQ ID NO: 77589 - DNA, 575 bp, Glycine max
  Clone ID: PAT_MRT3847_4107C.1
ggggctatcaaaaccacacgacccaaattctattctaagggtatattgatttcggatcctgctatttacacccacgtttttctaattacaccctatacctccccccctttgcctctcaattactcattatgcctttttttaaaaaagaaatacacctattttgctttccaaaaatgtatttgggaaattacatatacctattccaaaaaagtatttcctgaattatgattcatagttccagagatatacttttgaaatatcacttaagaattaagatgactgacaaaaaataaaaaaaatgataaatggttatcttataatcatgtttattagttttattttcatcctatcattagtggtttttaaatcctgtttaaaatcttattttcatcggatatttattattctttaaactctaattttaaattatcttcatcatatattcattataatagggggcttttatcattattatgcactattttatgttttccttcatgtgtcactttgttttaagatatgttcatcactaaattcaaatattatacacctttattacaaagcaaaatttttta

SEQ ID NO: 77590 - DNA, 157 bp, Glycine max
  Clone ID: PAT_MRT3847_41080C.1
cgatacgaaaataaataagaagaatttagaaaccctaaccaccatgtctccaaaatcaaaggctaaagctatctgcatcatcttcaaaaaattgatgttacatcttttgccaccgatatatgcatgtgggccatgccctacggcacggtaccccaaa

SEQ ID NO: 77591 - DNA, 552 bp, Glycine max
  Clone ID: PAT_MRT3847_41081C.1
ggaaattataaagagatactgagatttagtttttcttacgttaaaaattgtggttaggatgttagaatttgaatgccattcctgttagtagaggaagtgagtaaaaaaatccttttgaatcattttattctaccgtgagtaggatgggtgtttttactttttatgtggacaagaaaaatgttgttagtgataatgagggttaataaattttgcaataccgcatcctttaaataatttcatgacctgactgtagatttttaagacatgactttagttagtacttagtagaacattagctaatgtcattccttttacaaaaccaactgtatttagtaaactataactgatgcaagggctgttgctgaatacactggcttatcttaccaaaccgtttctacatctctgttgatctcttcaggtcaattatagtgttctcatttaactaaacttatcataattcaggtcaactgagtaatcttactgtttgcattcaattttaaacaatgcatacatgtaactcaggtcgttcctagatggtatgagcattggact

SEQ ID NO: 77592 - DNA, 443 bp, Glycine max
  Clone ID: PAT_MRT3847_41082C.1
ccttacggtaaaaatcacgggtgtttatgaaacaatccgtgttgcttgtactgtgcatgactactgctgattcaaaaaaattttacataccgattctcccactaaataaatcgctcctccacatgtaaacactgaaattttttaccactataccaactctttgtgtcgaaagcataatatttttaacaaataatacaaaattctaccctctataagcaaaattttgtgtaactggactgacatttaattatgttttatgcacatattgagaacaattaaatgcattgcttccacagcttcctaattgagaattactattatacaacccaccgatgtgtgggaacataaattatgcatttacaaaaacacatttcccggcctattttacaaaacggaactccgacccctatattatattttattacaaattaataaatcatttt

SEQ ID NO: 77593 - DNA, 322 bp, Glycine max
  Clone ID: PAT_MRT3847_41083C.1
tcgagaaaagaagagaaagacccgattgaccccctaccgttgtgccttgggacaaaaattggaaagggggctcattggagggtatctgaaggaagggctatcgagcagactgacgcgattaaaggtctgcatcgcgggggtactcacggaagaaagagtggcaattgagaatcgatgagctcggcaagttgatatgatggctggcgtccaccatgagaaacaggcgagggggagtagaggctatgattgcgatctgtctgcaattatattactatctatatgatgactcatcttagtgtcatggaggtccacacctgacata

SEQ ID NO: 77594 - DNA, 253 bp, Glycine max
  Clone ID: PAT_MRT3847_41084C.1
cggctctcgggtaactgcccgcgccagtgtatctcagcggggggtcagacacgcgggctgcgactgggccatagagtctatcatcgtctgggtgagtgcaccgaccacgcggatgcccggagccattctacagctcatacgcgctccataccccgcccaccgcgatggacgcattcatccgacctaacgtctcgacaggccctgccagttgcgacgcggaaacatgataacccggcggcgcgtatggactatg

SEQ ID NO: 77595 - DNA, 285 bp, Glycine max
  Clone ID: PAT_MRT3847_41085C.1
acgagcagtggtatacgcgacctatatcaggaatcaatgcttaaaaagatacgtataattgtatctagatttaagattatgcactagggtaagatgcttgcacagctatgccacacagtgcttcctcagaatccacacccctttgcatcctaatgtaaccttcttcaccccactcgggtccccgcgagttcttgaccaaccaatattcagtcccatcatcactaacaccataccccacggcagtgacaccgtgatccaactaaaaaaaaaaaaaaaaaaaaaaaa

SEQ ID NO: 77596 - DNA, 448 bp, Glycine max
  Clone ID: PAT_MRT3847_41086C.1
agcgccccggctcgaaaatgcacaagaaggaggtcgtcgaggccgccaccatcatcgagaccccgcccatggtcgccgtcggcgtcgtcggctacgtcgagaccccgcgcggcctccgctcgctcaccaccgtgtgggccgagcacctctcggacgaggtcaagcgtcgcttctacaagaactggtaccgctcgaagaagaaggcgttcaccaagtacgccaagaagcacgccgagtcgggttcggcctcgtcggtcgcccgcgagctcgagcgcatctcgaagtactgctcggtcgtccgcgtcctcgcgcacacccagatccgcaagactggcctcgcccagaagaagcgcacctcatggagatccagatcaacggtggctccatcgccgacaagggcgagttcgccaagtcgcacttcgagaagacgttcgaggtctcgtcgatc

SEQ ID NO: 77597 - DNA, 348 bp, Glycine max
  Clone ID: PAT_MRT3847_41087C.1
cccacgcgtccgcccacgcgtccgcccacgcgtccgcccacgcgtccgaaaaaaaaaaaaaaaaaaaaaaaaaaaaaaaaaaaaagaaaaaaaaaaaaaaaagggcggacgttataaaaagagacaagactacgaaaaagcgcgtcgaaaagagaaaacaaaaattaggggggcagataaaggtattacaatgtcgggactgggaaaagaggggagtgcaaaaatcatggggctcgaaaataaaccgctttggacagatgcccatttgggaagggggaaaaataggaaagaggcccccaacagatggccattctaaaaaggctgaatgggactgaacggtgaaatggg

SEQ ID NO: 77598 - DNA, 270 bp, Glycine max
  Clone ID: PAT_MRT3847_41088C.1
aaaaaaaattaaaagaaaaaaaaggaagctaaattagtatgtaaatcttgtctttttaagaactaaatgggacgatgtttggcacagcgttaatgcagtaatactaatagttaatattagtatgtgtgtgtgttcagaagtgctcaaataagtgaagataactattacaaaatatcaatacatagtgcagtgggatcttagtataattccaaagttctcaaacaccaaacttactttgttcctttgtttttatcatggcatgaggcattt

SEQ ID NO: 77599 - DNA, 251 bp, Glycine max
  Clone ID: PAT_MRT3847_41089C.1
gtctttagctcgcgagcatggaccaaggccattactaacggacctgcaatctgaccggaaaaatgtgaaatggaaaaagccggaggaatcaaagatttaaactcgccatccatcaaaggtgcggaatggtttcgagagcgagtggtatcattgggaacgggggtgtgcatgtgccagtggtcaaaggttgtgcaagtctgggagtgaacctcccgtgtacgagtcgagaggaccacgaagcgccgtgctcg

SEQ ID NO: 77600 - DNA, 269 bp, Glycine max
  unsure (1)..(269): unsure at all n locations
  Clone ID: PAT_MRT3847_4108C.1
gcagaactgtttggataggtattcaaactgtgttgaaggaagaaatggtctttaccgttaacaatggagacctctctactttgtccttgttcaagttttgttgctgctgtgtttttgttctctaaattatttttgcngataagtttgtcatttgtgttttatacaagcattttttttattgtacagttctgtcttcgtttttntnnncctttttttttaaattgcatgatcatatattnccctactgttactgcacatnaatttagtnc

SEQ ID NO: 77601 - DNA, 447 bp, Glycine max
  Clone ID: PAT_MRT3847_41090C.1
taaataaacccatatcctagaacttgatgcatgattaatagtacttgaattcattgatcttgatattgtgagccatgcatgattattaatctaatagggaaacacgaaacataaatgaccgtttctgggtccacatgatcaacacaatgaaatgggatacttgaaagcttgtctactttgagagagaaaaaaagacggcaggtacgtctgtgtggactgatgcataaagtccgaaaagtgaggagcgtgtcggtgcattcttgcctttgcaaaaaatgaaatgaaatggtctcataatatacgataatggaatacaaacatgacgcttgataagatggatcatattatagtttcacttcaagatgaacattacaacaacatgtctcattattgaacaatatcagattgtcttgcatgcatgtaacattgattcaaaacaacttcaat

SEQ ID NO: 77602 - DNA, 378 bp, Glycine max
  Clone ID: PAT_MRT3847_41091C.1
cttactcattcgtgcacgcgtgcgacaacgcatacatactaagatcgatgccggattggctcatatagtaactccttagtacaatgaggttcattgctgatatggaaacaaataagggtaaaatgtcggttgatgatgttgaaacttctaaaggtgccatgtcggatctcacaattggtggatctaaaactggacttgcaaaaaacacagtatggtggaaccaatgtgaatagtgaactatgggcaaattttgagacacactggcaattttaaaggaagtgttgatttgcagggcactgatgggattaaatgaatgtacaaaatgttagccacagttgctatgaatgagaattcaagggtatcattgcacttgtgcta

SEQ ID NO: 77603 - DNA, 294 bp, Glycine max
  Clone ID: PAT_MRT3847_41092C.1
aaacacggaaactttttttttattgggtaaaaaactatttattaggagcttgatccttcccccaatcctttatgaaatgcatatttaatggagatttttatcaaaaaaaaattttttatatgggagaacgtccatggggtaaaggtgcaaacctccaattttaagccttaaaaatttaacctgggggggaatccggcctaagggaggttggctattctgaggggggcccaagcccggatggggggagaggggggtgttagggtaacaacagccagcgttaaactggggcgaccg

SEQ ID NO: 77604 - DNA, 554 bp, Glycine max
  Clone ID: PAT_MRT3847_41093C.1
tacggctgcgagaagacgacagaagggggttgcacccaaacaaaaaactaaatatggcaacttcgattaaggtcatgaaggggtttttttgtacaccaattcgccacggcaaccccgaaacagcagtcagcagcagaaaccatcaaaataaaatgaaccccaacgatttccccctccgaagagaggcttgtcgaggcctctgctgaatcggtgaagaggtgagcgaaggagtggttgggattttgaagaaagcggagagtgtgtgtaagttgaaaaggttgatctctctgggtcccactcgaggattctcccccaggcgttcgggaagattcgtgccctcgttgtgcttgatttgtctcagaatcagttaggggtatacacggttttctatttatctttgtgtgtttattttaattattagtctcgagttcgagcttttgcagaaatagttgtgttaaatactcagatatatttgactctaataggattgcttcctgtgcaatacttaggatcttaatctgtcctcttctagcaacaaaaagaaagccccgata

SEQ ID NO: 77605 - DNA, 886 bp, Glycine max
  Clone ID: PAT_MRT3847_41094C.1
aaacgaaagaacaaacactaacatttaattaatacgagagcaacagaagagttggacaatgaattaacagtaaagctgagataccagactcaagagcattcctcccaccatattcaactattacttacaatttcaagattgcccccacaagttaaaaaaaaaaaagacaagtcagaaacgcgaaacataaaacacaaataaactagcaactatagggcatatcttttcattgaaatttaaaaagtagcagaattataaactcattcaaaggcccattggttttccctacgaacttcctcctcttcctcaggggtgaagtcattcttgatgttgaatgtcttgcgaatttcctcaggagtctttcccttgatcatgtctgctactgtctggcaagtaaggtccaaaaggctcttgatattcaagtaatttgcagccagaatgagatcaaagagtgtggcctgatcaaccttgacgaaatcagcgtcccaagccttgagttcatcctcactgggcttctcatcagcgcaattggcctcaacgtgcttcttgcaatactcgataaccttggccagaatcttgctggtaacattggggagaggaattccgctgtcggcgcagttgtcctcgatcatgtgcttgatcgtctgggactccaccgccaccgccaccgcctcctccacctcgaaggcctcgccgtccgaactcttcagtgtgatcttcttcgtcgaagccatcccaatctctctcaaaaaagaactcttctccctcaaaaaagaactcttcttttgattctgtgcttttgttttctctaaggtattgatttttgttttttgaggtccccttctgtcgtcttctcgcagccgtactcgagccgattcggctcgag

SEQ ID NO: 77606 - DNA, 919 bp, Glycine max
  Clone ID: PAT_MRT3847_41095C.1
tttacagagatcttcacacttgaagttcaaaagttctttttctccactttaaaggatggatatctaggaggatcagaagtgtttgacaatgaattaacaataaagctgagataccagattcaaaagcattcctcccaccatattcaactattacttacaatttcaagattgcccaagttcaaaaaagaagacaagtttgatacgcgaaacataaataaaacaaacaaaatagtcagaaacataaactagaaactatagggcatatcttttcattgaaatttcaaaagcagcagaatcataaaacttattcaaacgcccattggttttccctacgaacttcctcctcttcctcaggggtgaagtcattcttgatgttgaatgtcttgcgaatttcctcaggagtctttcccttgatcatgtctgctactgtctggcaagtaaggtccaaaaggctcttgatgttcaagtagtttgcagccagaatgagatcgaagagagtggcctgatcaacgttgacgaaatccacgtcccaagccttgagcacatcctcactgggcttctcatcagcactgttcgcctcaacgtgcttcttgcagtactcgataaccttcgccagaatcttgctggtgacattggggagagggattccactgtcggcgcagtcgtcctcgatcatgtgcttgatcgtctgcgactccagcgccaccgcctcctccacctcgaaggcctcaccgtccgaactcttcagggtgatcttcttagtcgatgccatctctcaaaatccctaaccctaacttttctttttcttttcccctctttcgattctatgcgtttcgctttctcaattgagaatggatttttgtaggtccccttctgtcgtcttctcgcagccgtacccttctgtcgtcttctcgcagcc

SEQ ID NO: 77607 - DNA, 292 bp, Glycine max
  Clone ID: PAT_MRT3847_41096C.1
gggagggaaaaaaacttgttttttatcccgcttataaaatctgaaaattttagggcccccttagggccttaatttattacaacctgcccaaggtgggtttaaatttttttaaaaagagggtcaaaaccccccgataaaaattccccttaaaataacgggtcaactacaaaaattgggcttgccccccccagtttccaaattgggggggggggggtccttccatattctcccggggactttgagcttaagttcctttttttcccccccaaaaaaaaaaagggccctttttttt

SEQ ID NO: 77608 - DNA, 338 bp, Glycine max
  Clone ID: PAT_MRT3847_41097C.1
acggctgcgagaagacgacagaagggggtcgcgtttgggattcaaacctcaaaatggacgtttccgagctcgccaagaagctcggtctctccgattccaaactcgttgtacggaaagctgccgagctccgtcgcctctgcgaagtccagttcgattcctccgtcattggagtcggcgaggttgcaaaatctatcatatgcttggaaatcgccgccatgagactcagcattctcttcgaccgatcctctgcggcgaggctgagcggaatgtccgaaagagcttacatcagatcctacaattcactccacaacggtcttggcgtcaagatgaagttagat

SEQ ID NO: 77609 - DNA, 511 bp, Glycine max
  Clone ID: PAT_MRT3847_41098C.1
agaccaggtatgcactcgtacgcaagcctccgtattcgggtcgtgttgctctggcaattctcataggctctcggcctatgagtatacccagaactgccgcccttgatgtttaggggagaaaggcaagggccactgactacagtaagggatgaaaaggaagaaggaggatgctgatcgatacatgtgatcgggtgattagcttatttacatcaggagtgtgagtgccgcataatacactgtgatagaaatcccgagaacattgttctggatggccactaccctggcaaggtttaaggcttctgtctgggaccgctcatggttagagactggcggacactctaaataaccatgccgtgaacgcaaggtgacggtgcccgcacagagatttatcgcagatgcagcacaacgcccggcagctgtgatccgcttgggagggacaaagtggaccttattgacgccaccaccaatgttgccgagcccttcaatgctggaccaggagttcgcggaagcc

SEQ ID NO: 77610 - DNA, 368 bp, Glycine max
  Clone ID: PAT_MRT3847_41099C.1
cttctttattgcatgtgggaactattaaacctatcagaggtagtccctcaaggacggactgcttcataaggggggccatgacatgggtggggactgatcataccgatcctgagaagacaattcgtaggatgaatgttgcgcctttcaaaggctgaagggccattagggtgggtacattatcgaatgccattgtgcagactgaaccagacatgaatttaaggttctagctctcgagaaccactaccaagggagattgtgatcaaggaatagagctcgcgatgggtaaagattatgtaccatgtcctgctgttgacttgacatcaagatgttcttcaactccattggtggaatctggtttgcataaagac

SEQ ID NO: 77611 - DNA, 1101 bp, Glycine max
  Clone ID: PAT_MRT3847_4109C.1
agtcggttatgcgtaaacatcaatatttatgtgatgtgtatatgatgaaacagaacacacaaaacctgctcagaagcatttcatagagatagaagaacaagtcaaaaggatataccatcgttatttataaatcagcttacattatcttgaagatggaggcctgtttgctttataagtacacatttaataatattagctttgttggcattgatcccattagatagtgaactcgaaactgggcaatgtgtaaggcaaagtgcctgaatttcaattaaaaaagttcttgaaccatccattattacagcaatagcaagcccagctaaaacatttgaatcggagtgttgttgagtgagaaacatttcactggcatttgaaacaacctggagtcctgactgcgacatctcaagaactgcaagctcatcagtggatccaaaccgatttttcacagctcgaagcattcgatatggagagtacttctcgccttccatatataaaacaacatcaacaatatgctccaagacacgaggtcctgctatgtctccagacttagtcacatgtccaatcaaaaaaactgagatgttagttgtttttgcaaatcgcatcaaagctgcagtacattctttcacctgcataatccctccagcacttcctattatagtttcaaggtaaacagtttgtatcgaatcaaccaccagagcacgaggggatagaccatgagtcttcgtcaatatgtcctctatatcagtacttgaatataaataaatattggacttaatcccaaggcgatctgctctaataccaatttgctgaaggctctcttcaccagagacatatacaactggaggtccttcatagtcactgcattcgtttgctatcattgctgcaatctgcaacagcagtgtacttttcccaataccaggatcaccaccaactaaagttaaagaacctggtacaagacctccaccaagcactgtagaaacttcatttccaaaagaaccagacaaaggtattctccattgctggtaattgaatccacggttcacctcttccaatttgacggggcgcaagtcttcgggtcgttgcgggagccacaagcccact

SEQ ID NO: 77612 - DNA, 426 bp, Glycine max
  Clone ID: PAT_MRT3847_410C.1
gcgcatttgatgtccaatatgtcatacacaaagttgagacccgtttttcttcctccggagcctcttacactggatgtgaaatgatgtcggctcgagtttcgaagcgtattaaagagcaagaatcttgtcaggacttgttcgaatcgaaaagagagaagaggtttttgaaagggattcccaggctcaaggaagtatttacgaagtacaaggctaagacaagaaaaagggcttcgaaccattgggcgattcgagttggcgtatggtcgagtcgaagccaaggcagcaagatttctggacttagcacaatttctgacaaaacttcacaaaatcagttcgacttcgagcaatgaggataaccgttctaaggagcagttatgtgcatgtaaggtgtacgtagcaagacacttggcattaagatagtgttcg

SEQ ID NO: 77613 - DNA, 695 bp, Glycine max
  Clone ID: PAT_MRT3847_41100C.1
accgcagctgacacctctgcaccacagctgatgcaaacactttcgttctgttaatgtatccatcatacacgtgtgttactctcatgactctctatgagttgcttctcgagcgcgaggatgaacattctacaaaccctcttatttcctcactcgcatatgttgatgagtctctttctgatgtgggtatgctgttctgctgacactgacgactctgcgcgttacaccgcattgtgctgggatccatgctcagatatagtgggacaaaccaatgccatttggatctgcagtaaaactctgaggtgcagaggggactaaaccacgtaagtattctacatacatttattataaatcgacgtgtatcataatgtgaacaccttctcagttagtgaactgaacttatgtgacagaatatgaccacgactcaatcatgtttagatcatgtctgagatgcgatgatccaaaaggagtagtacaatgtggaacaatcatgaaatacaggactcgctcttaccaagtgaaggacaagacatgaatcccaaagacaggcgaaaacttggagacatccctggccttgatgaacaaaagatccaaagaagacaaaaaggtcttaaaaggatgtgatggaaaatctcattggtccatcatttttgcagcttacacaaattctccggagggggatccaaggtttgaaaaac

SEQ ID NO: 77614 - DNA, 241 bp, Glycine max
  Clone ID: PAT_MRT3847_41101C.1
ggcccctggtatgacccagacaacctcttgccactggcttggcccctggtatgacccagacaaccaccaccaccaccacagagcagactcttttgaactctggactcgagaacagaagaatgagccagggatacgtcgagcctttgatcgagaacagaagattgagcagaggttacgaggagaccaccctcagctctggctcttactccaacgtagctggaaaccgcctcagcgtcacccg

SEQ ID NO: 77615 - DNA, 455 bp, Glycine max
  unsure (1)..(455): unsure at all n locations
  Clone ID: PAT_MRT3847_41102C.1
agacgacagaaggggatggtaagaacataccaccaaatgcccacttatgcgaagttgcatttgagtgaangaacatnnnnccacatgtagataagggttggcatctgcagcccaaaaagtataccaaagagataagaagtccagaatggaaaaaagtctttgtacctactacaagcttagcatctagcatgtgagatctgaaactataatccccatgaaagttaggcatgaagaaaaatatgttaacaattcaagatgcatttgtataaacttgttgacagagcattaagtaggggagttacagtcatggaacatatttagaaagctatatatcaatctgccaaaaaggtatataggattactttggacggtgactttagaaccaagtccatcatcataggttccagctgtacaaaactgcctactcaggggtgctacaccaatggatgatgcat

SEQ ID NO: 77616 - DNA, 127 bp, Glycine max
  Clone ID: PAT_MRT3847_41103C.1
gacacgcgtgctggaacacaagctcatccagatttgcgtaaacactgtcagaaccgtgatgacgacctgctctattaccgtcctttcacctgcgacgtttgacaacatatctttagattggaacaca

SEQ ID NO: 77617 - DNA, 215 bp, Glycine max
  Clone ID: PAT_MRT3847_41104C.1
ccgaaacaaaaaaacatataaaacgtctttgcagcagaagtaaaatcattttcctattcctggctttaaagggtacaaaaataataaatctgccaatgcacacatttagcaattggattattcgtcccttaccaagggaggcaactaaacccagatcccccgcccgtacaaatatattctcgctctctagagtaacagagtagaatttaaaaata

SEQ ID NO: 77618 - DNA, 429 bp, Glycine max
  Clone ID: PAT_MRT3847_41105C.1
caacaaagagctacaagcagcaaagcccaatgtgagtaacagcaaggagttgcaaacagcaaggcccaagaggcaaagccacactcctagtcatttgaaggattacgtattagttgcataattattccctaagcttctagaagatacaagtggctcaagaccgaggatcagtactaccttggagccaacaactccattcggggtgcatgtgtgcagaatgtgctggattctgtgatatctgctctcttggaggacaagaatcgcaagtttatctatgttgagatggcatttttccagagatggtggagacagcaaagtaaagcaacgaaaattaaagtcaaggagcttgtcaactcgggtcagttggaattcataaatgggggtatgtgtatgcatgatgaggccaccccgcattacattgatctaatt

SEQ ID NO: 77619 - DNA, 313 bp, Glycine max
  Clone ID: PAT_MRT3847_41106C.1
gcggtgcgtgcgcccacacgttcgttccaaaacgccggcgaccgaacccgaattgaagtccacagaagacaacaatgccgcgagttacagcaataataatattaataaccacaccgacaggggtgggagcaaccacggataggagttgttttttggaacatgggggtgacacccaccatgtgaatagtgggaaataaccctcaaaatactagttattgcggggatttataatagccctttctctcttcttttttttaacattggacctctttattttcttcaacgcgatcaaggaaatcggcaattggccccc

SEQ ID NO: 77620 - DNA, 332 bp, Glycine max
  Clone ID: PAT_MRT3847_41107C.1
atctttcgaccgccgatctggagcaccacttccaagggtgattgcgatcaaggaaacgatcactctctggctaaagacactgtagcatgtgctgctggcggcatgacaaaaagggacactccaactccactgaaggaatctggtgacaaaaaagacagctggttcatcgaggaatattttgcaaggacgacctacgtggatcataacgttaatcagccccaaaaaaaggattggctggagggacagttctcctccgatagtaaaagttctgtataaataggcaaacgaatgctctactaaaggaaacaaggttagtgacaaaacctccaaaa

SEQ ID NO: 77621 - DNA, 165 bp, Glycine max
  Clone ID: PAT_MRT3847_41108C.1
atctcgaggatgtgagttttttattttccacaaaggccaagtcacgatctgacattggggaagtcaccatgaaaatggatcaaaactgtatagaattgggaaaacgtcgttcaaatcaaatagatcaaattgcagataggtgaagctcgattttacagtagaagg

SEQ ID NO: 77622 - DNA, 708 bp, Glycine max
  Clone ID: PAT_MRT3847_41109C.1
gtggggtgggaaggttatcttgagaatggttattacttgcatggctattgggggattttggttgataggtatgaggagatgattgagaattatcaccctggttttggtgaccataggtggccattggtgactcattttgtggggtgcaagccttgtgggaagtttggggattaccccgttgagagatgcttgaagcagatggatagggctttcaattttggggataatcaaatactgcatatttatgggttcacgcacaagtcgttgggtagtaggggagttaagagaatacggaatgagactagcaatcctctggaggtcaaagatgaacttggattgcttcatccagcgtttaaagcagttgaggtatcataatctaaatgagctcctctcttcttcttctcatgcggttaattagtcagaaaactcgtcatgtaagtgcgtgttggtggaatttgtggcatatttagttacagtctttacagacatagaaattttgctcctcacgtttatttgtgagtgatggtatgttatgagaatatatatacgtttttttttttggttaaatattgctaattattttgtagcctctctctttctttcttggtcttaaacttctcaatttatgtttgtagattattcctatccgtgaattgtaacacattttttatgaagtaatggaaaaagttgcatggtggttcatggtca

SEQ ID NO: 77623 - DNA, 213 bp, Glycine max
  Clone ID: PAT_MRT3847_4110C.1
atttctctttcttcatctttaacttcactctcactcttcttcttcttcttcccgattctttctgatctgggctgggttttcagcatacaacaaaattgggtgctttcggttaaactgtgatgtctccgtcagtgctgagcatagttgatgaggagggtaaaagcaatgacatcttcttcaccgcacaatgacttaacccgattcatggccttt

SEQ ID NO: 77624 - DNA, 320 bp, Glycine max
  unsure (1)..(320): unsure at all n locations
  Clone ID: PAT_MRT3847_41110C.1
ggcgcgagggctccagagagtgatacattacatagtgcgtacctgatacttacacacagctatgtgccaacatggagaatatgcagatattctatgcacaagaggcttgccagtggagggcagatgatcgcttggccgaggaagatagaagttacacttaggccccagctttctaacacgtgactgatgagcacacaagacattctctatgatacgcatgggacgaggaaaggttatgtgggactcactcatatagtgtacggngaattactgcttgagatgtgaagctatgacgatcatgcatcgtatactatatgggg

SEQ ID NO: 77625 - DNA, 492 bp, Glycine max
  Clone ID: PAT_MRT3847_41111C.1
ctcgaaaactggtcaatcattccaaaatccaaacccaaacacaaaacaccaaatttcttgaaccttccccttcaatataaaatccctagtttcaaaatctctcccaaactaaaccaaatcaaatttccaaaaccatacacacaatttccaaatcctccttcaaaagggagttcaaaacctcttcctaaccaaaaccacactcgaagtttccactttccaaatcctccttcataagggtggctcaaaacatcttccaaacctaacaaaatccacaacttaaaaaaaaaccacacacacacaaaatttctaaatttctccttgagaagggaaaatgcaaaataccctgcagcaacaaaccgaagaaagttcacaacttccaccgaaggtgtccttttccgggcacaagatgggtgatttgagtgatgggcaacaccatggtgggtatttggccgtggttccccggtccagaccggcctgcacatgctcgaaccg

SEQ ID NO: 77626 - DNA, 541 bp, Glycine max
  Clone ID: PAT_MRT3847_41112C.1
atgatacagttaagtgagtgtgacatgtattggttcatcttgttattgtgtgctattatatcagatctgcacatttgatttgaatacttataattgtctagaactttttgtttttaaaaagtgaaacagtcaaccttttattggtgctattttttagtatatatcaatcaattataatcaattaactaagttaattcttgttcatttttttaattttatttgacaggtgcacctgccaaaaatcacaattttgtattattttgtctgttttttttcttcttaatttgaggaagatagcctttacagtctcattaaatgttacaaacacattcagtgtaatgtgaccacaatatgggctatgtggtcacaaccgcgcttaaataatacggaatagactctctgtattcaatgtgtaaagtcaactgtatcattcaaagcagcggaaatggaataactgttccatgtgacgcaatgtactctttagcttactcttgtgccatctttgtgccccctcccccccccctttttttttgtcctggtg

SEQ ID NO: 77627 - DNA, 153 bp, Glycine max
  Clone ID: PAT_MRT3847_41113C.1
acaccaccaatccaacagaagatgtttctacacattgttttccttctttcccttgtgtcataggcttcttatgccagtgtccaagacttctgagtggcatacctcaatggtgcacacacccttttaggcttcccctgcatgtctcctggttat

SEQ ID NO: 77628 - DNA, 177 bp, Glycine max
  unsure (1)..(177): unsure at all n locations
  Clone ID: PAT_MRT3847_41114C.1
taatccagnaggagatttcttgaaaaactcaagtcctgttggngtaagaggatatattcagtggnacttntatngtgttttcattttnctgtcctnttaaantttaataaatagggcctgatttttctccngtntnagtacaatggcgagtngaaaattcnttcatgtatttggnat

SEQ ID NO: 77629 - DNA, 342 bp, Glycine max
  Clone ID: PAT_MRT3847_41115C.1
tcgcggacgcgtgggcggacgcgtgggtggaaattctgattctagaaactgcaaacagaagcggaatgcagtgcatggagatgctgtggccaccaaaaatacactagaaagtgatcgtcagttgaatagtggcaggattacagagcccaaatgtgttactggaaactctgattctagacagtgcaaagcgttgcataattcgcatcatggagatgctatggtcacagatcatgcagctgctgatgtcatacatactggagttgaagatggaagtcataaagtgggatcttcgtgcaagtattagctacagattcctccactaacgtatgatgcctgggactc

SEQ ID NO: 77630 - DNA, 937 bp, Glycine max
  unsure (1)..(937): unsure at all n locations
  Clone ID: PAT_MRT3847_41116C.1
ttcagccttctttctctcacacacactctctctactaaagtcgcaaacacaaacactttgtgaagtgaagcaatggagtttcagatttagatctcgtgctaaatcatcgatccgagagagagaaagagagaggtgttggattattgattctccgaagcatttgagggtttatcacacactcattctcaaactcttcgtcgatcagacgaaaactgaaaaccccaaacttattcattaatctccacaacatgacgagtgtgattctcagaagatcctcttccgtaatctcgcgccgcttcttcgccgctctcgcctccgtcgagccgcttcctcgcaggttccccgccgacaggcacggtgtatccggcaacggagcccggacctttcacgcgaatcccggaccgttgaatttccgagcttcgctggttcctcgagcggcgcagttcgccatcgagcgcgattactccaactacgaggaagttagcaacgcgaacagcgacgaaggactcgagatcgcgaagctcgggatcgctccggagatcgtggatgctctggccaggaaagggatcgcgaagctctttcccattcagagagctgtgctagaacctgcgatgcaaggacgtgatatgataggtcgagctagaacaggaactgggaaaactcttgcttttgggatacccatcttggacaggatcactcagtttaatgctaagcatggacaaggaagaaatcctttggctttggttttggctccaactagagaacttgcgcggcaggttgagaaggaattcaatgaggctgcacctaacttggccacaatctgtctntatgggggtatgcccatccagcaacaaatgaggcagcttaattatggcgtagatattgcagtaggcacgcctggtcgaaatattgatcttctcatagggnggcactgaat

SEQ ID NO: 77631 - DNA, 250 bp, Glycine max
  unsure (1)..(250): unsure at all n locations
  Clone ID: PAT_MRT3847_41117C.1
cgcacncncaacncnncacnngnnaaggcnnccggcngaaagnncnaaacncaacgcaagggagcnnagcaaagncacgnnagagaacncnncaaaannggagcagcaanggcncncgcactacgaagcancaaccaaaacgcgcanncncagcanngacggcggaggaaccaccgccanngncgccggcgccnccctcgnccaccncgaagaccagaaccgcgcccaaaccgccganccncacacgcaa

SEQ ID NO: 77632 - DNA, 921 bp, Glycine max
  Clone ID: PAT_MRT3847_41118C.1
aatacgatggaatgtgagagtcgttgcccgagaccatagagctagccatggttcaacaatttatatataatagccaacgttttgcaaaaccttaatagttgttcttcagagtctgtcttgcatcttcatggtaaggaaaatgtctggtgctccagtacttcctcgggaactcatagtggaaattctgtcatggcttccagtgaaggctctcatgcgattcaggtacgtttccgagacttggaattccctcattttcgatcctacgttcgttaaattgcacctagaaagatcccccaaaaacacccatgtcctattagagtttcaagcaatctatgacagagatgttggccaacaagttggcgtcgcaccctgctctatacgccgtttagttgagaacccatcattcactattgatgattgtttgaccctattcaaacacactaacagtatctttggttcttgcaatgggttggtttgcatgactaagtgttttgatgttcgagaatttgaagaagagtgccagtaccgattatggaacccagccacagggatcatgtctgagtattcaccacccttatgtattcaattcaaagataataataatacctactatccttggaaatgtggctttggattcgatgattcgagtgacacttacaaggtggtggcactcctttgcgatattaaatcgcagacaaaggagatcaaagttcattgcttgggtgacacttgttggagaaagacttcgaatttccctgcttttcccgtgctgggagaaggacattttgcgtgtggcactgttaactggctagcactacgcgtgtcaagttttcattatctatgggaaaatgttactatcgatcatatcgatcagttagtaattttttcctatgatcttatgtacgagacatacacatattt

SEQ ID NO: 77633 - DNA, 401 bp, Glycine max
  Clone ID: PAT_MRT3847_41119C.1
ctcggaatgcggctcgagattcccttggttttaccacaacatgctcacttttctcaagcgacatggtgacacatctggaaatcctgtgcgggggcttgttggtcctcatgatgcacctgtctatgaccagcccccatacaaagtgttgttcaaagcagtggcttcaggggagtatacttattgcgactaaggatctctctggacctccaaacagctcaaagggcatggctactgcctgatttaaatagcatcttcaactcttggtgactctggagaggcgatctatgggaaagaaccgtcttctgcactcttggtctggagcacggtcccattcttgagacaaacaccggggttctatgacacagtgcacagcgatcgctatcgaccatgtgcacaaatgt

SEQ ID NO: 77634 - DNA, 719 bp, Glycine max
  unsure (1)..(719): unsure at all n locations
  Clone ID: PAT_MRT3847_4111C.1
gcacatcaccctctacctacacacatcaaggtggactaatatctaaaaccttgatacatacatacacatctttggtgcaaccaacataatcaaattcaaaggcaatgaagtttgggaaagaatacacatcccaaatggtgccagaatggcaagaagcatacatggattacaattttctgaaatcccatttgaaagaaatacaacgtttcagacaaagaaccaagcctcctacagccactccaagaggcctaagaagaaagctaacactatatagagccttcagtggcctcacacaacaaaaacactaccaacaacttagtccctcagaacatgacatagagagccaacctataatggtgcactcagtgaacaaccatgatggctatgagaagtaccaaactacattccttatgacttcagaagaaggtggagaatacgagttggtgtacttcaagaggctcgatgatgagttcaacaaagtgggcaagttttatagatcaaaagtggaggaagtgatgacggaagctgcaatacttaacaagcaaatggatgctttgatcgctttcaggatcaaagttgagaacccaactgggtcgtttgatcgatccattgagatgactcgtcttgcttctgatgttgcttcttcatctgctgngttgncagcttccacacccaaaggagccaaattgaacagtaactcattttttcaacccttcaac

SEQ ID NO: 77635 - DNA, 154 bp, Glycine max
  Clone ID: PAT_MRT3847_41120C.1
tatttactgtagcatgattgacggcgtctttggatctaccataaagaaccattagtgtgtggatctctagtacaagcttaacttttaaatctaggggcttattctaatacaatatgaacgttagttccaccatatctctaaaggactgacacca

SEQ ID NO: 77636 - DNA, 2223 bp, Glycine max
  Clone ID: PAT_MRT3847_41121C.1
aaacactagtaaagggaaggaaccgcgccttcctcaatctaacgtgcctcgcgaggctgcttctcggtttgggttggctcctcaaacactagtaaagggaaggaaccgtaccttcctcaataaaactttctctccgatttggcttctcagtttcggttgtcatcgtcggggagaaacaaaaaaaaaacccacaaaaagattataacccaaaaaaccaaaaataaaataaaatatgaaaggtaaagtactaggatccgctgtttctcttatcctagtggtgggtgtcgtaattggcgtggttgctgtagttcaaagtccaaagggcgtgaacaacaacaacaatggaggagaattgaaaaccagcaacagggccgtgacagcgttgtgccaaggctcagacgaccagaaactgtgccacgaggttctgtcatcttcgaacagcacagacccaaaggagtacatcgcaaccgtggtgagaacctcgatggacagcgtgatcaaagcgttcaacatgagcgacaggctgacggtggaacacggcaacagcagcgccggaatgaagatggctctggaggattgtaaggacttgttgcagtccgccatccacgacctagaggcctcaggcgtgttggtcaaagagagcagcctacaggacgtgcaccagcgcaccgccgagctcaagaactggttgggagccgttgttgcctaccagcaatcgtgcctggacggcttcgacaccgacggcgagaagaaggtgcaggagcagctgcaatctgggagcttggacaacgttggaaagctcactggcttggcactcgatgtcgtgtcagggattacacacattctccagtccttggacttgaaccttgctctcaagcccgcctctcgtcgccttcttgacgttgatgatgatggcttccccacttgggtctcctctgctgatcgcaagctcttggctcagctcaacgatcctgttttgccccatgctactgttgctaaggatggtagtggtcaatttaatactgttttggacgctattaactcctaccccaagcatcaccagggtagatatgttatctacgttaaggctggtatctatgatgagtacatcaccgttgacaagaagaagcccaatcttttcatctacggtgatggcccctcaaagaccatcatcactggccgcaagaactttcacgagggtaccaagacaatgagaaccgccaccttctctactgttgccgaggatttcatggcgaagtcaattgcatttgagaacaccgctggtgcagaaggacaccaagcagtggcacttcgcgtgcaaggtgatcgttcagtgttctttgattgtgctatgcgcggttaccaagacacattgtatgcccacgcccatcgtcagttctaccgcaattgcgaaatctctggaacaattgatttcattttcggatactccaccaccttgatccaaaactcgaagatcttggtgaggaagcccatggcaaatcagcagaacatagtggtggcagatggcacagggcagaagaacatgcccacaggaatagtcctccataactgcgagatcatgccggaccctaccctcttggcagaccgcttgagcgtgaagacttacttggccaggccatggaaggcattctcaagggcagtgttcatcgagaatgttatcggggacttgattcagccagatggttatattccatggaacccaattgaaccaaacacacaggattgctacttcgctgagtttggcaacactggaccaggttccgttgctcaagcaagagccaagtttggcaaaggtctcattagcaagcaggaggctgcacaattcactgctgagccttggctccaagctagcacttggttgcctgctgctggcgttcctttcgatgctagcttcaccaaagcttaaggatccgagacaaaccagcatcttgagtgttataatctcttttttagcctacctaaattaataaaactataaacaggaaatcgattacctaatttcaatgcagtcacacatagccactccattgtctgaggagctgatttgtaatcattcaataagcttttcatatttatgatttatgcctttttgtatcaaccacttcatctctgtcttcagtatgcatataacatagactgatgatgggagaagcaatgggaattttgcttttggctatttaatggaaactacttaatttgccc

SEQ ID NO: 77637 - DNA, 272 bp, Glycine max
  Clone ID: PAT_MRT3847_41122C.1
tctggactatactcagatttctcaacaatcaatctgttactctttctaccaagtcacacatctagggtttccgggctttgatcttctctatgcctctgtgctgatacgtaaagtgggacacaggattgggagtggggagactgacattaattctgactcaatgcgaattgcttggataacctcgggcaaatggtgagtcctggctgcttcacttgttttaatcttgcttcaccaagctcttgcaaggtcacgtacgatggcctaagtctggg

SEQ ID NO: 77638 - DNA, 340 bp, Glycine max
  Clone ID: PAT_MRT3847_41123C.1
ggctcgagcgaagagaaaattggaattgatttagatttatagcacaaggccaaaaatagcaccgtatcttttactgggacacgaaaaaaaagctcgcatgcgcgacttctctatctagcatagatacaacgatgtccattctccgaaacatcacaaagaaacccaactgacagagcgaagaataagaagaatacaaagaagaagacgggacgacaacaatggggggaatcgcaatgcgatctgccttcaaatccaaatctgcacacattattatggctgctttgcttctgatgataatgtccttctatgctggcaacctgtttggcaacaatgctaccct

SEQ ID NO: 77639 - DNA, 196 bp, Glycine max
  Clone ID: PAT_MRT3847_41124C.1
cgctattcaaatcatgcacccatgctgagacataacagatatacactgctcgtacgactccggagtccctacggctcgccgaatcctattcacaattacatcgcctcttcacacgcacaaccttgcgtccaatacgccagctattacttcaaagatcgctaaatctgactatagtatcccggagttcataccctct

SEQ ID NO: 77640 - DNA, 699 bp, Glycine max
  Clone ID: PAT_MRT3847_41125C.1
acatcatacctgcaattacataatatttgaagattacataattgatcaggacaattcggctcgagacggctgcgagaagacgacagaagggacatactgcaaattgtacaaaatttaagtatagcagatctgtaaaatttatgaaaatcagacattattgtttcaaaaatagaaagtgcaagagcaggaaaaatgcagttcaaaccagaaggcaaaaataaactacccagaatttttcagcaggaaagaaagaatattatagtattaccatatagatggcctaaacttttttaaatatatttttcctaaaagcaataaaaaagcagtgagcttagttttttcaagatagaaattaaattgattaaagacaggactgtccaggtaccagaaccaacaacaccatttttgtgtgtgtgaaagagcaccatttaaataatccatctgcatcgatccacaaggaaaaagaaaatattgtctctttttaaaaagaggaaaatcaatcatattaggagaaggcaaattgcttaacaatgagaaaagaaaaaagaaaaaagaaaaataatggtattatatagatacaaaagcctcctgaggttttggaatatctattacaggaactcctaatgcaagttccatcttcagcataccatagaatggaacaaatgcacaaagcacaattatacagtaccggacgcgtgg

SEQ ID NO: 77641 - DNA, 896 bp, Glycine max
  Clone ID: PAT_MRT3847_41126C.1
ggctcgagactcgttatccctctttctttcctcttccaaactcaacttggaattctccaatttccaaacaaagcttttctatcaacatatcgttctcgtaactctgctcaaccactagtccacttcagcgacgcaagacgaataacattacataatcgaatttacattcgacacttaaaacgccgatccgtacatttctctagctgtgtcgttttgactgatcaatgaatggtattccgagacacgagcgccgatgggcgtccgacagcgttccgggaaaagcgaccgtcagcgccggaacttcgccgggaactgagtccaactccgccgcggaggagtttgtggaggtgactctcgatcttcaagacgatgacaccatcgttctccggagcgtcgagccagcctccgtcattaacatcgaccgcgggcggacgcgtgggcggacgcgtgggccggcgtcggtttcgaggtctccgacgatccgtcggagctcgtcgagaggattccggcagttctcgcaggagctgaaagccgaggcggttgcgaaggccaggcagttctcgcaggagctgcggcggttctcttggagccacggccacgcttcgcgcgcgctttcgtcttcctctgctccgaacggcgccggtgccggattcgaaacggcgttggcggctcgtgctctcaggaaacaacgagctcaacttgatcgcacacgctccggcgcgcacaaagcgcttcgcggtctaaaatttatcagcaacagatccaatggcgttgatgcgtggaacgaggtgcagagcaacttcgataagctagctacggacggttttctcaagcgcaccgattttcgctcaatgcatcggtttgaaggatttcgaaagaattcgcctttggaactg

SEQ ID NO: 77642 - DNA, 266 bp, Glycine max
  Clone ID: PAT_MRT3847_41127C.1
acaaaaaagacaacccagagagcgcgtcttaaaaacgctcttctctgaaaacccccatttcttttcttctttcttcttctctttcgcttcttcgatcttcgatcttcgtcgctgaaaatgagagagtggcatttgattccacatcggccaggcccgggattcaggtgtggaaacgcctggctgggaggctttactggcctcgaacacggcattcaagcctgatgggcaagatgccatagtgacaaggaccgttgggtggagggcga

SEQ ID NO: 77643 - DNA, 506 bp, Glycine max
  Clone ID: PAT_MRT3847_41128C.1
ccctccccccccccccccctctgatatgatttcacatatcctcttgtgtctttttacccaaaaaaacatggtaaaattaaaagcacagtgatttaaccgtacaagtttacctgtagtgtttttggccacaaaatataacaaggggtttgacttataaatggagtttgtttctgggcccatccccacaggaactaacggccaaaggatgaaatagcttgactttatcaaaaattactttatcttaaacacaaccgctaggtttgctgctttcccaataagggcccatgcccctggctgccctgcgtttttctttcccaaaagccaacatcttccttaccgccattcccgtgttgggactaaaaacttttctttgatttgaaaaaaaatgcactccttctttcaaaaacgttttatttctttgatttgacacccatgatgctggggttaagacgggcccactaggattaagttcatttattttcaagaaaccttaccccactgcttta

SEQ ID NO: 77644 - DNA, 1567 bp, Glycine max
  Clone ID: PAT_MRT3847_41129C.1
gcagccagttacgtgagggggcttcagggaactgacggtaaccggttaaaggtcgctgcctcttgcaaacactttacggcttatgaccttgataattggaacggtgtggatcgctttcactttaatgcacaggttagcaagcaggacattgaggacacgttcaatgtgccattcagaatgtgcgtgaaggaaggcaaagtggcgagtgtgatgtgttcttacaatcaggttaacggggttcccacctgtgcggaccccatcctcctaaagagaacagttcgtggccaatggggtcttaatgggtacattgtatcagactgtgactctgttggggtgttttacaatagccaacattacacatctaccccagaagaagctgctgccgatgccattaaagctggtttggatttggattgtgggccttttctgggacaacatacgcagaatgctgtgaagaaaggcctcataagcgaagctgatgtgaatggggctttattgaacacattaacagtccaaatgaggttagggatgtatgatggtgagccatcaagtcatccatataacaaccttggtccaagagatgtgtgcacccaaagtcaccaagagcttgcccttgaagccgcaagacaaggaattgtgcttcttaaaaacactggtccttctttgcctctctccacacagcttgatcgcaccgtggctgtcatcgggcccaattctaatgtcacttttacaatgattggcaattatgctggtgttgcttgtggatacaccaaccccttacaagggataggaagatatgcacggactgttcatcagttgggttgtcaaaatgtagcctgtaaaaatgacaagctgtttggacctgctataaatgcggcccgtcaagcagatgcaacggttttggttatgggcttggaccagtccattgaagctgaaacggtggacaggacaggcttgcttttgcctggtcgtcaaccagaccttgtttcaaaggtggcagctgcctcaaagggaccaactattttggtcttaatgtctggtggtcccgtggatataacttttgcaaagaataaccctcgaattgtgggtattctgtgggctggttatccgggccaagctggtggtgctgccattgcagatatcttgtttggaacagctaacccagggggaaagctgccagtaacatggtacccagaagagtacctaacaaagttaccaatgacaaacatggcaatgcgagcgtttaaatcagcgtatacaggaagaacgtatcggttctacaatggtccaatactgtttaaattttgacattaaatgacatacacacacttttggtttacactaacaagtgcttccaaccgtaaattgtttatatgttataacctccaaaacaggacggggtagatttgatttatcaatcccagccaataaagtaatagggttgggtgcgatttttggagaaaagattaggaaaatgtattgttttttttcccattcatttttactttttttgccattctttttgcttggacttttatcaaaacaaaacattagtattttttttttt

SEQ ID NO: 77645 - DNA, 169 bp, Glycine max
  Clone ID: PAT_MRT3847_4112C.1
gtttatgtccaaatagaaacttgaaatttaccataggattgactgatgaattcagttattcttttgttgtatttgcagggaaaaaggttcttctggaagaatctttcgatatttcaataatccgtagcatgtgtgcttgttttggcccaaaaagaccataaaaaatagc

SEQ ID NO: 77646 - DNA, 196 bp, Glycine max
  unsure (1)..(196): unsure at all n locations
  Clone ID: PAT_MRT3847_41130C.1
gngangacgcgtagtcagcncgggcttcggcncgagnngcntgnncgcaaaaccntcaatggcgtcagnttancntctctctcntnnangtctncntcncngntgcagcagngtntcnccggtanctcgaaggctcctattactcaatancgcnaggaaaagtgcgcgcttttcggtcttcgntcaaaagaaggcn

SEQ ID NO: 77647 - DNA, 555 bp, Glycine max
  Clone ID: PAT_MRT3847_41131C.1
aaaaagggaagtttcttttaaacaattcatataaaaaatttttgctttaaatatcaagaaaagtaaattttgaaaggaaagttcaattacatataaattttgggcattcaaatggacaagagagcttttgaatcagggcaaaattacctttttgattccccagttgggcttcaatttcaaattttgccccccattaaattaattcacaatttttttttctcctactttttaaaaccaggcaaggggggcccctcaccccacaatgggacgttgattgttacaaagggacattgactaccatggggcacttttttattgaaggaggatgggcacgtatcatggggatgttaattccataaaaaaggaaatacattggttgttttctttgccccatcaaaacatgacccggggaaagtcttctttcaataaaaaagggacccgggacaataatcaacgtcaccttgtaacccgttaagggttcaaggggggactggaggaccaacattacctgattttataaaaaaaaaaaataatattggggaattaatttagggg

SEQ ID NO: 77648 - DNA, 650 bp, Glycine max
  Clone ID: PAT_MRT3847_41132C.1
gctctaagaaagatatctatgataataaaaagaataatattacaagcacatatatgtaaaagaaatgaacattgtgacattttttctttaaattctttagtctaaaggatcgaaatttcagaacttcaaactaaactgaaatgttttttatatccactataaagcaccaaaactttgaggtaacattaggttccatccatgtcatgctattcaaacatttgagatacacagattacagagttaggctgtatatgtgatcgtttctcaatatatgctcgaagctttcagttgacttctgcacaggatgaatatgcatcccttcgtaggttgttaccacaatctcttcgtctttagtatggcgttggatttgtttcttcacattgcaacctcgataagaacatctgcagtaactatagttaacaaagataagaatactagacactcataacaacattttggatgttctcctgatcttaaaaaaaaactacgatttctacttcctatattaacatatcatgtaattattttgaggcgacaaactgaaaaaatttattgtttaattctacgaaaataaatcgtttcagggcaaagaaatggctttgtaaattttctgaaatatatatatgcttaatccagtatatcaacatgac

SEQ ID NO: 77649 - DNA, 263 bp, Glycine max
  Clone ID: PAT_MRT3847_41133C.1
cccatcatgcaacggcgtatcgcaactatagtgctaactaatatcagttcgatgcccgtcgaattacaacgtcgggactggcaaaacgcgggtgaaaccgaacctactcggaaggcctaacattcgactttgagacgctagcgtaattgcgaataggcccgttacgatcgctcttgctaacagtggcaccaacggaatggcgtatggtgctcaccctgaagcagatcattaagcgcgacggatgaactaggtacgcgcagtat

SEQ ID NO: 77650 - DNA, 238 bp, Glycine max
  Clone ID: PAT_MRT3847_41134C.1
gcagaacggagatggacagggcactgagcactacattcctaggaaatgctccaacgcaaacagatggtgtaccagcataatgcaccatgctgcggatcagatcaacattgcgcatgtggatgataatggcgtcaacattggccatacttcctctgatgcgctgagcagatgcaaacgtgctcaaggtgatgctgacagtgctctagaccgcttgtggaagggtaagagaggtgaactt

SEQ ID NO: 77651 - DNA, 418 bp, Glycine max
  Clone ID: PAT_MRT3847_41135C.1
gtgcgacgcgtgcgtaagcttgcatcctctagagcgggcgaccagactacagatgggggcgttccttcttcttctgcgcgctgagactctcttttcttacctctttttacggatatgaactgattagctctccgatttatctgtggattgagaagaccactgaagaggagatttctgatgatgaggacgccgaacagacgaaggctcaggagggtgaagtcgaatatgtggatgaagatatcgagacggaggcgaagaacccgaatatcattacggaggtatctcatgagtggtcattgttgaacaagcacaagcctattcgggtgatgaaaccagaagagatcacaaaacaagaatgtgctgctgtatacactagtcattccaatggatgaacaagagcatttggctgtaaagcact

SEQ ID NO: 77652 - DNA, 518 bp, Glycine max
  Clone ID: PAT_MRT3847_41136C.1
catcactgtatgacgtcctccttctttgggggggggggggggaaaagaaaaagagtaccaagtggagaagtaattaatgaggataaatggtactagaatagaggtgaaaataaaaacccgttataacgtggttttgaaaatgtaccgagacagaattactatcatccggatttaattagtagaatgcacatagctgaaatcgatggcacggctaaagtagaaataattaaaagcaggccaacaattgcaagcgggtaacgccgtcctaatgatggggggttgaggatgatcgaaggaacaattagataaggttagagcagtataaattagcggcacgttcggttggcgagtggctacgtttttacaagggcaaagttacagcgggaggtaagcgacgatggagggggcaaaccggtaaggacgtggcttacaacgtgcagcaagtgtatagttaacggtaattgttagtaaatcacccggggttgggcagtcatgtaggacaaaacaaatttggaaag

SEQ ID NO: 77653 - DNA, 306 bp, Glycine max
  unsure (1)..(306): unsure at all n locations
  Clone ID: PAT_MRT3847_41137C.1
gggggtcgaggngacgtttgaggactatttgtcttgagttttatttgcaccgcacagcctatttaggggacgtgtgatcagtgagaaaggcggaagagtatccaagcttgactctatcaagaacggcgactcttggatggggatggacgtgtcggtcttcaacacctggcactgctgcacccacaccggaagttctcaaccgagcgactatgttcaggtgaataataacatgttcaaagacatcaaccgttttgtatgctactataaatggctaacaacttgtgctaactgggttcagatatacgt

SEQ ID NO: 77654 - DNA, 378 bp, Glycine max
  Clone ID: PAT_MRT3847_41139C.1
cgagggtgtgcgtccattatacgtttcatatgtcctacttttttattatactctcctctttttctctcaattctatactagctggcagtgggtaatgttaaagaggtgcgtacgggaggtccttttccgtaacggtttatggtgtgccgtaacagttacagtggtggtcgcggtaattactgttgtggccgtgaccgtaacggctaccataacagttacggtggttgccgtggtgatcttaactattacggtgataaaatttctcctttttaattacagtgttaaccatagtcaaacctttctttttcttgtcaaaacctaacaattttcaattctaagttcatacacaaacttaagctcatccatacattggatctt

SEQ ID NO: 77655 - DNA, 136 bp, Glycine max
  unsure (1)..(136): unsure at all n locations
  Clone ID: PAT_MRT3847_4113C.1
cgtcgttctgtggcgtgagaccctgtctttcaaggtctgtagcagtgactttcttatcctctcatatccgtgatctctntctgttcccttcttctgnntcatgcccacaccactgtacctcgntctcacccaaacc

SEQ ID NO: 77656 - DNA, 361 bp, Glycine max
  unsure (1)..(361): unsure at all n locations
  Clone ID: PAT_MRT3847_41140C.1
cgggagcncggatcgagggcagcgcaccatttgtagaagtgaaccttacattattgttagtaagaattgggaaaggatggaaggaaatgagcctagcgatgataaaactgtgctcggctggacctttatccactggcgtgagcattcggccagcgtgcattgcgtatgggttattataccttgcgagccatggagtggagaatgactcggacaatgactttgatgagagtacaaggttgtgatgacttccacctggacagatactgaatttggcccgaatggaatttacaggttatacttctcatgatcctacgttaggcctccatggtgatgactaagacagctatgatattgatcctat

SEQ ID NO: 77657 - DNA, 606 bp, Glycine max
  Clone ID: PAT_MRT3847_41141C.1
aattcggctcgagatttttttcgtgtgttataggaactacgcccgaactcattaattaggcagcatggcagaacgaagggttttcactctctcacaggttgcccaacataaatccaacaaagactgttggctggtgatcaatggcagagtgttggacgtgacaaagttcttggaggaacacccgggaggagaagaggtgattctagaggtagctgggaaggatgcgaccaaagagtttgacgttattggacacagcaaagcagcacaaaatatggtcctaaagtaccaagtgggtgtcctccaaggtgccacagttcaagaggtagacttgaaggatgttgtggacaaggaatccaacaccaaagagatgagtgccttcgtgatcaaagagggtgcaaggtctaagtcccttgctttttacgagttctttgttccccttcttgtagctggtctatattttggttaccgatgcctcccttattagctcatcttataattgagactcgctgtctgaatgtttattgtatatttatattcgcttttaattgagacttgagtgtgtgattgttctactcattttttactttccaataccctttcaacccc

SEQ ID NO: 77658 - DNA, 1238 bp, Glycine max
  Clone ID: PAT_MRT3847_41142C.1
gtcaaacaatgccatgggtgaaaagggggttagagcttttcggtcactcctaaaatcacaaattaacttggaggaactttatttgatgaatgatggtatatcagaggaagctgcaaaagcagtttctgaattgcttccttccactgagaagctgagggttcttcatttccataacaacatgactggggatgaaggggcaattgctattgctgaaattgtgaaacgttccccagctttggaagattttcggtgctcatctaccagagttggctctgatggtggagttgccctcgttgaagcacttggggattgtaagcatttgaggaagcttgacttgcgtgacaacatgtttggtgaagaagctggagttgctctaagtaaagttgtacctgcatttacagatcttacagagatatacctcagttatttgaacttggaggatgatggtgcagaagcccttgctaatgccctcaaggaatctgcaccatcactggaaattttggatttggctgggaatgacattactgcaaaagctgctgcttctgtggctgcctgtatatcatcaaaacaattcctcaccaagttaaatttatctgagaatgaactgaaggatgaaggtgttgttttgatcagcaaggcactggaaggaggtcatggccaattaattgaagttgatttgagcactaactcgatcacatggtcaggagctaagctggtggctgaagctgttgtgggaaaaccaggttttaagttgcttaacattaatgctaacttcatttctgatgaagggattgatgagttgaaaaatatattcaaaaactcacctgatatgctgggtcctttggatgagaataatcctgatggagaagaccctgatgaggaggctgaagaagatgctgatcatgatgaattggaatcaaaactgaagggccttgggatttaggaagattcgcaggaacaaacatgcaacctttactcaagattaatctgtaggccatttaatattttcaacagacacacttgtttcatgcacaatagctagctttgatctttgtattttagatattctattccatgacccgacattttagaagtttactagatgtatgctcttaatatatctggcaaaacaagaatggtattagctgcagaaatttttgggttctattgtgcttttgctggccaaaaaaaaaaaagagaggggggggggggggggggggggggggggggggggaagg

SEQ ID NO: 77659 - DNA, 280 bp, Glycine max
  Clone ID: PAT_MRT3847_41143C.1
tttgagttttttttttgcaacgtaggcgtatctcataatataaaggaagacatcaattgatgtggcaccaaattcaccaaaaagaggggttactcaacttcaaaaagtatacgcactatcggaactgtactaagacctcattccatgcctataattttgacacagctgaacgcatacttagacagtttaacttgtgccaccatgacatgtaatgtgcgttgaacttctactcataatgttgattatcatcagccagttagttgcaagacgccacacgagc

SEQ ID NO: 77660 - DNA, 360 bp, Glycine max
  unsure (1)..(360): unsure at all n locations
  Clone ID: PAT_MRT3847_41144C.1
ggagagagagagagaactagtctcgagtttttttttttttttttttttttttttttttnaaaaaaaaagtaaacactttttgtccacacagtttaaaccaattttacattgtcgtcaaatcacaaatccccatttttgataaatttgtttaactttttttttccgataacttttttaaaagtcatttttttaccatgaattgtgaccagtagaccgtcaacaaaaattaaattaaacctttcaaaaaaccaaaggagtttacctcaattggttgtgaaggatgtgtgaatgttgtaaactacccggcaccatattcaattcctccggttaaaaaaaaaaaaaaaaaaaaaaaaaaaaaaa

SEQ ID NO: 77661 - DNA, 405 bp, Glycine max
  Clone ID: PAT_MRT3847_41145C.1
ggcaaccaaatgggtaacacgacctggtagctgtaagtgtcaatgcaatgcttgtaacttccaagaagagggccagtataattcggtaacccagagctgtaaccagtataaagcccagcctgctagagctacagacatccgccagggcacagactagtagagggtagcccacaggtagacccaagcatacagtaagtaggcgccagccggggataggcaaaaccacaaaacgtatggccctgccagccggactagccgtgctgtgagcaataattgacgtaaggcagctaaaagcagctaaccgtgcgagcggtgcgcgtagacgagcagagtcagcctgccagagctagtgaagccgtgtctctagtagtgcatgcccaagcgacactgctatgagcggactag

SEQ ID NO: 77662 - DNA, 481 bp, Glycine max
  Clone ID: PAT_MRT3847_41146C.1
gagcagaaaaaagttagccctttactaagggtcacttgggaaacggaatttccttacctaaattgggcaaaaaaaccttccttaaaccaccaggcccatagccaattttttgtttttgcccaaaaaggatttccccccccccatttaaaaaaagggggaccggttttccctcaattttgaaagaaaaaaaaagaaggtggggtttaaaacctttccgaataaccagattaaaaagccggctttgggcctcaacaatagagacgggccggggccaccttggtttgcaggggcatctgcggataccgggggggggggccctggaggaaaagaaaaaacaaacttttctttacgacacttacttacaaaaagggccgggggggtttttccctagagattaagggaaccaaacctggggggtgcccacccattcggtaaatcatttaaaacctcgggataagggcaagcaaattctttaaaagcc

SEQ ID NO: 77663 - DNA, 537 bp, Glycine max
  Clone ID: PAT_MRT3847_41147C.1
attctgtcgatcgctcgcgattccctcttcctccctctctcttctactcacgagcgtcctgctcctgcaggcaaaccgcgatccgttggtgatgaaatccaaggcctcaaccctagcttgccctcgtggtcggattgatgtggattacatgagtgtcggttctggtgtagagcctagcgatgatgaagacctcgtccaagtccagcgtcaccacgatcactgacgtatccctcaaagcacctaaaatttgaacgaacgaacacgaattaggttgaaaattggcaagtgaaagtgatgaaatgaaattaagggatggaccccaaaccactacaccttctcttttgttttcaaagcttgtgtctgtcgaccttccctctatctccattgatgctcccctccacgctaccatttcggaacttggtgtggcactcttcgtcacgcacacaacatgtttggtgacttgtgtcaccgagacattctcagaacttggattcttggaattctattgtgtctgttgctggagtttggagcgattaa

SEQ ID NO: 77664 - DNA, 681 bp, Glycine max
  unsure (1)..(681): unsure at all n locations
  Clone ID: PAT_MRT3847_41148C.1
cggccgctcgagccggcgggccggggagtcactctttgtttaccgcttgaccactatattcgtgcccattcgcagaaatggaggttgttctttctatatgttccaaattccttttgcgatttccacgaanaaatatgacggaaattgccatttacacttaacaagtttcgcctgaacctactactccaacaaaaatcttcgatcatggacgccgattgacgacgtcaacagctcgaatagagaaaagagggaaaagaaatgaagaagctgaaattggtggaattggcgtccatacaggttctgatgatgtgagactgcctgtacacatacggcgaggaacgttatggacctatggaagacaggtgtgacaccgagcatgatgaggataagaccggcatgataccggactacgagagggtacgcctatgattacaggaaggtccacatatacgctgtatcgtaaggttgacgagatatacagtcacgattcacgccaacgagaggaaggaatcctccgaagtattgatacgacttctctgaaatccgtagcgctggcggcaccgcctacgccatgagcagattactccaagtaactgcccttgagaacatgaacgcgtggtgctgtgcatgacgtgaactactgcaccttacgctgcttccctcaggtgtacagtgttgtgt

SEQ ID NO: 77665 - DNA, 527 bp, Glycine max
  Clone ID: PAT_MRT3847_41149C.1
ctctcagcagcttaggctagggttcagaaacgaaaaagggttcggtgttcagttcgcgatgagagccaaggtgagttcaattcgtcactgttgtttcgctaaattccttgattttatcaaacgttgaggtatgattgggactttttttttttttttttttttttgcaggggaaaaaaaaccctttgagggggttaaaaaggaaccccccaaagatgaaacaaaaatccaagttgggcgttaatccaaggagttgatttccggtgcttttataattatgttgccaaattgggcccccatttgttaaaggccctggtttcccctttttgaggttttgaaacatttttgtttggtttaattcgccttatgttattaactaaaaaaaatgcttttactgggtttgcaaaaaaaaaagaacttttaaatgcatttcggaatctttttttggttttttttgcttaaaaagggcagccaaattgttttatatttactgaaattgtttagggttaaattgagctcgttaattcaa

SEQ ID NO: 77666 - DNA, 257 bp, Glycine max
  Clone ID: PAT_MRT3847_4114C.1
aaacatttgctatcaattaaaattgccttacgagcgaagatctaaaaatccttgccgcggtacattactaacacaggccgacattcaaataagacacaagcacagaacaacctacatatacatcgactggaatcaatctaccaccaaatcccttgtcacagctatggaacaacatgaatgatcatgattaatatgaagattaatagtaataacataaacttcctcacagcgcatctctaaaaccaccaaataatatt

SEQ ID NO: 77667 - DNA, 482 bp, Glycine max
  unsure (1)..(482): unsure at all n locations
  Clone ID: PAT_MRT3847_41150C.1
ctctctcgtccgcggacgcgtgggcaactttttgactcatcgggctttgtctctccaacccgaaaagtaggagtcagagaacgaaacggcactgttgaggtgaagtccaatttcgtagctcttgcgtttagcaaaaacggtgtcgtgcggagaaagaggctgcgtttaaagattgcagattagagaaaacgctgctcactcactgcagctcccttgttcacgtggaccggagggcgacaaacgcacgacggagggtgacggacgcggtcttttccggcacggtctctcttcagtcttcgctctcccttttccggcacggcccgaggcggtctcacttctctcacccttttgcgacgaggtcaccactgtttctgtgttttccggcgaggactctcatcatatggacaacttacgtcaggagaaagttcaaagatttgaagaatntgttgacaaacgcctganacctgatctngttcatgcta

SEQ ID NO: 77668 - DNA, 1187 bp, Glycine max
  Clone ID: PAT_MRT3847_41151C.1
attatttgaattcttaaaagttgtaagtttgtatttgtaaaataaaaaatatgctaaaagagattgcagattagagaaaacgctgctcactcactgcagctcccttgttcacgtggaccggagggcgacaaacgcacgactgatggtgacggacgcgggctttttcggcacgggctctcttcagtcttcgctctcccttttacggcacggtccgaggcggtctcacttctctcacccttttgcgacgaggtcaccactgtgtttgtgttttccagtgagaagacgacagacggggagggaaaacgcaaaagacaaaagaagggtgttccgtcgtggcggcgtggtggaacttcattcacagtgggtggcttgcgttttggaaaaacggtgtcgtgcggaaacagaggctacgtttacgactctcatcatatggacagcttacgccaggagaaagttcaaagatttgaagaatttgttgacaaacgcctgaaacctgatcttgttcatgctattgctcagcgggacaaggtatttgaacaacagaaaattttcactgatttgagaaaaaacattgaaaaccttgagaagaatagtgtaaccagtctaagaactttggtcaatattgggtctgaagtatacctgcaggcagaagtgccagatacacaacacatatttgtggatgtaggatttggattccatgtggagtttacttggtcagaagctctgaactacatagataaaagggaagaaaagatagccaggcagatagaggagtacacccagttgattgcatcaattaaagctcagattaagcttgtttgtgaagggattcgagaattactgcaacttccagctgagaaatccttaccagaacggatattttgatatttactgaatcaacgcatgtgaacagaacagagattgatatttatccagtaggaaagattgtatctctttctctgaccttaaaccaaagtacatgaagatatatcgaatgttgtctagttaccctttttctattttggtcttgtggcattgtgatgcctcaaagtttgtttttgttagccattaggtctaaacttgttagggaactttgtcaatatcatgcttttgagtttatgggaaatcatctataagaaaaaaaaaaaaaaaaaaaaaaaaaaaaaaaaaaaaaaaaaaaaaaaaaa

SEQ ID NO: 77669 - DNA, 469 bp, Glycine max
  Clone ID: PAT_MRT3847_41152C.1
ccacccaaaagcaggacctttttcattttcattggctaaaaacttggctctgcaaaaaaacagggttttcattaaaaaaaaaaaaaaggctggtttatcaccctaatcaactaaatccatccttaaagaccagccagggaaaggcgaccccaaaaggaaaaaccatagggttaagcggcccaaaccctaggctggcataaattacggaaaaattcccgtttttggggggggtccatgaaaggccggagaccccattctattggagcttcagctggacccaccgtccccaactttatcggaaaaagccgaacctaaaaccggggaccaatttccttcagttctataaattaagggcccccaggcttttcataaataggaggccggaaggaaatatagccaaacgggtggaaaaaggggacaatacgtttggggtcgggtttgggccctgaaaaaagaggcttaaaaaggt

SEQ ID NO: 77670 - DNA, 145 bp, Glycine max
  Clone ID: PAT_MRT3847_41153C.1
gcacagtgcgcaatggatcgggagaccagtgataacgaccaaggttgggacgagatgcagaaggggaccaccatgctgatcgaagttcttggcggagcaccagcaactgcgttcagttctgcgcgatgcacgatgctaccacaca

SEQ ID NO: 77671 - DNA, 609 bp, Glycine max
  Clone ID: PAT_MRT3847_41154C.1
gcacgaggatttgctggggttacatatattttgggtgaaacaataaactgattggagcccaaaatatacacacaagtcaaacatcgagaaattagagatcaagttgattagggtttgtgtgatatcaagcatcatgaagaagagacaggtagtggtgaaaagtgtggccaacacttcatcttcagtgatgagaaacataagatatggtgagtgccagaagaatcctgcagcgattagtggggggtacgctgttctgggtggcgcccaattcatgcccagtaccggggaggctgctggtggcgcactttcgtgcgcggcgtgtggcggccgcggggtcttccacggaggggaggcgggtgctggggtagtgtgtggccaccccccccccttctctggtcgctaacgtaaaaaatggggagtgccagaagaatcatgcagcaaatattggagggtatgctgttgatggttgcagggaattcatggctagtacaggggaaggtgctggtggggcacttacatgtgctgcttgtggctgccacaggaactttcacagaacggaagtgaatactgaagtagttggtgagtactctcctcctaattctggtcgct

SEQ ID NO: 77672 - DNA, 285 bp, Glycine max
  Clone ID: PAT_MRT3847_41155C.1
ggaaagccagaacaaaacctggtaccgagcccactactagaacttaaaaagaaagatatcttttcttaaactacttccacatatcatatctaggcccgaaaatataggtaggcaaaagggggaagggaagagagaccgcacgaaactccctgttcctgactcacaataacatattgaccatacaattattcaaggaacagagttaccattctatgcaagttaaatggcggttgtaacttgcaatccttctgtctacaacttaaaggatctgccttttttcagggg

SEQ ID NO: 77673 - DNA, 402 bp, Glycine max
  Clone ID: PAT_MRT3847_41156C.1
gcgggtgtgcgaaaccagtatgggtttctaagcggaaccaatgaatggggccgctatcaaaggtcttctcaggagcgatctaaatttcttctaaacaccctaagaggaacgctagagtatcctaatattcgaaaataaactttactttctccgggcattacgacgatgcatataatatggccaattgggagaggattacctatgtacgcatttttatgcgcactgggttagccatttattatataacaaagggtcactcgcactttagataacctggcgcttacccatatgtgtatatacggaataaggatttcctatgtactctcgatggactatttgattcttaccaccatgacgagcattaatgcgttaatgacagaattcgtgtgactgctagacatt

SEQ ID NO: 77674 - DNA, 801 bp, Glycine max
  Clone ID: PAT_MRT3847_41157C.1
gacagagtctgggtcttcctttcctaattcccttcccccttccataaaagcacccccgtcctccatacctcactcacccacgacaccataattaacaaagtgaacattagaacatacaaacaaattcgaattacaatgatgtcctcatccccgttcccttcctgcttccgcacctcccccaccaccgaatcccagcctcctcctccccctccgccgccacactccacaatgtccaacctcacaatctaccacaccgacacaggtcccgtgtccctaacatggtcacgctccattgtaggacgctccctccacattcagctccaccaaaaccaaaaccccttagattccccaccctaccctaaccccaccaccctctccttccaccaccacataagacccttcctcttctggaaaaaacacggttccaaaaaactcgcccccgacactttcctcttctggaacctctccagagccaaattcggcgccgccccagaacccctctcgggcttctacgtcgccctcgtcgtccacaaccacatgaccctcctcatcggcgattccaccaaagacgcgttttccaagtccaaggcccgccaccctaacacgccacaactcctcctactaaaaaaagaacacgtcttcgccgacaggctgtacaccacgcgcgccacgttcggaggcaaagcgcgtgagattcagatcgattgcggctaccacgaccactccaggctctgcttcagcgtggacggagagaaggtgctgcagattaagcggctgaagtggaagttcagagggaacgag

SEQ ID NO: 77675 - DNA, 721 bp, Glycine max
  Clone ID: PAT_MRT3847_41158C.1
cgggatgaaaaatctttaataatataatatttggagaataaaaaaaaatactaattgagattttggatgcttcagaccttcacaatagaattggcatttactcttttaaaggttccttcgcttactttttccttttagttccgtaactcagatgcgtatccacagaacaattaaatcaacttttggatatagtttactaattaatattcaattcaatgctgaagaaagaaaataccacagtcagaacaattatatcaacttcaaaagcaaaatggcttcaaccatttgtgaagtaatgaatatccacaaactgccttattcacaattgctcaacaactgaagaaaatgagccaacagaatgttcaagacttctcatgcctcagaaggatatccaagtgccacatgatttcaaagaggtcctggaaaagtcccactctccctctgttcattccacctttcaacccattcacccgggcaaagggagcggtaatatttagcaaatctctcacattcaccagagttttcaccctttgctgccaagcatctgtgaaactctatgtagcgagtgaaacaatgtctggtttgatttgttgtaggaaaacgaaaatcagcaggtgcagttttcagttcaatctccgccatgagtcagactcgatcaacaaataggacgaaagaaaagcccaaaaaaagggcggccgctcgcgatctagaacctcgagcc

SEQ ID NO: 77676 - DNA, 679 bp, Glycine max
  Clone ID: PAT_MRT3847_41159C.1
aaaaaaacccaaaccaaaagcaaagtttttattagcaaaaaaagcgccgcggcccaaaaaaaacagaaaaaatcctacccaaggaacaccatgataaacccttctcccaggcccattcttcttataagaaacaaaaagggggtttacacggcccccgcccggggggataaaacaaccaccccccctggggggggcaaggatagcgcgcagtggggcaccggaacccaccttcggggaaaacccggatcgccaggggggctaaacaaaaaggggcccctcggcgccctcgaccccgggggggggccaaacaaaaaagccgggccggcctgaccaataaaagcgggaaaaaaagtcgagggcggtgccccccccaggcccggaaaaatgggctgtacccgaaaaaaccaccgcggggggccccacaaacccgggggaaactcccgagggaaccccccacaagacgggggaaaaaggataccgcccgtatgcccaaatgacaaacaacaaattgcaccggcagtgcggcggcgggcccccccccaagggtcctttggggttccccccggccagggaaagaccccccccctccggggccccacaggaaatgttctgccccaaccccttaaaaaaaaaaaagggggtgggcggggggcggcccccccccagggggggacccccc

SEQ ID NO: 77677 - DNA, 325 bp, Glycine max
  Clone ID: PAT_MRT3847_4115C.1
ttcactctggtttgagtttgagctcgattttgtttgagatcaaaacccattacatttacaacatcatacaaatcccaaatcctatctggggggccaattatataaaagaacccttcattaaaatcctgcccgctcttttgcctatgacccaatgggtgctcttatccaaaagggggtaaatctctccgaactctctggtgggaagaaatagtggaaaattttaaatttggggcgggtggtttgccaaggattggaaagaagccaaacggcggttctacttattttttcttttagaatggtgcctaccctaaaaaagggggggccc

SEQ ID NO: 77678 - DNA, 426 bp, Glycine max
  unsure (1)..(426): unsure at all n locations
  Clone ID: PAT_MRT3847_41160C.1
ctggaattatctgggatgccacacaaggttaatgatgtatctgaaggatctgatgatgctccactaacgtttgaggcccttgtgcttaagcatgcacagtttcttaacagcacgagcaaactccaggtggctgatctattaattccattgagagagttagcccacacagatgctaatgttgcataccatttgtgggtactggtatttccaattgtctgggttacattgaataaagacgaacaagtaacacttgctaaaccaatgattaatcttttgtctaaagattaccataagaggcagcaagccaacagaccaaatgttgtgcaagctctattagaagggctttagttgagccatcctcaacccagaatgccaagtgagctcattaaatatatngggaaaacatataatgcatggcacattgca

SEQ ID NO: 77679 - DNA, 1256 bp, Glycine max
  Clone ID: PAT_MRT3847_41161C.1
agacgacagaaggggaagaacaattatacgtacggtagtattctacctcttcacatccatatcacagaaaactattttggtttaatttgcctttccttttcaagggagctcattgaagagacaaaaaacaatggctgaaacaaagttgagcatgatgaaggacaaaagatggtcactccgtggaatgactgctctcgtcacaggagccacccgaggcatagggcatgccattgttgaagaattggcagactttggagcaactgttcatatatgtgcacgtaatcaagatgatattgataagtgtttagaagagtggaaaaacgagggacttaatgtgactggctcagtatgtgatttacaatgttctgaccaacgtataagattaatggaagttgttggctccatctttcacggaaagctcaacatactagtgaacaatgctggaagatgtatagcaaagacaatattggattccactgcggaagatatatcaaccactatgggcaccaattttgagtcagcttatcatttgtgtcaacttgcacacccacttctaagagaatctgggtacgggagcgtagtatttatttcgtccactgcaggtttaatgggttttccctttttttctgcttatgcagcctctaaaggagccatgaatcaattcaccaaaaacttagcatttgaatgggcaaaggataatatccgtggaaatgctgtcgcatctggacctgttatgactgtccttatggagggtgtcatgaattcttcagaagtgagcgacgttgtgaatgcagcaacgtctcaatcacttgttggtcgcatgggagaagctaaacagatatcagcattagttgcttttctttgccttccggttgcatcatacatcactggacaagttatatgtgttgatgggggtctcacaacttaattagtattctgttaattactatcatttggctgctgaattaaattctaatgtatgcagttggtgtttcctccaacccattcatgctttgtatatcattggctgggtttaattatttcttgtttttaagcatatccatgtgccttttgttctgtctcgtgtagtgtatttcttttgtcccaaatcattgaacaaggattaacaattattacttaccttctccctcgttaccccatgttatcttaatttgttgttaataaatgaaacatcacttcatcgtacgtttgtggtaatccttctcctcaatattgaatatatatttaattagtta

SEQ ID NO: 77680 - DNA, 344 bp, Glycine max
  Clone ID: PAT_MRT3847_41162C.1
aggcaaaattcaccattttaaggttaaattaaatgaaaaaaaaaggggcaggaaatggggaatcaaaaactatggggttccctcaaaatcaaaacctaaaggggaaaagggaaaaaattcctaaaaaagggggtctctggttagcgggaacaaaaaccaccaaaagaaaaaccaccgtttgggggatttaaaagggggatttacccaaaaagggattaaggtgaaactcccacaagatttattcattaggggggaaaaaacttgggggtgggggactttggaaaacaaggctttcaaagtccaatccccctgatgttgataaaaagggctgtcacttcataaaa

SEQ ID NO: 77681 - DNA, 369 bp, Glycine max
  Clone ID: PAT_MRT3847_41163C.1
ggatgggaaaactgactttccaccaggtcacttcccaaagtgttaagagaatgcgtctctctatagggggaggagctggtgcaaagaatgctattctcatgaatatgccaaacgctggtctttcaacgtggagatatcttgttggagatctacacttcgaagtctctaagatgactcattcctacattaaatgcacagacactgtattcataacacccaggagattttgctgaagacaccataaaagctgaggcttctaagcacagacccgcgcaccctgtagagattcaggaagatgttgtatcgacaccctcacacgaggtgtttcatacacctagccaaactcaggctcttcttgtaccaaccctg

SEQ ID NO: 77682 - DNA, 445 bp, Glycine max
  Clone ID: PAT_MRT3847_41164C.1
gtatgtggtaatgttggatcaggcaagtccagtttactttcttgtatagtaggggaagtaccaaagatatctgggaccctgaagatatgtggtacaaaggcttatgtttctcaatcaccatggatacagagtggcaagatagaagacaacatattatttggtaaagagatggatagggaaaagtatgataaggtgctagaagcatgttccttgacaaaagaccttgaggttctaccatttggtgatcagaccactatcggagagaagggaatcaatttgagtggtggacagaagcaaagagtgcaaatagcccgtgctctataccaagattctgatgtatatctgtttgatgatcccttcagtgcattggatgctcatacaggatcccatccctttaaagagtgcttgcttggccctttaaaatcaaaaactgggatttatataa

SEQ ID NO: 77683 - DNA, 847 bp, Glycine max
  Clone ID: PAT_MRT3847_41165C.1
ctctaaagttcaaatctcactccctatattatacaaaaaaattatatatatctatatatagagtataccacacagtagtcatcaaacgccaattgatgaacaacaatcaaatcaataattcgccaaaataattttgactatccctttgcgtactagctccacataaccatacccgtggacatcaacaacataaccatccaatgaaaccttcctgtgaagattgaggctgagctatcttgactgccactatcagtggatgaatttgcaactttgattccgagtctcgaacaatcagatccaagagtacattcactgtaacaaggaaaaactgagatgttgagaagattatagtaattgggttggcattcgcatctgtgtgtatgtgttctgttcttggtgcatgtaccttccccacagtacgcccaatagcaaggatcaaaagctgagaagttatgtggaaaactcttctctggaactggcggtggtgctggctgacaaccatagttcaagctacattcgggaatgacacatggaagaaagctagtggcatattcatcatcgtcatcttgggttcgcttccagccagaatcgcattcacaaacgaagtttaatgggtaacttgtgtttactacgcagcttcccttaccacattccacttcttcacaaaccttatcaaagaaatcagtaatattatcccctttggcagccatgggtagaagcactatgaaaagcatggccataatacccaataacttggaggaacccatttgttagggatataatataaccaattattagagacttgaaggtgggaggagtaagagaagaagaattaaaacttgtcgag

SEQ ID NO: 77684 - DNA, 1264 bp, Glycine max
  Clone ID: PAT_MRT3847_41166C.1
atttctcaccatgtgattcacacctctcttccaccgtttcttctttaacccagtaatctccatttgtctttcccatatgatatatatatcacctttgccttcaacacatcccacataacataacctcttgttttgtcatctaagaaaacctagtgagagtaagcacacattgatcagcaacaatggcagcctactcaagccatgctttgaaaaccatccctttttcttcctttgtgaagcctgtcagtaccaaaccaacatcattcttcacaccttcacctaccaaacctttcttacccttcacctcaccaaaccactctctcaccaaaaatctcaagctgaactccactttgccacacttttgcttgtcttcagttcccaagaaatctttcacttgtagaagccaggctgagcctgttgactcagaaaaagtccaagaactgagtgtgtatgagatcaacgagcgtgaccgtggaagccccgtttatcttcgattgagctataaaagtgtcaattcccttggtgatttagtcccctttagcaacaagttgtacactggagatttgcaaaagcgcattgggataacatctggtatctgtattttgatccaaaacaaagctgaaaagaaaggggacaggtatgaagcaatcttcagcttctactttggagactatggtcacatagcagtgcagggaccttacctgacctatgaggacacatatttggctgtgactggtgggtctggcatatttgagggtgttaaaggtcaagtgaagctgcgtcagattgtgtatcctttcaagattttgtacacattttatctaaagggtatcaaggatttgcctcaggagcttcttgtcaagactgttgagccaattccatctgttgaaccttcccctgctgctaaggcccttgagcccaatgctaccattgctggcttcaccgactaattcatcaactttttttgtatttgctttggcctttgtagtagtatgatttaagttactgaataataataacaagtggggactatgatgggttttgtagtggtggagtttctatttaacgaaaagcttgacattattcagttagtggtgtttaagcaaatataatgaataaggaaaggaagtataattatgtttgccatcatttcattatattttcgaattgtggttgtgtttgtataattatataataatatcatttgttgtatattttataaacacgtgccttttaagccgacgcctatggttgtttttttatg

SEQ ID NO: 77685 - DNA, 750 bp, Glycine max
  Clone ID: PAT_MRT3847_41167C.1
acgagtataaatcacctttgccttcatttcatcacacataacataaacttttgtttttgtcatctaaacttagttagagtaagcgcactttgatcagcaacaatggcaacctactggagccatgctttgaaaaccatcccttcttccttggggaaaccagttactgttagtgccaaaacaacatcattatacctcacactctcaattaccatacctgtgttacccttcacctcatcaaaccactctctcaccgaaaaccttaagctgaactccactttgccacacttttgcttgtcttcagtccccaagaaatctttcacttgtagaagccaggctgagcctgttgactctgaaaaagtccaagaattgactgtgtatgatatcaacgagcgtgaccgtggaagccctgtttatcttcgattgagctataaaagtgtcaattccctaggtgatttagtcccctttagcaacaagttgtacactggggatttgcaaaagcgcattgagataacatctggtatctgtattttgatccacaacaaagctgagaagaaaggggataggtatgaagcaatcttcagcttctactttggagactatggtcacatagcagtgcagggaccttacctgacctatgaggactcatattaggctgtgactggtgggtctggcatatttgagggtgttaaacgtcaagtgaagctacatcagattgtgtatccttataagattgtggacgcattatatgta

SEQ ID NO: 77686 - DNA, 703 bp, Glycine max
  unsure (1)..(703): unsure at all n locations
  Clone ID: PAT_MRT3847_41168C.1
accagaaanctatttttcaaccaatgaaaaggttgactcgtcctccacggcatttttcccctattgcatctttcatttcacatgtaatgatactgtctggaaattcagtgcagcaaagaaatgaaagaggtcaaattttttgtaacccataattgctagtgagaaatattacatttgcttctagtaagtagtagtatccacatgatgaaaaagattaacagggcatttatacttataaacttctatatttccaatttcataaaattgctactataaatacaattcttatagacaaattttatttttttgtgatactatactagaaacatgcacaggggttccaacaggaatttgtacctcttgtcatggacgaaccttgggacatttttttgggcctgaccaagagcaagagcaagagcatttgcaaatgcagcaagagggaaaaggccacccaatattgcaacttgggagagtgcaacaaattttgcaaccacaactatctttgcagcaatgtgatattccattagggcagcaagagcaaattgtagatggaagacaactagaacagcaattgcatggcatgcagtgggaacaacaacttgacatgttttgatgttcaaagcacccatcacagcaccaatggcagatccaagaacagttaaagcaagggatgtcacacagccacttncagaagctacatgac

SEQ ID NO: 77687 - DNA, 403 bp, Glycine max
  Clone ID: PAT_MRT3847_41169C.1
gggtcgtggggtcagtgctgttggtggtcagagttccttaggttatctttttggcattggggtgcctaccagcaactccaacattcatactgcaaattgtgctcgcactcataatactagctctccttgtccaccaattgatacgcatagtccatcaccagcaccagcaccagcccctgcctcatctctcattgatataccaactccatcttgaattcctgcaagtcttaaaaacaattaccatcgggcctgatggcaaaactgtggcaactttcttacttatcggccatctacccaggatcatgctgccccaagtggcggatcttcctttgattacctctttggtggtccttcagggcactaattcatcattcggttcataccttacattgtgagtatgatt

SEQ ID NO: 77688 - DNA, 266 bp, Glycine max
  Clone ID: PAT_MRT3847_4116C.1
tggaaacttgtctaaaactacctacaggcggtaggggtagagttattgatgtgagatggatccaaaaaaaggggggttccagttataatccagaaacgattcgtatatatattttacagaaacgtgaaattaaagtaggagataaagtggctgggagacatggaaataaaggtatcgtttcaaaaattttgtctagacaggatatgcctgatttgcaagatggaagaccgttgatatggtcttcaatccactaggtgtactttcac

SEQ ID NO: 77689 - DNA, 595 bp, Glycine max
  Clone ID: PAT_MRT3847_41170C.1
aagaaaatagatagggatggagttcaggactgactttatcaaagtcacccttctcccaaaagaaatgtatttttgtttacactttgctaattttctctcacattttttgataataggatcccaaatcgcactacttcttgggtttgccccaatcggaatacctaagtaaggaaaaggtatagacatctggctgcaatttaagtatgttgctgcactaaccatccactactctgacatcccaatagccccaaaagactgcttgtttatatatatatatatatatacatatatatatatatttatttatttgaatttcacaataacatacctcataccttgtagttgggctttgtgaagggttttggttttctgtttgggaggctggcagcacagctgcctttgtatggttatcatcagtacccctggtactgtagcttctcttattaataaatatatatattttctgccttccaaaaaaaataaaaaaatctaataataaaatattttattaaatactaaatttataaaggaaaaaaaaggaaaatttccacaaaataaataataattatggtaatggtgaaaggcaaaattaata

SEQ ID NO: 77690 - DNA, 123 bp, Glycine max
  Clone ID: PAT_MRT3847_41171C.1
cccactcgtccgcacaaacacattcttttgcataagcgcaaattgatttgatagaggagaaactggaaacactaaaataggactaactataagaaaaaggattatactgggctgccgttttgt

SEQ ID NO: 77691 - DNA, 303 bp, Glycine max
  Clone ID: PAT_MRT3847_41172C.1
tcccgctcgacccactcatccgcccactcaaccatacaaccgctcttatatcactgacaacacaacttcatcagcgcaggttttactaatcaggtcattgattttcctttacacaaaatcagatttacttctaaaataaaattcatttcttaatctcccgataaaacagatccctattatctccttcttcatcacaattcattacaactctaaatacatcaactatatacactctaccaacacaatctctgttaacatttattctcacactaccaatcttttaactatctacaacatattcta

SEQ ID NO: 77692 - DNA, 142 bp, Glycine max
  Clone ID: PAT_MRT3847_41173C.1
ggctcgagggatcaggcttgcttctctgatctcgggtctaactatctttcattattttctacctggtacagggaccggactaagcactgtgtccagctttaatatccaatacgacgaagatgacacattccacataacccac

SEQ ID NO: 77693 - DNA, 483 bp, Glycine max
  Clone ID: PAT_MRT3847_41174C.1
gagcaaaacgacaatttgattcctgaaagaaagtactgaaaataaagaaaaacgaaacactgccgacaagacggacaaatgtcacagtttgcgagctttgttttgcccttccttgctgacctgacaacacaacaaattcttgtccctgaacactggcccgcaacaacagccagctagatacataaaacgaaacaaaccaaacaaaacaaaatgcagcgctcattagattacaggaaacacaacaaacacaacaaaagcaaaaacgaaaaacaaaactaaactcttcaacgtctgttgttttcaaacaaagttagataaggacagaaaaacctctgtcgagctgttgtttgtttgttgtttgttgttcaaaggtctctctttccatgatgtttgttatgttttcgtatgacaaaatccctacacgaacctttgtctttacaatgggataaacaaacccaatcacaatattgtgaaccgccttct

SEQ ID NO: 77694 - DNA, 491 bp, Glycine max
  Clone ID: PAT_MRT3847_41175C.1
ccggaaaaccccggtcgacccacgcgtccgctttttcttctttcctttcttccatcttcttctacttttactctttcctctctctctctctctctctctctctacactcaatttctccggcgacgcgtttccctttctctctcttgttgacttctccgatcacctccatggggcattgctgcagcaaaaacatcgccgtcaacaacgagacgctccccgccgatcacgcccccaagccgccgcattacgcggcggcggtggcggcttctccgctgccgccgtcggggagctcggtctccgccgcaactcccgggaggaacacgccggcgcaatcgttttccatgagcccgttcccgagtcccctcccggcgggcatggcgccgtcgccggcgaggacgcctggaaggaagttccggtggccgctgccgccgccatcgccggcgaagccgatcatggcggcgctgctgcggcggcaggggaaggcgaagccg

SEQ ID NO: 77695 - DNA, 244 bp, Glycine max
  Clone ID: PAT_MRT3847_41176C.1
gaaaaaataaaccggacacaggggagacaccggaaaaccacccgggaatttccgcccgtgccccagagggatacatagtttcctttaagagaggggcaaaaaaacttggataaaaggaggaaaagagagattttttgaaaaaaatattttccctcaccatttcccacaaaaataaaacccggaaaccttaaggggaaaaacgggggggctcaatgggggaatttgcggggcttaatttgggggc

SEQ ID NO: 77696 - DNA, 673 bp, Glycine max
  Clone ID: PAT_MRT3847_41177C.1
cactctttcattcaattcttctcccaaatcaaaccacattatacccattacacattcttcttcttcttcttgttattattattgttgttaacattgtcattctcatattatatatacatatatatatatattataaaaacacaacattttgatgatggggaggaggatgatgcaatggaacaccatcaccaaagcttcaattctcgtcaccatcaccctcctcttgattctccccgtggccgttaacagcatgaggctcgaattggtgcacaggcaccacgagcgctttgccggcggcggcggcgacgtggatcgggtggaggcggtgaaggggttcgtaaaaagggacaagctgcggcggcagaggatgaaccagaggtggggtgtagtaagtaattacgacagcagaagaaaaggcttcgagatgacgacaacgccggcggaggtggaaatgcccatgcactcggggcgggacgatgccctcggcgaatacttcgccgaggtcaaggtcggaagccccgggcagcggttctggctcgtggtggacaccggcagcgagttcacgtggctcaactgcgtaatgcagaatgccacatcaacaacaacatcgcggaagatcattacccaaaagaaacaacaatcacaccaccaccatgtgcacaagcatcacagc

SEQ ID NO: 77697 - DNA, 887 bp, Glycine max
  unsure (1)..(887): unsure at all n locations
  Clone ID: PAT_MRT3847_41178C.1
agcatccccaacacatacatgcagttatacgccacatagagcctcatcgagtacctccccgtcacaagcagcaccagcacatanagcggcaccaagtttattataaacacataacctccccacgccgacaccatgtagaaatacccgaacgccgaacccagggcgcgccagcgagccagtgttcaccgccttcacaaagaggtagaaggtcagcagcagcgcgaagatcgcgacgccctcgttgtcataggaccccgcgacggagcgggagatgtagccggggcagatcgcgatgagcgcggcggcgacgatgccggcgccggagtcccagacctccttcgcgaagaagtaagctacgagggtggtgttggaggcgaagaagggcgcggtgaggacgcagacctcgcggatgtggacgaagaggcggaggaagcggaggagggagtggatggcggcggcggtgagcatgaggccggggtagagggtgccgccgatgatgcggccgagcgggtaccatgattccgagtcgaaccagttccagaactcggcgaagccgttgcgagtgaggaagagcgtggtgcggtagttgaagtaggggtcgaactcgtggatcatggactcgtagcggagaacgctgaagaggcgcgtgatgaaggcgaggacgtagatgagggagagcgtggcgacgcggatcagaagctcttgttgcttcgttttgagctttagggttttggggagagtgaaggagggttttgagatctagcgccattggagaaggtttggttggtaacaaccattgttgggattagggtttcatggagaaattgggaatgggagtgagtgagattggacgagtgcagtgcagtggaggtggggtggaatttggt

SEQ ID NO: 77698 - DNA, 532 bp, Glycine max
  Clone ID: PAT_MRT3847_41179C.1
acgagcctaggcaaactctatcttgtcagtctccctccctgccttctctgcattcattcattctttctttgtatcaaattcagaacaacatgtattcgtcttcgggcttgattttttgagggttccaagggcacaaggcccaacccatggacgacgaaagcctgaacgggccttctcgcgttccatcgccaacgacgatgtcgtttaaggcaacaaacgacgcgtgggatgtttgtatgcagttgtagggcaagttgcaaggttgaagatgaaagatttagtctcttcaaagtttgatttcgagaacagtggagtgttggatgatcttcctccacctattgcggaggagaatgcattttttccaaactagggtgtttcccacacaaggcctagtttcaacgctaaagggctttgtgaatagaacaagttatataaaaagcctaaagcaaaaacacataccccaatcattcaattgtggcatgcgaatggtagatgccctaaggacacaatactcgttaggagaaccaagaag

SEQ ID NO: 77699 - DNA, 2791 bp, Glycine max
  Clone ID: PAT_MRT3847_4117C.1
tttacggctgcgagaagacgacagaaggggatactgggatggacgtagtattttttttgtcccttttgtgttgattctgttctttgtaattctaatcctaggataaaagttcctgaactcttagaagatgaatggttcaaaaaaggatacaaacaagcaacttttataatggaagaggatatcaatgtagatgatgttgctgctgctttcaatgattctaaggaaaatcttgtgacagagagaaaagagaaacccgtgtcaatgaatgcttttgagctcatatctaggtcacaaagcttcaaccttgaaaatttgtttgagaagcagcaagggtctgttaagagagaaacacattttacctcacagcgccctgcaaatgaaatcatgtcaaaaattgaggaagctgccaagcctctgggatttaatgttcacaagcgaaattataagatgaagctgcaaggtgataagagtggaaggaagggtcacctttcagttgctacagaggtttttgaagtggctccctccttgcacatggtggaactgcgaaagaccgggggtgacacactagagtttcacaagttctacaaaagcttttcatcatcatcagggttgcaagacatagtgtggcattctgaagcaaaacaatgaagaatcaagatgtgcgtgtgcgattcacacacacacacacacaatatttgaaataggtgaacattatcgtaacacacaacacaagtttggaaaacgttatttgtgggaaacaaaaggaacagaacaatgagcgggaagcaggccgtgagacctcgtacccgcgtgggaaagtacgagctgggaaaaaccattggcgagggaagctttgctaaggtcaagttcgctaagaacgttgagaatggtaaccatgttgccatcaaaatccttgatcgtaaccatgtcctccgccacaagatgatggaacagctgaagaaagaaatttctgcgatgaagatgatcaatcatccaaacgttgtcaaaatttacgaggtgatggcaagcaaaacaaagatctatattgtcctagagttggttaatggaggagaactatttaacaaaatagctaaaaatgggaaacttaaagaggatgaagcaagaagatatttccatcaattaatcaatgccgttgattattgccacagcagaggcgtgtaccacagagatttgaagccagagaatcttcttctggactcaaatgctattctgaaagttacagattttggattgagtacgtatgcgcaacaggaggatgaacttctccgcactgcttgtggaactccaaattatgttgctcctgaggtgcttaatgatagaggttatgttggttctacatctgatatctggtcctgtggagtcattctctttgtgcttatggctgggtacttgccctttgatgagccaaatcatgcgacactgtaccaaaaaattggcagggcccaattcacatgtccatcatggttttctcccgaggcaaagaaactattgaagcgtattcttgatccaaaccctctaacaaggataaaaattcctgaactcttagaagatgaatggttcaaaaaaggatacaagccaacaacttttgtagaggaagaggatgtcaatgtagatgatgttgctgctgctttcaatgattctaaggaaaatcttgtgacagagagaaaagagaaaccagtgtcaatgaatgcttttgagctcatatctaggtcacaaagtttcaatcttgaaaatttgtttgagaagcagacacaggggattgttaagagagaaacacattttacctcacagcgccctgcaaatgaaatcatgtcaaaaattgaggaagctgcgaagcctcttggatttaatgttcacaagcgaaattatatgatgaagctgcaaggtgatacgagggtcagtaaagcaagaaacacattttacctcacagcgccctgcaaatgaaatcatgtcaaaaattgaggaagctgccaagcctctgggatttaatgttcacaagcgaaattataagatgaagctgcaaggtgataagagtggaaggaagggtcacctttcagttgctacagaggtttttgaagtggctccctccttgcacatggtggagctgcgaaagaccgggggtgacacactagagtttcacaagttctacaaaagcttttcatcatcatcagggttgcaagacatagtgtggcatgatactgaaggaaaaaatatgaagaattaagcaacctctagggaaagcaatcatcatattcatagggttacgccttcaatgattcgtttgattaattcataaatcgggttattgttctgtttctacttctagtgccattcccttattgtggttcgtggagttcccatgctttgctaaatctggaactttggatgtgtctggttggatgttcgatatgaaagagagaaaaatagatcccttattggtgctttatctttgacgctgtattcttaattttttttttactaccgtattcagtatagacgtagtaaatatatataaatggggggaaaatagtataagtgagtaggcattggagtgtggtataatacttgtactcttcaaatatttcattcccttatgtgttcattacttctatctatacttattttttgcatgcttgtggcttgatcgctcagcgtagctcgtacaacatttagagtgtataatttcggtgacgcattattccttaatattcatgacagttccttcttctcgagcaggatcgccagctgacgagtgagcgcgtcgaacctg

SEQ ID NO: 77700 - DNA, 405 bp, Glycine max
  unsure (1)..(405): unsure at all n locations
  Clone ID: PAT_MRT3847_41180C.1
atgggctgcagtgatggcaggccacaaagctactattggggagggaggttgggaaaatttctccatttgcccttgtttatgttagaggactaaggattgaaagagggaatataataataggaaggggtagggggagaatgattcagaaaatgaanttcttcaaaaatcaatgttttggtatcntcaaaatttaantttatatattttttttttcttcttttatattcatttgcatcataacgaaaaactacccaaagaagagaaattagagattgctcactctagtcgtaaaattaattaataancattatttcatttccttantcaaatagatattacattgaaaacagatgccaaaaatcaaatgaggatattcaataaaaataatattcttttacttatcct

SEQ ID NO: 77701 - DNA, 139 bp, Glycine max
  Clone ID: PAT_MRT3847_41181C.1
aaaaaaaactttaacccaaagaaatgtgatcacctaattacgacattttcattaaacaaagaaaattcttaataaacttttaactcttaaacctattaaaactccaaatgctccttataaaatcaaacatcttatacaa

SEQ ID NO: 77702 - DNA, 283 bp, Glycine max
  Clone ID: PAT_MRT3847_41182C.1
aacactccttctagcacggaacatttaactctacctactgcacactatcctaacacattagaagggttatatagccattacagctggtgattgatcaaataatcatagacagagccttctaggacgaatgtatggagaccattgcaatagtaccttaactattaccatctcttgataaactccatgaccatgtatgatgtaactctatgtatccacataaacatgctatgaatgtaacatactattacctaattcaatatctcacatcttgaacgttataaca

SEQ ID NO: 77703 - DNA, 369 bp, Glycine max
  Clone ID: PAT_MRT3847_41183C.1
aatgaatattgcctcgttgtacacctgcatagggatcactcacattgctgctagcctgaggataaaacattgatagcaatggatttcttgctggcatgttattgttcgcatccaaattcctgttagcagaatctatattagatatgttcttcttgagcagttgttccaaggtattactgtttgatccattgctctcatagtgccatggctgagtgtaggatcctggaatgtgatctagaacactgtttctattcatcaagtggccatcaaatgttttgttctctccagtttgacttgtttgtcctatcagagggagattctgatttggtcctgggtaataatgcagcgacttctctttcatgtaatcac

SEQ ID NO: 77704 - DNA, 463 bp, Glycine max
  Clone ID: PAT_MRT3847_41184C.1
gagggggcaaacaaacttgaaaaaaaaatcattttgcaatttaactttaaattataaataaaagaatccctttcattacttggctggatgtcctccgcttcactttttaatactttgacaaaaaaaaaatcttccgtggcccaatttacagggccaaacactgaaatctttaaattcacttgccggaagtttgaaactttgaatctccaagtggctaaattctaattctgatcccaaggaaaaatataattctcagttaattttttaaataaagcccattgggccatccaacaaaatgggggggaaaatctgaatttttttttataaaatgaaccattttttttaaaacaaaacattgagtgttttttttagaaaatgttttttaaatcttgaaaggggatatattaaatttctttttcatgaacaccttaaactagaataaatagtgtttttcctcacggaa

SEQ ID NO: 77705 - DNA, 343 bp, Glycine max
  Clone ID: PAT_MRT3847_41185C.1
aattggcttggatggtgcttcacttgggcaacggttatcattggcggcaccaacacgtgcatatcgaaagggccaccaaagggcatatgtgatgcagttaatcattatacggggacgcagatctgcggtgcacctaccctactggacatgatggcaaaagcatcacctagtgaccagaggtctccgtctaatagggtgaacgtcacaaatgcaggcgtgctaccaccttatcatgttccaaacacggagccacaacatggatgtgatgggaacatgggcactggcatgacaaagactttcggtccagcgacttgaagaccacggcacccctattcagatggca

SEQ ID NO: 77706 - DNA, 215 bp, Glycine max
  Clone ID: PAT_MRT3847_41186C.1
gttggttaccatgccactgctcatattctttcacaaataaaattgctactgaaggagttagggtgtctttaaatatggaaagaagcatagcattactcactagtcttctctcaactgttgtcggagtctatgcatatgattttgctgcagctgttagcacaagtagaagatctctaaggttagccaaatttactcaaaatcattatacaaccttg

SEQ ID NO: 77707 - DNA, 2456 bp, Glycine max
  Clone ID: PAT_MRT3847_41187C.1
ggtttttatagtcctcaaagcaaatgacagtggagaaggaggaacgtttgcactatactcgctgatttgcaggtatgcaaatgtgagtctgcttccaaatcgtcaacaagccgatgaacaaatctctagttttaagctcaaactgcctactccagaactggaaagggccttaagaataaaggacactttagaaaggacaccatttttgaagaacctattattggtgttggttcttctgggagcttccatggttattggagatggtattctaaccccagcaatatcagtgatgtctgccataagtggtctgcaggatcaaatagatgaatttggtactggtgaagtggttggtatttctattgtagtcctggtggctttgttcagcatacaacggtttggtaccagtaaagtcggtttcatgtttgcccctatacttgccttatggttcttttctctgggtgctattggaatatacaatatacttaaatatgatatcactgttctaagagcattcaatccggcttatatttattatttcttcaagaacaatggcaaagatgcatggtcagctcttggtggttgtgttctgtgcattacaggtgcagaagcaatgtttgcagatctgggtcatttttctgtaccagcaatacagattgccttcacttgtgtggtatttccctgtctcctccttgcttatatgggccaagctgcttttttgacgaagaacccaaattcttatgcaagtgtattctacaagtctgttccagagagtctcttctggccaatgtttgtgattgccacacttgctgcaatgattgccagccaagcaatgatatctgctacattttcatgcataaagcaatctatggctttgggatgcttccccaggctcaagataattcacacctcaaaaaggttcattggccaaatttacatccccataattaactggtttctgatgatcatgtgcatagttgtggtttccatcttccaaagcacaactgatattgcaaatgcatatggcatgcctgaagttggtgtcatgatggttagcaccaccttggtgacccttgtgatggttttaatttggcagaccaacttatttttggcattttcttttgctcttgtatttggtacagtggagttaatttacctgtcttctgtgctatccaaaatcattgagggtggctggcttccacttgcctttgctacctttttcctctctgtgatgtacacatggaactatgggagcgtattgaagtaccgaagtgaagttagagagaaggtttcagtggactcaatgcttgagcttggctccaatcttggaacagtaagggtgccaggaataggattgctatataatgaacttgtccagggcattccctccattttcttgcagttcctgctcaaccttccagctcttcactctactatagtttttgtctgcattaaatatgttccagtccctgtggttcctcaagaggaaagatttctatttcgacgagtttgccccaaagattaccacatattccgctgtgtcgcccgatatggctacaaagatgtaaggaaggaagatcaccatgcatttgaacagcttcttattgagagtcttgagaaattcttgagaagggaagctctagaaacagccttggagttggagggcaacttaagtgatgaaatggacagtgtctcagtgaatacaagagtttcagatgttcctgttgatactacggctgaggagcttaggattccactggtgcatgatcagaaattggaagaagcaggagcttcttctgcctctcaggaagttgcatcagcattgccatctagttacatgtcatcagatgaagatcctgctcttgaatatgagctttcagcccttagagaagcattggaatcaggattcacctatttgcttggacatggggatgtgagggcaaagaagaactcttttttctttaagaaattgatgataaattatttctatgcattcctcagaaagaactgcagaggaggtacagcaaacatgagagtacctcataccaatatcatccaagttgggatgacatatatggtttgacttggccatattctttctgataattatgcaatgcaatctcagtctggaacgcacattgttattggtatttttcttttctgtgtactgtgattaataaaattttcgtagtatatgttggctcataatagtaaattgtctttagaaaaactcagtttgtattgcctgttacaacagtgatggagccaacttggttaatgtatgaaattgtttcagatactgtacttaaaattgtgatcagaaagggatctaaattagattattggttttaatgtaaattaatgtatttgggccaagctagcgaaagttgtactagtctccttgggacattaccttttgtatcacattttttgggttaattacagaaagtgttttaaat

SEQ ID NO: 77708 - DNA, 214 bp, Glycine max
  unsure (1)..(214): unsure at all n locations
  Clone ID: PAT_MRT3847_41188C.1
atttcctttatctaaccaccacccaccccaaacggggcgaagttagaaagacaaacacaccacggcagacaccccgagggaagaacagaacgaagaacccaaagaggcccaaggcccgcacgacaaagaaggggaaggacgcacnaccgcggaagaacccgccaccgacacccgggcgacggaacacaaccccaccgaagacagagcccaagac

SEQ ID NO: 77709 - DNA, 952 bp, Glycine max
  unsure (1)..(952): unsure at all n locations
  Clone ID: PAT_MRT3847_41189C.1
caaatataaccaatataagtggctggctacacgaggggtagatgaagaagctcttctcaaaggacttccagctgatctgaggagagacatcaagcgccacctttgtctggaactagttcgacgagtcccattgtttgatcaaatggacgagagaatgctggacgcaatctgcgagagactaaaacctgcactgtgcacagaaaacacataccttgttcgcgagggagatccggtgaacgagaccctcttcataatcagaggccaccttgattcctacaccaccaacggaggccgcaccggtttcttcaactcctgccacatcggccccggcgatttctgcggcgaggagctcctaacatgggccttagggtnccgtccaagcttcattctcccctcctctactcgcaccgtcaaggccatctcagaagtcgaagccttcgctctcatggccgaagacctcaagttcgttgcgtcgcagttccgaagactgcacagcaaacaactcagacacaagttcaggttttactcgcaccagtggagaacgtgggctgcatgtttcgtacaagctgcatggaggcgatacaagaagcgaaaggaagctgcggaactgagagcgagggagaatgttcatgagggtgagacagcagcgtatagatcagggttggtggttgtgtatgctacgaggatggctaggaagggtgtgcatcatgtgcgttctggaacagattctggagtttctttgcagaagccagaagaaccggacttttctgttgatgagtgatgagtttggacttcgaattggcttgttatactaccctatgcataattcttttattggttattgatcatataaattaggacattgaaattcttgtaatgcatatatatgcacgcatataatagtagtgcggggaaagctgattggaaattaaccatatgatgacccaatatt

SEQ ID NO: 77710 - DNA, 274 bp, Glycine max
  unsure (1)..(274): unsure at all n locations
  Clone ID: PAT_MRT3847_4118C.1
caatttatgttcaggtttaagtagcgtgacatgtgaganactatgtattttccaccatttttatagcatcatgttgactccaccttatgaagatatatatgccccccagcatatcgataacttttttactttggccataaattattttgtgagaatcaactaaggtaagaagtaggagttcagtgatcttcttnctcctncnaggtgggnnttannngttcnagtncccacannttaananccnngggnaanaaacancttttnnnaacncgnc

SEQ ID NO: 77711 - DNA, 410 bp, Glycine max
  Clone ID: PAT_MRT3847_41190C.1
gctcatatcttctcattttggatggattgctaactttgtcggtctcactttttattttttcctcctaacttggtaagcaacctaggaaggaaagaagataattttactatcttcccatccttcctccgtacccctctttgtttttcgggtaccataatcattgacctcatttgtcaatgatttttatatcctatatttgataaaaaaaaatttagataatatgactgagcatgtggatttttctttctattatagtttttccattcaattttttatgaattttgtaattttttttcaaattattttacaagaaatttctttaagttctgctacaatattagtaaaaatataattatttctctaaatttgctgaaaaaatcaatgaatttttttatgtgttctcatacaat

SEQ ID NO: 77712 - DNA, 617 bp, Glycine max
  Clone ID: PAT_MRT3847_41191C.1
aattataataagtagtatgaaaagttaaatgaaataatctgatatcaaaggagaaattttattttattaaataatatactaataaatgagagaataaatgagaagttccattaatttttttaaaaaaagtaatagcccattttcattacatgtttttattttagtcaaacaaatcaatcaaataaacaataaattagttgaaaacaatttttcaaataagtagcattttttagaggaaaaaaattgttacttatttaaaaagtcatttccaaataagtagcaattgataaaaaaaaaacttcgtatccaagaggctgtttccggatttgaatccatgaccaacaagtcaccaaggtacaactttaccgctacactaaggctggctctcaaataagtagcaattgatattcagccaaaaatctatttcctttacaagaaagtctaaagaacatagtatcagatgatttaggacacacctaaaccctcctaattttattttctgtttgatacaacttagaagttttcctctatacagtattgcaaaacttattaaatgaatctcaaaattacctaacatcattaattttattcctttttacttgtttatttttatttac

SEQ ID NO: 77713 - DNA, 165 bp, Glycine max
  Clone ID: PAT_MRT3847_41192C.1
ccacgcgtccgcaaaaactataccataaagtacaaagttcattcttctattgatcttcaaaattagattgacctttagaaccaaatgatgtcatcaatcacctggggaattctacgctagttgtgggtagagagcgacatatccaagtttctcaaggttacatct

SEQ ID NO: 77714 - DNA, 2288 bp, Glycine max
  unsure (1)..(2288): unsure at all n locations
  Clone ID: PAT_MRT3847_41193C.1
gatttaaatgcgaattgaatttgtagcatgaggggccactgtgatggcgtggcgagatgatagatagatacaatatctcccgtactgcagaggaacccaacttgaacactttcttgagcaagcaaacacctgtttctgctcttgttctggctgcatcaacattcattcataatctcactctccctttctctctcatgtgttatcgttatctctcattcacaatcacaactcaccactcataactacttcttccaagccaagctgcaaaattcaactttttccccttccacttctgcatgaactaccttccaacttagacagtcagagatctaatggagtacgagaggatagagaaagttcaggctggaataatttcccccagtaaactgaggatgaagttattaggacctctccatcataggaagaaagatggatccaacagtaactcatccagaacttccccttcaaggattgaggatgctgaatttgtgaatagcttacttggctcaaaaaatgacaaccttgatgatgaagttacatctccaagcttggatgttctgtcattaaagccgtcgagtgatgctgtgctggaccggagacaaaatggccagatttcctatgaaccaaaggagacaatgcctaaggaaaacagcgacacggggcgtgtaaagatgcagcattttcagaaggttgacacgcgaagttcaagcgcaattcatgcggtgagagcaatagaagatgaaaatcttgattatgacagcaatgctagctcgtccagttttgagtttgataaaggggagagaccagggaacaatcctgccactagaccctattcagacctattccttctaagtggaatgatgccgagaaatggataatgaataggcaaaatatacaggctaatcactcaaaaaagaatacttgtcataaccaagcaaatcgcatgccaacaaatatggggagggttgcaccagagtctggtaattatgatcacaaactcccaacaggcaaggccacagaaacaaagcgagtcgatttctgtcagcctacgtcacatatgggatttgagaaattctcttttgttccctccgatgctcattcggtttcaggtcaagcacacggaagaaatccagttgtggagtctcttccccaaagcaaagatctaaaagatgtcaatgaattgggtttatgttgctcaagaagtacagatgatcagtcagtgatgcctgggataagatctgttgccatgagagacatgggaactgaaatgacccctgtgcccagtcaagaaccttcgcggactgctactcctgttgggtctgcgacaccactacggagccctgtttcctcaatgccgtcgactcctaggacgggtgcacctgctccgacacctttggacaacacgaccaatgaggattcccagtttccagttgaaaatggcaaaaggcatttgtctgaagaagaaatgaagatcaagacaaggagagagattgcagcccttggggtgcagcttggtaagatgaatattgctgcatgggcaagcaaagatgagcaggaaaagaacaaatcttctccccgggacatgagtgtgcaagaacaggagagaattgaatttgaaaaacgtgcagctctgtgggaggaagctgagaaatctaaacatactgcaagatttaagcgagaggaaatcaaaattcaagcatgggaaagtcagcaaaaggcaaaattagaagcagaaatgagaagaattgaggccaaagttgagcaaatgagagcccagacacatgcaaaaatggtaaaaaagattgctatggcgaggcaaagatcggaagaaaaacgtgcagcagctgaagctagaaaaaatcgagaagcagaaagaactgtggctcaaacagaatacattcgccaaacaggacgattgccctcttccaattacatttgttgtggttggctgtgatatataccttaaacactgcttttagaagaaaatgcaccttactacaagattgctaatctttcttaccgtggatgatatgggtcatcaaaacttggcatatcatcttatacgttacttgaaaccttgtaattttcaaacacctgagtgctacattaaattgattgctgagtgatgtttacaagtcacaaaactgtctttttttttcaaaaaaaaaaggaaagaaatgtttgttgtgatgtacctggccttttttattttgctctaatgtaaattttcatgtgatcttgctttcagtttatcatatttttttgatactcctgttgngtctgcgacc

SEQ ID NO: 77715 - DNA, 739 bp, Glycine max
  unsure (1)..(739): unsure at all n locations
  Clone ID: PAT_MRT3847_41194C.1
tttattataatncaaatcaaactaaggtgttaagacgtttataacaaataacacacattatttaactaactgatttaaattgcttgatgttgaatttaagtatagttaataatataagattttaaataacttttctataactaatagatgttaaaataaccaaataatattgaatttaatattatacttaaattttatcttctttttattaaacaatcttgtaataattatatactatttcttttaaaaagttaataaattaatcttatttttatctacttttgttatttttttttattataaatctcatattcctttttgcacacatttacttcgttttttttaatcgcatacaaccattcagttaaatacatcaatataacatgaccaatatattatatactatttatatttttcattttacctttttttgggtgtaattattcattataaaaattaatttaagaaataaaactaaagaaaatataaaataggttaatttatttgattaagaatatattgaataacataatatatttttaattaatagaaatataaattttatttcaaattatcatttctttcttacacaactannnattatttaataaatttttaacatattaagttatagatatgataaaaaaatattacatnnnaatttaaatatcttaatcnnattaaatttaaannatttttnnnnntaatatcnnctctattacnnnnannttaaatagca

SEQ ID NO: 77716 - DNA, 662 bp, Glycine max
  unsure (1)..(662): unsure at all n locations
  Clone ID: PAT_MRT3847_41195C.1
agcatctccgttactgcagaggaacccaacttgaacactttcttgagcaagcaaacacctgctcttgctgcatcaacattcattcattcattcataatctcactctctcattcacaatcacaactcaccactcataactactacttccaagccaagctgcaagattcaactttttccccttccacttctgcatgaactactttccaacttagacagtcagagatctaatggagtacgagaggatagagaaagttcaggctggaataatttcccccagtaaactgaggatgaagttattaggacctctccatcataggaagaaagatggatccaacagtaactcatccagaacctccccttcaaggattgaggatgctgaatttgtgaatagcttacttggctcaaaaaatgacaaccttgatgatgaagttacatctccaagcttggatgttctgtcattaaagccgtcgagtgatgctgtgctggaccggagacaaaatggccagatttcctatgaagcaaaggagacaatggctaaggaaaacagcaacacggngcgtgtaaagatgcagcattttcagaaggttgacacgggaaaatcaagcgcaattcatgcggtgagagccatagaagatgaaaatcttgattatgacagcaatgct

SEQ ID NO: 77717 - DNA, 343 bp, Glycine max
  Clone ID: PAT_MRT3847_41196C.1
cataaggttttgtctcattgtccattattttttatggaagtaacaattataggcgtaagtgattttttgcattaacttgttgcatgtctgactttggggatttgtttggttgtccaaggttacagctgtcctttgtgtatctctaggatgttcctatagtgcatgaggaacttaatgcagtcaatgaaaataataataatgtttaggggttgatgcatggatttacagcaactgtaatattgacacggaaaagacaatgataactgtggtcctcagtgttgtcttggttgttgtcttctgtcctgtcagtagtaggataggtgaatttcttgaaaacaactta

SEQ ID NO: 77718 - DNA, 306 bp, Glycine max
  Clone ID: PAT_MRT3847_41197C.1
agtcggtggccgccctttaattctttttgtaagatcagaccattctaatcccacaacatctgttaagggttacagtgaacaacatatgcttgagtaattacatgtcttagataaaaactctctcagaggaacaacaacagtttcaaccccacccgagggtctagttggtcctcttcctttcggctcaaaagtggggtccatgccactattaactggaatcggacctgctttactgacttttccgcctcccacagcacgctccagatgcactggggtagcagataccgatgccagattgggagtctc

SEQ ID NO: 77719 - DNA, 346 bp, Glycine max
  Clone ID: PAT_MRT3847_41198C.1
atcaaaaaaataccgattctcgaaaaaaccaggcgataaatattctttctacgagcggaaagaaaaaatgtgccggtgcgtgcccccatttttaaaaaaaatacaaaatgcaactggtcaaaaatcattgtttggccaaaaaaccttggggggttaaaaaaaaaacccccaggtttttttgtaaaaaaaaacttccactttaaaaaaacccccgggccagcgaatttcaaaaggcctgtctgttgaccattgggtcccttttccccatggattcaaaaaaaaactcctggatgtaaaaaaaaaattctccccctttttaaaaaaaccactaaccttttgatttcta

SEQ ID NO: 77720 - DNA, 444 bp, Glycine max
  Clone ID: PAT_MRT3847_41199C.1
gggtggcatggattttggagcctgaaatgagaggaaagttgggtaaagatgaatgctaggtcatttgatgaatattgaaagtgaaagaccaaagacaaagcaaggaatgaagatagagacaaggatagctttagtttgctttagctttttaactacttagggtttatctataagggttttaagctgaaatcaaaagaaagaatgaacaagattgaagcacatgtagttgaataaaagtagtcttgctctcttgggaaaaatattatgtatatcacacgattaaggaacggtagacttagtgatttttttttcaaaataatattgcagaaagtaccccacttagttttgtgaaagagggggaaaaataaaggaataaatcaaccatcaaagtagcaccaggaccaggacttctttctagggatatgtaatattatttcttacttt

SEQ ID NO: 77721 - DNA, 127 bp, Glycine max
  Clone ID: PAT_MRT3847_4119C.1
ttgccaaaacgatacaacaacactgcttttataccacattcgcaacttctcatacctagaaaggagagaaccgtccacactacttcctcaatggcagcttccagccaccagcgtaccaaccccagca

SEQ ID NO: 77722 - DNA, 163 bp, Glycine max
  Clone ID: PAT_MRT3847_411C.1
cggacgcgtggggtatatacatgattccaccatcgacaagtatttaattgaagtgtaaattattttgaaaccataacttggttactacaaaatggcactcttttgtcttatatggtgtaaaaaaaaaaaacatttttttatgtgaaaacaagttgaataagac

SEQ ID NO: 77723 - DNA, 477 bp, Glycine max
  Clone ID: PAT_MRT3847_41200C.1
gtatagcttattattttttttgtcttccttttttttttttttttgtttatactgattatcaaaaaaaaaatattgggttttaaaccccaaaagttttatgaaataaccatatttttagaaaaaaaaagatgtttataaaaaaaaaaaagggcttataaagggggggggatttaactggaaaaaaaaaaaaagttataaccttgtaaaaaggtggggaaaaaaaaaaaaaaaaaatgtttctaaaatgggaaaaaatttagtggcactacctgttttttttttaaaaaaaaactgggtgagggttttcaagccaaatctttaacctaaggaaaaacaccaccctgaaggctttctcttacttggaaaaaaaaacaaccgtattaggtaaggaggctttgaatttcttaaaaattggatcctaggggaataaaagcctgcgcacataaacaaaggccccccagaggccacacccccgga

SEQ ID NO: 77724 - DNA, 188 bp, Glycine max
  Clone ID: PAT_MRT3847_41201C.1
ttattaattaactcacggttgagcacttaccaaccccactcgcactctctaactaatcagtcacagacctgacaagcctgcttcccaagcaccatacaattcacgcaattactctacgaagagtgccagcccacatgatgctcttactataacgaaccagaggatatcttccatgaaacactctgcat

SEQ ID NO: 77725 - DNA, 659 bp, Glycine max
  Clone ID: PAT_MRT3847_41202C.1
ttgcggagatacgtttaaggttggattggtgcaggctgtacacttcttaggatgcctgattggggctggaacattcggccacctctcagactcctctttaggaaggaaaggctctctcacagtggtttgtgccctaaacaccatcttcggctgcttaacagccctgtccccaaactactggatctacgtcctcctccgcctcctcaccggcttcagcagcggtggcgtcggcctcactgccttcgtccttgccaccgaaccaatcggcccaaccaaacgtggtgcagcgggtatgtccaccttctacttcttctccggtggcattgcacttctctcaggcatcgcctacatcttccaaacatggcgctatctatacatagcttcctccatcccctccttcctctacatcatccttgtccttccctttatctccgagtctccaagatggtacctcattcgtggcaaagttaccgaagccatgaaactcatgtccaccattgcttcttccaatggtaaacaccttcctgatggtgttctccttgcacttgacaacgaaacatcgcccacaacaaaccaaggttcaagttcaggctatgacataacagaaatcatgacttacaaaaacgaaaacaaagatgcacttattgagtccatcatag

SEQ ID NO: 77726 - DNA, 273 bp, Glycine max
  Clone ID: PAT_MRT3847_41203C.1
cgaacagctagcagagaaacaaagttacgagtaaagtaaattaagaagatcattaatggcttctcttgcaaccttagctgctgttcaaccagctgcgctcaatggccttgctggaacttccctctctggaactaagctctctttcaagccctctcgccaaactggccaattccaagacttccggagtcgtgccgtggtaacaaagtatggtgaccagagtgtgtactttgatttggaagatcttggcaacactacggggcaattgggccttta

SEQ ID NO: 77727 - DNA, 905 bp, Glycine max
  Clone ID: PAT_MRT3847_41204C.1
taaaaacaaaaacattctctcccattcctcaatcctcccccttagcccttcatctccttgtgctcccctttgttgaaaaacaaaaacattctctcccattcctcaatcctcccccttagcccttcattttctttttctttcttttgttggtttgtttattcctttattctctgcttctgcattttgtacatgcggtgttctatttctctttggtttgataacaggatttggcacaagcgttgtggtctccccatttcaggagaatcatcactcattgccataatatagagcttgttaaaagcaaaagaaagaaaagtgaagtgttttgagatctggcatgttatccttttctctctagctttctttttgagggggtgtattgtgctagagtaactgacattccagctctgcttcctttgttttgcgtggcccagaagcataataacaatcaccaaaagaaaaaaaaatattccaccgtagcggttcttttaaacccttttcgatccaccacttgagcttggcctagctagctttgcttcccattcctcacttaacttcaaaacggttccagatggatcgtttttcttctagtaccattctccccgaagcgtttcaaggtgccaaagatgacttcaccatgcagcttgcattggtctggaaccaaatcaaagcgccactgattgtcccgttgctgagacgagcactgtttctgtgcttgatcatgtcggtgatgatgttcatcgagagagtctacatgggcattgtcatcactctggtggcgtgggggcggtcttggccagagaaacgttacaactgggagccaatgaaggacgacattgagttgggatactcttgttacgcggtgtgatcttgttcaagtccccatgtacaacgacagagaggtt

SEQ ID NO: 77728 - DNA, 424 bp, Glycine max
  unsure (1)..(424): unsure at all n locations
  Clone ID: PAT_MRT3847_41205C.1
ggataccgtcgtttctaaatactgagacaacattattagccgttccagcctctaccaagctagggccctattacattttgctttcgttcatttaactacgatggttgaaggtagatggcctcattgagcacatttctcggttggtgttaagcggngttgcggccaccaacagacaactaggaaaaaaaacccccaacacgggggggggcaacgaaaccttcatgcaacccgggggcggcagagaacccaacgcgcacccagncgggaagaagacacgacaaggacacggggccagagaggnacgaacgggcncgcggcgaaggggggaccacagaagcaaccaagaggcccgaggcggcaccacagagaacaagaancaccgccacggggccanngaacaacccccacgaagccgcggagacgg

SEQ ID NO: 77729 - DNA, 381 bp, Glycine max
  Clone ID: PAT_MRT3847_41206C.1
cgagcacctatatttataaacccacacatacccacttcactaccttattatatggtgccactaccatccccactgggctagagggaattcaattgaatggggggcaactactaccaacattcgtgtattagccacaaaataacatgtgtatcgatcatcatattctgacaaagctgtctttcttaatctcactccctaccatgccgccagaaactctcatgtctacaccccaaaacacaatctcggttcccttcatgtgggaagaagcaccgagtaagcctagtcattaccacaccgaatcagatcccgaggacagtgctactatctctaaataatccttggagcttcctcccatagcgttgtttctgttggacactacca

SEQ ID NO: 77730 - DNA, 290 bp, Glycine max
  Clone ID: PAT_MRT3847_41207C.1
ccacgcgtccggacgcacccaccacccatccttcagtttctcagcatcttcgctataacccgtgacggaaagactcaggctgcagcgtggatcagaatgcttggaatcgccttttgattccctgacttgacctattcacctctattcatctaaaagatttgtccttcctctccttacctgtctctttcaccttatgggtgttcataaaacgcccttaaaaccgcgatgggggccgccgatgagtgttacccacagccgatcacggtggtgctgctcttgaacaccttgcc

SEQ ID NO: 77731 - DNA, 223 bp, Glycine max
  Clone ID: PAT_MRT3847_41208C.1
agtatatggttatagtttatcctccacatacatgacaagacactgtacgtacgtaagtacatatgcatgaaactaattcatagacaacattatcatgtatatgcatgcgtatgtacttacgtctgttcagctgcggaggttgatagtgaagagggagctgttcacattggtgaattaaccgctggtggatctgttggactccctactacgactaatttgctgt

SEQ ID NO: 77732 - DNA, 736 bp, Glycine max
  Clone ID: PAT_MRT3847_41209C.1
gaacaagtggcgaacccagtttgagcgctatttttgtttgtgttcccagcgaaagggcaaaacaaagtataagaccttgctttgatttgcttcccttttcttgttgtcgtgtcaaccatggcgtcgtttgggtctctgaaatccaccattttcgaaaaagaagagagaaaacagcagtatcagtcgcatattcgaggcctcaatgcatacgaccgtcacaaaaaattcatggacgattacgttaaattttatggaaaagaaagaccgtcaaacctaaagttgcctattaaaacagatcaagatacactaagagaaggatacagattcatccggtcagaggaagatgatatgaatccatcgtgggaacaaaggctggtgaagcgttattatgacaagctttttaaggagtatcctttgcaaacatgttcagtttttatactaatattatttatactgtaggagtgatagttccttttatttatttatgtaacataatattggcatttggttaactttgttggtaaggaaatgtggacaatgctcatgtaagagattcagatttctatgtattatattttgcattccatttacccaatttggtccctcttccacagagcattttatctaaaacatagcttatatgaaaggatataagaagttattattggcattgcttctgattcataccaatataggaatgacatttatgggatggagtctaactacctgcctgcaa

SEQ ID NO: 77733 - DNA, 271 bp, Glycine max
  Clone ID: PAT_MRT3847_4120C.1
ctggagtgcagatcgtcccccgggcaatgaaccatgagattggaacatcaggaggaaaatatcggcgggggcagctaaagtagtggaataccttgcacgacagagcaaaccctcctgtcagtgatagagacggcatatgcagcgaggatattactggatgtaaggttagcgatccaaagcgttcagacggtggtcttgcaaagcttgttccgagtggtgacaaatcacacggttcataccgtgtcatgggaacttatgggtacggtgcccc

SEQ ID NO: 77734 - DNA, 347 bp, Glycine max
  Clone ID: PAT_MRT3847_41210C.1
gagggggaaatgaacccattcacattggttcaaaggctttatacaagttttttaacatcatccgggagctaaaaagcccactccataaaaaaagcttcaaaaaaaaaaaaaaataaccgggggcaggctttgttttaaacccccttttccccaaaaaaaaagaaagggaatttccaaaccccccaaatttttttcccaaagggggaaacaaaacaaagcaaagccaagcttggcggaacataccaaggggaataaaacaaggggccttccccccccaccggaactcgaaactccgtttgaatttaaaaaaaaagggaaaacccccctcttttccccggattccttaa

SEQ ID NO: 77735 - DNA, 457 bp, Glycine max
  unsure (1)..(457): unsure at all n locations
  Clone ID: PAT_MRT3847_41211C.1
cggtctaaaatattcctatctgaaatctattaaaaataaagaaattgtcttgctcataggggggaggtgtataacctggcggcattgaaaataacaattaatataaattgattgaccataagagtatcggtcagtgacaaatcaaaagcgtggagtgggtcttgcgttgtgtaggaatcccaaattcatttcttgttctcattctcaattcttcttttattctcattctgatttgccacacacgcataaaggtttaaaatattgggacttgattcactggaggtggataaagattgctaaaaacgtcatttgctttgtgcttgatatagcaactcaatgatattgcttcattgggttcaaacatgggcaattcaacataggacttgtngtgatattaattaatattgacccttgtgcaagccaaagatgcttttgatgattctcaaaaaaactcttt

SEQ ID NO: 77736 - DNA, 944 bp, Glycine max
  Clone ID: PAT_MRT3847_41212C.1
acggctgcgagaagacgacagaaggggacatctatgagggactttctttctcccacgctgcatttctggtacatgtacttttgtatatgggggggttctgctttgactacttcacatgtagaggcaagcactataagtgtgctgatcaaacctgaataatataagtggctcttccattttcactcttgttctgaacgacttttcaagagaaacaaaccatggtagtgaaggtttacggtccccactgtgcttccaccaagcgggtgctggtttgtctggttgagaaggaagtcgaatttgaggttgtccctgttgatgtcactaagggggagcagaaggatcctgagtacctcaaactacaggttcaactcttgtattttcctttcttttttgttgaatatgttttgtcttcgattctttatcttctgattcatgttctttattcataatatctgcagccatttggagttgttcctgtcatcaaagatggagattataccttatatggttacactttgtgcttctttgttctgtttttctacttatagtttgtttggttaaacgtactattcacttgctttttatatctctttaagtcttagcgtctttgtaagaaaactatccgttttagcgttagaaattcttttatggtgttagcatgattttgaattgcgattgcggtcgtggcggtggttgcgttacggtaagtcagaaaacctttatagttcaggtaatcgcgggaaaatgtggattgcaattgcggcattacaggagtcaaatactttgatattgcgggtgcaattgtgtttgcaaaacgctatttaaaaccatgggtgttagcattagaatcaaaacttaacttgtatgtatgtgtagggactaaaactcaacagttttctgaactaaaattaaaaaagatcaaatgattaatagcttaacctatt

SEQ ID NO: 77737 - DNA, 434 bp, Glycine max
  Clone ID: PAT_MRT3847_41213C.1
agcctctgatgctcgtttccctcattattttcctttccacaacagaatacaatacacataaacataaaaataaacaaattgttaatcagagaccagaaaaagaaagaaatagaaaaaaagaaccacgcaaaatgaaaaataatgttgtaactcctcagctctcaccagtctcttcgtctcttttgagtcttttatctccatctacatgcacacatgcacatgcagtacttaactaatagtagtaatttctctctatgagtatcaccacaaccaattcacctcaacacacaacagaaacacaatggttggatttgggttacgttgtctttgaatattctaaccccaccactggtgcactgcaacaccctcgtcccttaacttgccatacaaagccaagcactcccaataggcccttcggctggaattccctgagc

SEQ ID NO: 77738 - DNA, 243 bp, Glycine max
  Clone ID: PAT_MRT3847_41214C.1
cgttcttttttttaaataacgagaaatccttttattgctctatggtaacatcggtaaccgaaaattgcgaaaaatcactttgtcacagtcatcccacccattaccacactctacattgcaaaccaaacctgcacctgaaccatgcacaacctaggacgtattaacccatcagaatgaatgtgcaggacgaaccttggatacaggccctggggacatttgcttgatttcatgacgtgccgccaa

SEQ ID NO: 77739 - DNA, 383 bp, Glycine max
  Clone ID: PAT_MRT3847_41215C.1
ggacagggcaatttccgatcaagaataaaatgggggagaagtttttagctgtagcaactaatacgcctttttatgacgatgatggaagcttagttgggctaatttgtgtctctattgatttgcggccctttctcgaaatgaaagttccaatgcctagtgtaaggaacatcgagtcagattcagattcaggtggaacccgacctagaagtagcattacaaataaacttggccttgacactcaacagccgcttcaagcttctatagcttcgaaaatttcaaatttggcatcaaaggtgggtaacaaagttaagtcaaggatctggacgggagaaaacaatttggatcgtgaaagtgggagtggtgaaagtcatcattctgagcat

SEQ ID NO: 77740 - DNA, 829 bp, Glycine max
  unsure (1)..(829): unsure at all n locations
  Clone ID: PAT_MRT3847_41216C.1
aggcaaaaaggaatgctttgatggcaagccaggcaagaaatgcatttcagaaagtcatgagcgatggaatgaggaggccaatgcactcaattttgggactgctttcaatgatacaagncgataaattaaagagtgaacagaaacnttattgtggacgcgatgctaaggaccacgtaatgtcctatcaaacttgataaacgatgccatggataactcaactaaggatgaaggaagattttctttggagataaggtcttttgggttacattccatgctgaaggaagcagcttgcctttccaagtgcatgtgtgtttataagggctttggttttatggttgaggttgagaagtgtttgcctgacaatgttatgggtgatgagaggagggtttttcaggtaattttgcatatggttgggaacctactggaacacaaccatgggggagggatccttgtatatcgagtttttgcagaaactggaagtcagggaaggagtgacaaagggtggacaacctggagaccaagctcttctagtggtgatgtaaatattagatttgagatagggatcaacagtagtgattctgaagttgggagctcaatttcttcaggatttgggggtagaaaatatagcagtgatagggttgggggcagattgagcttcagcatttgcaagagggtagtccaggtgagtttcataatgtctatcatatgtatgcatgaatatagtaaatgcattaagacagcgactttcattttagtcatgtgctatataagtagtatctttgcagagtttggtggaagactatattatgcagtccttcattattccgct

SEQ ID NO: 77741 - DNA, 268 bp, Glycine max
  Clone ID: PAT_MRT3847_41217C.1
attcgaggggacacaaatgatttattttatttatttaaatcctaaacaaaagcaaatacttagcgtgtagcagcggtggaaggaagagaggattgatttgattgtttctgattctgaaacccctcacagtgtcctggccttggatgtctacaattgacaagatcaattaagccactcgaaggcctcgtcaaaatcgcagatctgaccattaactctggacaccatgtggtgcgtctctctctctgtcttttttattgtgaaaattgga

SEQ ID NO: 77742 - DNA, 392 bp, Glycine max
  Clone ID: PAT_MRT3847_41218C.1
attctttttttgtttttgttgtttttccacacttttctattgttttttttattgtttttttggggccaaggaataatccccgggatcttatttaataaaaataacggaccgccttatgggcttgtttggagggcttaatattagaacaagggctgaggctactgaaaggcccaacccccttctttgctgccgagggggtcaccacatgggacaccaacgttcccaaggatccattttccctctttggcaagttattatttgtaagctgattagcttacaaagagaacctgaccaaggagctatacaggatccttgaaaacaaacttcaccaatggggtgaccccaacctccttaacattggggcttggaccttccatcagactaagcggttg

SEQ ID NO: 77743 - DNA, 181 bp, Glycine max
  Clone ID: PAT_MRT3847_41219C.1
ggatttttttttttttttttgataaacattggacatggatattatacagataaaaaaaccatgcgtatgcaaataattagtcataaccaatttttgtttgtacataaatggtttgaaaattaacatagctaatatgacctgaccagctattacttgcaaaaagcaattcaccccaataaaa

SEQ ID NO: 77744 - DNA, 253 bp, Glycine max
  Clone ID: PAT_MRT3847_4121C.1
ctttcttgttcgactctgcttctttctccaacttcacacacacacacacataaaatctaattaactaacatggtaattgatatagcacttggtgtggctctggatttctccaaaagcagggagaatgctcagtaatggggaattgagaacttagcccaaaaatgtgacactatttaagttgttcacattgacttcaactctcgacacgattccatcatcaaactatgggcagaatctgggtcacctcttaatc

SEQ ID NO: 77745 - DNA, 375 bp, Glycine max
  Clone ID: PAT_MRT3847_41220C.1
taccggttcggaattcccgtgtcgacccacgcggtcctaccggttgcagaagaccaccgaaggggttacttaaccaggttaaagaagaacattaatggacttaccaagcaaccctatggcgaaagtgggttgtgtcaccggagacagctgggccctatgatcatgggtgggcctactctacttctaaagcgggtacacactgtatgcgaccgtacaagatatctagggttaaaatgagacgaaacattttgaggaaatggtaggagcatcaagtaatcttcattattttgtaaaggagcttcttgacatcgactacattatcgctgatataatagggtgttctctcgtaatacaccatgcttgttataacatcat

SEQ ID NO: 77746 - DNA, 271 bp, Glycine max
  Clone ID: PAT_MRT3847_41221C.1
ccgccctcgcctttttttttttataacgggaatcctcctaggtctgggaaatgggggagggggattccccttatcacacatttattacttgcattggcaccagcctagtcctaaccagaaatcaaatactcccaattcatatatctacatttttgcctacttatttcttcaacctgcggaattgaaattccccctggaatcacgatatcattttctatctcaaaaggatcggactaatgggacaacaaataggggcaattcgtctatccac

SEQ ID NO: 77747 - DNA, 673 bp, Glycine max
  Clone ID: PAT_MRT3847_41222C.1
ggcattacacagctcttacaatcggatactatagtatagattcgcctgcgtgcatgagtattgatatatgctgatcataccatttaaatgtagtaacataatagtggatggtggatctatgagagtggagccagtcgccacagtgatggatgtcgtggggaaggggtcgaaactcacactccctttgatgtcgcatttaactcctgagccagacacatgaactgaggacctatctactcacttgcactactgccccttaccttgacatgcttgacaactgcgtcattctcacactggacaatgcacttcaagcctaacaacacacacacacttgttcgccatggtaccatcagaactactgccttccgtccaacagatttacacgctaccacgaatggcccacaacatgctggattccttaaccgttcacatttttggcgttgttcaaaccgacacatcgccatcgcctatggtagatagccattcaacacgaaaccggctgtaagctacaacaccgatgccgaaggaaacggcatctgacggatccttgtacggcgagaacacgccggtgaaaagcgaggcggtaacaacgacgacgaacccgttggcgctgtactctacaagcctgccgaggaaagactgcttggactttgtgtttgtaaatgaaaacttg

SEQ ID NO: 77748 - DNA, 331 bp, Glycine max
  Clone ID: PAT_MRT3847_41223C.1
ggtctcgctctgcacaaagcctaacaccaaaaccagaagcgacatcgcaatcgcaatccagcgaatatgatagtcgtcactggagacgtgctcgcattgttgggagggaatccttcaccgtctgcagatgacatcaaacacatcctcggcgcaattggcgctgaagctgataatgagttgattgagttgctcatgactgaactcaagggaaaagacatcaggtgagctaattgctaatggaagtgcaaagatgtctgcagtgtctggtggcggtgcagcggttgccgttgctgctgcagtagctggaggtgcagctgcacctgctgccgaa

SEQ ID NO: 77749 - DNA, 463 bp, Glycine max
  Clone ID: PAT_MRT3847_41224C.1
gtctagcacaaagcattactaggctgaaggagagacctgagaactttcctaggtagatcaatccattgtatcattcagttcttctaaagcctacgttggttaggctgatggcagtattatagttgctaaattcagcactgtgttcctgttgtcgtggttcacgacccaccaggtattttcagattataaaacttttctttctttcttaacagtttcaacaggccactcactcttaagggtgagaagaataaccacaattgtatgtgcctgttttttactcttagcattagatgaattcaaatttggaaacagattgatagcaattttttctaaaaacattagacttttgctaacctttttttttttaaatttgcttcaacaagctctccaccagttgactttctttggctaattttactttgcatgatatgccttaatatgccttcataaataaccattttaa

SEQ ID NO: 77750 - DNA, 353 bp, Glycine max
  unsure (1)..(353): unsure at all n locations
  Clone ID: PAT_MRT3847_41225C.1
gcaagagtagctgtcacagaattaagtggtcaaatttgtcatatctgtggggatgagctcnaanttactgggaattgttaaccagttggttgcgggcaattaattttcattccctttgtgcaaaccttgttattattattaaaaaaaagagggcaaccaagtttgtcctcagtgtaaaaccatattttatcccatcaaaagtagtcctatagttgagggtgatgaaaaagatgattatacttatgatttaaaaagtgaattttatatttggagtgtgttctctgctctccttaactattgttcacaagtgaatggttcatttatccacacaccatcaaatttttattcacctt

SEQ ID NO: 77751 - DNA, 397 bp, Glycine max
  Clone ID: PAT_MRT3847_41226C.1
aaattataatgtacaaaataaattcagcagaagggtatataaggacagttatacatgtgaaaatgcaatcgggacatatatgggatccacaaattcggggctactaatcaatgaacgcagaatcacaagacatgtttaccatattaatgtgagaaaaaacacctcccaaaaaatcgtttagaagctaacttgatgtaccaatgatactgaggacaagggatctatatgatgctgtaaacgaaacagaagtcatcgcataaattgtacaactgaaagaactggatacatatgattagaatacggcattcattgagatggtattaacaatgggcctatcattctcatatgttagggaccatagagaactacaagctccatactcagcatgcactgatgc

SEQ ID NO: 77752 - DNA, 270 bp, Glycine max
  unsure (1)..(270): unsure at all n locations
  Clone ID: PAT_MRT3847_41227C.1
ataaggtattaacaatcaatgtgataagctgcataacacaagctttcaaactccttaagatatatgntaanaaggtttttcntaaactagttatttctctttgtgtgntactcataaaagtcgtcattaactgctttcgcaacttttatcccattttttattttggtgaatgcttaatccttgttttaatctgttggagttactcgggatatgaccaaaatagttatttaagtaacgggcacccctcacctcatcaacgtggggttgagt

SEQ ID NO: 77753 - DNA, 461 bp, Glycine max
  Clone ID: PAT_MRT3847_41228C.1
tcggcggccgccctttttttttttttattattaatgattttgtcattttactaaaattaacctaccactgggaatgggcgatgatttttgggtcatgaaattctccaaacacaccataaacgtgtatatttcacacatgacttgctatcatcacattagtaaaaatataccggaatagacacttcttaggatccctccgtatttcaatttcaaaacttgggtgactagcttacaataatacaataattcaataaatgggtgactagaaaattaggggtcttggccaaactttttgtgggtgcactccaggagaaccaaatgcaaccttgaaacccacattataaaacagtttgtctactgttagagccttaccactctggcggttatcataagcctttttctttccaaaggagtgtagaagagaatccaggtctacttccatcaactttacacatttttat

SEQ ID NO: 77754 - DNA, 355 bp, Glycine max
  unsure (1)..(355): unsure at all n locations
  Clone ID: PAT_MRT3847_41229C.1
ggttcgagaactactctctattctccatttatattttccttcaccaatggctcttgccgggggcgctactttttcctcttcagctgcagcagcagcagcagcgtgtagctctttcttctcgcgccttggatcttcatcggacgctaaacgctcctcaaaattgattctctttcnctnccctnacaccccctcacctccccactgctgttgccaatataactcaaagacgctggcgggtgaggccaggcggtcgaaccccaacccaatattctcttcttctcttgcagcaactattcttgatcctgaggttgagaaggagaaagacagatttatgagcaattatgcgacaagacct

SEQ ID NO: 77755 - DNA, 115 bp, Glycine max
  Clone ID: PAT_MRT3847_4122C.1
accacaccaaaaccgcattttttttttgtgcccagggaaaattacctaaattccctttccaacaccacagggagctcaatttcaattcaaggggaaagcttaaattaaacaacca

SEQ ID NO: 77756 - DNA, 373 bp, Glycine max
  Clone ID: PAT_MRT3847_41230C.1
aaatctcggaagctggaccaagccctacagacaaatcttgatctagttcatgctatgatatactgttcgctctgactgacatgaccgggttggttgcgaaccaatattacgcggcaatggtgggaccatacctggatttcatatatcacctgccacaggctaaaacctactttacaaacagactgatgcacatcatgcttagaacaacgacaccacacgtgttcattatatgtatcgctacaaacgcctagatgcatatatttatgattggagtatgatcaagggaaacctcttcatgtatagctattgaatatgattggtgctgggaatctacagcatgaaacggacctctgagacagacaaaaaccttagt

SEQ ID NO: 77757 - DNA, 233 bp, Glycine max
  Clone ID: PAT_MRT3847_41231C.1
atgtacaaccggacgcgggtttttatatgttaaccacggacggggacctgcacccgaaccagctttctatttagagtgtactataatacctagtcttaaaccttgcgatcattgttatactacggaaagggatgatccaggaactcacctatcatcatacgtgcccgtattctagcgagaccagtctggggccggtaacgagagatctaacgaacaagaatggtcttgaaatt

SEQ ID NO: 77758 - DNA, 808 bp, Glycine max
  Clone ID: PAT_MRT3847_41232C.1
ctcaaggctgcttctttcttacagcaggggaaaaccagggaagattctatttcatttccttgccaacttagagagagagagagagagagatggcaattgggttcatggaggtgcagcttgtgaaagcaaagggtcttcaagaaacagatatctttgctcatatggacccgtatgtactgttacaatacaaaggtcaagagcgcaagagcagtgtaattcatgagggcggcagaaatcccatatggaatgagaaatttgtattcagagtggaataccctggatcaggtgatcaatacaagctcaaccttagaatcatggacaaggatgtattttctgcagatgactttgtcggccaggctacaatctatgtgaaggatttattggcggaaggagcagagaacggatcagctgagcttcgtcctcacaagtatagtgtggttcgagctgaccagtcttattgtggcgaaattgaagtcggtataactttcacccgaaaggaagaggaatacattgaagatgatgttggaggatggaaggaaagttgcttttagttcagtgtgcttcagatatggagtttggaatgtaacacggttacatggagacaactcttcttaagtcttttctgtatgtagttgaatatgcatgggatttgaaatcctttctagtgtttatgatgtgatgaaaacacttggcattgttatcacagttgttaatgagtttacccataaattttgtaatcaaaactaatcatacaccaaggagggaaagtacataatcattacttggaagtttggtctgattaaaactg

SEQ ID NO: 77759 - DNA, 508 bp, Glycine max
  Clone ID: PAT_MRT3847_41233C.1
aaaaacccaaatttgggggaattttttcatttattcgattttacccaaccagaaatttaaagggaaaaaaacggatccaggggccccaaaccaaaaaaaattaccaaaccggaacccctaaaattgcggaacacaaacataggaaaaaacactaatcaaaaaaattaagccctaatttttccaggttccatcacccccaccaagaaaggagggggaccccccgcccccggaagggccgaaaagaggggttttggcaccgccaaaaccaccaccggtacgggtaaaagcaccttcccgaggggcaccggatcccccaaaaccaccacgggggggggatccaccgccactttcggaaccgccaccgcccccaccggggtttccgggggacggagctttgttcaaaggggggggggggccataaagggttggaccggtaatccctttgaagggatcccttattgaatcctggggggggaagggaaaaaaaccaaatccccgggatcttcca

SEQ ID NO: 77760 - DNA, 356 bp, Glycine max
  Clone ID: PAT_MRT3847_41234C.1
cttctttttttttttttttttttttttttttggtttttttttttttttttttcaaaaaaaaaaatggtttccatttttggaaaggaaccccatccccgggttttggtctagtcaaaaaggggcccccatttttggggcccccttccttaaattttttaccatggaaatctttgttaaaccccgttctcctttccagttggaccaaccctgtttcctccccgggggggaacaacaccgaaacgaacccgcttttttttggcctaggttaaccccggggggggcaccttgaaccaccacccccccagttccatttttgcctggggtggatgggcccattcccaatggctccccttttt

SEQ ID NO: 77761 - DNA, 442 bp, Glycine max
  unsure (1)..(442): unsure at all n locations
  Clone ID: PAT_MRT3847_41235C.1
ggaataatgatgtagcaattatcatgcatttgcatgatctattagcaaaaaggagaaatgcttatcatgcatttgaatctcatctcatgtataaaaaacaataaatttattgtttgaatcatgtcttttctaaaattaatcatgcttttgtgtcagcatcaacaagcatgtcagaataatatttttttttcttgtttttcctgaagcaatttctttacttacctgcctgactacaaatctttctccaacgagtttttcaataatgagatataagttgggaattttgtgttgtaacctgaaattgccccccaggcatcattggtaaccatagtgatggttcaaatgtgtttaaaattcgaagtgcattttgaatattgtcatgtgggtaggaacaaatactgttttccaaatatttaagagaattgacactngaagatgatat

SEQ ID NO: 77762 - DNA, 389 bp, Glycine max
  Clone ID: PAT_MRT3847_41236C.1
cgttaatagaactagtgcacatgaatacggcaagcacttactttagcggatctaaattgaaaagcgtaccagctgggcataaaatcaccattactgaaggtatagacaaaactagcgcaacttggcaattgagaaagatagcaaattgtgattccctcaagagaaactctaggcagacaggtagtggtctgtggggggccactgcggacaaggcgagacaatggacagaacggaatcaaatggcaacaaagaaaacgccaatgcaagaagattatagcgagaatagcgtaagtgaattacgaagaattggatctgcacagtccaaaagaagctcgccaaccgagaaggaaagccctctctcgcaatgaacggctgcaaaaagccgatgg

SEQ ID NO: 77763 - DNA, 175 bp, Glycine max
  Clone ID: PAT_MRT3847_41237C.1
aaaaaaaaaaaaaaaaaacataaaaaaaaaaaacaatgacataatcagatgcaacaaacacggcagggatctttaagcaactacggcaccatatatggacctatactaatactggtactccttcttaatggggccaatctaactccgatgcactgccgaatcatacatctcaaac

SEQ ID NO: 77764 - DNA, 306 bp, Glycine max
  Clone ID: PAT_MRT3847_41238C.1
ttctaatcgaggttgatcatccacaagatgtgcctgacccatgcgtggatataaacgggggctggagagatgaatcggccacacccgatccaatgcttaaatagtgctgtccatatactaccagcacgcatcgcgcaatccgttaggaaagaataccagccatagacaaaacttatgtggccagtcattctgaacactcagcacggctgctcgacatcggagaatatattcaagatcagggacgtacccatgcttcacactcatgatgcaggctggttgggtctccaattcacggggtgctcgtgg

SEQ ID NO: 77765 - DNA, 940 bp, Glycine max
  Clone ID: PAT_MRT3847_41239C.1
ccacgcgtccgccttgattgagttatgttcgtttggtttcgttttgagccaagaaaccccttctttcgctccacatttcttcgctctcaaccgttcgactcgttcgatgccaccgagttgactcagatccctaagtaaaattttctgttggaatcctccgtgctgagtgcctatataatatggatcaagaagacaacaagatgggcactgtgaatcctcctgaaatgtcttctaatcctctgtcattaggaaaagatgagacaatgggcactgagaatcctctgtcatcaggaaaagatgatgtggtgggtaccgagaatcctccagaagtgtcttctaattctctttcatctgcaaaagatggtatggtggatgctgcaaatcctactaaagtgtcttctaatcatacaccttcagtaaaagacaatatgatgggcactgagaatcatccatcatcaggaaaagatggtgagatgtgtgctgaaaataaagtgaaagaaggccaaaatacaagcattagtgagaaaagtcctaaggaagagtcagacgttagccagctgaaggatactgatcctcctgatggatctagtaaactagagttgagtgacaagaatactccacaaccattgaaggcaaaatctataattgttaagaaatctcaggctggtaaacttaaggctaagaagaacaatggttctcaacagattcgtgggaaaagaagaattaagacttccaaaaaagtagacaatgctgaaagttgtcataatgccgatgagaagcaaattttagacaatagccagttgaaggaaactaatgatgaactacctaaggggaagagtcaggaggctgaaaataaagtgaaagaaagtcaaaacaggagcactagtggcaaaagtcctagggagaagagccagcaggctcaaaaggataagactagtca

SEQ ID NO: 77766 - DNA, 544 bp, Glycine max
  unsure (1)..(544): unsure at all n locations
  Clone ID: PAT_MRT3847_4123C.1
tntgacncnnacnnacncaganagannancncgnaaggcnnatnncacagaacagcanancgaagnngnngcgcgcanagcacancacagnncacccancanacacanncncacacacacacacnacananangacancacacgccnnnnnnnacanaggncanacacangcacncacacacnanagttcccgagagtcgagcgcgnagagcgcagacagaaacagaanacgcacagacnacngcgnananaccaacacacacacnagncaacnancancacgccgatanacggcgncgnacancncgcncacgcagnanacnnagntccancaacgaacananagancanacagacagcacacagcgcgcacagcacagacgagagaanagancgcccanagcacncgagagcacacacagangnngagngacgacnaagcacacacanacaacggcacacgacacancaagaccngacagngacaacagcgaacgacngaggcaccancacacaacgagcaccnncacacatngagaacanc

SEQ ID NO: 77767 - DNA, 227 bp, Glycine max
  Clone ID: PAT_MRT3847_41240C.1
taccaagcaagttatgagcaagatggcagaaatgagcaacagtggttgtggtgatgatgaaaaactgatgcttgaaacgtcacacttgctgttggcttgtctttcatggatggcacattgtaggagcgatatttggagagataaatgtgcaacacgttgtgcatcatcgatagcagctgtttccactagcacatcatacgatgtccatattctatgatggcatgatt

SEQ ID NO: 77768 - DNA, 251 bp, Glycine max
  Clone ID: PAT_MRT3847_41241C.1
ttccttcaataagttgcaaccagacatgattctgggtggatttccacagcatgagatcattcatccttggttgcttgttatgcttcctggggggacctgtaagagcagagccaagaacaatgtccacatcttgcctgtcgactggaaaattctggccagaatttgaaggaacccaatgaagtgtaatcgcccacatcttgtttgtataacttattcacactgaacaacagagttcaaacagtttaattggc

SEQ ID NO: 77769 - DNA, 1427 bp, Glycine max
  Clone ID: PAT_MRT3847_41242C.1
cggggccatggattcaattctgttcatcctttgcttcccaaagaaagagaaaataaaaagcaatgggtagccttgaagcggaaagaacaacagtaggattggcagcaagagacccttcagggattctctccccatacacctacaatctaagaaacacaggccctgatgatgtttacataaaagttcactactgtggaatttgccattctgatctccaccagattaaaaatgatcttggcatgtccaactatcccatggtcccaggacatgaagtggttggtgaggtactggaggtggggtcagacgttagcaggttcagagtgggagagttggtgggagttggactcctcgtaggttgctgcaaaaactgccagccatgccaacaagacattgagaattactgcagcaagaagatctggtcttacaatgatgtttatgtcgatggaaaacccacgcagggtggctttgctgaaaccatggtcgttgagcaaaagtttgtggtgaaaattccagagggtttggcgccagagcaagtggcaccattactgtgtgcgggtgtgacagtgtacagtccactggtacactttgggctgaaagagagtgggctgagaggtggaatattggggcttggaggagtgggacacatgggggtgaagatagcaaaggcactgggtcaccatgtgactgtgataagctcttctgacaagaagaaacaggaggcacttgagcaccttggagctgatcaatatcttgttagctctgatgtcactgccatgcaggaagctgctgattcacttgactacatcattgacactgtgcctgttggtcaccctcttgagccttatctctctttgctcaaacttgatggcaagttgatcttgatgggtgtcatcaacacccctcttcaatttgttagccccatggtcatgctagggaggaggtcaatcacgggaagctttattgggagcatgaaggagacagaggagatgttggagttctggaaagagaagggtctgagttcgatgattgaagtggtaaacatggattacattaacaaagcctttgaaaggttggagaagaacgatgtgagatacaggtttgtagtggatgtcaaaggcagcaaacttgttgattagtaaaagaaagtataccagcacgacacccgcaacatccatccatcatcatcaagagtctggaaaagtttttcattgaactaaagctgtgtttgtttattaaaaagagtgctctgttttctctgttttggttacacgccgttcattaaaatatttgatatcaaattctcgtggaaagcaaaagataccaaacttcctgtttgaccatagctttgctgtgtaaaaaaaatgttgtattgttccgccattaaaagaaagaaaaaagaagttggatattaaaaaaaaaaggaagac

SEQ ID NO: 77770 - DNA, 1551 bp, Glycine max
  Clone ID: PAT_MRT3847_41243C.1
taatacggctgcgagaagacgacagatagggaaggccactccttttagcaagttaacaacacttttgtcttcgttccattatctagttctcaattctcttcaccctttgcctctgaaagaaatgggtagtcttgaagcggaaagaacaacagtaggattggcagcaagagacccttcagggattctctccccatacacctacaatctaagaaacacaggccctgatgatgtttacattaaagttcactactgtggaatttgccattctgatctccaccagattaaaaatgatcttggcatgtccaactatcccatggtcccaggacatgaagtggttggtgaggtactggaggtgggatcaaacgttagcaggttcagagtgggagagttggtgggagttggactcctcgtaggttgctgcaaaaactgccagccatgccaacaagacattgagaattactgcagcaagaagatctggtcttacaatgatgtttatgtcgatggaaaacccacacagggtggctttgctgaaaccatgatcgttgagcaaaagtttgtggtgaagattccagagggtttggcgccagagcaagtggcaccattactgtgtgcgggtgtgacagtgtacagtccactggtacactttgggctgaaagagagtgggctaagaggtggaatattggggcttggaggagtgggacacatgggggtgaagatagcaaaggcactgggtcatcatgtgactgtgataagctcttctgacaagaagaaacaagaggcacttgaacaccttggagctgatcaatatctcgttagctctgatgccactgccatgcaggaagctgctgattcacttgactacatcattgacactgtgcctgttggtcaccctcttgagccttatctctccttgctcaaacttgatggcaagttgatcttgatgggggtcatcaacacccctcttcaatttgttagccccatggtcatgctagggaggaagtcaataacgggaagcttcattgggagcatgaaggagacagaggagatgttggagttctggaaagagaagggtctgagttcgatgattgaaatggtaaacatggattacattaacaaagcctttgaaaggttggagaagaatgacgtgagatacaggtttgttgtggatgtcaaaggcagcaaacttgtcgatcagtaaaagaaagaaagtatactactagcacgacacacgcaacatccatccttccatcatgaagagtctggaaaagttattaattaattgagaactaaagctgtatttgttgttcactctaaaaaagaagctgtgttttgtttattaaaaagagtgctctgttttctctgttttggttacacgacgttcattaaaatatagtatttgatatcaaattctcgtggaaagcaaaagacaccatagttttgttgtgtaaattgctgtatcgttccgccattgaaagaaagaaaaaaaaaagtggatattaatgggcaccaaacaaaagctggcaaacctacgtctgtacctgcgcttcttct

SEQ ID NO: 77771 - DNA, 1616 bp, Glycine max
  Clone ID: PAT_MRT3847_41244C.1
acttttgtcttcgttccattatctagttctcaattctcttcaccctttgcctctgaaagaaatgggtagtcttgaagcggaaagaacaacagtaggattggcagcaagagacccttcaaggattctctccccatacacctacaatctaagaaacacaagccctgatgatgtttacattaaagttcactactgtggaatttgccattctgatctccaccagattaaaaatgatcttggcatgttcaacaccccttttcaatttgttagccccatggtcatgctagggaggaagtcaattacgggaagcttcattgggtctctttttgaagcaactcttgtcttccctttcaacttcaactcaaccctcaatcaaactcattctgtcttttcttctatttttatttctatccaatcatccatggccgaggaaccccaaaaaccagcctccgctgaagaagtggtcgctgttcctgcggagaacccaccatctgaagccgaagctgaaaacatcgaagcagagaaggcccagagtggtgtagaagacaagatttcccagtcggtttcgttcaaggaggagaccaacgtggttggcgacctccccgaggcgcagaagaaagcccttgatgagctcaagaagcttgttcaagaagcgctcaacaaccatgagctaactgctcccaagccagaaccggagaagaagaaaccagcagcagagaagaaggaggaagttgaagtgacagaagggaagaaggaagctgaagtcatagaagagaagaaggaagtggaagtgacggaagagaagaaggaaattgaagtaacagaagagaagaaggaagctgaagtcatagaagagaagaaggaagtggaagtgacggaagagaagaaggaaattgaagtaacagaagagaagaaggaagcagaagtgaaagaagagaagaaggaaggggaagtgacggaagagaagaaggaagttgaagtgacggaagagaagaaggaagcggaagtgatagtagaagagaagaaggaagttgaagtgacggaagagaagaaggaagtggaagtgacggaggtaagaagaagtggagtgatcgaagtcaaaagcatccaaggagaagaacaacgtgagaagtggaagtaaagaggcgcaggggaaagcccttgatggtcacaagaggcgttcaagaagcgctcaacaaccatgagctaactgctcccaaaccagaaccagagaagaagaaaacggaactcaaagcactggagaagaaggaggaagaagtctctgaagagaagaaggaagttgaagtgacggaagagaagaaggaagcagaagtgacggaggagaagaaggaagcagaagtgacggaggagaagaaggaagttgaagtggcggaagagaagaaggaagttgaagggacggaggagaagaaggaagttgaagtggcggaagagaagaaggaaacagaagtgataaaagaaaagaaagaaagtatactactagcacgacacacgcaacatccatccttccatcatgaagagtctggaaaagttattaattaattgagaactaaagctgtatttgttgttcactctaaaaaagaagctgtgttttgtttatt

SEQ ID NO: 77772 - DNA, 259 bp, Glycine max
  Clone ID: PAT_MRT3847_41245C.1
ggcatacatccacataggtataaatgtgtttgataggaaagaacacacaaaccaatccaatacatgtttaattatgggtacaaacattaatatcttactctttccttaatcattaaataggattttctaccaaatctttgaaatcatgcatacatcaataaaggggatcgatagacatggatttactccttgacataagaattcatgaattcagggcattggagtgcatgacttcggacaaaagctacaccctatattc

SEQ ID NO: 77773 - DNA, 247 bp, Glycine max
  Clone ID: PAT_MRT3847_41246C.1
cctttgttgtttcttgtggttttggagtctgcagcaatgtggggttcgatggtcggggaagcgcgtagggcagcgtgcaactggaactgggtttcgctccgaagcatgggtggcggtcccagaacctttctcggcggagtgaacaagtggaagtagaaccgcatgcacgaaaagctctacagagactggcagaacagaatcataccacgagagaagcagctctagccagctccgattcggtcccaca

SEQ ID NO: 77774 - DNA, 1073 bp, Glycine max
  Clone ID: PAT_MRT3847_41247C.1
gaagcttttatttgtctcagcgttttccgcccgtattcttcactcatatggtactcacttgggggggttttaatggctcgagggtgaatctgctggcacgacagactggtttctaaaacaacaaccatagccaatcagtgtttggtctctttttcttttagacccaccctttctcttctcttccctttcaacttcaactcaacaacccttcccttctcaaactcattcttgcctttctttttgttcatacttttatttttattgctacttactttttatttctatccaatcatccatggccgaggaaccccaaaaaccagcctccgctgaagaagtggtgcctgttcctgcggacacgccaccaactacccaatctgaagctgaagctgaagttgaagcaaatgcagaaagcatcgaagaagtggtggcggaagcagagaaggcccagagtggtgtagaagacaagatttcccaatctgaagctgaagctgaagctgaagttgaagcaaatgcaaaaagcatcgaagaagtggtggcggaagcagagaaggcccagagtggtgcagaagacaagatttcccaatcggtttcgttcaaggaggagaccaacgtggttggcgacctccccgaggcgcagaggaaagcccttgatgagctcaagaggcttgttcaagaagcgctcaacaaccatgagctaactgctcccaaaccagaaccagagaagaagaaaacggaactcaaagcactggagaagaaggaggaagaagtctctgaagagaagaaggaagttgaagtgacggaagagaagaaggaagcagaagtgacggaggagaagaaggaagcagaagtgacggaggagaagaaggaagttgaagtggcggaagagaagaaggaagttgaagggacggaggagaagaaggaagttgaagtggcggaagagaagaaggaaacagaagtgataaaagagaagaaggaagttgaagtgacggaagagaagaaggaagttgaagtgacggaagagaagaaggaagcagaagtgatagaagagaagaaggaagttgatgcgacggaag

SEQ ID NO: 77775 - DNA, 330 bp, Glycine max
  Clone ID: PAT_MRT3847_41248C.1
cttcctttttttttttttattgcacaatgtagggagaacaagctagctttattagtgcgaacgtgctgacatagccggatattcaaccggcccttacaagcggaggaaaagcctaagggcgattatcaaactcaacaatatacatacatatattgcactgtgttggtcaatggtatcacacacaggaacacgtgacaattccgaactcacactaaaacaaactctattaagacaaaaatctggaacggttcagcgaggacatgcaagatcaggctgaactgtctaagccacggatgcaaagggggcccatcaatgaatgacacggggact

SEQ ID NO: 77776 - DNA, 370 bp, Glycine max
  Clone ID: PAT_MRT3847_41249C.1
ccattttgtgcccccaccgagaattgaaaattatctgccaagttctactggtagttttctttatgccgctgatttatctgacggcaaaaatgagtgcctaattgaagggtgggatattgttgagcatcccacttttcctcccccaccatcgcaaagtgaggatgttgagcactggactcgagccatgttcatagatgctaaagggaagtgatcttaatttgcaacctttcaacaaaattttcttctcagaatagttaacaagaattcacccattgatatgggctcagtaagtaatatcacctttacacataagtgtatgttcgctaaatactttttgagaaataatcattcattttatttcttttaaaaa

SEQ ID NO: 77777 - DNA, 611 bp, Glycine max
  Clone ID: PAT_MRT3847_4124C.1
attaagaaaaaaaaaaaaaaaaaaaaaaacaagaaaaacaaaaccaaaaaaaaacaaaaaaaacaacagcaaaaaaacaggaaaaaagaaaacgaccgaaacaaaaggcaccgaaaagcaacagaaaacaccaacagaaaaaaaaagggggggcccccccaaaaggccccaagctaccgacccggggcaggccaagcaaaacccctttaaaggggcccccaaaggccaaccccgggcccgcggtaccacaccggcgggcggggaaaaccccggggggcccccaacaaaagcgccgggcaaccaacccccctttgcccggggggggaaaaacaaaagaggccccccccaacccccctcccaaccagtggccccccctaaagggcaaagggacccccccccgaaggggcccataaagcgcggggggggggggggtacccccccgggggcccgaaacattgggcaggccccaaggccccgttctttgggttttttcccctcccttttcggcccggtgggcggggttcccccgaaaagccaaaaaaggggggcccccctagggggccccaaaaagggcttaagggcccctgacccccaaaaaaccggaaaggggg

SEQ ID NO: 77778 - DNA, 373 bp, Glycine max
  Clone ID: PAT_MRT3847_41250C.1
aaatcaagaatattactgggaagatgcaatgcatattcattattaccacaaatccaacaaaccagaccgattaagacagtatattgatgggatgaaacttgccttactctgtctgcaaatcaaccactaaccacgccgatgtattcatatatgatgataaaaagagccataacatttatgttgtttgtgaaattcaaaactcagactaatctattgagggaaattttacacctttacttttgataagcccaagggtgtgaaagctgctcttaaagactccttcataaccacagataagtcccacttgcaagttaaatccatgttcttctctgcagggtatgtacaacaatacaactctctgacaaattttggt

SEQ ID NO: 77779 - DNA, 489 bp, Glycine max
  Clone ID: PAT_MRT3847_41251C.1
ggctcgaggaacctttgggaggaaacgcttgaaaaccccaaacttttgttcttcctctctttgcaatctctatacagaagatttatggataacaggtgcaaatctggttcactgcaacactgttccgtcgcaaatttcttccaccgacaagtgcttgacttcgtggttccgtcgctttttcaacccttcgatagattcattccttggttacgctttctatctcccaaataacattcaagctaccctctttgtcctgttattttcttctgaaaaaaaagggcttacagttattgactaggacttttagcaagcaaactctccagattgtggctttctgagttctaaatctgcacgagtcttcagacagagagattgcaaagtgatttgagaccaaattatggtgtaaggaccaagatggccgcttcagcccattcttctcttaagaagatgtcatgggctaagggtcaatcctttgggtggacagctttt

SEQ ID NO: 77780 - DNA, 1422 bp, Glycine max
  Clone ID: PAT_MRT3847_41252C.1
aaaagcagctagctagcttcaattaacacaacattttctaactcctctctctttatatatagctgctttgtttggtacattcatttcatatcatggctccatcattggaaaccagtaacggtgaagccatgcaccttaaacaggttgaagaagagcaagatggtatacttttcgccatgaacatgatgtctaccatggtgtatccgtttgtggttcggaccgcgattgagttagggatctttgacatcatagcgaaagccggtgaaggtgcgaagctatcagcagaggagattatagagcaacttggcacaaagaaccctgaagctcccacgatgttggaccggcttctcaggttattggctagtcactccatgctatcttcctctcttgatactgaagatctccaacatggccaaaactctcctaagaggctctatagtcttacctatgcttccaagtattttgtcactgatgctgatggtgtctcgttcggagctaccttgaacttacttcttgacaaggtcttcttggaaagctggactgaactgaaaggagccatcttggaagggggtgtagcattcaacagggttcattccatgcactcatttgagtacccagcagttgatcctaggttcaatgatgttttcaacaaagctatgttcaaccttactactatagtcatgaagagggttcttgagttttacgaagggtttaagaacattaataggcttgtggatgttggtggtggtcttgggatcaatctcaatctaatcacttctaaatatccacatgttcaaggtgttaattttgacttgccacatgtcatagagcatgctcctacataccccggtatcgaacatgtaggaggagatatgtttgagagtgttcccaacggagacgccatttttatgaagtggatacttcacgattggagtgatgaacaatgcttgaagttgttgaagaattgtcataaagctattcctagtgatggaaaagtgattgttgtggacttaattcttcccattttgcccgagagcacagttactgctaagagtggtttccaagctgacctcttaatgatgactcaaaactcaggaggaaaagagagaacccaacatgaattcatggaattggcattaagttctggattcagtggcatcaaaatcgtttgcagtgtctctggcttctgggttatggaattttataagtaaacacacttatcgagtgttgctcaaattgttcttctattatccttgcttgttgcttgaaaaaatagtatcatgctcgaacattatttaccaattatctaaggacatatgttcaatctttgttgttgttatttatatatatatatatataaaagatattagccaataaagatcttacctcgtattgtgaaggttttcccataaaaaaaaaaaa

SEQ ID NO: 77781 - DNA, 2688 bp, Glycine max
  Clone ID: PAT_MRT3847_41253C.1
gcaaatatagttgcacccttttcttgttgaaagattataaaaacactgttttttggaacctagtattattattatcattattacttgtgatggctgttgtgttctgatcttcctttcccatgtgctgacttggttttcttcgccttgctttgttttttctgtccatttggctctcctctttctttcctttgttttttgggggttgaaaagctcaagttttgaggattgaaggagtgttcagctactgggtgtgtgttcatttcattgaggtgttcttggcccttaccggatccagcttcatctggttattgttggtataattcttagtttttagtctaaggaagatgtctgagagagaagggtccaacaattaatcccgaatagtagaggtagaagatggaaaatacatgcctatggattcagaaagagggtcgcagaagaaaagattcattgcatggcttattgaatgatagggaaatatcagaggaagaatcttcaaaatcacagttaaagaagttgattaaaagatcaaactctcatcgggcaatagttgtaaatgctatccaatcacaaatcagcaaagttttcttcaaggatttgttctttcgacgtgtccatggactagacaatcggattccaaaacatgtggtgagtgtggatgagaaatacatccgccgctgcctggaattcatacataacactgcattaaaagcagctcaattcaacatacctgagagcttaagagccacaaacatggagactttatcagaaagcttgaatacagtgaaattttttggtggaaatgcatgtggtttgggacattttgtctttgaatgtcctgtggccactgagaatgggagagtagttataagtgctaatgctggggaccagtggaccttaggttcaataatggggagcaagagcatgataaatatattgaatagtactcttcttcagcagtttggtgcttcacatagaactgacaatttgaacaggatgaacttttctgatcctaacggaaggttgagccttgagttattggactgtcctagtgctctatgtatcttataaaaagtgaagagaatctaggattttatacgtgaattgggttttcattctatgcttagggttgtaattgtaatacagtcagaaatagttttgtttgtcctttctaacaattcatagtttgtagccatctttttctttttcttcattcttttttgttgaagaggatacattgtaaaagggtttgtggaagaaaatttggtaaattgtagcattgaaattgagtttgttaaggtagttaggctttgggctatgtgtatgagtttcacttgaacaagggtggccaaaagggtcgcgagattcctgatggtgattttccatttgttgggaagatgcatgtatcaacgagtttcaccctttgcccgaacaattgtagaataagggagacggagtttacactattccataacatggaaatttctgacaaagaaatgtccacatcagagcattctcacaggaagagcaaggggctgtcgaaggtgtcgaaagtttttaaaactagcccatcatcaaaacgcagaacactctcaaggtttggtggatcaagtgccataaaggagagttgtccgtgggagccatatgctcttggcgggaccaatttattagatactgatgttcctccaaattttgaaatggctaccattgttgtgaaaaaccatcttccttgtaaaaaaccagagaaagtaggagggtggggtttaaaatttcttaacaaatctggtgaaaatcaaatcacgttgccatctgaaagtagtaatcaaaataatggcgactgctcaagtagcacgagcattctaattccggcaggctttcatggtgggccaagaaccagaaatggtgggccatccagtctgatagatagatggaaatctggtggccactgtgactgtggtggttgggatgaggggtgccctctgactgtactagagagaagatctaacaaagctgaggttatgtctaaaatagatacaggagacgggtgcaagtcagttgatttggttattcagggttcaagtgattacggccccaccttgaggatggtaaatgttcacgatggtttatattatattcatttccatccacctctatctgcactacagtctttctccattgctgtggcaataattcatgcacaaagtcctacacttcagcccaatggtgcaaagaagctgtcataactatagttgaatctgaggttatttagccgtcataattctcttactgtattataaaaagtgaagagaatctaggattttatacgtgaattgggttttcattctatgcttagggttgtaattgtaatagtcagatgttatcttatttaggaggaatagttttgtttgtcctttctaacaattcatagtttgtagccatctttttctttttcttcattcttttttgttgaagaggatacattgtaaaagggtttgtggaagaaaatttggtaaattgtagcattgagattgagtttgttatagttaattagaaggaaatgggattagcactcaatctgaataataactttgaaaatttctgttcaataatggatcattactcacgacagtttggtctgaagatgagtttgtcttggcgaatgagatatgatatttaattccgaccttt

SEQ ID NO: 77782 - DNA, 366 bp, Glycine max
  Clone ID: PAT_MRT3847_41254C.1
cggagcctgacctctccttgaacataagccctccctctatctcagattctgaagccgccaaagatgttggaagctttggaaaagtgctttacagtgatatttgttcaacttctgattctggtagtagtggaggaagtgatttgagccacgagttccacaaccttggtcatcatcatcatcgtgagcccacattgaagttaggattcggaactgtggatttgaatccgcaccatcatcaagtacaaggtgttccaagaagcttcattcaccaccaccttcaacctcacatctatggccgcgatttcaaacgaagcgcaagagtcgttcatggtgtcaaaagaagtgtcagggctcctaggatgagat

SEQ ID NO: 77783 - DNA, 205 bp, Glycine max
  Clone ID: PAT_MRT3847_41255C.1
gctcctttaactttccttttcctttggaattattaccttaggagaagcaaaacctccccttaaaacggataaggttttaagccaaccttcaaaagcatttggccattctcttcaatttattaacccaaaatgttgtgcattaaaacctaatctttggcataagttcttccacaacaacttggtccaaacttttcaaaaattcaca

SEQ ID NO: 77784 - DNA, 237 bp, Glycine max
  Clone ID: PAT_MRT3847_41256C.1
taaaaacacccattttattatagttttataaaattacttgtacagtataactcaatcacttacagcaaccataatcttccccttcaaatttgaaacatacacaatttggcttacaaatattattgcaatctgcagcagttttgcatttccctacgcaagaaaagattggtggacttaatcctgttactggtcctgaacccaaaaccaaagcaacaaacaaaattccggacgcgtggg

SEQ ID NO: 77785 - DNA, 267 bp, Glycine max
  unsure (1)..(267): unsure at all n locations
  Clone ID: PAT_MRT3847_41257C.1
gnaaaatatgaacatatagactttaatganctttcaaccattacagnaggatatactggaagtgatcttaagaatttgtgcactgctgcngnttatcgacctgttagagaggtacttcaacaggagaggtnaaggaannggannngaagancanagaagcagannttcanagatcagangangctctgatgcnagaggagntaacancagatggngtggttacnnccaaggtgtttaaanattcangncnagaagncacgggntnnc

SEQ ID NO: 77786 - DNA, 270 bp, Glycine max
  Clone ID: PAT_MRT3847_41258C.1
accgacgcgtccggtcaggaagacccgtcgctatgagctttgttatccacgcacataacactatctcctgatcgtttttcaatgcacaggtgaaggaccgtaaatgagcaccgctcttaggcacacgcttattatctgagatgctcagctacatcaacgtcatcttcaccgacatactccaacagccagtccacatatctaccctcatcacactcaacttcccagatctgtatctgactaagaagcatacacagctgtatcattaccaac

SEQ ID NO: 77787 - DNA, 549 bp, Glycine max
  Clone ID: PAT_MRT3847_41259C.1
gctggtgtgaaagccattcataggtcaaatgaatcagataacatggcaccttccacaggtaaaactttggaagaagctaggaaattagttgagcagagttttggaaattatgttagtagcaacgtaatgctggctgctaaagaagaaattaataaaattgaaaaagaaattgagtttctgatgtcagaaattactgatgaagccatagataggaaaagcaggaaggctttatcaccacgacaatacaaggaaattgcagaattactggaagatttaagggcagaaaagcgtgttcggtctgaattgcggaaacagaaggaagcaaagagaatatctgccctgaaacctttgttggaggagcccgaaagtggacatttaccatttttgtgcttgcagtatagagattctgaaggagttgaacattcaattcctgctgtgtttttggggaaggttgactcccttaatgcttcaaaactcaaagatatgatttcttctgttgattcttttgcattgaatctagcagacgcagagccaagtgtcgctgattct

SEQ ID NO: 77788 - DNA, 486 bp, Glycine max
  Clone ID: PAT_MRT3847_4125C.1
aagacaacagatgttcgtttttatttagcgtagctgaagcccaatcatatatctctactattactatatccacgatggcgataacaacacaacatgctgctacatgcaacgggccgatgagttacctaaggcaggaacacactgggctagctgcaagccttcctatatcattcaagatattagaattggcgtgcaatggttttaatgttcatccttttacatagctaacatgccggattgagtggcttcccacagacactttcgttgttacaaaggaggaggctcctggcatgatcaaaacgatagccatcgtaaatcttgtctcagagatggttgtgattcaaattctattgcccactatttgaaaccatagatatgcacttatggctggacccttttaagcttttactctataaaaccagtaccatgatatatgacctcacgccgcacgcgttcggtatttttccctccaaggcgttccggctc

SEQ ID NO: 77789 - DNA, 148 bp, Glycine max
  unsure (1)..(148): unsure at all n locations
  Clone ID: PAT_MRT3847_41260C.1
gtgatttcccccgaatcaccctctattccttgactattggaagaatttcatagtactcctgctggagggcactcaggtttngtgagaacataccgaagactggtagattccttatngtgggtggggatgtagaggagtggcnnggata

SEQ ID NO: 77790 - DNA, 270 bp, Glycine max
  unsure (1)..(270): unsure at all n locations
  Clone ID: PAT_MRT3847_41261C.1
ttaagaacaaaatgggcagcctggcactgttctaacttcaaacacaattcttctgaggcaacaaattggcttccattcttcaaaccccattcaaagaacacagctgagtttctttccaccaaaagcaggtagttttctgggaggaacagcaacagggggcaaacagtcaggcagcagaagaaagctatgtgnatnaacatgtggcagcagggtgacttccaccagancagtgggtggattgggtcttggctggcagaacttccaggggtg

SEQ ID NO: 77791 - DNA, 1017 bp, Glycine max
  Clone ID: PAT_MRT3847_41262C.1
cacgctcaagggcaaaataagaactccactcttttcatttcggttcattttattctgcgatatatgtaaatagaatactctgcttcggtgcttcactcttctgcaaaccattaccaccactaccaaactccaatctatattacgcacagtgcacacacattaaatatttaataataattcccctcacattttcccagaaaaataagaattccaatcttgtcctttgggttcatttttttatgcgaatgttcgctaccaatgccacgagcaacctcttcttcccctgcagcccttcgtccttccggtgccgcgccgccgccggagacctctccgcgggcccctccttcatccagtccgtcgccggcggtctaagaattggccagttccccgacggcgcaggactcgccgtggaaggacggcgcggcggcggcggaaacgaaccaataagggtgaagaaatggtctcggaagaatgagagttacttggataacgacgccgagcctcttccccttccaatgacgtatcccgattcctcgcccgtttcgcaagaagagattgataagcgcctccaatgcgatccccaaattcaggattgtaaagaggtggtgtatgaatggactgggaagtgccgtagttgccaaggatcgggatatgtgagctactatggcaagagagggaaaccggttacctgcaaatgcattccttgcatgggaattggttacgtgcagaagataacagctcgcaaggatattgatgtaatggaggatttggagaatggaaaaccaccatgatggttgatggtcctctcggaccccctcagtcttagattcttgttttatttcatttcaacacctcgagaatttggactttatttatcttgatgagttactcttccatagtagttaaaaaaaataatacgtaaatgaacattgatacgattagacttggtaaagattgtaccactagaatactgacttgataaaaaaatatccccacaaagtaagataggaaaacaca

SEQ ID NO: 77792 - DNA, 292 bp, Glycine max
  Clone ID: PAT_MRT3847_41263C.1
ggcgcgcttaaataaaatgggaaatcgggacaagaacgctgctgccaagcacagcaatcaagaggtgtcagagtcaaccccaacactcgtccaagaaagcagaaccaaggcaacagcaaagatagccgacggagggagtacgaacagcaccgatgatatgagtatgagagagcgcagagctcgcgatggagaagcaatagacgccaagggcaaaagggaaggggaaagcggaaggacaagagggctagggaacataaccaggagaaaaagagaggaagcaaccgagggcatc

SEQ ID NO: 77793 - DNA, 392 bp, Glycine max
  Clone ID: PAT_MRT3847_41264C.1
ttttatgtttgggaagagacgcataagacatccaaggcttattagagcccattattctgttgggcacatatcttcaatatacgtaatcagatgattgtgctgaacatcatatacgaatgaatgatacttaccacgtcgaggaaagattcatccaagacctaagtggcgccactagcactcacctagtgatgacaccacacgataatgatcttatgcggatgctgatcagccatcttgatagctttcgacattaacacaaaactaggccactgcgcctccctataggccccacttgaaatgagattttgcgataagaatacccgatggctctctttagaagacacttttgccatgccataaactctaacctaatgtggacaattgaaacctac

SEQ ID NO: 77794 - DNA, 132 bp, Glycine max
  unsure (1)..(132): unsure at all n locations
  Clone ID: PAT_MRT3847_41265C.1
anagcanntngaacaganagnagagnanagcaagaagagtgngcncnntgactttggaggagngtatatatcatnnanaaatnngngtgngtncttggganctagaagnnacgtnngtgccnccgtgcaaan

SEQ ID NO: 77795 - DNA, 287 bp, Glycine max
  unsure (1)..(287): unsure at all n locations
  Clone ID: PAT_MRT3847_41266C.1
cngggggggggggggggaagggnnaaaacnagcgngacgcggggaaaagggacaccaagcnacggnccgcagcggcagaacacaggggggcacaaacggnnaaangacaacacancggacacacgagcccgggnccacgaaaacccanncnaacaangaaaccgggggggggggaangcngacaaagaagcgaaggggaaggccncgccgccgggaagggggaanngcccgaacgcaacggcggacgaacaaaggccgggggggggggcncagaaacgccgacgggg

SEQ ID NO: 77796 - DNA, 248 bp, Glycine max
  Clone ID: PAT_MRT3847_41267C.1
ctatcgggaggagaatattacattgagcgtattgtttattgctccaggagttactggagcattgccataccatgtctcatgctaccaaaggaaccctatcctaatgaaaactgactatggtaagcgttcttcgtaggcaaaatgctcaagttttatacttgctgatcaatcacacaacatcctatcctttaaaaccattccttaatagtgctttaaaccaacaaatgactacattaatgtcgaacaat

SEQ ID NO: 77797 - DNA, 356 bp, Glycine max
  Clone ID: PAT_MRT3847_41268C.1
ggcctacaatgaactttggcccatgagttatcaaaaacaattttttttaagaaaacgaggtcgtttgggcttggaggtggatactcactctcctgttaccttatttactgcatcgcttctcgtcgaagtgggcttcatttcataggcggcgttgaaggggaataagatgcctcttacattgtatgtttccgttaagccacatattaggaggagccggatggatttagttgtaagggtgggaaaacatgtgtcagaagaaatggggttgcattgttaagagcttggagagttcgtgggctttgtgtgaaaaagctataggagattatcaggcctgctgtcaatgagctgtgctacac

SEQ ID NO: 77798 - DNA, 182 bp, Glycine max
  Clone ID: PAT_MRT3847_41269C.1
gacaaaaagaccctttacaaaatttttttttatgagcaacctttgtgctggtctttggaaaaacatgatgacaactgaaggtttaagggccccacaaaaaggctgggcatattgttatgctcgagcacgaacagacaaactaatacaacatgagggtaccatagatttgaacgatataaata

SEQ ID NO: 77799 - DNA, 1034 bp, Glycine max
  Clone ID: PAT_MRT3847_4126C.1
ctagttctagatcgcgagcggccgctcgcgatctagaacctcgagccgctttataatgttgttggtgaggatttctggtcatctacttggtgcaacagtactgcatttgaagggaaacaacttgaggggacaaggataacacttgtaaaaatgggggagaatggttttgactttgcaattagaacaccttgtacacctgctagatgggaggattatgatgcagaaatggcaatggcatgggaagctctctgcaatgcttactgtggtgaaaattatgggtctactgatttcgacgtgcttgaaaatgtgagagatgcaattttaaggatgacatattactggtataacttcatgccactgtccagaggatctgctgtagtcggatttgtagtcatgctgggtttgttacttgctgccaatatggagttcacaggaagcatcccacaaggttttcaggttgattgggaagccgttttgaacttggatcctaattcctttgtggattctgtcaaaagttggctatacccatctctgaaggtaacaacctcatggaaagactatcatgatgttgcatcaacttttgcaacaacagggtcggttgttgctgccttgagctcttctgatgattgaactccttggaataatgacaggttagtcaatgaccaagttattttcaatttctgtttttcttaatttctggtcttgtactgtagcttttgcaattaattacccaatacaacagaacggttcaattcaatgtctctgctaaagcaaacacaaggttctatctgcttttgtacgcttctgtatgctcacctagtaactatattgctgctggtctttcataaatcataacctgcggaaaatgcagcagaaccgtaaaagctttgacatttacttattgatcttcctattgatgcttaatctgtatgcagtctttataaattgtaataatatatgatagccattgtacagtcttgtaacttaaggcgttggatgatgaaattatcatttatcttttccactattccaat

SEQ ID NO: 77800 - DNA, 327 bp, Glycine max
  Clone ID: PAT_MRT3847_41270C.1
tgaaatatttattttttttctttttttttttttttttttttttttttttgtcgggcccgaattacctcagattttcagatgttactggaaaaatttttttagatctagacattttccgatcatgccctgggataatactatcagggccctaaaaaacaaaagagaagggaaattccccctttttccatcaaagggtgggccaagtaacttcttaagggaagattaatcttccaaaaaaaaaaaggggggaaaaagcctcccctaagtcctttttttcgggatattttttttatgaaaaaatgaacgggtaaacaaaggggttttttt

SEQ ID NO: 77801 - DNA, 196 bp, Glycine max
  Clone ID: PAT_MRT3847_41271C.1
acggctgcgagaagacgacagaaagggggaatgatgcatgctcagccttctaatgctttgccaagttcttgttgtctgcttctgattgtgaatacattctcaattcagtgtgttctgtgaaaatccttgcaaattgcaatgtataatgtaataataatagtagtaacaactaaaaattgattgttgactaatgggc

SEQ ID NO: 77802 - DNA, 700 bp, Glycine max
  Clone ID: PAT_MRT3847_41272C.1
ggtactacaactgttagttggatgtcgcaaatacagaagattgttgttttatccactacagagattgagtatgttgcagtaacagaagccactgaagagttgatatggcgtcagggattgttaacggagttgggattcgtctaatacaaaagtgttttgcatagtaatagtcaaagtgcaatacatttggcaaagaattcaacattttagaacaaagcacattggtctccattatcactttatcagatctttgcttgaggatgagatgctaacattgagaaagatccagggaagtacagatatattaactaaggtggtaactattgacaaactgaagttgtgttcaacttcaattggtttgttagaataacaaactggagaaggttgttgcattgatcgagatatgaagacaaattgaaattagccttcaagtggaaaatggagggtatcattcttttatggagaaaaaatggagaaccattatattattgggtagaataaaattaaaaaaaagagtgaaatgtaaattctccatgcatgtataaatattaccatgctataactattataatcaattccaataaggaaaaaatagaaagagaacattagtgagagaaaataatatttatattttcagaaagtaattgggttgtgagttaagtgttttgtaaacacctattatatattcttttctttcaat

SEQ ID NO: 77803 - DNA, 288 bp, Glycine max
  unsure (1)..(288): unsure at all n locations
  Clone ID: PAT_MRT3847_41273C.1
gcnncaggaggggtgataaaattattatatcaagattctttttcctcacggggggttggtggaaccacatactacatgatgtaactttcttacctacaccgccactactatgactgctgcatgatggacctgtattacctacaggattattctagcagtggggggaggactaatgccacgactgttgcagaaggatctaatagagggnnnnnntcaaatgcacctccttaccccgcatgacttgctgaagataagattgtttttttgcagngacganngagttcttgt

SEQ ID NO: 77804 - DNA, 1284 bp, Glycine max
  Clone ID: PAT_MRT3847_41274C.1
attagcatggtattccgaaaggacagatagttttgtaagaaagagctcctgagccaatcaaacaatctctctgtcttcccttgaagaaggagaaatggggggaaattaaaagggaaaaaggcatataaccggaaacaatcgcgtttcgaattcaaaatcactcgtttctcgcttctactttccatgaatcttcactctccgagaaaccatggagcgtgaaaacgagaacagcgtcaacgctcaacgccgcgtgggtttactctacgacgagactatgtgtaagcaccacacaccagacgacgaggaccatcccgagaaccctaatcgcatcagagccatttggaacagactccaaagcgccggcgttctccaacgatgcgtgattttggaggccaaagaagctgaagacaaacatctactgttggtgcattctataaaccatgtgaatctgattaagaacatcagctcaaagcagttcaattcgcggaggcataagattgcctcaaaattgggttccatatactttaacgaaggttcatcagaggctgcgtaccttgccgctggctctgcagtagaggttgttaaaagagtggcaagcagggaattggattctgctgttgccattgttaggcctccgggtcatcatgcagaacaacaagaagctatgggattttgtctgttcaacaatgtggcagttgctgcaagatatctcttagacgaaagacggctcgagggtgtgaagaaaatattaattgttgattgggatgtccatcatggaaatggtactcagaaaatgttctggaatgattctcgagttttattcttttccgttcacaggcatgagtttgggagtttttatccagctaatgatgatggattttataccatgattggagaaggagcaggtgctggatataatataaatgtcccctgggagaatgggcgatgtggtgatgcagattactttgcagtgtgggaccacatcttgcttcctgttgctaaagaatttaatccagacataattatagtttctgctggatttgatgcagctgttggtgaccctctgggaggatgccgtgtcacaccatttggttattctgttctgttagagagttgatgaattttgctgaaggtaggattgtactgattttagaaggaggatataaccttgattccatcgcaaaatcaatgcatgcctgcttggaagttttgctagaggacagcctgttattggatcctcagaggcctatccatttgaatctacgtggcgtgtgattaaagcgg

SEQ ID NO: 77805 - DNA, 557 bp, Glycine max
  Clone ID: PAT_MRT3847_41275C.1
cacaaaaacctcctcccccgggtaaaaagtagtctcaaattcccaattttcctttttaattttaaaattttaaattaaaccgagattttttagactgaaaataaaaaatttacccgggggggccctttattgaaacccatgtctaagggctttggccccattgaaagagggtcatgaataatccccgaattataatcccctgccaggacggcccttacaaaatcaaaactcacctgttccagcagaaaaaaatttccttttccctgtggaaaaaaaacccacccgtcccaaaggttaaaaatccccttgccttaaatgttaaaagggaaagaatttccaaagttgcaactaaaaatttttggaatcttcctaaaaatgtcatggccctggccagctaaaactgcatttgtttgatataaaaaactgcatccccatcccattttgttgtgaatttggggttatgaaaatcccaaattttttattttggaattttaggacccaggtcctgtttgccccaagaactcctaagttttgcatttttgacccctttgtttttt

SEQ ID NO: 77806 - DNA, 736 bp, Glycine max
  unsure (1)..(736): unsure at all n locations
  Clone ID: PAT_MRT3847_41276C.1
attagcatgggaattccgaaaggacagatagttgtgtaagaaagagctcctgagccaatcaaacaatctctctgtcttcccttgaagaaggagaaatggggggaaattaaaagggaaaaaggcatataaccggaaacaatcgcgtttcgaattcaaaatcactcgtttctcgcttctcctttcgttcgacgcatgaatgcaggggcttcaccgcttcagacttcagtagcagagtgacagaaattagaaactcaaaaaagtaggcgcagccgagtgagaaaccatggaacgtgaaaacgacaacagcgccaaaagcagtgtcaacggtcagcgccgcgtgggtttactctacgacgagaggatgtgcaagcaccacacaccagacgacgaggaccatcccgagacccccaatcgcatcagagctatttggaacaaactccaaagcaccggcgttccccaacgatgcgtgattttggaggccaaagaagctgaggacaaacatctactgttagtgcattctgaaaatcatgttaatctgattaagaacatcagctcaaagcagttcaattcgcggaggcataagattgcctcaaaattggattccatatattttaatgaaaggttcatcggaagctgcgtaccttgctgctggctctgcagtaaaggttgntgaaagagtggcaagcagggaattggattctgctgttgccattgntaggcctncaggtcatcatgc

SEQ ID NO: 77807 - DNA, 415 bp, Glycine max
  Clone ID: PAT_MRT3847_41277C.1
aattcggctcgagaatcattacacaaaacaacgagcatactgctcaagggtaatcttatccaacacaacacattactaatgatatggtgctaacatgcgatgggggggggcagataatgaattaatcgaatattgcctacaaaattcttgtccttttgattggaagccattacactgctagtgctgcaatcactttcattgtcaaatatcttgctaaactccctcacatttattataaattctatcaagagcaaatggaaattgcaaaactgaaatctccaacacagttattgaattgggatgataacaacaagatgcactattcttggaatgtatcttgtgaagtaatgaaaatcactccttcacttaaaagaagctttacgtaaactatcaactactttattttacaagcttt

SEQ ID NO: 77808 - DNA, 265 bp, Glycine max
  Clone ID: PAT_MRT3847_41278C.1
ctgctgtacagcaatggcatcggtcaagccgagcgtggctgctacagtgaccgcagtgagagatagtatccacaaggaacactgccccagtatacaaccctacacgtccacaaagtggaagtgtcaccccatgttgatgttccctatcgacatgcattcagaaactaatgatttttacttagctacttgcgccacctgcaatctcatctgaatctggatatgatgctagttggtgagtatccagatataatatggtagtttaacg

SEQ ID NO: 77809 - DNA, 386 bp, Glycine max
  Clone ID: PAT_MRT3847_41279C.1
gggcacgagtgcaaacagacaatgcaatgtctatttcccaggatatcattgcccgagggattttgtctttggcactgaaggcagcccatggacctcatctaatggtaacagtgaacgtgagaatgactgttaccgacttggttccttgccattgtcatcaccttgtcatatttcaggacacaacaaggaacttctgaaacaaacaatactcaagcatgaagcgatatttagggaccaaattcaagagcttcaccgcatttaccagaaacaaagggagttaatggatgaaattaaaaggattgagttccataaacacagtttaaggatggagatatcatcttcaagttcctctttgtattactcacaaaacatgccttggttgacta

SEQ ID NO: 77810 - DNA, 1550 bp, Glycine max
  Clone ID: PAT_MRT3847_4127C.1
tgtttttcgctcaagccttttctctctctctttcttacgagttgcaaataaaactcccctttttctccggatcaatgagcgatcatctggtgctgttcgtggaccggctggtgcgacccgtgccgatggtccagccgctggcccaacagccccccgagcccgcgacgcccgttgatgaggcggcggcggggccatccgggtcgtctacggcggcggaggaagacggtgactactgcggagaggatgcgccgctgctgcatatggcggagtgtcgcatttgccaagaggaagacagcggcagctgtttggagacaccctgctcctgcagcggtggtctcaaaaaaatccaaaaaaagaaaacaaaacgcttaacgcaatacaaaaaccacagtttcaatcacatctctctctctctttctcgcaaatttctactttctgtatgctcacagaaagtgtgtccagcattggtgtgatgagaaaggagacataacttgtgagatatgtcatcagaatcttggatgccagggtatagctggggtgtacctagatggggtctgggaaggcattggctccccaaaaagccatatcaacctgggtatactgcccccccacctcgtcctaatcctgaagaaactactattgatataggaggtggctggacaatatctggcacacccttagacttgcgtgatcctcgactcttggcaattgcagaagcagaacgtcagttcttggatgctgaataggatgagtatgctgcttcccatgccagtggagctgcattttgtcgttcagttgcattgattttaatggcccttttactcctaaggcatgcactttctgtcacagatgctgaagctgaagatgatccatccacttttttctctcttttcttgcttcgagctgctggttttcttttaccttgctatatcatggcttgggcaatcagtattttgcaacgccggcgacaaagacaagaagcggcagcactagcggcaacccaagttgcttttgttctacaaaccgggcagcgtaggggtctgcagtttgcaataggaccaggaccaccaacaatgaatacacaccaaccggaacaagtgtaatttttgtatgccaccagtgtatgtaacaaggcttgttggaatgccatgcatttttttactcatgatttttctgagctctaatttacatacatagcttgagagactttgagatggtacttaatattctagggtccttaaaccctcaaaaagaaccgctcattttgttgtattgcagtttcaaagtctttgaaagttatagcaatgttaattctactagaaagttagcatgtcattccatagggataaggttgtgtccgtgcctgttttcctgcaccgtaataatcatgattgaagcaaacgcaaacggtagaagaatttgacaagagtttttgcattaatttgagcacgagaatgtcccatctgtcttcggtgcttgttggccatccattttggtttgtttccaaattgtattgacttctccaatagcgacattgcatcgttcagact

SEQ ID NO: 77811 - DNA, 433 bp, Glycine max
  Clone ID: PAT_MRT3847_41280C.1
tacggctgcgagaagacgacagaagggcatctaacatagattctcgaagatcaaaattaaagagactatgcaatttcaaaaggatgtcgagatcactcgtcaaacttaaaggatgtctcaaataggaataagaaggatcgatgatggttctatgtcagtgttaacaatgatttagtcaacttaatattttatcagaaagactttgacaagatccaaacctaatttcgagattgattgtaacaaaaaattataacatttgttaactaatttcaaaatgttgagaataatgaaaataaattgaaaacaacaaaagatagtggtaaacttaacatttgcctccatataattatcgtaatctaagctactcaaatctttctcccactcataagaaaaactactacctgaataagattatcatcatcaaaataaaaac

SEQ ID NO: 77812 - DNA, 622 bp, Glycine max
  Clone ID: PAT_MRT3847_41281C.1
gctcaccaaaatcattacagcctcctctggttctataaaagctgatgaagttgctcagaaagctttggatggtataaaatgtggcgattttattgtttcttgcaatttcgagggaattgcactatccctagcaactgcaggtttatcccctcagaggtctttcttaatggcgtttcttgaggttgttgctgctggaatcctacggattgttgcactaggtatgcagtggacttggtatagaagtatagagaaatatcacagccaaaggaagggagcctcttaaagaatcgcctgtaccctgtaaaagggtaatgctaactcaaattaattgcccatggtaaagcttgtgaaattgatgatttatacttctagcaggttcatcccgaaggagctgaaacagagttctgtgcccttcttttaggagagttatatgcttatattgggttgaggctttcttccactccgttctactatgaaattaatatagggaaattcaaataatcgttaagaaatgagaattcgataaacatcgagtagttctagtgctttatttctgactttcatcctcagaacttgatacagagtgaacaatgaaaatatggcatatctcgtttttaatcac

SEQ ID NO: 77813 - DNA, 479 bp, Glycine max
  Clone ID: PAT_MRT3847_41282C.1
taagggggttaaacttaccactacatcacttggtatcattagaaattagaagaaaaagaaaaaacaaggtgcactataggagaaaacacacactggggggaaatcaatcaaaattgaactatagaagtaatttaaactagatatgagtcattttgacaacctaagtggttagaatatgtgtatataacccattctaagaaatccaaattcccatgagaaaagattgggaatgtcttgctactatattaaacaagtagggctagctttatgcatatcttaagataagctacaaaagcttgaaaaaactgtaactctatttccctcacaacaaccatttgcgaatcactatgtcaagaaaggcctgcatttgcttggtataaaggtgtgttgtcccatgagcaccccacagttataagtcattcaatacttttccttttggtgttatagtacacaatatcagtagatttcaaattctaaaa

SEQ ID NO: 77814 - DNA, 2615 bp, Glycine max
  Clone ID: PAT_MRT3847_41283C.1
agttacagaagggcagagctcaaactgtctgatcacagacctgtgaccgccaaatatatggttgaagttgagacattttctcctaggaagctacagcgagccctaactttcactgatgcagagattgaaaatgaacaagtcatgacaaatttaagtaattggaatttagctgcttaactggacagggatacatcatgagttgtaaaggagattaacttgcagaatttcaggagcatcagtgatagctgctgcaacttctaacactcacattgccactactagaattagattcattcattttttttatctggaaattttttgtaatatgatttagctaccaagccactcatatttggcatctgctggtattgatggtgtcaaagttgatgttcagaatatccttgaaactcttggagcaggacatggtgggagggtgaaacttgcaaggaaataccaccaggcattggaggcatcaatcgctaggaacttccctgacaatggaatcatttgttgcatgagtcacaacactgatggattatacagcgcaaagcgttcagctgttattagggcatcagatgatttctggccaagagaccctgcatcccacacgattcacattgcatcagtggcttacaatactattttccttggtgaatttatgcagccagactgggatatgtttcatagcctacatccgatggctgaatatcatggtgcagcacgagctgtagggggatgtccaatttatgtcagtgacaagcccggacaccatgactttgatcttttgaagaagcttgcactacctgatggttctatattaagggctaaacttccaggacgaccaacaaaggattgcttatttactgatcctgccagagatggaaagagtcttctgaagatttggaacatgaatgatttttctggagttattgcggtattcaattgccaaggagctgggtggtgcaaagttggcaagaagaaccttatccacgatgataatccaggcgttgtcacaggtgtcattagggctaaagatgttgactatttatccagggtagcagatgataaatggacaggagatgccattatttattcccatcttggtggagaagtggtttaccttccaaaggatgcatccatcccagttaccttgaaaaccagagaatatgaagttttcacaatagttcccgtgaaggaattgagcaatggtgtcgaatttgctcctattggtttaataaagatgttcaattcaggaggggctgtcaaagagtttaattggggatctaatgaaagtacaaatgtagccatgaaagtccgtggttgtggccaatttggtgcttattcatcagctcagcctaagttgataacagttgactcagaagaggtagaattcaagtatgaggaagaatctggattggtgactattgatttgagagtacctgagaaagagttataccaatggagcatttctattgatttttgaatcagagactttgtctcaagatgaaggggtttagagttatagacttgatgtatccatagttcgcaacaatatgatgagcgtatgtagaccaatggcaggaaatgttagaggttccctgtaaggaataaccagaagcaatgaatgaatatcacgaagttctctacctattttttgtgatatacttaagcagaatgtaaatgcagcctttgcatcgttcccatacagtatgaattggttgctcttggtttcattatgcctcatttctaagaagttcattgtagtttcgttaagctagaaaagaaatatacggatagaaatgcattaagattagcccgcatatcctttaaatggagaactaattgattatttgataaattcaaagattacatacatgtcttccaaaggaagggagcctcttaaagaatcgcctgtaccctgtaaaagggtaatgctaactcaaattaattgcccatggtaaagcttgtgaaattgatgatttatacttctagcaggttcatcccgaaggagctgaaacagagttctgtgcccttcttttaggagagttatatgcttatattgggttgaggctttcttccactccgttctactatgaaattaatatagggaaattcaaataatcgttaagaaatgagaattcgataaacatcgagtagttctagtgctttatttctgactttcatcctcagaacttgatacagagtgaacaatgaaaatatggcatatctcgtttttaatcacatttttgtttggcaaatgtatgattagctatttagtatcctatattttgaacaactcaatttctgccatcctagttttaactgtatcaagttgaccttataattgttttctgattgtataaaggatttgcttatgttttatatataggcccgagggagttttgttttaaggcaaggtgtaggaattttggagtgatcgatgtaattggtatgtaagggatttaaggggttgccagggagtttttgtttttttttctgccagatttttttgtatcgttttctagcaattgtggcccaacacgcattgtgttgattccttcctatgcccttttttttttattaaggtgaaaaattaaatataaaagatatttgtc

SEQ ID NO: 77815 - DNA, 283 bp, Glycine max
  unsure (1)..(283): unsure at all n locations
  Clone ID: PAT_MRT3847_41284C.1
aattcggcttgaggccggtgcaacttgagtacactgcccctaccggcttataacgctccctgatctcaatgcccatcattctttacatgggttcaagattntcttcaatgtggtggcgaggtctttgtgtaccatttcttatgggaaagaaaatcactctctgtgctggccacagacttcgtgaatcattttcttttccactcttagtttatttgctgaacactctcctatttgatataggacttctgtgtcagatttaaacttcttctgtttctttcactct

SEQ ID NO: 77816 - DNA, 196 bp, Glycine max
  Clone ID: PAT_MRT3847_41285C.1
ggagtgtactaaccaaacgtcttttcgttctgatacattttaccttagtttgtgaaattctatccaaagattttgagaatgtctaactgtgggtgtggaagcagctgcaactgtggcatcatctgcagttgcaacaagtactcttttgactacgttgagaagatcacacatgacactcgagatttgggtgttgggc

SEQ ID NO: 77817 - DNA, 1058 bp, Glycine max
  Clone ID: PAT_MRT3847_41286C.1
cgacgcgtccgggaaaggtgtggcgtgggtagataaagagtgtatctggattctgatctgaatatattggcacgcataaaagggaacgaacgtaatggctgcagcagcgttgctcgaacttgatcgagttctcaagtccaagaaggaaatgttgacgcctcgggaagcaaatattcttctatcgtggaaatctaaatctctgatggatctcgctgccggtgcacttggtgggaccgcagctgcaggggctgcaacttggaaactcaatggactatttcgaatatgcctttcagcaggatttggtacttactgtggaccgtggatgtttaatagatcctcgtattctcatgcagatcagattcttacaatggatggtagtatattacagaaggagttagcgaatataacggtgacaaaataccagaatgatcctttgctaatgcggcttatatctaagcatttgtacttggagaggatttttgatgattcaacctctaataatcctacattaagatggagataccggaatttctttagcgataatgcagtcaatggtcataggacacatgatcgtgaatcaaatgataaatcccaaggcaggtctgaaaatgtcaccgacagcaaaagaacaaatcttaagaccaagcgtacttttaaaaacgcgagtcctgatattatgtcggagggtgaccctcttgattgtctttttggttatgctcctccggtggaagagatccatcattcaaatttcccaaataaaccatcaggaatacataatcgggctcgtagaaaatctcaccgtaggcgtcggatgcataatcatgaggacctttcaaactctgagtctgcagcagctgtttgactatcatttaacatttgcagacgttgatgttaggattatgcaaattgtggttttcttaataacgtaggattatgtaaattgtggtttttttaataacgttctgatcaacttccttcttgtcaaacaacatttcagaaaagaacagtgttattattatgataagtaccatttaatatgccacattattatgcgtctg

SEQ ID NO: 77818 - DNA, 369 bp, Glycine max
  Clone ID: PAT_MRT3847_41287C.1
acagctagttaaaacaagattcctaattgattgctgcacatgcaacatttaatactactgggctcttttgctttactgttgagtcatcaagggactcttgttgtcagagtcttttgtttttgttatcctgactcacagagatatcaaaacaagtacatgaaagaatgccatgtaattctttgtcctctattgatttcagattggttttggtatgggtcattttcagtcaaatgctggtttcctcctcttattctttgcttttccccctctcgagagtgtggggaattttcgtgatacaaggaaagacatcaagatgccttgtcccttgaaatacaatgagaatctaaataaagaaaagtagcatatgcc

SEQ ID NO: 77819 - DNA, 385 bp, Glycine max
  Clone ID: PAT_MRT3847_41288C.1
cttaaactggctcatttgagcaaaagaaactaggatgcattttaatgcgatatccgtggatgccatgctctccttcactaggaacgtttgagaatggggataacattagctaattagacactggtaacattaacctatataagatgactaccacgattaaaatgatgaaatcacaatgtcactctcacaagaaggatagggtggggccaaacatgattccttgcgcaatgtaaaggattgtagagaacagaaatccatctcactgaataccaaagcacctaaacgagaatcggggaaactatacgcggaagttcttgtgtttcaatggatgaagcaatgcgttaattgctgataaagaaagagacacgctctgcgaacaacatgt

SEQ ID NO: 77820 - DNA, 444 bp, Glycine max
  Clone ID: PAT_MRT3847_41289C.1
agacgacagaagggggagagaggaaaggtgtggcgtgggtagataaagagtgtatctggattctgatctggagtatattggcacgcataaaagggaacgaacgtaatggctgcagcagcgttgctcgaacttgatcgagttctcaagtccaagaagggcgtgttttgatatccgatttatgaccaaatatctgcctttctaggaaatgttgacgcctcgggaagcaaatattcttctatcgtggaaatctaaatctctgatggatctcgctgccggtgcacttggtgggaccacagctgcaggggctggtttgtcatttccgtatccttaatgaaagaagatgctttcttctttctcttctagttattggcttaacctgggggatttatatgtattttatttagtctaccatagttacagcagattatcatcagtgcgtatgac

SEQ ID NO: 77821 - DNA, 1178 bp, Glycine max
  Clone ID: PAT_MRT3847_4128C.1
ttaatatgtttttgttatgtaatagccactctgattccttgctaggtcaaacttattaagatgatcctaattttgatttctggttaaacaagttcgatcgatcgaggttgggcaaacaactggaattgcagagaaaatgaacagcgccatcttcaaagcttcaaacagcaacaatctccattcctctctcagggccgcactcttccattccacctctcccttgcaacgtaaacgccgcaatcattgggactccagagggagcaaccatacctcgagaaggtttagaagggtgcaagcgaaacacagagtaatgaacagtatcaatgattatgcagaatccctgtttcagagctggaagcaaggtattgatagggatgacccatcatcaagtcgaggcacctcatggtttaaaaaacaatattctgatggggcctctggaaggtaccggaatagcaataaaggatcaagtcatcggtacagaagagatccttctttttgtgaagatgattttgatgttgaaaccattctccgttctgcctttggtgggaatagattcttctattggtccttcatcaatgaggaaaatcctcagtggaggaggtctgaacgcttttctaattttgagaaatcatggagctggagatatcgaaacgaaaatgattatgactcttcatctgagtctgatagtttagattcagatttagtttctgatagattagcccttggattgagtgcttcaggttccctgaaacttgaagatgtaaaaaatgcgtaccgggtctgtgctttaaaatggcatccagatcgtcatcaaggctcttcgaaggctatagcagaagagaagttcaagctttgcagtgcagcttatcaatctttatgtgataagctggccttggattaaggatccttaaggcctatgctaatccttttctagaagtctccagccagctcataccagatgattgaccatgctaaattatttaacccaacaatcctgttttcattgtatttttgtagttttaagtaattttattagatgatcatggaaatattatgtatgctattttacaattacaattgcatttgtaccatttattatctcagctgattcatttcagaatctcgtattggtgttcaaataataaattgtaagagttgcctttttgcaacatttgagt

SEQ ID NO: 77822 - DNA, 210 bp, Glycine max
  Clone ID: PAT_MRT3847_41290C.1
aggcttatgtggatacctatgcaccgatagactatgaatgtcttaataagcgacgaagggcttctgtgggggggatatttatcttagatcctttgtttccctatattagtcaaccaatcaaactgctgcttaatccacgggcaggcaatgagacaaccttgggaactgtaacatcttagaagccagaggaaatgaaagctaaatcttttc

SEQ ID NO: 77823 - DNA, 535 bp, Glycine max
  Clone ID: PAT_MRT3847_41291C.1
gcacgaggaaatgaaatttgagttggaaaaaaataagctgttgttatttcttacttgaattttggccgattgtgttataaaggtcaatgctttgttggattcactagcaaaaggagcggtttggtttttgtgacggtatataattaaaaaataaatttaacaaaaaaaactatcacaactaattaaaagccgtcacgatctttaaattaatcataataattaatttacccttggtaataatttttaactgccacattgttaaaattgattattttaaaatttaaaatactaaaagtgttgatgttaactaaaggaaatattaaaatgaatccattcaaaaactcaaaagattaaaaataaaatttttaaaacataaaatatcaaaattaaaaaaatacaaaggaccaaaatgttattttaccctatcttttattctttcaacaaatacttttccacttaaagctataactgtcttattttgcaagaactcccctggcaaccctccaaatacgagaacagtactctacccttctct

SEQ ID NO: 77824 - DNA, 459 bp, Glycine max
  unsure (1)..(459): unsure at all n locations
  Clone ID: PAT_MRT3847_41292C.1
cgtccnngctcccaccatgtncnntccttccactttctctttcctcttttctccgnncaattcaattcttcgcagcgccttcnnttctcacgccgtgtgtgagggnnttttgattgggagaaatttgttcnngcgggggggttcaaaggtttnnttcgaanannttgggtccccgtgaaccgccgtnnttttttntnntggcggcannngtttgtggtggtnntatgtttcaaatggcaattnngagaagaacccagctttaaaggtnngtccaggctttgattccgagttgctcttcctcgaagcanagggaaattattgtccaagtgaccgaagagnngtgattcgtgcggcgtaacctctgcttgcggaatctcgacgaccgatgatgaagtttgatggatgctgattcntggggcccggggtctgatgatttntgattntgctggaatttggggg

SEQ ID NO: 77825 - DNA, 782 bp, Glycine max
  Clone ID: PAT_MRT3847_41293C.1
tttcaatgtgtttggatctgatggtcttggaagaatcacatttggggataatagtagcttggtccaaggaaagactccatttcaacctcagggcattgcatcctaccagcagtagaacggcattcaacttctagttttaatgagctcccctttgagtactgttatgaattaagtcctaaccagactgttgaactttccattaatctgactatgaaaggtggagacaattatcttgtcacggaccctatagtaacggtcagtggtgagggtattaacttactttgtttgggagtcctgaaaagcaacaacgtgaatatcataggacaaaatttcatgactggttaccgtatagtctttgaccgtgagaacatgattcttggttggagggaatctaactgttatgatgatgaactctctactttacctattaaccgatcaaatacacctgctatttctcctgccatagctgtgaatcctgaagcaagatcaagccagtctaataatcctgtgctgtcacctaatctctcatttaagataaaacctacttctgcgtttatgatggccctttttgtgcttttggccatattttgagcatatcttataggctattcagtgttatattactaatattagtattttctttagcacacaccagagaagcgttattactacgcattttttggattcttagtagcactattttgataatgagtttgtaaataatgtaacaacatgtcagtatagttgtgaaaatatatatttccattcttacatttaacttt

SEQ ID NO: 77826 - DNA, 1428 bp, Glycine max
  Clone ID: PAT_MRT3847_41294C.1
ggctcgagctcgagccgctcagttctcacacaacataaacacatacaagaacagagcaatatatctatctatttctctgttctgttgtctcagcaaaacaaataataaaatcctctcgtagctaccttcaacaactcttgttcatggcgtgtcaccgttggctctgtatatcactgttgctgctgctgctgctgagtttagcttcgcagagttgccacgctctccattcgttcgggttcgacattcaccaccgtttctccgatcccgtgaaagagattctcggcgttcatgatttacccgacaagggaactcgacaatactatgttgctatggcccacagagaccgaatattccggggccggagactcgccgccggttaccactcgcctctcacttttatcccctccaacgagacttatcagattgaagcctttggattcttgcattttgccaatgtttctgttgggactccaccattatcgtttctggtggcattggatactggcagtgacttgttctggttaccttgcaattgtaccaaatgtgtgcatggtataggcttatcaaatggagagaaaattgcttttaatatctatgatcttaaaggatcatccacaagccaacccgttttgtgcaatagcagcttatgtgagctacagagacaatgcccttcatctgataccatctgtccatatgaagtaaactatctatcgaatggtacttcaactactggattcctggtggaagatgtgttgcacttaattacagatgacgataaaacaaaagatgccgacacacgaattacttttggttgtggccaagttcagactggtgcatttttggatggggcagctccaaatggtctgtttggactaggaatgagcaatgaatctgtcccaagtatcctagccaaagaagggctcacttcgaattcctttctgttttggatctgatcttaatggtccgcgtccggtcattcgtcgtgaccacacgccactcggttggagggaatctaactgttatgttgatgaaccctctactttagctattaaccgatcaaattcccctgctatttctcctgccatagctgtgaatcctgaagaaacatcaaaccagtttaatgatcctgagctgtcacctaatctttcatttaagataaaacctacctctgcgtttatgatggcccttttggtgcttttgaccatactttgagcatattttataggctattcagtattttataactaatattagtatttttttaggacacaccagagaagcattattgctacgcattttttggatttttagtagcattattttgataatgagtttgtaaataatgtaacatgtctgtatagttgtgaaaatatatatttccattcttacattattatacttttatggactatggtttttgtctgattt

SEQ ID NO: 77827 - DNA, 405 bp, Glycine max
  Clone ID: PAT_MRT3847_41295C.1
cacaattgaaattataaacacgactgttatatactaaacacttcacttatccaatttgggtagggtaacaatttaattgtattgagcgaatgggatcagaaagatggaccgctaactcccatttatgagttataatagaatccaccgaccaacttgctttgtcatccgacacaatcttttgattgcaaagatgttccagatacaatccaaactctatttttataagcgaatcaatcctactacttgtgcccctgaggtctctgcgcttgaaaaaaaaaaactgcgacggctcccccaaataatcggtccggccctagatggaccttttcccccagggaaaacgcctaatattgacaacgctatgatagtaaaggggagcgatactgttggctaacaaaataatgg

SEQ ID NO: 77828 - DNA, 979 bp, Glycine max
  unsure (1)..(979): unsure at all n locations
  Clone ID: PAT_MRT3847_41296C.1
acagcagaggaaatgctctttccattatcttctttctttctagagcagagcacatgctattgtcttttctctttcttttggcattttttttggggacagacagggtcttacaagcccaatgataaaagcacagatgcaaggaagaaccagatgattaatattcttacatctcaaagaagaggagtaaagcatacaccaacttgcttgagttaaagatacaagagacgttggaagcccttttgactgtttatcttctacaagcctcaaaacagtacctgatctcggacacaatgaaaatctatcaaacactagggatgtataaaagcataccaaataaatgcacataaaagcaaagctggggtgtagtggtatttctataggataacattttacaatttataccacatgcctacaaaaaattgcaacgcggagaaaattaagcaaaaaaaactcaattacaactgccagactaaagaaacaaatgtattagtgtattacccaaatagagtgatcaaactgactccctctcactcatgacaaatgcctgaataagactttgggcagcatgagtttgctcaggggttccagatattataattttagtttccacagttccaggctttggatcagtaatagtaatgtttgcatcagaaatctgaagtatttgttttaggcattcaccatcttccccatatattacaggcaccactgctcgaggaacaacaacttcaacagtggtacttgtgataattggttggctcccccctgcaaatcctgaaattcttctaggaggacctcctggaaagtctggcaagccaatgggtatgccaccttcaagtatcccctgtggaccccaaggcttcctttcagatatgtgaggaggaaggcctggtctatgtatactattcaagaanaggagggcgatcatcaagaggaaaagcccgcgtgtgggattgtggatgaccaaggtcagaataca

SEQ ID NO: 77829 - DNA, 568 bp, Glycine max
  unsure (1)..(568): unsure at all n locations
  Clone ID: PAT_MRT3847_41297C.1
attgaataatactnttccttcctcctgttatctctctcttatcaaatcaattcatttccaccttcgtcgtgctcctccaatgagagcgatgtcttccatctaaacttatatttatccactcacgtcttttgcgagcaaccgcataattcctcttcttaaagccctcatatcctccctcatcttcatctacaccttcttcctttccttcctcctatttattctccctctccggctcctcctctccacctcgtcttatccttcttcttctccaaataatcattttaatcagcttttgctcttactctaggaggatgacactttccacataaagtcactatctcatgacgttttaatgggtcactacagatgtttttacctcttgagcacttccatcttctattggtttcgaaacaacgctctttttttccagtccttatttccaattgcctattatttttaaagtcattttattcatcattcactgtctcaattaacaactgttgaagattattcaaacttttccaaggcttattaacaattatttcaacttttattgttctatttcaaa

SEQ ID NO: 77830 - DNA, 225 bp, Glycine max
  Clone ID: PAT_MRT3847_41298C.1
ccgccctttgtcttttttttttttatgaaccaagttgatagatgaatttattgcagcataagattaccccatattattccaaccacctcaattacaacatagcatataagtgtttaatggagcacttataaaaccctaacatttactaatcgggccatctttcattatttggaaataaagagcatgatatatcttatagctagcaaaccatatggatatacttat

SEQ ID NO: 77831 - DNA, 556 bp, Glycine max
  Clone ID: PAT_MRT3847_41299C.1
ttttttttttttttttttttttttttttttttttttttttttttttttttttttttttttttttttttttttaacaaaaaaacgggcccccccccctattaaataggaaaaactagatagcacccaataacaaaactaaagcaaacaaaaaaaaattaggcccacaaaagttggcccgtttatttggcaaggaaagggccgggggaaggaaaaaaaaccaccccccacaccccacacccttttattaaaaaaaaaggggggggggaatcccccggaaagaaaggccccccccacggggaggaaaaaccacagggggggggattggggccggcccattacgggcccaaaggggggaattctgggcccccccggaaatttgggcccaaattcccttaaggtgggtcccaaacttttaaaaggctggaatggccttgggggcaacaacccaattgggatgggccctcgggccaagggaaaccccaaaaaaagcaggcctgggcaaaatctttaacacggggagggccaaaagggcccaagcctttccgggaatgggccc

SEQ ID NO: 77832 - DNA, 227 bp, Glycine max
  Clone ID: PAT_MRT3847_4129C.1
cgacgtaagctcggattcggctcgagaaacctgtcaatcttagtttgttattaaagcatcattacacggcccatccatcaccacaacgcgggctctttataataaaacctcatccctccacttcaaactaaaaacaaaaccatcataactttctccaataaaatcccaaattattcctccctatccaccaacaaaaacatctttacctaaatccaaaattcacaaac

SEQ ID NO: 77833 - DNA, 341 bp, Glycine max
  Clone ID: PAT_MRT3847_412C.1
gagaaaatggggggataaaaatgctctctttctgctgaaaaaactgaataatttcatgccctggctgggtttttttttggagcataaaattttttgctcaagtaagcttcaaacagaaaccccacaaggtgggggcaagccaaagttgaagctgtaattttttttttaagggaagcccaagaaaaccccagcatcaattttttttcccttcttgcagattttaaaaccttaaagaatttcccccgaaggccccgatctttaaagatgggattgtgatcctttgtgggcaaagattatctagggggtagacctttttttttgctggtagggcccttagccca

SEQ ID NO: 77834 - DNA, 492 bp, Glycine max
  Clone ID: PAT_MRT3847_41300C.1
ggtggcttcgtgtcacagtgctgaataataatggtgatggcttcgtagttgtaagttgtgataataataacagaaaacgaaaccctcaaacgaagggaacaatgcgaatataagtgagagaagaatatatcaatatcgtctccaaatacgacgtcgttcaggttggagttttagcacaagatgtctctgagaataaaagcagtagtagataagtttgtccaagagttgcaggaagcgttagatgctgatattcaagataggatcatgaacgacagagagatgcaaagttacattgaggagcgtgaacgacaggttgctgagagtgaaactgcttggaaggctgatctttctcgacgtgaggcagagattgctcgtcaagaagcaaggctgacaatggagagagacaatctcgatagacagacatgtgtcttaatgggaactgtgtctattcaagataacctatatggagctcttgaggttacagtaagcgca

SEQ ID NO: 77835 - DNA, 286 bp, Glycine max
  Clone ID: PAT_MRT3847_41301C.1
cgaagcgaaaacaacttaaattacaattgatggggagttgatgagaaacccaacccgcgaaaactactttttgtaacagaatgacccgtgcaccattgtttaacactaacacccatggcaatgcaattaccttaatcctacctttaaccaaacgttgaggcctggctggattggtcatgggggatcatctcgctaactactgctgcttagacaaaaatcggataacggccacggcgcgtcctatcttcataatctgccattaagcgtcctaattaatgcactattt

SEQ ID NO: 77836 - DNA, 861 bp, Glycine max
  unsure (1)..(861): unsure at all n locations
  Clone ID: PAT_MRT3847_41302C.1
atttcacacaggcatttgggagccgctaatatcggcttccacacggcggcgctccgattctccgacacactgtcgctcaccgcttcactctctcacaaattgaccgaatcatcgctagttgctgtctctggtgtcactacaagggagggaagactataattgaattgaatcgagtgggtgttgctaaatggggaacgatgaaggcaatgataagaaaaagagagtggtttttgtgactgtagggacaacctgtttcgatgctcttgtgagagctgtggattccaacaatgttaaacaagccttgtttgcaaaaggctacacccaccttctcatccaaatgggtcgtggatcctatcttcctactaagtctgaaggagatggttctttggctgtagactacttcactttttcatccagtattgcagatcatctcagatcagcttctcttgtcattagccatgcagggtcgggtagcatatttgagacattgcagctgggcaaacctttaattgtggttgtaaatgaagatttgatggataatcatcaaagtgagttagcagaagaacttgctgatagaaaacatctgtattgtgctagtcctcaaacactccatcaaactatagcaaatatgggatttaangttctctctttccttactctccaggtgatgctacaccagtggccaagcatataaacaatctccttggttttcctgatgattgatctaaagcctttttctcccctctatctctagggttaaaagtctttgtgagggatgataatcattttatgtaatatttggatcccctaaatattcagtcttaaatgttgaattgaatatcatgtcgatgcaagcaatat

SEQ ID NO: 77837 - DNA, 179 bp, Glycine max
  unsure (1)..(179): unsure at all n locations
  Clone ID: PAT_MRT3847_41303C.1
gaattcggctgtaggcaagtcggtctggaggatggagtggcagactagcgctggatcagcatatgnacacagaactgccgtggggaacgagaaatcgtgttacatacccagagggctgggagttcatgcagccgacagtcgtgaacttcaagcacagatgagggcagttagaatgatcc

SEQ ID NO: 77838 - DNA, 812 bp, Glycine max
  unsure (1)..(812): unsure at all n locations
  Clone ID: PAT_MRT3847_41304C.1
accacgcgtcccgattccttccgcccaccgtcctggctgctctcccgttgatttggtttggtaaaggcaaagggcactgcgttgacggtcgaaatcctgggcgcgcattagagagaaaaaagggtttgtatttgagaactgagaagtggggaagatggatttggacggtgatgataatgataatgacatcttcagagacgacgaagatgatcctcaagctcaactctctctcctcgaaaacgagtcgagcaaagaatatgtggtttaccttgtcgatgcttcacctaaaatgttcagcactacttgccctgcggaagaagacgaccaaaatggtgaaactcacttccacattgccatctcttgtatctctcaaactctcgagtctcagatcattaacagatcctacgaccaagttgccatatgcttcttcaacactagggagaagaacaatttacaagacttaaacagtgtttttgtatttaatgttcctgaaagagagtttctggacaggccaacagcaaggctcataaaagaattttatcagctggaggaatcattttcaaaaatcattggaagtcagcatggcattgtgtctgggactcgagaaaattctctctacaatgctatctgggcggctcaggcacttcttcgtaaagggtcagcaaagacagttgacaaacgtatacttttgttcacaaatgatgatgatccttttgggagtatcanaggggcagtaaaatcagatatgacaagaatgacactgcagagagctaaagatgcacaggatcttggcatttctattgaacttcttc

SEQ ID NO: 77839 - DNA, 489 bp, Glycine max
  Clone ID: PAT_MRT3847_41305C.1
aaagatcctcaaaactttttcaagatgatcaacaactttcaaatggatcaactcaagaaagccaaccctttggtttgggacttacatgtaaatgtcacaaatcaatgtcacaaacaaatcaagaaagccaacactaccacaaatcaccatcccattaaaggccaattgattcatatttctacaacctcaaacaagtgtggaagggaatatgactctttttccactgtttgaaccttggctttgggcattggtagttgatcgatgccggttgcagaatttgtcaacctgtaactttaatggagtgatcctaataaaaaaaagtcttttagactctagcatagtataaccatcaattaccaactactgaacatgttttcttgaccaaaatatggtttgagcttcggttcagcttgaacgaatcctaaaataaagttcttttgagatactaggtggtctcttttgcaaattctgagtttgtgtggctcaatt

SEQ ID NO: 77840 - DNA, 305 bp, Glycine max
  Clone ID: PAT_MRT3847_41306C.1
cccctcatgtcagtaacataaactttatttctatttacatttcagtgaatttatcctaacatctggggttaataaatcctgtggatggtgtataaaaaaaacggctttataaacaaacttataaatatacattatcatttgtcttgcaccttaacattataagctcttctatccatgcctagttattcatttattaaccatacaaatcaatactttacttacagtctaattatattaaatcctatatattattctatatcctaattaatttatttattttataataatttttctctttccttttt

SEQ ID NO: 77841 - DNA, 529 bp, Glycine max
  Clone ID: PAT_MRT3847_41307C.1
ttacaagcctccccaattggacgggctttatcaatatctttcaacagtgtttgcaactgatttgcattctcgtgcatttttacggcttcctaaatctgtgggtgtggattttcgtgcctcgtgtttctgccataaacaaacaattgacatgggctatgtgtgttctgtatgcttatccatattctgtgagcaccatgataagtgttcaacctgtgggggttagcatgtcaagaaaagctatgagatgaaggcaatcccagctgattaagatgaagttttcagtcctgtatttggataatctcttgataacacctacacagccgcaacatttccatgagcaaacaattgacatgggatatgtatgttctgtatgattatgttccagcatttgtttctacaaggaaaattacattttagtctattggctactaaaaatttctacaagaaaaattacattttagtctataggctatattggctactagcctatgaatccaattgtagcttttattttaatgtataatactta

SEQ ID NO: 77842 - DNA, 349 bp, Glycine max
  Clone ID: PAT_MRT3847_41308C.1
agatacaattattattaacctaatcttttccctgttatttttataaaatgtacgtttttcagtcattttttttattgctccgcacaaaaaagtattattcaactttttagatattaaatacgtctttatataagacatattgatagtaatataatgtaataaaattaaaaatatttttttttaggttttttgtgttcttataatggtttatgagttataaacctttttaaataatacattattgtgaaaataaaggaaaattagactagatatttatataatgttatatatacctactgttatatccgttcttgaagtgttaattgttacagtgcctgttttattaaca

SEQ ID NO: 77843 - DNA, 622 bp, Glycine max
  Clone ID: PAT_MRT3847_41309C.1
gtcggattctggatcgggtcaaattggggatcggagaattggatccgtttcggtgcgaaagaattaagttgacagcacaatgttcttgttctggtggttgtaataatgatgaacatataaaagtaacagtaaaatccttattcttgagcttcaagttactctgggatgggcttggtcttggacctgtagaggagtttcttcttcttggatgtttggttatctatggtgagtacaatcttgccaggttcaccaattttgaaagcgttggtaataacggtctcatcagcgggaccaattttcctgttcttctgaactatgacagtgtaaccatcctcagcgccgggaacaaattcagcaccgtagctgacatcccagcccaccactcggatttcccaaacagcatgacttttctcagaaacagggaactcaacagcatgcttagtcgcgggtttgattgtaacctcagtgacaggatcagaagtggtgaattcctgttcagcctctcggctaagtccaccatattgaaccggcaccagctccggagctatatattggaaaagggtgtgagcagatttggatgggccagcaaagagaaatttgctctcgagccgaatttcgagcc

SEQ ID NO: 77844 - DNA, 349 bp, Glycine max
  Clone ID: PAT_MRT3847_4130C.1
gattggccgctccatatttggtgtcagtcacgaacaggctcattctgtgcaagcaagtaatgaatctgattcctgtgatttagagctctggtcattccaaaagcgggttaccgatcaatttcaagacctttctggagctagcgatgagcaaattctctcaactgattggattcataatctcctccgaacatttatctgctggcaagaggaattccgagccatcctgttgaataacgaagagcatgtcacaagaccccccctagatcgcatgaattctgaattctttgataggtcagtgacagcgcttgacatgtgcaatgctaaccgagatgagactgagaatactcgc

SEQ ID NO: 77845 - DNA, 377 bp, Glycine max
  unsure (1)..(377): unsure at all n locations
  Clone ID: PAT_MRT3847_41310C.1
ctatgctacttaccgcgaaccgtacactcactgcaatgaacatgctcgttgctggaggagaatgatcggacgtataatcacgtgtctcagattgctggtgagagtggttgcattaggctccccctagcatactgcatnncaacgccaactacggatgctaaatgatgaagctggctcacgactcttgaacgtgcactgctacatgctccgaaccctgtggtactgctatcaatggcggaagaatcatggacagatgtactgatcacggctatagaacctgctgcagaccgggtctgatgccctgatgaatcccggtccacaaccagatgagatctactttcttatacaaaaccgcacctgattgggatctactgcct

SEQ ID NO: 77846 - DNA, 3358 bp, Glycine max
  Clone ID: PAT_MRT3847_41311C.1
gcgcgagcaaagcagtaaataaacaaataataccaaaaaacaccatgatgcttggggagacccaccgcccaaatccaaccgtacacgtgaaggaatagatgatcacatttaaacaaactttacaggcataaaagtatatgacaatgcaaacagacattaattgtttcatgtacaaatgaagcccgtcccgataatgaaatagcaaaggttttatccaattccaaaacccaaatagcaaactaccgtaagcttaaatgaaataggccaacgccagacttgaaacaaaataattttataaagcaaatgaagaaaagaaccccaccccgtatgaaagaattaagttgaacagcacaatgttcttgttcttgtggttgtaataatgatgaacatataacagtaacagtaaaatccttattcttgagcttcaagttactctgggatgggcttggtcttggacctgtagaggagtttcttcttcttggatgtttggttatctatggtgagtacaatcttgccaggttcaccaattttgaaagcgttggtaataacggtctcatcagcgggaccaattttcctgttcttctgaactatgacagtgtaaccatcctcagcgccgggaacaaattcagcaccgtagctgacatcccagcccagcagtcggttttaccaaacagcatgacttttctcagaaacagggaactcaacagcatgcttactcgcgggtttgatggtaacctcagtgacaggaccagaagtggtgaattcctgttcagccgctcggctaagtccaccatcttgaaccgtcaccggctcctccgctatagagtataaaagagaacacacgacccaaccaggatttttgagcggacacccaccccgcgaacccaaacgtacacgtggcaccgtggacgccgtttagactagtggggtaagccgttaatgcggagaggtgcccgttatggagagagtggaatctggacgaagcataagcgcgaggatgtttccaaaactgagcaaagcgagtcgtctggaccgggtcgggttccggttccggtcaaatcggggttcccgacgttgcgtaggtttcggagcttgtcagtcgccgatgtccttttgttgcacctccctcggtgtgcatagcatgcgggggagaccaaacgtcggattcagggtggaggctcgcgcgcctgatcaccgtgagttctcttacactggcacagcctcaagctatgtcatcggagggagtcacaagaagggtaatgcgtgcgatagcgcgatttcgttcgtcgacttccggctccgcgcaccaagtcaaacaccacaaacctcaccggacggatccacccggggcgccgcccgtcgtgctcctagaatactccccggcgctgctcgccgtgttgatcttcgctaatcccacctctgcccactcctcacctgactcatccctgcaaggcagcaagcgacgcggagtccgcctcggcgtctccagctgcggagtccgcggccccgctggccgttgccgggcccgacgccgggggctgcgctttactgtcctattcaaccttgtctgactcgcatcctgtaaacgtccttcgcccagtcaaagcagcaaaggttttttccaatttcaaaaaccaacagaaacaatgaagcaaatttgaattatatacgggaataaggaatacatgatcgcatttaaacaaactttacaggcataaaagtatatcaccatgcaaacagacattaattgtttcatgtacaaatgaagcccgtccagataatgatccctccttcgcccagtcaaagcagcaaaggttttatccaattccaaaaaccaaataaagaagacaggaaattactgtaagcttttaatgaaatagcccaaacccagacttgaaacaaaataataaagcaaatgaagaaaagaagaaccccgtatgaaagaattaagtccctcgccccacccaccaatgttgttgtggttgtaatgatgaatataacagtaacagtaacatccttattcaagttactctgcaatgggtttggtcttggacctgtagaggagtttcttcttcttggatgtttggttgtctatggtgagtacaatcttgccaggttcaccaattttgaaaccgttggtaagaacggtctcatcagcgggagcaattttcctgctcttgtgtactatgacagtgtatccatcctcagcgctgggcacaaattcagctccatagctgacatcccaacccaccactcggatttcccaaacaagatggcttttctcagaaacagggaactcaacagaatgtttggtagcgggtttaatagtaaactccgtaacagggtaagcagaggtgaattcctgttcagcctctctgctaagaccaccgtattgaaccgggaccagctccggagctatatatctgaaaagggtatcagcagatttggaagggccagcaaaaacaaatttactcttggtcctctgtgtgaagaagggactgatcatcctagaaaaggcaaggtaccaccaggggacattgatgaatatctgcttggcaacgaactcagggtagttgtcctgaagcagttgaagggcctgattggtggcctgcctcagttccctcttgcccagtccgggagagttcttaaggtcgttcacctgaactattgtcgatatcccattcggagagaagtcaaggcttctaacgctcttctccaacgactgaatcctccaccttatgaacttgttcctcttttcctcgtccaaaaacgtcttgctgtacaactccttgtcctcaaactccccaaagacgttgtagtacaccgggtgcccttctttgtcgtatccatccttgaacaccaccttctcccaatcacttccaagatcttcctccactagaccctctattccaaattcctttctccatcgcaccgtgtttcttatcatgttcaaggcctccttcaccttgaaatcccttgccctaagaaactttagcagaatcacatcgctcctctcgtcccccagcaggggaattccccatatctcaacttcctctggaacaacagcccaacctttttcttctcttctttcacttcactttccttcttctcttccatcacttctacttccacttctttcttttcttccgtcacttctgtttccttcttctcttcgatcacttccacttctttctttccttcggtcacttccacttccttcttctcttccgtcacttcaacttccttcttctcttctactatcacttccgcttccttcttctcttccgctcgagccacttccttcttcttttctatcacttcagcttccttattctctcccgtcacttcaacaacccgc

SEQ ID NO: 77847 - DNA, 397 bp, Glycine max
  Clone ID: PAT_MRT3847_41312C.1
ggcacaagtgagtttgttgatcgagatcactagaaacagtgtgatgaaaatgaaggtccttgttttcttcgttgctacaattttggtagcatggcaatgccatgcgtacgatatgttccctctccgaatgaacactggctatggcgcccgtactccggaggtgaaatgcgcatgttgcacgcttgctgtggtagcacacaacatctttggcttttacaccattcctgaagagtgcgttgacgcacccatggaatacatccatggcgatcaatctagatcagactccattacaggtgaccaacgagcttacttttatgccacagacctggaaggccatcctagggacacatttgcagttagcatagatcgctccgtactctctaatattgcatactac

SEQ ID NO: 77848 - DNA, 1419 bp, Glycine max
  Clone ID: PAT_MRT3847_41313C.1
agaagagaagaaggaagctgaagtcatagaagagaagaaggaagtggaagtgacggaagagaagaaggaaattgaagttacagaagagaagaaggaagcagaagtgaaagaagagaagaaggaaggggaagtgacggaagagaagaaggaagttgaagtgacggaagagaagaaggaagcggaagtgatagtagaagagaagaaggaagttgaagtgacggaagagaagaaggaagtggaagtgaccgaaggaaagaaagaagtggaagtgatcgaagagaagaaggaaacagaagtgacagaagaaaagaaagaagtggaagtagaagtgagggaagagaagaaggaaagtgaagtgaaagaagaagaaaaaggtcgggaggttgttccagaggaagttgagatatggggaattcccctgctgggggacgagaggagcgatgtgattctgctaaagtttcttagggcaagggatttcaaggtgaaggaggccttgaacatgataagaaaccagcagcagagaagaaggaggaagttgaagtgacagaagggaagaaggaagctgaagtcatagaagagaagaaggaagtggaagtgacggaagagaagaaggaaattgaagtaacagaagagaagaaggaagctgaagtcatagaagagaagaaggaagtggaagtgacggaagagaagaaggaaattgaagtcacagaagagaagaaggaagcataagtgacggaagagaagaaggaagcggaagtgatagtagaagagaagaaggaagttgaagtgaccgaagagaagaaggaagtggaagtgaccgaaggaaagaaagaagtggaagtgatcgaagagaagaaggaatcagaagtgacagaagaaaagaaagaagtggaagttgaagtgagggaagagaagaaggaaagtgatgtgaaagaagaagaaaaaggtcgggaggttgttccagaggaagttgagatatggggaatttccctgctggcggacgagaggagcgatgtgattctgctaaagtttcttagggcaagggatttcaaggtgaaggaggccttgaacatgataagaaacacggtgcgatagagaagaaggaaattgaagtaacagaagagaagaaggaagcagaagtgaaagaagagaagaaggaaggggaagtgacggaagagaagaaggaaaattgctcccgctgatgagaccgttcttaccaacggtttcaaaattggtgaacctggcaagattgtactcaccatagacaaccaaacatccaagaagaagaaactcctctacaggtccaagaccaaacccattgcagagtaacttgaataaggatgttactgttactgttatattcatcattacaaccacaacaacattggtgggtggggcgagggacttaattctttcata

SEQ ID NO: 77849 - DNA, 232 bp, Glycine max
  Clone ID: PAT_MRT3847_41314C.1
cagctccatttttcgccttatagtttcgtcgtgtcttctttttactttcctgctggaagctgttcatggcagcataaaggcaagcttgttgttgctcatttagctataacagtttctaccatgaaattatgatgttttttttgtttgtgatgttgctgaatttcccagcatttgcattaatgcttggctgcatgtttgcagtgttacattgtatacttgggagctcattctc

SEQ ID NO: 77850 - DNA, 1076 bp, Glycine max
  Clone ID: PAT_MRT3847_41315C.1
cgggcatagttgggcctagtgggtccgggaacggcactctcaccgtcgcgcgcaccctctactctgttccagcgacccctacttcaactcggatcatgcgactcctaaaattgttgggattgctccactacttttttaccgggaccctaaaaggcgttctatggccatgatggcctgaatcttagattcgagaagaggtgggggagtcgagaaacggcgcactccgtctgttcctcaccgtcaccggcgcgcgcaccctctgttccagcgactcctaattaagttgggaaataaaaaagacttcaaatttcccagatggctgcagcctttgcttccagatgctctcgtgtgggccgttctctgtctggtggattaagcaacagttcccctggtttatttacctcatcacatggcatgacatgcaacaatttgttttctcagcaacaacgtaccttcatacagatgaggactgttctcaaggttgtcgataactcaggtgctaaaaaggtgatgtgcatacaggcattgaaagggaagaaaggggcaagattaggtgacacaataatagcatctgtgaaggaagcacatcctaatggaaaagtgaagaaagggaagggtgtatatggggtaagttgagcgtgaagctatgcctaaggtgcttggtgacaagagaggccacaagtttggagccagagtttttggaccagtgcctcatgagctaaggcaaaagaagcatgtcaattttcttacctgtgcagggcacattgcgtaaaagagagcatgggctgaccttgagttttgttgggaattctgcataaacatctacaaatggtatattttgatttttgttatgaattccaatgtcacatctcccattttaatatttggatattttagtgttatgtgcaagttttagtactttatcagtttatgaggagtaaaacaggtgtagaaggcttctacttgaataactagaatttgatttggtttctagcctaaaaatgaactagagacacgaaagtgatgtgtgtttcatatgtaacatatcaacttatttatgattatgatttttttat

SEQ ID NO: 77851 - DNA, 979 bp, Glycine max
  Clone ID: PAT_MRT3847_41316C.1
tacgtaagctcggaattcggctcgtgggggaaaagaaaggccaagagagtcgagaaacggcactctcaccggcgcgcgcaccctctactctgatccagcgactcctaattaagttggtaataatcagccacacttcaagcaggaacataaaagacttcaaatttccaagatggctgcaatctttgcttccagatgctctcgtgtgggccgttctctgttcggtggattaagcaacagttcccctggtttatttaccacattacatgagatgacatgcaaaaatatgttttctcagcaacaacgtaccttcatacagatgaggactgttctcaaggttgtggataactcgggggctaaaaaggtgatgtgcatacaggcattgaaagggaagaaaggggcaagattaggtgacacaataatagcatctgtgaaggaagcacatcctaatggaaaagtgaagaaaggaaagggtgtatatgggtgtaaatggtgcgtgcggcaatgcaaaaaggggcgttgtgatggcaggaaggtcgagtttgatgaatggaaaagtgaagaaaggaaaggttgtatatggggtagtggtgcgtgcggcaatgcaaaaggggcgttgtgatggcagtgaagtcaagtttgatgataatgctgtggtgcttgttgacaagcaaggccaacctattggaaccagagtttttggaccagtgcctcatgagctaaggcaaaagaagcatgtcaagattcttaccttggcagggcacattgcataaatgagaaaaagggctgtccttgagttttgttatgaattcaaatgtcacatctaccatttttatatttggatattttgatgtgatgtgcaagtttgagttctttatcaatttatgaggagtaaaacaggtgtagaaggcttctacttaaataactagtatatgatttggtttcttgcctaaaaaaaaaaaaaaaaaaaataataagacat

SEQ ID NO: 77852 - DNA, 465 bp, Glycine max
  unsure (1)..(465): unsure at all n locations
  Clone ID: PAT_MRT3847_41317C.1
ttcgttccaggaaggtttcccgtcatcactgtatgacgtcctccttctttgggggggggggggggtgaccggctgtatgaaagttggggggaaccggctgaggaataaccccacgcttttcttagagtatgttgtattttaacgtcacttggtgtggtacggcatagagccccgaacccataatgatgtatgtcggtgcaatggtgacgcaaggcgcagcagcccgggcatgcctgatttggaagcagcggaggatgggcggtagtgcgacaacaagtatgagtggtagtggtgcaccatgcacgatagaaagtggggacttgggttataaaaacatggggggatccgacaaaaacatgtaatatgtgcacgaaccataggaaaatggtaggaatcgggggggcacacaaccaagacgatccgattccaatggtttagggggtaaaaagcatgttaantagggtg

SEQ ID NO: 77853 - DNA, 534 bp, Glycine max
  unsure (1)..(534): unsure at all n locations
  Clone ID: PAT_MRT3847_41318C.1
aaaatacaatgctgtaacaagcatatgcctactaggtttaaattttcaagattattactgatcagcggcgtgcttggccattctatcaatgggctgtcctcatttgactccatggaccaggagaaagatgatctgaaatctaaaatggatcgtatagaaatgtgtcatccaaatgttatattagtggagaaaactgtttctcgtgatatacaagagtcaattttggcaaagggaatgacacttgtgcttgatatgaagcttcatcgtctagaaagagttgcatgttgtactggttcaccaattttatcatgcgataatttgaacggtcaaaagctaagacactgtgactntatctattttgagaagtttgtggaggaacatgatgctgttggtgaaggaagaaagaagcccatcaagactttgatgttcattgagggctgtcctacacgtttgggctgcacgatttactgaaaggtacacacagtgatgaactgagaggatcaaatgtgacatgcggtgtgcagtgtcatggca

SEQ ID NO: 77854 - DNA, 3182 bp, Glycine max
  Clone ID: PAT_MRT3847_41319C.1
cccacgcgtccgcggacgcgtgggtctcgtagcatcttctcactcttattctcaatgtaagttctttccacttcttcattccgtcaatttcttcacgccctagcccatgcacgcacaatccgtgaatttatgagtacaaatttcactgatgttttccgtggtatgggtttgggattagggtatttgggtatgcttaaatcgcaccctcccacgtgtttcattacttgttttctataatgttattgatcgaggttgtgaaagtttgattcttttgtagatagttggggttgggttttttctagatatgattaaacagatattcggtaaaacctcgcaaaccctcaaaatcatctcacaataattcaaacggggaaggagggttcaatgatggtttctcactgaactcatcttctaataataccctcttgaaatccaattcagtttcttcaaaatcttcaagttcttgttcagttgggtctcgttctgggaatgagactattgctcaatactattcaaatcaatctaagaaatcagctcctacttcaggttcagtaatggcttcggcagcttatgaggctttgcctagtttcagggatgttcctagctcggagaagcagaatctttttatcagaaagttgaatatgtgctgtgttgtgtttgatttcaatgatcctgtcaagcatctcaaagagaaggacgttaagcggcaaactctacttgagcttgttgattatgtttcgtctgtgaattcgaagttcaacgagttagcgatgcaggagatgacgaagatggtggcgaccaatttgtttcgtgctctgccttcttccaatcatgatggaaatttggaagacatgggtgagcctgacgaagaggaacatgttttggaaccggcatggcctcatctgcagattgtgtatgaatttctcttcagatttgtggcttcacctgagacggatgctaagcttgctaaaagatacattgatcattcgtttgtgttgaagctgctcgacctttttgactcagaagaccaaagagagagggattacctgaagactatcctccaccgtatttatggaaagttcatggtgcatcggccattcattagaaaagccatcaacaatatcttttacaggttcatatttgagacagctgcagaagtgggattgcagagttgcttgaaatattgggcagcataatcaatggttttgctttgcctttgaaggaagagcataagctgtttctggcccgggcattgatcccgcttcacaagcctaagtgtgttgcactttatcatcaacagctttcttattgcattactcagtttgttgagaaggacgtcaaactagctgatactgtggtaagaggtcttttgaaatattggccgataactaatagtgcaaaggaggtagtgttccttagtgagttggaggaagttttagaggcaactcaagcagcagaatttcagcgatgtgtgatcccactatttcgacaaattggtagatgcctcaatagcttacactttcaggtagctgaacgagcactgtttctgtggaacaatgatcatattcgaaatttgatcttacaaaacagcaaagtgatactgcctataatcttccctgctatggagaaaaatatacgggaccattggaatcaagctgttcagagcttgaccatgaatgttagaaaaatattctctgatgctgaccaggcactttttgatgaatgcttgaagagattccaagaagaagaaatcaaggatagggagaagcaagaaaagcgagaatccatatggaaacaactggaagatgttgctgcagctaatgctgtaagcagtgaggccatccttgtctcaaggtttgtgtcctctgttgcaattgctaccagtgcgaatcaattggcaactgcaggtggttgagagccatcagagatccaaattgtttgttctgatcccatgatgaggaacaaaggtgaatgggggttgatgtagatatcaggctgctccttgtttctgggctttttcgtctccatcatctgttctggaatcatgggttgtactatgtatcataaggaatgtagtttataataggcagtgtttgtttagaagtctagccattgagattatgcagtgatacaaaaacaatccttttcttttgccatatttatgtaattttaacattagtaaaatttctatttcttttagccttttgcagtgccataactcagtttgttgagaaggacgtcaaactagccgatactgtggtaagaggccttttgaaatattggccgataactaatagtgcaaaggaggtaatgttccttagtgagttggaggaagttttagaggcaactcaagcagcagaatttcagcgatgtgtgatcccactatttcgtcaaattggtagatgcctcaatagcttacactttcaggtagctgaacgagcactgtttctgtggaacaatgatcatattcgaaatttgatcttacaaaacagcaaagtgatactgcctataatcttccctgctatggagaaaaatatacggggccattggaatcaagctgttcaaagcttgaccatgaatgttagaaaaatattctctgatgctgaccaggcactttttgatgaatgcttgaagagattccaagaagaagaaatcaatgatagggagaagcaagagaagcgagaatccatatggaaacaactggaagatgttgctgcagctaatgctgtaagcaatgaggccatccttgtctcaagatttgtgtcctctgttgcaattgctaccagtgctaatcaattggcaactgcaggtggttgagagccatcagagatccaaattgtttgttctgaccccatgatgaggaacaaaggtgaatggggggttgatgtggataccagactgctccttgtttctgggcttttttatctcatcatttgttctggaatcatgggttgtactatgtaccataaggaatgtagtttataataggcggtgtttgtttagaagtctagccatcgagattatgcagtgatacaaaaacaatccttttcttttgccatatttatgtaattttaacattagtaaaatttctatttcttttagccaaaaaaaaaaaaaaaaaaaaaaaaaaaagcggccgctcgaattcggacgcgtggcgggacgcgtgggcggacgcgtgg

SEQ ID NO: 77855 - DNA, 1052 bp, Glycine max
  unsure (1)..(1052): unsure at all n locations
  Clone ID: PAT_MRT3847_4131C.1
tgagctattagaaggatacagatttatgagattttacactaaggaaaggatatattttgtgagacaacattgagatttgtcatattgcaaaatgattagtagattaatatacacatataatcagcactgctgctttggcaatccaataaatagttctgtatccacatctaaactctggctacttgaacagtggggttctgcttctgcttgtgtgtgtctaggccattgctgctgggatgacttttctgccctctgccacattgcacttaatttggcattctctttgagcaagttactctcctgggatcgtagttgatcaatctgttccgtatatagttgagtttttctctgcctgactctttgcaaacttatctgcagctgctcctcaattcctttgagttcatcataagaacaagaactcacgctttgtcccagaagctcccttttagaatgttctagaagctcaatcttctttgccaagcttgcggagtctaacttcagttgctggatataatagttgacaaaatcttactgccaggaacatctttggtatgttcacggtatcgttccaaaatctttgtcatgtcagaacttgagaactcatagagccttccgttctgtgagaagactatcacagccacttctgcatcacaaagaacggataactcgtaagctttctttagaagaccacttcgacgctttgaaaacgccacttgacggcttgttgtatcctcaatcttcttcagttgaacctttcccctcgccatctccaaaaattagcaagagacgtcttcaagaagagtttccctttaatttgtgttctttctaaagcaaatatcttcaggttgaagtaatgaaagaagagaaagtgtagggagtggtagaaagaagtggcaaatattccagaaaccctaatcacaaaaacaataaaaatgctaataaatatcatttgaaacattatcaacacacggttacgtgtcaagtatcaaactatgactgtctgnattgtcactacgtccaaaaagctgtaaaccacaagccatgcactgaca

SEQ ID NO: 77856 - DNA, 643 bp, Glycine max
  unsure (1)..(643): unsure at all n locations
  Clone ID: PAT_MRT3847_41320C.1
gcaaatttcctgtgaccaatttccctctttttaacttcactctccccaattttcttccactcttgtagcatcttctcactcttattctcaatgtaagttctttccacttcttcattccttcaatttcttcacgccctatcgcatgcacccacaatccgtgaatttatgagtacaattttcagtgatgtttttcgaggtatgggtttcggattagggtattcgggcatgcttaaatcgcaccctcccacgtgtttcattagctgttttcgataatgttattgatcgaggttgtgaaagtttgattcatttgtagatagttggggttgttggttttttttttttttttttttttttcaggttctgggggtgttctagatatgattaaacagatattcggtaaaattcctcgcaaaccctcaaaatcatctcacaataattcaaacggggaaggagggttcaatgatggtttctcactgaactcatcttctaataataccctcttgaagtccaattcagtttcttcaaaatcttcaagttcttgttcagttgggtctcgttctgggaatgagactattgctcaatactattcaaatcaatctaagaaatcagctcctacttcaagttcantaatggcttcggcagc

SEQ ID NO: 77857 - DNA, 566 bp, Glycine max
  Clone ID: PAT_MRT3847_41321C.1
atcatagctaatatctgaaactgaattcattgtaacaatagtcaacacttttagaaatagaacttcgcactcttctctgaaaatttctctctttagtttctatttcacccattccaattgtaaatctatttctatttttgttgtaaataataatgtttactctgctgtaactgtccattctctttttgcatgccatctaagactatggcgtcccaatctcaacgtcatgagaattgtactacaacaatgaaatattccagtcatcaacaaaagcacttttgaattttgttcagcctggtgtgttgaaaaaacacattgactaccttccttttcttctagaacttataattcaccacttgcattagtatataatgatttgtggtgacctgcccctctattatccctccaacaaatttctgtattgttacttctgttgatgcttattctagattcacttttatctacatactcaaaaacgagtcagaaaccttcacttttcaacaatttaaatccatggctgaaacactgtttaatggcaaacataaacctcttcaaactgattgggg

SEQ ID NO: 77858 - DNA, 209 bp, Glycine max
  unsure (1)..(209): unsure at all n locations
  Clone ID: PAT_MRT3847_41322C.1
gcaccagcggaaaatccaagaaagacaaaaagttcaaaccaaagaatgacatgcatcaccaagtgacccctctttctgagctaatttgctgagccaaccaatgccaatcnatgtcctttgtggggacanncgagttcttggccgngnagatctanaaggtggaaggggngggagngcncgtgacttngtgggactttggggattttctt

SEQ ID NO: 77859 - DNA, 473 bp, Glycine max
  Clone ID: PAT_MRT3847_41323C.1
catagttttttcatcaccattaattctttatttttgtatatatattttttattgtagaaaaaaattatataactattttaatgcattattaatgttaaaaattcgtatcaagatgatttatttctaaatgattaatatattttttagaatatttaatgatttaattgcatttccctatttcacaattgcttgtattggtagcataattaattgtcgagagtgaaacaaattgtaataacacaattatgatgttgtatatagacacatatgtctaacatactattttaatttttttgaaagaaagacattttaagactattctctagaaaatcatcataaaattctcaattttgattttttttaaaaatatattctaagataattttttgaataatcatcttagaaaatttacattttaagatgatttttgaaaaaatcgtaccagaattctcattctttgaaaaaaaattcta

SEQ ID NO: 77860 - DNA, 273 bp, Glycine max
  Clone ID: PAT_MRT3847_41324C.1
gggtttttcttcatcggccatttatttttttcaaaaacaaaacaaaacaaagcaaaaccccaaaacaaaaacctttaagtattccatccagtaatttaaaaagccatccacacttgggtcaaggatgggaacaatcaagttcacactcagatttttattgtccgtagtggagtgaggggctgaaactcagggcactaaggaggggccggaggcagatgttcccaccccctaccccccggtgggaccaacaagggtgtttggggaagggaacac

SEQ ID NO: 77861 - DNA, 697 bp, Glycine max
  unsure (1)..(697): unsure at all n locations
  Clone ID: PAT_MRT3847_41325C.1
agaggagaagagaaagttagagagagaaaaaagaaaagaaggaatcaggttagagaaaaggaggagaaaaagtaagaagaggaagaagaaagggctacggtgccaagacccaatgcccaaaaatcatttgcacgtgttaccagagtttgtaggccaaagaagagaaggtgcaaaaagctgctgatgaactcgcttagcgaggcagattggctaagcgagtctcattcgcttagcgaggcagccagctcgcttagcggatgggaaaccctagaagaggataagtcagagatccacgccctcgacacgtgatcagcccgcccagcgaggatgtcgtctcttctcgcgttcagcgcgcccaagctcgcttagcgaaagctgagcgagccttcgtgtgctaagaagtccaagagactttaaaacactgagattaacaaaaaatgaaaggtcaccaccaccacaacgacaatctagcaagcatttgctacatgaaaaacaaggagaaatagggaagagaagttggagaagacattctccctcatctttttccattttatttcaccaaaaacattttctttcttgtttgtatgaagctttgcttgtaatggaaggctagaacttctttgttggggagtaactactaaaaactcttgatgtaatgttctaactatctatntaatgttattttctggtgttcttt

SEQ ID NO: 77862 - DNA, 306 bp, Glycine max
  Clone ID: PAT_MRT3847_41326C.1
gatagctggctgtgagcaattgtggtttcacagaacgtgatcttatcaactatggcggagaaacacaacatcaagaacccagccgtgaagcggattctccaggaggtcaaggagatgcaatcaaacccttccgatgactacatgagcctccctcttgaggaaaatatatttgaatggcaatttgcgatcagggggcctcgtgatactgaatttgaaggtggtatttatcacggacggattcagctgcctttagaatatcccttcaaacctccttcgttatgttgctcacacctagtggccgtttga

SEQ ID NO: 77863 - DNA, 294 bp, Glycine max
  unsure (1)..(294): unsure at all n locations
  Clone ID: PAT_MRT3847_41327C.1
gtacgtaaactcanaatcnncctagctctctggagtggcggggtctctctgactagaatgcctctattctgctctgccggtcacacacagcgatagatggattatagagaagagaacccttcctaggcgcctcattgtgactgagagagaagtctctgttgtttctacttttccattttttttggagagggggggagagacagatctgattcttcaccagagagtgtcattcgtttgccggtgtgactgcaggcaagttgacacgaagggcattgccatttcaatcccatacaa

SEQ ID NO: 77864 - DNA, 1196 bp, Glycine max
  Clone ID: PAT_MRT3847_41328C.1
cgggtgcggccgcccgaggggggggggggatactttccccctcaccatttgagttcatatcattcgtcttcttcttccaacgtgaagcaatctctgtgttcgaaatggctcgtacgaagcaaaccgcaaggaagtccaccggaggaaaagctccgaggaagcaactcgccacgaaagcagcacgcaagtccgctccggcgaccggcggcgtgaagaagccacaccgtttcaggccgggtacggtggcgctgagggagatccgaaaataccagaagagcaccgagcttctcataaggaagcttcctttccagagactcgtaagggaaatcgctcaggacttcaagaccgatctccgcttccagagcagcgctgtctccgctctgcaggaagccgcggaggcctaccttgttgggctgttcgaggacaccaacctctgcgccattcacgccaagagagttaccattatgcccaaggacattcagcttgctcgtaggattaggggcgagagggcttagggtttgttcgtgtgatgtacaaagctgtagtactttcttagtgttattgttttgtaatcgattatgaaacttctattttcactgtgactggattggaaaatcatttgtagtatggaaagtgtcagtggtgaatcttgagaattacatcgtctttggtctttaatctggtaatataatatcccttctagtaagattaattgggattttgaaagcaattaacagataataatttttttttctttcctaaaatatagtgtgaggctttgattctcaaagcaggtaaaatttgatgattatgctttggaaggatttaatcattgattattaattgagagaatatgaaagttaataacgtacctatatggactgggcttatttttgtgggccgatttatgcaattacttgtagcggagctcattctattggcgggaaagaggttttagcagagaggatagtatattttcccttttgtttttgctattgtgatgcaaaaactaagatgtgaacttaaagctcgagaaaatggaaaaaaatacttgggtttcacataaacaaccaattggagaggttcagccccttcgaaggtaaatttgttcttcgtgtgttcgatttctgtttgttgacataggtcttgagatttgttatgctataaactttcatttggaggttgcattggaagag

SEQ ID NO: 77865 - DNA, 188 bp, Glycine max
  Clone ID: PAT_MRT3847_41329C.1
ggggcctcagtagcctctaactcactgtgtctgcatgagcatgtggcctctccgtcgcttcaccggtggcgaacccagtgacccagggagacgtggggtgtgctgatgctgctcgccagcccaccagtgcttggtcaggctgccccttccctggacagggctgttgagatggctccggcggcttgggg

SEQ ID NO: 77866 - DNA, 450 bp, Glycine max
  Clone ID: PAT_MRT3847_4132C.1
ctgagagcgtagacattgtcgtctgacattgtccctcaatctgtttacagttagggcatgctaacgatggacaggttgaggttcctcatatggagctaatattgagcagaatagtagttgctacttgatatgtgctgaaagaagagtatagctatctgactagtatctaaccgatacatggtactggctgagattgatcacactagacgaagggcttctactaggcatgcagtgaagcagcatactacacatatgggacagacgagtggtgacatgacaccttgtgcttcatctcatgcaatatttgatcccgctgatgcatttgctaggacatctgacatgatacctccccctctcatacaagggatactcttggctcatacttgacaaactacatatgctagggcaagacataccatcgatatcctaccaactatgagctgtgctatt

SEQ ID NO: 77867 - DNA, 1165 bp, Glycine max
  Clone ID: PAT_MRT3847_41330C.1
gaattttgccccaggattttctgatggactgatcctagcagtaaaaaggatgaacagaatatctgagcagggggacgatgagttctgcagagaaattgaacttcttgctcgactgcaccatcggcatcttgttgctttaaaaggcttttgcattaaaaaacgtgagaggtttctgttgtatgagtacatgggaaatggaagcttgaaagatcatcttcattcccctggtaaaacacctttaagttggcgaactagaatccaaattgccattgatgtcgccaatgcactggagtacctccatttctattgcgatcctcctctgtgtcacagagatattaaatctagcaacactttactggatgagaactttgtcgctaagatagccgattttggccttgcacaagcttcaaaagatggctcagtatgctttgaacctgtaaacactgaaatccggggaactccaggttatatggatcctgaatatgttgttactcaagagctcaccgagaaaagtgatatatacagttttggggtgttactacttgaaattgtgacaggaaggcgagccattcaaggtaataagaatttggtagaatgggctcaaccatacatggaatcagacacaagattactggagctagtagatcccaatgtgagggagtcttttgacttggatcagctccaaacagtaatctctatagtagcatggtgcacacagagagaaggaagggcaaggccttcgataaaacaggtacttaggcttctgtatgagacatcagaaccaatgcacagtgagtttctacaagcagttgaagatgaagaatgtcagggaagtcagcacagaggcagaagaagcaaggggaaaatgctcagaaatgaggcattgtctcacagcggagatggaagatatcttgcttcatcttcaagtacgtctaggtcgtattgcagtagaacctttttacttgagagtggctctccacagtctccgccaaatattttctctctctgaaagtctttagatccttcaagttgacttcaattttgcatttctcatttactcactgacttgtggattttttagaagtaggagaaactcttttaaggtgtccatatattaaaatctttggataaatgagaaatatagtgctttctttgcttttatcaa

SEQ ID NO: 77868 - DNA, 426 bp, Glycine max
  Clone ID: PAT_MRT3847_41331C.1
ccctcgcgttcggaacattctttcatggcggttatcagggtgctagcggctgcgatcatgtcagcggtgcttgcggtggttcttactgtggacgccagctacgactacccattattctcgccgtgcacggacacccgagtgcagagagccaacggattcacgttactaattgggttcgctccgaatgacaaggctttatacgacaacaactacagccttgactggtagccgagctgaccaaggctctttctctccagtgcgaactatcagctctggaagacaagacccacggtccacgatacttggatactgacccttgatgaataatgattcacagacgactgataccgttatgaccttgcatccgctggacacagatatgcagcaggatcacctcctgtttttgttgcagacggcacatttact

SEQ ID NO: 77869 - DNA, 445 bp, Glycine max
  unsure (1)..(445): unsure at all n locations
  Clone ID: PAT_MRT3847_41332C.1
ttttcttntatttttcttttcttttttttggggctggaaaaaaaattggaaaggaacttcccttaattaaataggaaaaggttttccccaattaacccaaggaccatggtccaaacttaattaacccaaccttgttttttggccctgggcccaaacccgcccaatatttggttgggttggacctccggaggattttggcaataaattattagccggggaatcccaaggaatccctttttttctcctcccttttttggtttgggaaaccggaccaaatccggactggtaaggaaaaattggcttcaattaaaaagggttttgggttctggaaatcttagaattcggtttggttaataggggggggggggacggaaccttcccccaagggggaccaaggtgcaattggggtggaaatattaaggaccccccacggatggtaattttc

SEQ ID NO: 77870 - DNA, 435 bp, Glycine max
  Clone ID: PAT_MRT3847_41333C.1
cggctcgaggtttaacggctctccgttctacgcgaacagcgcccccgcttctactgtcggatttcgtcggaacaccacttcgcagcagccccctcgtccacccgtaccgctcttctccagtagcaccggaaacgtcagtcgccacaagcaccagaggaacttctcgaccggcaccatgatgcaagacaaggaaatcaacatcgctactttcgagggcgtcacgcccttcgacaccctcaacatggtcgacttcgactgggatacctacaattctgcatcgggcttcacctcgatcaacgactcgatggtcggttccatcggaactgcggccactgtgtcgcccaaggatatcttcaacgatccgctcgcgtcggctcctccctcgtctgctttcacaaacctgacgtccccctccatcaacgagtcaccttacat

SEQ ID NO: 77871 - DNA, 314 bp, Glycine max
  Clone ID: PAT_MRT3847_41334C.1
tcggccaccccttcctaccggttggagaagaccaccgaaggggtcattaatttaagggaatcgatacttttcttagaataaaatggtccaaaaattaaaattttaattattttaattttaaaaggaccaaccccaattttattgggattggcccgggatttaaaaaaaaaaatggaaggtgaccaattaaaaaaggaaggggatggtttgaataaaaaaaattccccttcaagttttatttttttggagggccaggccaatttgaatgtttaattttgctttttcacccctttaaaaggattttttgttttttt

SEQ ID NO: 77872 - DNA, 566 bp, Glycine max
  Clone ID: PAT_MRT3847_41335C.1
gaagaatgctccgttcaactccaattccggcaccgtacaattcggtgccagttctctctcgcgcccgcacgtgtcactctctagcacctgcacgtgccgttcattcccattcctctttcgtttcgcggctcgtgttcccacaattccggcaatacatcgtaaatgttcccggccgagtgtttgtcgcggcagccgcaaagaagcaacggcgcggcggcgctgaactcgctgtaacggacgacggtttcgacgatgacgaggagtacgacgacgacgatttttatgatgagtacgatgatgatgatgatgatgaagaagaagagtttgatgatgatgaagatgatgaggggatgctttcattggagaagatgaataaatggtttgagaagaagccgaggggttttggcgaagggaaagtttacgacacttcggttgaggataagctgctcgaggaaatgcgccagagtagaatagcgcaggctgagaacttgaagaagcttatgagcaacccagtaaaacatgctttcaatgaaagtgttcaaaagaagaaagatgcagaacttgtt

SEQ ID NO: 77873 - DNA, 938 bp, Glycine max
  Clone ID: PAT_MRT3847_41336C.1
ggaatacttctctttctcactaacatcatatcactatacttttcccttaacatgactaggtaccacgatccctactactactacttgtgggaatacttctctttcccacttcacctcatcttcttcgtgttaatacttttctttgtgctagcattctcgtggtacataaactacgagtccttgttggaggacttgctcgtgcaggtgaagatcttcctcgccctcgtgccgctgctgctgttgctcctcgttcactgcctctcgagcggagcgtcgttccccataccattgccggaggagagggagtcgctgcacagagctggaggctctccatggggtgtggcactcttgcttctcttcgtgttgttcatgatggcataccaatcttccttccaccaacgttggtttcctttggctactagatgaggtgatgatgctctcaaggagttgcaagctagtgagtgtgaacctttctaattaatttgtgaaagagtcaggaaaaaattattacatggtccaagattaatacacgtaagaatcaatctttgtgtgacacatacatgtcattcaaagatagatcgacttaatgattcggaccatgtaataatttttcacaaattaaagaataattaagcatgattatgaggttacgtacttttcatttggattggggtctagtgggttataaccagtaggttaattaattactttagttttacataaaaatagggaatggtcatggttagctttgcccttattttgaattgattttccctcggctccgcatatgcatcttgagttacttataagagcaaattttgagctttggagaaaaatgaatcaacctcgtgtaacagttgtgtgtagattaaatgggttatgattatttttttcatgatttattaatattagaaatttttcctaaaaaaaaaaaaaaa

SEQ ID NO: 77874 - DNA, 420 bp, Glycine max
  Clone ID: PAT_MRT3847_41337C.1
tgttacagataatttgtttttcttttttttttcttggaaaaaccgtttccaatgccatttgaagctttaaaagtttaccaagcactttcgaataaaggtccacaacttctcataatggtccaaaagcaccggaacatggatagttccagaaaaagaactaccttccacagagctcggggagaaaaaaagcaaccccgtcgatgtaacagctctgggcaaggttgtaaccaatagatgttatcgttaatagccatttccttgagcagcctatgagccagtttcctgatattgttttcccaggggagaaagatctttacgagcttgagagaatgctgccttttaggtcccttatccaaaatgccagtgaacaaaaccctttttggcataggaggggtccaatttgtggagagagccaaagaa

SEQ ID NO: 77875 - DNA, 295 bp, Glycine max
  Clone ID: PAT_MRT3847_41338C.1
ttcgcttttccggaaaaagatcatcaagaaaatccggcaaagcttgatgccagatcgggtcagagaatagaacctcaagacaatgtggttcacgctcaggtggagacaaatttgcgtaaattgtttgttgatgatgtcgaacctcctaaaggtcccatggtggatcttacaattgctcactgttaaatggcacatctgacaaacacacggtggaggaaccaaactgggtaatgatgtattgccaaatttttcgacagaggggaattttagagcaagtgttgatttgcagggcact

SEQ ID NO: 77876 - DNA, 247 bp, Glycine max
  Clone ID: PAT_MRT3847_41339C.1
tccggctgtgagaagacgacagagggggacccctgaagcgaagaaaggggcgtccggttctgttgtggttggagatccgaattttgattattgaatgtcaaaattctgactcaatcaatcaatcaatcagtaataagatccttcaacccctgcaatggtctgtgagaggtgtgacaagatattattgcgcgtgataggaccagacaattggaaataaggggccatcaatattaccgagggtggcggt

SEQ ID NO: 77877 - DNA, 413 bp, Glycine max
  Clone ID: PAT_MRT3847_4133C.1
ctttccgatttctcacacgcttcgccaaaccccacaaccccttcccctccacgcgccggtccccactctcatctctccacgcgcctccacctcaccacgaccaacccaacctcgacgaccgcctcgtcctcgaccaactctcccaccttttccccacactcacttccaaatcccaaaaccctgttttccccaatccacacccaaatgcagcaaacgctgtcgatgcgtttttaccccccgaagacaaactgcgcggagtattcctccagaagctaaagggcagggccgcaatcgaaagcgcgttgtccaacgttgctgtcgacgtggacctcgacgttctcagtaaggttctaaaccatggaaacctcagtggtgaatccatggtccgtttttttacctgggcaattaaaaca

SEQ ID NO: 77878 - DNA, 384 bp, Glycine max
  Clone ID: PAT_MRT3847_41340C.1
ggaccggtcgaattccggttgccacgcgccgcttatcctaaacgaccaaacctaattctcattgcgtgatagtttgattcttctcctcctaaagatgcagatcttcgtgaaaactttgaccggtaagaccatcacccttgaggtggagtcctccgacaccatcgataacgtgaaagcttagattcaagacaaggaagggataccacctgaccagcagagacttatttttgctggtgaacaagtttggaggtggtgttaaccttggccgccttcaccaatccaaaaggattccattttccaccttgcgctttgcctcaggggtggcatgcaaatctttgtcaagactttgactggtaagaccattaccctcgaggtcgaatcctt

SEQ ID NO: 77879 - DNA, 502 bp, Glycine max
  Clone ID: PAT_MRT3847_41341C.1
agctcggaattcggctcgagctttctttgaagtgtgaaaaaaaccttatagaaaagatgatgcgatcagaggatctgcaattccaatggccattctttgaagacatgaactcaacttttgatcaaggtgttgagtcctatggcttcaccaccatgtatggccacgttggtgattgtggaccttatgacttcactatgaatgaccatgttggtgattgtggactcaatactctattgagcacaccagaggattctacttctgaaatttgttccatcccctttccttcctcccccattttctccattgatcatattcatatccaatacccaatcaatgaagaaaccatgcaccttccatcactcatggaattggatgattttgattccatcttggatactcaaattattagtattcaaggtcatggagaaagtgaagggagcttcttcccttcacagaatttctcgagtgaggtggaaaatgcatggagtccaaccccatctgg

SEQ ID NO: 77880 - DNA, 528 bp, Glycine max
  Clone ID: PAT_MRT3847_41342C.1
ccgtggcagtggtagttgccaaactagtagcaagaagtaagtcacgtttttctccgttttcattcatcacaatattaaagcttttagtttccttcagtatgggggacacttacgttttggccacaccgaagcgcaaccgtcctcctccagctctgcagccacggcgaacacgtggtcgcctccagaactctctacggtgggacccacgcgctcctctcacactttctcccgcgcacgtgcggaatatccactagcttcgtggaggtgacggatcttgacatggttgatgctgccatagtagaagggaaaacaaaagtgctttacttcgaatctgtttccaaccccacccttacggttgcgaacatacctgaactgtgccacatggcacaccggaagggagtgacggtggtggtggacaacacgttcgcgcccatggtgctttcgccagcgcgtcttggtgctgatgttgtcgttcacagtatctccaagttcatcagcggtggggccgatatcattgcaggagcggtg

SEQ ID NO: 77881 - DNA, 1864 bp, Glycine max
  Clone ID: PAT_MRT3847_41343C.1
gctgttataggagagggaaacacaacagcatggaagatgtgtggccttgacaagagtacatgcttgactgtgatgtttgatctttcatcaagtgatcgttcaaacacccctggtgctatcaacccacaattgtacctacagttccttacaagttaccaggacccaagtggtcaatcagtgcttcgtgtcacaacagtaactagaagatgggtagatagttctgttagctctgaggaattggttcaaggatttgaccaagaaactgctgcagttgtaatggctagatttgccaaactagtagcaagaagtaagtcacgtttttctccgttttcattcatcacaatattaaagcttttagtttccttcagtatgggggacacttacgttttggccacaccgaagcgcaaccgttccgatgacgtggacggcggcgaggcgaagaagctgctgttgcagcagggcgaggcagacccggcggcggcgctggcgagcgcgcggcacgagttcggggagcacggcggggtgaacatgtcgatcgaggcgtcggcgacgttcacggtgatggagccggagacgatgcggcgcatgttcgccggagaactcggccccgaccgcgacttcttcatctacagccgccacttcaacccgacggtgctgagcctcagtcgcctcatggccgccctcgaaggcaccgaggccgcctactgcaccgccagcggcatgtccgccatctccgccgtcctcctccagctctgcagccacggcgaacacgtggtcgcctccagaactctctacggtgggacccacgcgctcctctcacactttctcccgcgcacgtgcggaatatccactagcttcgtggaggtgacggatcttgacatggttgatgctgccatagtagaagggaaaacaaaagtgctttacttcgaatctgtttccaaccccacccttacggttgcgaacatacctgaactgtgccacatggcacaccggaagggagtgacggtggtggtggacaacacgttcgcgcccatggtgctttcgccagcgcgtcttggtgctgatgttgtcgttcacagtatctccaagttcatcagcggtggggccgatatcattgcaggagcggtgtgcggacccgcaagactggtgaacgcaatgatggatctgcaacaagggtcactaatgctgctgggtccaacaatgaatgcgaaagtggcattcgaactctcggagagaataccgcacctagggctaagaatgaaggagcatagcaaccgcgcactagagttcgcaacgaggctcaaaaggctaggaatgagggtaatatacccgggcctggaggagcacccacagcaccagcttctgaaatcaatgcacaacaaggactatggctacggcgggctcatgtgcgtggacatggaaacggaggagagggccaaccgcttcatgagccacttgcagaactacggccagttcggcttcatggctgtgagcttgggctactacgagaccctcatgtcctgctccggcagcagcaccagcagtgaactcagcactgaggagaaggagctcgccggaatctcgccggggctcgtgaggatgtcgattgggtacattggaaccttggagcagaagtggagccagctccaaaaggcgctcactagactaaacgactctggatacaacaagatcgcttgaattgcttttctcatcatgcacatgcacatgcaccctcgtcttcttcctgctcccataatgttatgttatctataataataatttatgctcatctttatgtcttgtcttgctactcgatcgtgtctcctgtatcatggatatgaatatgaattgcctgtttcttttc

SEQ ID NO: 77882 - DNA, 388 bp, Glycine max
  Clone ID: PAT_MRT3847_41344C.1
cctcccacaccccctgattttgaaggggaattttgaaataaaaaaccaaagggccctttttaaatgggctggcccaaaaggtggggggaaaaataaaaaaaaggactatggttgggggggggaaatttttgccaccccttgaaattaaaaggaaaatcccccggagggggggctttaaaaaaaaaaacaagttttgcacagcttccccaaaaaaaagtttccgggggacctttggggtcgttaaaaaaagtttcccaaagggggggggtgggggaaaaattgaattcctgggtcgggggggaagtatcccccctaaggggctaaaatggggggttgcccttaaaaataaccctaaaatgaccccccagtttttttatttgttttttaa

SEQ ID NO: 77883 - DNA, 2398 bp, Glycine max
  Clone ID: PAT_MRT3847_41345C.1
ccacgcgtccggttaaaacagaaagaaaaaaaatccagagtgacagagtaaagatgcaggttgggaaataataactggcggatttaatccatgttaaagctggagcactatgtgtggctgtattgctgattgcaatatacccacgcgtccgtacggctgcgagaagacgacagaagggggcggcttggtttgttctacttgttcttacactgggattaggacgagacgtttctacactaacaataatacctttccctctttctcctttaccttcccccaccaacctcaatcattctctttccctaaacctctcagactcatgtctcagcctttgaccaccaactctgctgatggtgattcctccgtcgccgcacctcccatcctcttcgattatcatcttatcgaccaaaaacttctccaaaacatagtctacgatgctcttgtctggagcaccctcaactgcctccttgttggtgacaaatcagttcagagatcaggaacagttcctggtgttggcctggtgcatctcccgctttctttattacctgggccatttcctgaaaatcattggaagcaagcgtgcgaattagctcctatatttaatgaacttgttgatcgggtgagtttggatgggaaatttctccaggaatctctctccagaactaagaatgcggacgaatttacctcaagacttttagatattcattctaagatgctacagattaacaaaaaagaggacatacgcatgggaatagttcgttcagattatatgattgatgagaagactaaatcacttttgcaaatagagatgaacacgatttccacttcatttgctttgattggttgccttatgactggacttcataagagcttactttctcaatatggaaagtccctgggactagattccaatagggttcctgccaataatgctgttgatcagtctgcagaggccttggctaaagcttggagtgagtataacaatcccagggctgcaattctggtcgtggttcaggttgaagaaagaaacatgtacgagcagcattatatttctgcacttctaagagaaaagcatcatattagaagcatacgcaaaacgttgaccgaaattgatcaggaaggaaaaattctgccagatggaacactttctgtggatggacaagcaatttcagttgtttacttccgggctggctacacaccaaaggactatccttcagaatcagaatggagagctaggctactgatggaacaatcttctgctatcaaatgccctacaatatcttatcatttggttggcaccaaaaagattcaacaggaacttgcaaagcctggtgttcttgagaggttcgttgaaaacaaagaccacattgccaaattgcgtgcatgctttgcagggttgtggagtttggaagactcagatattgttaaaaaagcaattgaaaatccagagctatttgtgatgaagcctcaaagagaaggaggaggaaacaatatttatggtgatgagttgagggaaaccctccttaaattacaggaagcaggttctcaagaagatgcagcatacatccttatgcagaggatatttcccgccacttctccagcaattttggtgcgtgatggtaattgggatacgggtcatgtcatttcagaagctggaatatttggtacttatttaaggaataaggacaagattatcattaataacgaaagtggctatatggtgcgtacaaaaatatcatcatcttatgaaggaggagttttgcctggttttggagtggtagatactgtatacctaacttgatggagctaaccccccaagttatcaaagcaattcaaaacattatgtatggtttatatatcaccactcaagtctcctcactcctgattttctttgtatggaggcattgctgtttcttttaattgttcctatgggatggtgtctaattattaactgtactcaacgacctgtttgattctaaccaataaagattgatgaactgttctaactggtttatatattaccactcaagtctcctgactcctgattttgtttgtatatctccgaaaacagtgaaagaagaaaagaggcattgttgtttcttttaattgttcctatgggatggtgtctgtactcaacgacctgtttgattctaaccaataaaaattgatgaactgttcttctaacctgtccccgtcaatgagctctgtctctctaccccgtctacctctcctactgctgtttactgtttattatctctatatatacttggattcctttcgctttattaaactttctcacttgtcgcatcacaccctaaatacacactttacttagcttaacctttttactgttttagtagaatacaatacaactcatatataataatataatcttaaa

SEQ ID NO: 77884 - DNA, 497 bp, Glycine max
  Clone ID: PAT_MRT3847_41346C.1
ggctcgagaaaatatctcttccatacgagtagggaggcaaagtgtatgtgcctcccaaatcctactcttgtgaccacaagccttcacttgactctctctctgtctctgtgtctggtctctctctctctgtctctatgttgacacccttttttctgttctcagaccggaccatgcaagcaagtatattacactactcactcactgagaccgtgggtactaacatcgccaccgttaccgacgctcaggccaagggcgcccgcgggcgtggccgtgcctacgtgaccttgctagccggaaacggcgactatgtgaaaggagtcggtggcttggccaaaggtgtgatgaaggtgaaaagcgtgtaccctctggtgggtgcagtgttacccgatgttgcgaacatcaccgaaacatggtgaccttccaaggtcgcattgctagagaaggtgaacccgtgtaccctgctgagaatcagacgcataccgccatggcatattacg

SEQ ID NO: 77885 - DNA, 192 bp, Glycine max
  Clone ID: PAT_MRT3847_41347C.1
ggaggagggaatgggggtactcacaatccggagacatcttttcttactccatcgaagccggtgatttggattacacacatttttgtatttgacagctccacactaacatataatggtaacattacattcatcagaacggctgcattactgataaaagaagccatacaagccatcagtgggggccatgaatac

SEQ ID NO: 77886 - DNA, 241 bp, Glycine max
  unsure (1)..(241): unsure at all n locations
  Clone ID: PAT_MRT3847_41348C.1
anaatatatttttccgtaatctgaggtgcaacaaagacgatattagttgttgaatatggcaaaagcacacgtgctgatcttccctcttccattgccaggccatttaggctccatgntcaagctcgccgagcttcttgccctagacaatatccacgtcacctttgtcgataccgagaacatccacattcgcctnactcgtttcggggacattcaagaactctcagaatggcnaccccacgct

SEQ ID NO: 77887 - DNA, 329 bp, Glycine max
  Clone ID: PAT_MRT3847_41349C.1
gtttcgctagctcacacactaagttctgtataatgatttccaaaggttttcttatgctacgtatatccatggccactatacttatgatctcctctaatgctgcacccgatcacgcataccacaattttgacaaaacatattgcaagcgtattgcacttggtgccgatgaaagcatatattgtccttgcgcctatgtcaactatagcggttagcccattgagggatatcaatggccactaaccatcaagaagcttactcttgctgaatgttcacgttatctgaagcacctcgtatattcaatagacacagaatactatgtgtacaactat

SEQ ID NO: 77888 - DNA, 405 bp, Glycine max
  Clone ID: PAT_MRT3847_4134C.1
agcgcacaaagagctcctagcatgcacactagttgtcgtctgcgactgtgtccagtgtggtgccgctgaatgccggcctgccactcgattcaacgaagctgtgagcacattactgtgtgtggcgaggacaagtagactctccagggagcatggccactagtgaagttgatgtctcgtcacggcactcgctaggagaaccagagacttctgctaaccaaataatctggacaccctactgtatcggtgtcatcatcatagggtagaataaactagctactgctctggttacatctctttgataagagaaccttgatgaacagtactcattctgctgtattgctttccgtgatggtccatgcatgcttcttatctcgcccctaaggccgcgaaacggcccctaaagta

SEQ ID NO: 77889 - DNA, 273 bp, Glycine max
  Clone ID: PAT_MRT3847_41350C.1
caccaaggttgctcctcttgggcactggcatattttttctttcacccttaaattcattaattttcatacccattgaaccttcttttaacaatccataatcaaatttcccacctacccaccaatggcttaaaaactttcccaatttcatttttttttacaccaacattttacgggccacaaccttacagacgttaaaaatattataccattattcaaccatattctttaaaacaactggtttacaacccactttattattgaccatttttttaa

SEQ ID NO: 77890 - DNA, 427 bp, Glycine max
  Clone ID: PAT_MRT3847_41351C.1
ccgttggggttgtttgtttttttgttttttttttcttgcttttttttttttgtttaaaaattggggccccaaaattgttcctagggcgctcgcaccccggggggcccccaaaaaaagccctttataaattctgcattaccgcccccataaaagaaactgggggtaaaaggaagactcaccgggatggggaaaattagacaggaaaaaaaaaaaagacagggaaaaaaagtttaaagttttagggtccgctataggaccggtagcccctaggatgggaaattcgggggtcccagggctccccaaaaaagcggggcccaaaaagggggggggggcccaaaaaaaaagggcccccctggggggcacaaaccaatttcccccaaaaaagccggggccccctttaaggggccccgggggacacttaggcccc

SEQ ID NO: 77891 - DNA, 286 bp, Glycine max
  Clone ID: PAT_MRT3847_41352C.1
tacagtgtttgtgtccctggaattgtttacaaggctcttatactacacccctgtggctatccttgcctctatcatcctctctgctcttcctggattaattgacctaagtgaggcttgctatatctggaaggttgacaagttggactttcttgcttgtattgatgcttttcttgaggtgttgtttacatcacgagagatgggccttcttgttacactaataatatcttttacaaagatactaatacaatcaattcgacctagaatagaatttctaggtagagtgtcc

SEQ ID NO: 77892 - DNA, 750 bp, Glycine max
  Clone ID: PAT_MRT3847_41353C.1
agacagacacaaagggccaaacccaactaaacactttttctctgacacccaaacagagaaaacaaactaaaatccccacttcacttttcaaacttatctggctcaccgaccaatgtccacaaagaggcacaatcaaagcgccggcatgccggttcacccgattgaggatcttcccggagctccgttcggcgacgcgggttcgagtttctccgaatcggagctccgggagacggcctacgagatcctcgtgggggcgttgccggagttcggggccgaagccgctaactttcatatcgcagtcggagaggggggatcgggatagagcggcgccggcgccgtcgttgcaccggtcgctgacttcgacggcggcgagtaaggtgaagaaggcgctggggctcaaaacgacgtcgtcgtcgagggggagtagcaagcgcgcggcgacgagcacgggggagttggtgagagtgcagatgaggatttcagagcagagtgataccagaattagaaaagcattgctcagaattgctgcaggccagcaatgcttggaagacgcatggagtcagtgggttcttccactagagcttatacaactgttcagagttcagattttccaagtcaacaagagtatgaagcttggttgagaagaaatttgaaggttcttgaagcaagactcctcttgcatcctcatcttcccttagataaatcagacccttctgcacagagtctacggcacataatccgcggagcatt

SEQ ID NO: 77893 - DNA, 252 bp, Glycine max
  Clone ID: PAT_MRT3847_41354C.1
tacgcgagaagacgacagaagggatcctttggatggcttgtcatgagagaatggcaactaaagatagattaatgcgatttggaatgctcaatgatgatacttgttactgtaaagaaaaagagatcattcaacatattttcttccaatgtaatgtgttgagtcatctttggaaacacatccttaaatggctagaggttccacattctccgggtggttggaatgaggagttggattggattattaagaagtgca

SEQ ID NO: 77894 - DNA, 403 bp, Glycine max
  Clone ID: PAT_MRT3847_41355C.1
aaaaaaacaaaccgggaaaactgccttttttttagggggattgaagggcaccccccccctcaaatttaaacataggctccctgggagggaccagggcccatttttttttttttcaaccaaaattttttttttgggttttttttcaaaaaagggcctcatcctcaccccataaggctgggattttaggcaactttaacccggggggagccttgttgaaactcagggttgaccaaaggaccccattttcttttttttttaagctaaaacccttgactttgtcaaaggttgtaaaaatgggcaaaaccctttgggggaattgccctaaacccatccttaaagaacctaaggactgccttggggggggttttgaatactttgttttcaaatccttgttttccgggtt

SEQ ID NO: 77895 - DNA, 413 bp, Glycine max
  Clone ID: PAT_MRT3847_41356C.1
gcctgccgaccggacggaattccgggcacccaccgttcttttacgcgtgggctcaggaatgtgttcccaggacctattgtgttttgaatccacaaaatccttttgtgttaaataggtggatgggaaaactgactttcccccagggcgcttgccgaagtgttaaaagaatgcctctttctatagggggaggagctggtgcaaagaatgctattctcatgaatatgccaaatgcgggtcttttaatgcggagatattttggtggaaatctcggctttgccgtgtttaagatgacttctccctacactaaatgtacagggtgtttttttatagcagtgggaaatttggatgatgacaccataaattttgaggcctttacccacaagctggcgccgcctggagagattcatgaaaaa

SEQ ID NO: 77896 - DNA, 1095 bp, Glycine max
  Clone ID: PAT_MRT3847_41357C.1
ggctcgagcacgagccgaattcggctccgaggctttgtttacaagtcctcctttctcacagctaggtggtggtgattagtgtacatatatatatggttgaagtgggtatttatcagatccctacgagcactttcgacccatttgcggaggcaaaagaaacagatgctcccggggcaaaagagtatgtgcatatccgcatacaacagaggaatgggaagaagagtctgaccacagtgcaagggctgaagaaagagttcagctacgagaagatcctcaaagacctcaagaaagagttctgctgcaatggcaatgttgtgcatgacaaggagcttggcaagattatccaactccagggtgatcagcgcaagaacgtttctcacttcctcattcatgctcgccttgttaggaaggaccagatcaagattcatggtttttaacccactaccactagctaccacctttcttctattatgaaattaaacctatggcagcgtttatgaaataagtaaggagtttgagtttggaatattttgtcattttctttctgtatgattgaaaatccaagaatagtctttgagagtggttatatatattactacttcatgttgtgctttcatggaccaaaaaaaaatcttgggggcgccccccgatgatgccccgcggcggcttctggaggaagcctcttaatgaaacttctagagaaagctacatgaagctgcctcggtaaaaacgctgcccagccttccttaaccgttggatcttctcaaaatttggtcttcaacttcacaagacacttgtccagaatctgaccgttgggatctttgagaagatgtttggagtgtgttagaagcctcttaatgaagcttctggaggaagcctcttaatgaagccacagtgcaagggctgaagaaagagttcagctacgagaagatcctcaaagacctcaagaaagagttctgctgcaatggcaatgttgtgcatgacaaggagcttggcaagattatccaactccagggtgatcagcgcaagagcgtttctcacttcctcattcatgctcgccttgttaggaaggaccagatcaagattcatgggttt

SEQ ID NO: 77897 - DNA, 339 bp, Glycine max
  unsure (1)..(339): unsure at all n locations
  Clone ID: PAT_MRT3847_41358C.1
gggagacagagagaacagagagcgtttactacggactactgtcgggggggaggcggtaccctgacattgggtctaagcgggcctgggaatatgacagttctcacgacatcttcagaagcttgcccaggaatcttctaactgcccgctgcacggaaacccaccatacttcagggaggtgtagccggggtcngctgtgctgccggtgaattggctggccgccgctctggggtccngggcgggccggggtgctagtcttacctgctgttatgggcttgtgcgcgccgcgggtggctgtggtgtgcgccctgtgcgggggttgtgtgcgtggggggggggggg

SEQ ID NO: 77898 - DNA, 405 bp, Glycine max
  unsure (1)..(405): unsure at all n locations
  Clone ID: PAT_MRT3847_41359C.1
agcaagtgttgtggccacagcttaaggcaatctgtttaaaatttattgcaaatcctgcaaacttgggaggtgcgtatcgttttagaatatgaatgtaaaaatttttggttgtttcatttcaacttaagattcttttggaaataagcataatatgtattacagtcttgatgtttcctgacactttccttattaagtatgttttcttgtttctcttagtctctttaagttgataggagggtaagatgtttgatatgctatatggccaaatatcattatgagcgacggtaatctgttagaacttttgaatgggttatgggttaggttgtgtttctaattcattataatgcgaggaagttgntactgtgttttggtagtataatgtgaattttcttctttcttattcat

SEQ ID NO: 77899 - DNA, 528 bp, Glycine max
  Clone ID: PAT_MRT3847_4135C.1
aaaaaaaaacatatttgaaaattatacaacaaaaaccgaaaagggggggatcccttcgatccatttataacaccaaaggggcactataaaatatttttgccaggctaaaaaaaagaaaaagtcggaaaaaaggggatttttaattatcttcattttgatttctaaagcctattgcatcctttgcaccggaattaataattttttatcgggtaactatcctcgttaaacatttctgctctacaaggttttaaaacattttttttcccagcccaaagaaggggaaccggcctttatttttttataaggcttccaaagcatttttcgagggctaattagcttctgttattatttggaggaggtctaaaggagtagggggtggatccaactttaaacaatcctttggagcattataagctttttggccagaaagcaagtaattcggaacctgaggaaaaaattgaaacatttcctttttaggaataatcctttcccgatcacgggccatgtgcctttaaaaccagtcctaaa

SEQ ID NO: 77900 - DNA, 289 bp, Glycine max
  Clone ID: PAT_MRT3847_41360C.1
gatccattttcaaattccatcacagacaagtgggtatctgacttgtacatttgtaatacgccgagtgatcgattattcagagtcacaggtgttagttatggcgaccaggtactgcatggcgtctctgactgtgacaaaattccgatacactctctggaacactactgcaggaacagatgtgcaaacactacttcgacactgctgtctacagattcaacatccccaatctccgcgtcggaaccctagactgcctactctgcctcagcgacgataccgtcaagtcgaacag

SEQ ID NO: 77901 - DNA, 534 bp, Glycine max
  Clone ID: PAT_MRT3847_41361C.1
ggaattcggcacgaggctgagatatcaattagtcttaatgttttgcaacattacttcacaggaagccttaaggatgctgcaaagagccttggtgtttgccctactacaatgaagcgcatctgtaggcagcatgggatatcacgttggccatctctaaagataaaaaaggttaaccattccctgtccaagctcaagtgtgttattgaatcggtccatggtgctgaaggagcatttggtttgaattctctaagtactggttcacttcccattgctgctggttccttttctgaccctttcacttcaaacaagttccaccgccaaaccaccttgaccattaggccatcagaacctaagatcaacgaaaatgattttgatgcttctggagcatcagaaacaaaaagacaggttgcgatggaagatcaattccttggacttgaagcaaggacacgaagtcctgagaaagtgattaatgataaaggagtgtccattcaggagattggcactaaaggcacaaacaagtttagaactgggagt

SEQ ID NO: 77902 - DNA, 244 bp, Glycine max
  Clone ID: PAT_MRT3847_41362C.1
aacataccctcttaactcccacaaccacgcttatccacttcaaaaccaacaccttcggctaggctcaatctatcatagaggagcgcctaccattcgatacttacacagccaaaaatgctacaatcaacacattcaacgatctctttcagcatacatctcatgccactcacatacttatacaaattaacctcttgcactcacttaagcatactgataacctttaaattaaccatattatgcttcc

SEQ ID NO: 77903 - DNA, 543 bp, Glycine max
  Clone ID: PAT_MRT3847_41363C.1
ctttttcgccccggagccgctggccaacccgggcaggctggagcgaacggagttgtctcacgcccaattcctggcccgaagggaccgcctggagcgcctggccagaacggaaaccccggaagccaaggtcagccaggacagccaggaggccaaggaccgcccggacctcctggcgcgcccggtcagcccggccagcctggaaactctggccagcctggacagcccggagcaccgggacagcccggcaaggacagcggctactgtccgtgcccgccccgctcttccgtgttggcagtcaaaaagaagatggcggcagccaagaaagcataagcgacaagcgcagggagaagagaaccgaaagacaaaggaccgacgcgaaagcgaagctgaagatgatcataattgggtggaagttgttgtcggaatttgtgttcaccagcgcatttcccacacgaataaagggcattcactaaactaaaaataaaaataatctattctttcttttatcattttttcttaatataataataaaaaaataatatg

SEQ ID NO: 77904 - DNA, 222 bp, Glycine max
  Clone ID: PAT_MRT3847_41364C.1
cttatgcaaagctcaatttcaccttctgcggtaatacccagaagaagatagtgatgcttgggctattttctactggcgaaacgactatacaatacaaatatcacatttgataatttttatccaccgttcctacaattgatcttaatgtggagaaagtccattatatctttgttattttcacatttatattattgttagtatacttatttaattcttatttct

SEQ ID NO: 77905 - DNA, 108 bp, Glycine max
  Clone ID: PAT_MRT3847_41365C.1
actgttacattactacacaatgttatcgtttacaccccgactgcttggaatgggagcacacatcctccctatatgtccctcgccagaaccacacaatcatatcttcta

SEQ ID NO: 77906 - DNA, 229 bp, Glycine max
  Clone ID: PAT_MRT3847_41366C.1
cagctgtcctctgtttcactttcccggcctgcctctttgttgccatgaagggcttctacctatggctggtggtcctgcctgcatgctagctggctcacggccagtatgacctgtaccctcttccgtctttctctgaccactaccagttcacccactatatctaccagatcgacaacccatactactatgattattatgaggtgactccttatacttccgaggaacattt

SEQ ID NO: 77907 - DNA, 898 bp, Glycine max
  unsure (1)..(898): unsure at all n locations
  Clone ID: PAT_MRT3847_41367C.1
tatccaaatgcttttaaagacacttgtgctcacaaatgcatcaaatgcgggtgttgagggtgcagttgttgttggcaaactattggaacaggagaatcatgatctaggatatgatgcagccaaaggtgaatatgttgatatggttaaagctggaatcatagaccctttgaaggtgattaggacagccttggttgatgcagccagtgtatcatctttgatgacaacaactgaagctgttgtgtctgaacttccaaacgatgataaagatactccagctatggctggtggcatgggtggcatgggttattaaccagcttctattgatttggttgcacctgaaaacaaggattagtgctgaatccccacttactgtcttttttttttggggttaaattatttgttgtgtgaggcatccctgtaatcatagtgagagatcaagatgtaggtaaggaaatgtaactgcaataaataagatatttggagcaattttcacctcccaaatcaaggccattgttgttccctgaaaagttgtcagtttgaaggatattcttgatatatttctaacatagtatggtccgttcacatttagtacgtaaattttgttttggaattcataacaaaaaaaaaaaaaaaaaaaaaaaaaaaaaaaaacaaacaaaaaaaaaaaaaaaataaaaacagccaacaccaacacatgatctaaaaaactcggtttaacaccccattaaatttatagtggggcccttantactcatcaaaaacggcataggtgttctgtaggagaaaagaactcatcctatacggaaaaatacactccaatgaatctttggaaattgccacaacttatttattgctttttggcctttttatagggtgtgtttttcttgcctctgaccca

SEQ ID NO: 77908 - DNA, 405 bp, Glycine max
  Clone ID: PAT_MRT3847_41368C.1
atgaggttttctatttctaacgcgaacacagcctcactgacatggcgaggactacgacgactcgaaacggatctcaagttacgagcagaggattgatgacactcgcgaacaaccgactaccctgactgctgaaaggaaacctacagaaccgacgcgagaacttcctaaggagaaagagcacagaaagaccctatggggacgccaaacctgacttccaagacactcagcatgaatgcaaccatgacaacaccatggacaacaaaagcaccaaagaacagatgagagcccatgctcagctaataaaccatagggcgacaaaaatcacaccaaaggaaccacaaggggcaccggcgaaccatatgaacaagaccatgaagcaggagcatgctaacaaagaagaatacc

SEQ ID NO: 77909 - DNA, 326 bp, Glycine max
  Clone ID: PAT_MRT3847_41369C.1
gggaattgttttttgaaaattaataattgattcctaagaggcaactcttctacgatgaacaatagcgtggggcttcccaacaggcagtgctatgtcaaaagagagagaatcagggaaatgcatacatcattcataagaggtgggccttattggtttccccctaagaacaggctgacctacactctttcatgaaatgtcaaagtaaactaatctatgacacatttatcaatcctatttactttcattaactaaaaccttacaatcttccattcttacgatcacctagaagctttctcatctattaacacccatgggggtgttaaatt

SEQ ID NO: 77910 - DNA, 227 bp, Glycine max
  Clone ID: PAT_MRT3847_4136C.1
caacacagagagggagatgcgaagagacaacgatgtgaaaccgtggtcatagtactacggcagggaacagcttccacatgtcgctgggtcggtcagtcgccgagacggtgaactgcggcctacgctccgaggcgacgacactctggttcagctccgatgaaaggactcaagctctgtcaacagtctacccacggcctacattggcgacatagtgatagccaccgtta

SEQ ID NO: 77911 - DNA, 789 bp, Glycine max
  unsure (1)..(789): unsure at all n locations
  Clone ID: PAT_MRT3847_41370C.1
gctagatcgtcatctgtccaagtagtgtcgcaacctgaaagtccttctccccttcaatcaccatcaaatgcaagttcagtcccagttgaaattcccgtaattttaaggacttctgacatgatgacagatctccctgaaacacagaaggaagaggcaaagtgcgtccggcctagacctggtcaagcagtcaatgagaatgctggggaatcatcactcctctggaactcagggttatgctgaacaggaactgcaaatgaatacagaaccaaactcaaaactagaaaaacagcatcctgcatcttgtagcaatgaagctggtcaaaagcttgatttttacctcgaaggacaacacctggatcataaattgactctatatcaggcaattcttcaccatataataaaaaaaaatgcagattctttttctagtgcaaaactgtggagtcaagtgcacataataacctatagaagggatgtagaatctgaggatgtaatacctccagaatgtcattcttcaccccagcatttctctgatgaaaaagttttagcttattatcagcatactccttttttctcagacatgttctcttgtgaactagtttctgatttggagatgtccagtccaacttatgatattttgtttcttcttaaaagcttggaaagcatgaacagaattatatttcaccttatgtcgcgtgaaagaatttgtgcttttgcccaagggaaagttgataacctggatagtctaaaaatacagttccttctgtnccacagatttgagttgtaagcagt

SEQ ID NO: 77912 - DNA, 507 bp, Glycine max
  Clone ID: PAT_MRT3847_41371C.1
atgtcctgcttacttgacaaaagaggacacctattactcgccctagggctaatgctctgcttcaccctgaccttcttctccaagggtgacacgatgggagggtgccctttgcttgcgaccctaggaacggcctcacgaggggagacaagactctgcaacactcacgtgcagatccacgcgaggttgcatgacctcataacgaggctcacaatggctcaaaaaactaagctattcattgacaatgccatcggatagcccacactcggcaaacagcgatacaagaggagatgggatgagctccacatccacaccaaagtgggccccctatccaatgtcgatggagcctaccctggcgcgcccatgttcattgacgacatctcaacacgatggttttattaatcacaacactgcggcacgaaattggacgggtggcgtctgatgaagaaagagctatggacaccgagggacatgctcctttgacagattaaagtgcttacgagaacattt

SEQ ID NO: 77913 - DNA, 644 bp, Glycine max
  Clone ID: PAT_MRT3847_41372C.1
taaaaccggaaaaaacgcgaaaaaaacgcgtggggttcagctacgtgaagggtagtaataattacgaagggagtaaaagttcgggtgtgacagcgtttgacataatatcgatgtcttggggtttggatttaacgaggttgttcgaaacgaagtgggattcgggaagtaaaagaaagaagaggttcacttcgagtgcaagagttaaggtggtggaggagaaggtgaaggaagtgggagggctgttggggtttaaggttgaggttggaaagagcaacggtgcaattgcgttgctcaaagggaaagtggctttggtttttgagctccttgagattgtgcctcatcaacttcttttagtggcggttaaggtgctggagggtgctttggagtttgaggaacttcattggggggattggaaacatgccttgcaagatctcgtgctctcttggcacaaccaagaatcatgattcatcaatcaaacaagcttgatgatgcttgtttttgtgaaataacactacctactcttgctttgattaatttctgttgtagcttagttataggtgagttaattcatataccatgctttgaaaaataaaacttgtttttatgtatacatgacattaatggttatagtttttgttcttgtt

SEQ ID NO: 77914 - DNA, 231 bp, Glycine max
  Clone ID: PAT_MRT3847_41373C.1
tttacaattaatcatttcatattttaggcattcataacaaaccttggtgggatattaaagtactattattaatgggacacaattgagttcaacacaaacccaacttattttcaaggggccttattaccaacccctttaacattaaaattcttcaaaattttttgggacacattccacattacacaacgggcgttaaaccccccaccgagaccgaggacaaggggaaagggt

SEQ ID NO: 77915 - DNA, 254 bp, Glycine max
  Clone ID: PAT_MRT3847_41374C.1
tcgttcgcacacactactctcaacatacttggggggatgtttcaagtgaagggggggctcaaaccatgtagctcatgtctaggggctctagcagtgattccggggatttgaagaaagaccttttcctgcaatggcagagccggtgtctaaggcctatagtctctcatatctcagatcaacccacataacaccatcaactatttccttgtctataccgggcacatagacaaccctggctctcttaaatctaagac

SEQ ID NO: 77916 - DNA, 299 bp, Glycine max
  Clone ID: PAT_MRT3847_41375C.1
ttgtttgaccataggaggaaccatactgcgtagggatctattggcgcacaattcggcgaacggaacctttgtgccaagtgcgacccggcggcggactcagagcatgaaaggaaccattaaacggtcggtcactgtcgaattcactgagagtacaccaataggatcacactgtgcaatgaatagatgctctacgaggcttgccaccgtagctatttacgcgatgtggtataatgactgtgaatcatgcaaacctgcttggacaaacgcattgactgtgatgatttaaacacacacatacc

SEQ ID NO: 77917 - DNA, 474 bp, Glycine max
  unsure (1)..(474): unsure at all n locations
  Clone ID: PAT_MRT3847_41376C.1
aaacgctcttgtgtgtctttttttttttttgttttttttgtgtgctttttgtttgctttttttttttattggtttgtttaaatgtgccggacgaaaaaccctaaaaaggaaaagggaaaaatttttggggggggggcggctttttgggtataccacctatttgggggacgcaggtccggggaagggggggggggccaacgtaacttatgggggggccctttgttggggtttcgggggatgtaaaaaaaaaaagnntgggacccgccaaagctgggcccctgtgggggaattggaccctggggggcggcccggggaaggggggggggggaataaaaatgctttatcgcaccccaaagaaaaaaaagggttgcgccctgtctgggggggggatttaaaaaaggggcgccaaacgggcgggttaccccgggaaatcgaggccgcgacccggggggggccagattttgctaaatgggg

SEQ ID NO: 77918 - DNA, 897 bp, Glycine max
  Clone ID: PAT_MRT3847_41377C.1
gtgaagagcaatgaacatggaaattttgttgaccatgaattacttaataatattctcaacaatccagaagtgattgagaagttggttggagattatggagctattaataattcacaatatgtacataatgcggggtcatccttggcggctttttcaaatcctcctattcctattcaaggacaaaccactacaccttcatcggttgttttttcaactacttcttcctatactccccctattggaggtcaggcggaacctgttactacccaatggcctcctaggcctgcagtgagttcagctattgtttcttctcccattgaggtccctcctgcaagagatgtaaactactataagagcttaattcaacaacatggaggacataaagaaacacttccatactccagtaaacgtcagattcctcaggcagcaacaaactatgagacaacctcctacaatcatagaggtaaagtgtcaaaaccaaagataatgaagccttgtatctttttcaacagttctagaggatgtcggaatggagctaactgtgcctaccagcatgatgcatcatttcagccacggggtaatactgtgtcagggatacaaagttcaaagaggatgaaaatggatcatgagattagcaattaaaatgaactctattggctggtgttgttgattgccgttcattttgatggggacgactgaatgcaaatccatatcatatgcgtctgatgtggtcaagttagcatttaatttaatgagcaattgcgagccttgtttgctgatatttttaaatgctacaaggaaaattttttttatgaaagacttttcaatttcctccccttgttgagaatccggccaaaatggtgcctttcttgggccaaaatttcaagattgtaattt

SEQ ID NO: 77919 - DNA, 262 bp, Glycine max
  Clone ID: PAT_MRT3847_41378C.1
ctcataattagagacagagacacagcgagctcatatgagtcctaagacgtatgcgatattcatgtgcggtgtcgattccgactacttggtgaagattcaccgatgcacctatagggtattcatgaagatactccaagatcaactcgaagacggggacctctacaagctcgtcaacggagagttcccgtagcagcatgacttggctctctacgatggctacttcatccgtcgcggcttctacgatgcagatgccaatgaccca

SEQ ID NO: 77920 - DNA, 1281 bp, Glycine max
  unsure (1)..(1281): unsure at all n locations
  Clone ID: PAT_MRT3847_41379C.1
gccgtcgcttggcgctctccggcaggcagggcggtcccccgtggcttcgcatttctcgtgcccagcttccgcagccaggatttcggcctgcagaaagggttgaggagaccgggcggcgtttggcaaactactgcaagaagttcaaggtaccttttgaatacaattgtcttgcacagaaatgggaaactataaaacttgcagatctcaagatagacaggaatgaagtaactgttgttagctgcttctaccggctgaagaacttgcctgatgaaactgtggatgtgaagtctccaagagatgccgtgttgaagttgataaggaggatcaatccaaacatgttcatccatggggtggtcaatggcacttacaatgcaccctttttcctgactcggtttagggaggcactctaccacttctcatcactgtttgatatgtttgaagctaatgtgcctcgtgaagacccggaaagagtgatgcttgagaatgggttgtttggaagagatgccatcaatgttatagcgtgtgaaggggctgagagggttgagagacctgagacctataagcagtggcaggttaggaaccagagagctgggttcaagcaagtccgatttgatcctctattggtgaatgatgaaaaagaaatggtgaagaaggaatatcaaaaagattttgtggtggctgaggatggcaagtgggtttggctggggtggaaagggcgtattctgaatgccatttctgcttggactcctgcttaagcaatgtccagaaagtgtcttgtaactagtaatctactcttaggtcggttaatgaaaatgcaataaactactatttactatttttctttctccatttgtttccacatttttagatattgctgttcaattcgcttcctagctggtatggcatgacacatttccttcttttttttttcatgaagcacaaatttaccactgatggtaaggaatggcagaagcaaaaataagaaaaaagggcaccccaatggaagactagatgtagtcaatcataggagcaactcaaacagaagaccagcagctacatctgactaaaagtagctgacaatactctctcaattacggattagaattagataggggcatcttcaataatgttccacgtattgcaatgtcttctgtgagaaatcagtcattagccttgaccatctgcacaccataaacagttctattttatcagcaaataaactgcccaataaacagtaatgtctgtttcgcttatttgnngtaatcagagctnnccttgcta

SEQ ID NO: 77921 - DNA, 407 bp, Glycine max
  Clone ID: PAT_MRT3847_4137C.1
atgtcgccgccgcacacagctgctatgaagcatttgacttacttattgagttggggacgaagtacaccggcgccttttcgtacgacgacctcgaagagaccatgctgcatgcagccatgtgccatcccctctgctcgcgaaaactgttgaagcggttgatctatatggatatcccactaaaaacgaaagggtgcaaatgcagtttgagcaagaaggcattttgcaaagacatcagcccacacttgcaggagtacgcttatgagaagtaccaagagcgtcgtgcaggtcgcaagggagggccggcttcccccgcctcccccgcctccccgcgctcgcccttccgtttttggcggtcctccagttctgtcaagaattccatcgaataaatctctcttacattgccaccg

SEQ ID NO: 77922 - DNA, 314 bp, Glycine max
  Clone ID: PAT_MRT3847_41380C.1
tttccgatgttgtacaacaggcaagacgaaaagaccgaggatatgtcatatgaatttctggagcacaatccgccccaaaaagtatgggaaaggaatgagaatataaacccgtgaagacatggtgctctactggcacaagaaagaagactatgagaaagagaagagaccgcaatgaaagaaaaaggagaggcaaatgagtccagcaaaaagggtactattgtaatagaggaaaggagactggatctacttcatagatcaacgcaggaagtttaaaaaaacacagatgggggaactattgtgcgtgagggactact

SEQ ID NO: 77923 - DNA, 337 bp, Glycine max
  Clone ID: PAT_MRT3847_41381C.1
gttgttcttttttttttttagtcgggcgccttacaaaaaaaggatgttaatatttaagtatgggaccatacctttaacaggattgtcttcaaaggaagagacatgtggaaaatccataacaaaaaagcttagaaaaggcctccaaacaaaatgaattattgaacctggatatcaagggtgttggagttactggtaaccttgggtatgggtatttaaagcataccatccttaacctttggcttaattttgtcaaactgcccattattaggccaagcaatcctactggtatacctaccataacttttagcaaaacatccctcctatttttgcgggtttt

SEQ ID NO: 77924 - DNA, 233 bp, Glycine max
  Clone ID: PAT_MRT3847_41382C.1
cctcaccctcatgcgtacgagtttcttcattaatccggatgataactgtgaagagttacaaagaccgatcgactgtttcatatgctgctcacaatgataattaagatccgttggatggaatcggtattggggttgaaacgctagtgtgatgggattacctgcattgaatgaggaagccacgagaatcgaatactacgcaacagaggcagagccattgtgtgagtaatactatg

SEQ ID NO: 77925 - DNA, 258 bp, Glycine max
  Clone ID: PAT_MRT3847_41383C.1
ccaatcaaaaaactcaaaatttttttattccttggtttttttttcctcctcctccttcggaaacatcacacccctttttagaagtcataaccattggaaccaagatcatcctccactttttccgccacgttattttaaattttggcctaaaaaaacttaggacccttcacgagggggattccacctagaggcccaagaaccgcacccacaggcaattccggccccattccaccaaaattaccttttttttttttccct

SEQ ID NO: 77926 - DNA, 337 bp, Glycine max
  Clone ID: PAT_MRT3847_41384C.1
agctcgccattcggctcgagggtacagacgaatcaacactgagtgagttttgaaaagttgcaagatgctatgacatatatggtagtttgaaacccagattcaagacacctagagccaactacaagtatgattgaggctgatgaataacatttccttgggcctcgaaagaaaaaccactgcagcgaagtacaaggaggaaaacaaccccacagcatagtgagaggaggaaaaaacagagggaacaacaaagagtaaacacaacaaaaaaagaaatggggggggcccaaaacatcctctatcatggctgcggggataatgaagggcctggacccggaag

SEQ ID NO: 77927 - DNA, 286 bp, Glycine max
  Clone ID: PAT_MRT3847_41385C.1
actgctgctagaagacgacagatgggggtattcaacttttcatttttaaggcagttaggggtctgtgatattaataggttgatcctaccgctgctgcctacatcttcaccttgtttctcagcagaaacttctgaactacctcttcatcaccgctctctacacaggaaataggatttacgtttatcaatatgttcggtatattctgcatggcacagtattctggtatgtctatggttaaccaaactattggcaggtggttagtgcttccaaatgtggaattctctat

SEQ ID NO: 77928 - DNA, 408 bp, Glycine max
  Clone ID: PAT_MRT3847_41386C.1
attttccctaaattaattgcttcattgcgtcagtgttctctgttcaattgctaaccgttaatggcctttgggagtttcgtgaaataactctggcgcgaagtctctgaatttcatgaaacgattcttctcattttgtcgctctgagaggttttaacccttgaatttcctatatatataaatacttcattattgttattggtttctgttagaatgtggatttaagcctaactcaacccaaaagtaagctcacagcgtaaggcagcatggtaacagtaggattagagttcctgtgactattagaattccaccagagaggttttgtcatcgggcgccaaccgtcacgaatgaagttgccgaaaatgctgattttccttagcactattcgagaaaagagaagaaacctttttc

SEQ ID NO: 77929 - DNA, 1004 bp, Glycine max
  Clone ID: PAT_MRT3847_41387C.1
tcggaaggatttgaatgacacgaaactgcgaaatgccctaattcaagaagctggcattcggattttgtgattgggagagaaaccgacccagttgtgctactgccgctgtcccgtgcaattcgaagggaatgaagaacaagggtttagaattagggtcttaaaacaactcaaccaactttgtgggtaaaattagggattcaggtgtaaggtgaaaaactagggttttggcaaatctccaaaatgtcgacgggcaaacccagaggcggtgattttcagatggtcccggcgccgggaacgtcaaagcctccccttccgccggcagcagcatcgaatgcgatagtggaatatactccggtctctctcaaagaggaagaggaggatctggaagtcaagctccgacggattatcgacaatgttcctgtccgtgttagcaatacttccggtagttccgccggttcaggctccggcgacttccaccagtatcggcaaatgagacgcaaggaacaagatcgtcttgccaggatggaagtcgactaccagaaaaggaaagagctggcagaatttaatttgagaagagaggaaagactaaaagcggctgaggaacggacagcaaagaagcgagcaaaacgtcaaaagaagaagcaaaggaaaaaggagaaaaagaccaaattaaatgctggagaagagctgcaaaagaaagaagattcctcaagtgatggagactctgataatgatgaggaggcagcaccttgaaaccagctttaaacttttaaaatttgattcaagtaattggggatatctggcttagataaaacacaggcattgctctgggtttcaattattacatatgtgatttctgaagtactgtgttcgaaagcgatgctatatattgtttcaagcaaaaaatttgatgtagttagagaaacaaatcttacaagccttttatttaaaagattctatcttgcaaaaaaaaaaaactcgagacctggaaaaaaaaaaaaaaa

SEQ ID NO: 77930 - DNA, 471 bp, Glycine max
  Clone ID: PAT_MRT3847_41388C.1
gggaaaacccattttcctgggaaaaataaaagaatcaacccctggggcccgatttcacaaaaaattttttgcacaaaatgttttcgggcggttaaacaaccacgggttattggggtaagttaaaatgaggcccctaaataggggaaccctttcctgacctgttcaaattgatgagggaaccttgctgcacaccactcttggttggtttcagggtccagcagttcttttcaagcttacccttacggcactacattacttcctctttccaccagccaatctttaactcaatattggccatgaggcaaattttgtatttctaacccgcactagtcccaaagcccgtgcacccccaaacaatgcatgaagcctcacccaaaagtacttcaccctaaaaatcttatttttggccttgaaattggccccgacaaatctaactaccaggtttcccatccgcaagggcaatgcccaaag

SEQ ID NO: 77931 - DNA, 176 bp, Glycine max
  unsure (1)..(176): unsure at all n locations
  Clone ID: PAT_MRT3847_41389C.1
agagtctgcagactcaccgctgactctggcaagatcatctggatattcaaactacccttcggccctgctggtgtnaaacactaattctagatcctgtccactttcctgagtccaatgcgacgccaccgcgtttactgtccccttacctctttatattctattccatttcccccccc

SEQ ID NO: 77932 - DNA, 469 bp, Glycine max
  Clone ID: PAT_MRT3847_4138C.1
tacttactaacgctcctaatctgaaggatgtttatagctccgcaatgtgaagcgccaagcccaatctctgtgacctgcgctcttgattatgagccagatagctacggagacggctccagcccagccgattggcatagctcctgcgccatcttagacagcaaggccgatgctgaagaacaaccctcagctgccctgagctgaggaaccaccgactcacatcgccgtcggcaacggccacaaagctcgccagtcagtgacattcaagtggctccaattggaaacctagcagaggccaacaacaggcacggtccctagcgaagcctgctcacaagtctccaacctcatcgccgggcccgatgcacggctccaagctttcgagctcgagtaccaagggggctcccgggagcgtactctgaagccgatgtcggcaaggcctatccaaactgcgaggccattccttgcgaccagt

SEQ ID NO: 77933 - DNA, 1030 bp, Glycine max
  Clone ID: PAT_MRT3847_41390C.1
ccacgccgtccgcacacatatacatacacacgtacacagcaacactctcccacatgtctctgactctgtctcagctctcatcttatctctcttctccgttgaatttccaacccgtgcttgctttgcctagattctctttcttcttccacacatactcacatttctttttacccttttataatgggttttctgataatgctgcaagcttgtgtctttcacaattgacaaaagagtggtagtagcagcctggcaccaccccatctgttagaaaacttggttgctcaagtaaagaatcattttcattcactatatcccccaaaggaaacagctttctttgatttcactcctagtttaaaaacctttctatttttgcttctttttctttcactatatgtgcatggaagaggcaaatttgtgaagtggggtgtttgatatttgaagattgaggtgttgaagagtggtgagttaaggtttcaatggacaccaaagggagattagttgctgggtctcataacaggaatgagtttgttcttatcaatgctgatgaaactgcaagagtagctgtcacagaattaagtggtcaaatttgtcagatctgtggggatgagctggaagttactgtgaatggggagccatttgttgcttgcaatgaatgtgcattccctgtgtgcagaccttgttatgagtatgaaagaagagagggcaaccaagtttgtcctcagtgtaaaaccagatataagcgcatcaaaggtagtcctagagttgagggtgatgaagaagaggatgatactgatgatttagaaagtgagtttgatattgggagtgtgttctctgctcgccttaactatggttcacaggtgaatggttcagtgatccacgcaccatcagagtttgatgcagcttcggtggcttctgagatccctctcctaacatatggtcaagaggatgtcggcatttctgctgataaacatgctcttattcttcctccattcacggcgtcgagggaaacgggggtgtgccatgcctttgg

SEQ ID NO: 77934 - DNA, 417 bp, Glycine max
  Clone ID: PAT_MRT3847_41391C.1
tgtcgtccttttttttttttttttttttttttttttttccttagcaaaactaaatgggggttgaacggaagttaaaagtatagggataagattttaaccacctactaaaattgaataccctttcaattttaaccgaataccaacctcacttacccgtgaatgcaaccaaaaaaaaaatatcttgtgttaactgaaaataaaataaaggcccgtgtttttccacatcatgacggggaaaaccatggggataacaaaacttattacccttgaagctaccaacctttggtctcatgtgagcataatagaatagggcccctctgatgggccttaccaaaacctgagcatcctgaatggttaacgggacccacgctgaagacgaacaataagaaccgcggggaacgttgttaccctcatctt

SEQ ID NO: 77935 - DNA, 1155 bp, Glycine max
  Clone ID: PAT_MRT3847_41392C.1
ggctcgagcaaaaataccctcataggaaaagtacgcgtgcgtatctccacgctgcatacagggagagtgtataaaaacacttacccgttgttggtgctgagtccggtttcggggctgaagaaaatgggggagattgagatagcgataaggttcgttcggacgactcaacggctagatttcctccacgtgtactcgcagccgatgctgccgttgatgcaccatgtcaagccgctgggggtggtgcagcaggaggcgctgcggaacaccacggtgaggatggtggcgggacacctgtccagggcagaaccgccgctgaggaaggaggtggtgttctacatgctggacgcggactcacacaacttcagcatgaggaaagtgcgcgccaactggtataggatcataaacgtcatcgcggccgtggtagatattgtacggtggatagagcacacgcggggatggaggaatccaaccgcaaccatattggtgcacgcgctgttagtgatgttggtgtggttccctgatttaatcattcccacgttctgtttctacgtttttgctgtaggtgcgtggaactacaggtttagggcgcgtgacccacttccgcatttcgaccccaagatatctttggcagaggttgtggatagggaggagcttgatgaggagtttgacactgtgcccagtaacaaagcgagtgaggtggtgcgagtgcggtatgacaggttgagggcgctgggggcgcgcgtgcagacggtgctgggggatttggcgacgcaaggggagcgcgtccaggcgctggtgacgtggcgggacccacgcgccacgggaatatttgtgttcttgtgcttgactgtggcgttcatgctgtatcttgtgccttcaaagatggtggcgatggctttcgggttttactatctcaggcaccctatcttccgtgatcgcctgccctcgccggcgctgaacttcttcagaaggttgccttcattgtctgatcgaatcatgtagtttttttttatgatgtggtaaaagcaacgagggtcaagttgaaatgcatatatatatatatatatatagagagagagagagagagatagataagaaacatgatttttcgatttttagtattaattattgaatgaaatgctgaggttttgattt

SEQ ID NO: 77936 - DNA, 251 bp, Glycine max
  Clone ID: PAT_MRT3847_41393C.1
ccaagaatggcacttcgttgcttggtgatgtccctttctggtctcttcaatcttggtcttgggagaggatagccatgccgagacgaagatttgttgcatgctgtttggccaaacactcccattccaagttcagtgggagatcttctaaagcctggccctggaagtactgaaatcgatgatcaccctatgcaaattgccgacacacagtacccggtaaccttctgctctatagaagaccttcatccaggcaa

SEQ ID NO: 77937 - DNA, 370 bp, Glycine max
  Clone ID: PAT_MRT3847_41394C.1
gcgtcgaagctcgaattcgctcggacggacaaacttttgtggagcagaagaattcaaatatgtggatgaggtcttctgaaaggaatggagcaggagggagggtattatttttgatgtcgaatacacctcaatacatccatttgaagtgctggtcggcctacttgtatgcaagccaataagaattttggttttaggtctttaaaaaaaaaaaccaagtgcgaccgtcaactatacaactctattctccgccaattcatttcggaccggtacatccggaaccccaacttctactatattgtgtcgattaacaaccaatcgcagataatgacatatttgaaccctgtgagccattcttatacgatcacattat

SEQ ID NO: 77938 - DNA, 1036 bp, Glycine max
  Clone ID: PAT_MRT3847_41395C.1
agagttaagaagaaagttgctttggtgctcagacgctccactctccaagaggttagaagacaaagtagcactaatcaccgggggagcaagtggcatcggcgaagccactgcaaggcttttccttcgccacggcgccaaggtcgtcatcgtcgacatccaagacaacctcggacacttcctttgtcaaaacctcaacttcggcaacaacatttcctatgttcactgtgatgtcactaacgataacgacgttcaaatagccgtcaaagctgccgtttcacgccacggcaagctcgacatcctcttcagtaacgccggaatcggtggcaattcggactcctccatcatcgcccttgatcctgctgacttgaagagggtttttgaagtcaacgtcttcggcgctttctacgccgccaaacacgccgctgaaataatgattcctagaaagatagggagcattgtgttcacgtctagcgctgtttcggtgactcatccgggttcgccgcacccatacacggcgtcgaagtacgcagtggtgggtctgatgaagaacttgtgcgtggaactggggaagcatggaatcagagttaactgcatttcaccctatgctgtggccactcctctgctgacacgtggaatgggaatggagaaggagatggtagaggaactgtttgcggaggcagggaacttgaagggtgtggttctcaaggaagaggatttggcagaagcagctttgtttcttgctagtgatgagtcaaagtacgtgagtggggtcaacctagttgtggacggaggttacagtgttaacaatactgcttcggctgaagtagctttaggaaagttttctgctgattaagcccaaattgtaagctttcatatttgagttccttcgaccaaaagccaaaaggtgtgttttctagtttgaattaaaataaaataaaaaagtgaaagtgtgtgtaagacaataatacaatatttctgttatttagcaaaaagtgcagttacttttagctggaaaaaaaatccaaatttgtatttc

SEQ ID NO: 77939 - DNA, 1699 bp, Glycine max
  Clone ID: PAT_MRT3847_41396C.1
tgccttgcttggaagagaaaaatggcaacaaatggcaagacacctgcgataggaatcgatttgggcacgacatactcatgcgttgcagtgtggcagcgtgatcgagtggagatcatcgcgaacgaccaaggaaacagaacaacaccctcttatgttgctttcaataacacccaaaggatgattggtgatgctgccaagaaccaggctgctaccaatccaaccaacactgtctttgaacgcaaggcgcctaattggtaggagatttagtatcaagaggttcaaagtgatatggagctatggccattcaaagtcattgctgatgttaatggcaaaccaatgattgctgttgattacaattgtgagaaaaagcaattttctgcagaagaaatttcatccatggttttggcaaagatgcttgacattgcagagtctttccttggatcaacagtgaagaatgctgttatcactgtgcctgcttacttcaatgattctcagcgacaagctactaaagatgctggtaaaattgctggcctcaatgttttgagaatcctccatgagccaactgctgctgcaattgcatatcggcttgaaatgaaaaattgtaataatgatagaaggaacgtttttgtgtttgatcttggtggtggtactttggatgtgtctcttcttgtttttgagaaggatcatatccgagttaaggcaactactggagacactcctctttcccttgggttgcaagaagatggaggtatcatgaaagtaatcattcctaggaatactagcattcctacaaagatggaagatgtactcacaacacattttgataaccaaaccaatatcttgattcatgtatacgagggtgagaggaaaagaactagagacaacaacttgttgggtaagtttgtgctagaaattcctccagttccacgtggtgttcctcaaattagcgtttgctttgaacttgattatgatggcatcctacatgtttctgccgaggaaaaatctaggggaatatccaagaagctggccataacaaatgacaaaggaaggctttcgaagaaagaaattgaaaggatgatatcagaagcagagaagtacaaagctgaagatgagatgtataggaacaaggtacaatcaaggcatgcattggagaagtacgcttacaacatgagggatgctataaacattaaggagattagcttgaagctttctccagaagacaagaaaaatatcaatgatgcaattgattctgccttagagtggctcgaggtcagcatggatgcaaacccaaatgattttgacaacatgcggagcactctttctagcgtttttaatccagttattgtgaagatgataaaggatgaggataatgttgcgcctccagatactgttgctagctctggtagcaatagtgtgaagaatggcttgttatcaatattggcaaattttgctctcgatgcagtgtattcagctgctacaggtgatatcattggatttgcttccgtgattgttgactgtttgtcaatttagttagtttattaaaacttggtaaaatgtcaatagagcaagcggtaaataaacagcttcttattcaaagtgtgagtttctgactaggaactattatgagattaattaatgtgtaagacttgttttctggtgtatctgatcccattttatcagattgatttctttttcctgc

SEQ ID NO: 77940 - DNA, 442 bp, Glycine max
  Clone ID: PAT_MRT3847_41397C.1
cggccataacattgggcggtttttattaagggccatgaaaatatactggaacaagtcatcaaaaatatatgcccaatcttgagttacaaggacccaggggcaaaaggacaaattcaaccatcataaagcagctaagcgacccttaaacgggaaaacggaacaaattttttgctcaaaaaaataatcccgaggatagggaaggggtataattggggggggaccggaaaaaatatatttcaccggggccaaaaatgcctcaagggtgacatttttttttggcaggttcctaaccgatagtttctcctcagcattggtttcatgaacggcaactgtttcagtcattttaaaaactgttccttacaggccgggttgggttgtacagaaaaagaccccggagaaaaattgccccgccaaacaaaaaaaaggggctcaggcttgttcc

SEQ ID NO: 77941 - DNA, 690 bp, Glycine max
  Clone ID: PAT_MRT3847_41398C.1
ggttcaaaaattaaaactatatatagtttctctttaaaaaaaactacatataagtttatcgcgctaattttgggtatcaccctatacaactgtaattgcagctagtaaaatatagcatgtacaaaatgccaaatttcaaattgtatgtcatatacaaaaaaagaaaaagaaaatattcaatgaaattaattatcatttacctcttgaaaatttcttatttttctataggaacttttccatatacacatgcaatcagttaaaaaattcgatctcaattcatcagaaatcaatgcttgctggtctccttgtcaagtgtctacaatctttggtacacatttcttgaatttcttggcgttttcggtgagggacacgatgcaagacttccactcagatttatctttattatgtccttgacaaggaagatggcggaatatgtgaacaagtacaacagcatccagagcagcgtattctattgatttggagttaaaggccgttgctcccaattgctgtttcgtcttgtcttgtttaaactagctcccagtattttctctgcaagtccagccaaaccaccccgaggttctttaaaaacattctggatgtccagcaacatttcatagtttttgaaacatctcaactcttcatatgaataagcaagttgctttgcatcgcattggaaattatagccaagtt

SEQ ID NO: 77942 - DNA, 660 bp, Glycine max
  unsure (1)..(660): unsure at all n locations
  Clone ID: PAT_MRT3847_41399C.1
ttccagaatctttatgtaaattgtggaatttacagatattgaagttagactattgtgtatatctccaaaatttgcccaacaatttgacaagcttaacagctctacaacagctatctttgaatgactgcttctcaatatcaagcttgcctcctcagatagggaagttgacttccctaaggaatctaagcatgtgcattgttggcaaggaaagaggattccttttagaagagctgggaccactaaaacttaaaggagatcttcacatcaagcatctagaaagagtaaaaagtgtaagcgatgccaaagaagccaatatgtcaagtaagaaactaaacgagttgtggttgtcatgggatagaaatgaagtgtgtgaattacaagaaaatgttgaggagattcttgaagtccttcaacctgatatccaacaacttcaaagtttgggtgtggtacgatataaaggttcacatttcccacaatggatgtctagtccttctctcaagcaattggcgattggcagatgcagagaagtgaaatgtttgcaggaggttntacaacatatgacttccctgcactcgttacaattatacaatcttccaaaactagaatccttgcctgattgctttgaaaaccttaccttgcttcgtcatttaagtattaaaa

SEQ ID NO: 77943 - DNA, 1660 bp, Glycine max
  Clone ID: PAT_MRT3847_4139C.1
gattccaatcctttccctcttgttctatgctttcaagtagtaccaattgggcactttgtttagtgtcttcattttttttttcatcctcatcaaattaaccccctaaacatcatttagctagctagccaaattaattattaattaggcaaataatgggaaacccagaatccaatttgccacccggttttaggttccacccaaccgatgaggagctcattcttcactaccttaacaaaaagggtaaaaaggtagcatccatacccttgcccgtttccatcattgcagaggttgatatctacaagttagatccatgggacttaccagctaaggcaacctttggggagaaagaatggtatttttttagtcctagagaccgaaagtaccctaatggtgcaaggccaaacagggcagctgcttcagggtattggaaggccactggcactgataagaccatagtgacatcattgcaaggaggagcacaagagagcgttggtgtgaagaatgctttggtgttgtacaaaggaagacgcccaaagggtgtcaagaccaattggatcatgcatgaatatcgccttgtagacaacaacaaacccatcaagctcaaagactcctccatgagattggatgattgggttctttgccggatttacaagaagtccaaacatgctctaacttcaacagaggcatcaataggggtgggtgaggtagatcaagcagaggagcacttattccaagagacccttttgccaatctcaaaatctccagcacctccacctcaaaacacattgatatctcagaaatctgtgtccttctccaacttgttggatgccatggactactctatcctaagtagtttcttatctgagaatcataccaaccacccaccatgggttggatcaagtgctggattcaacactgggaatttggatcagcaatgctctccaatcaataacaacaaccctaccaataattacatgtttcagaagaatccccaattgaacccttcagtctccaacatggaaaacatgatgaggccaaagcgccaagtttcaaacatggatgaggaaacgttgtacccatcaaagaaataccttagttcctcttgcaacttccctactaacatcagcaaccaatacgagaacccacaatggaactacctcatgaagcagtctttgatgaatcagcggttaatgcttggtcctcatcttcaatttcaaggataatccaaaaatatcaaaagattaaatgaaataggaaaattaaagtaaaatattcagaagctgagcacaccaaagaataccaccaatttgatcattagataaggaatagtagctaggggtttagtacatagcaattatagtgttttctttttttatttctctttaattaatttgtgattgaaaatgaagaatagaatgttagcttggaagcaagaactatttggtagggaatcaaagaaagattccaccattcaaggatcaagaaactgttaaaacaaaatatccaagtttctatgacaaattagaaacaatttgtgtacaaaaatgttaatttgtacatgttgttggggtttgtttggaggttagctttataatatactttgtagataaggtattgtccttaaaaaaaaaaagaaagggcggccaccacaaatgagctc

SEQ ID NO: 77944 - DNA, 351 bp, Glycine max
  Clone ID: PAT_MRT3847_413C.1
gtggcaggaaaaataccatcacagggccatccaaactacaatttgcaaacaagcatttacaaaatggtggacacaaggcatctcaaatcgatagagtttatccaccacccttaacttattcgggccccagggtgaaatgttcacccccaaggtaaacatgtggcgtcaagctcctttggtgaaaagaggaactggtctccccatgggaaggaacccactggaaacatacacactggaaaaaggcaaacctgcctctgaggcctccggggcaaaaccccgattgggcattgatgttggaaaatgggatcctggaggggggccttccggaaaaagggttccctaccgatgggg

SEQ ID NO: 77945 - DNA, 155 bp, Glycine max
  Clone ID: PAT_MRT3847_41400C.1
cttctctctagtcttccatggagttcgttgcaagctctgtgaacgcatctttttctcttcgttgctctcacaatacccctttccctgccatctccattcctccggtgtcacagtggaagtgtttttcgttaagggtaatagaatctcggtttcca

SEQ ID NO: 77946 - DNA, 136 bp, Glycine max
  Clone ID: PAT_MRT3847_41401C.1
aaaaaaaacaattccttggaggttccatctcaatagcaaaacaattttcaggcccataaaagccctaatatagcgggagattcaattgtctagacgaaactaaaaaaacctctttatttaagaccgtcttgaaaag

SEQ ID NO: 77947 - DNA, 245 bp, Glycine max
  Clone ID: PAT_MRT3847_41402C.1
aagattagaccccaaatggcattggtctggtgcctttaaatgggattccttccaccggattcttaaagaagaactaacctaaaggtacctcccttttttttggaaccacaccttaattggcccggccaatcaataattttttttattaatttttaagccaagggcccgggccaaaaaagggggcttaaatctttttcaaaacctggcctacatttgggccagcctttattataaagtcttttttt

SEQ ID NO: 77948 - DNA, 199 bp, Glycine max
  Clone ID: PAT_MRT3847_41403C.1
ggccatatggattcgaatttacattacattactatcggaccttaggattctctgatcaaaaggagaccagaaatacatcctatacacttgtgtaaacatattccatttacttgggttaccaaagacatactctagttctgcaaaccgaattagagtttcgaccctccttgacctggggtatagatatttttgtaaagga

SEQ ID NO: 77949 - DNA, 412 bp, Glycine max
  Clone ID: PAT_MRT3847_41404C.1
gttgggactgttttctttatagtgaaccatgcttcgagggttgtacagtggaaatgaatcctaagcctatgttttgctataaatttaatctgtatcatacaaatatttctaataatcagatacaccgcattttccctggcttggccgctctttccaaggattcttgataaaattattggagctttaaatgattttaaagggccgtgggtttatggctaatttccaataccggggattacccttgttcccaaaatttagtattaaccccccttccggccaccccaccattaaaaaatttgttggcccattgggttttccaactattcttggaatcaagtttaaagcccgcccctttaaaaatttttgaaggtccgttttcttcccaaaattcaccttccttaaataaataaaa

SEQ ID NO: 77950 - DNA, 355 bp, Glycine max
  unsure (1)..(355): unsure at all n locations
  Clone ID: PAT_MRT3847_41405C.1
ttctgngcgagnnccnnatcgccagnnggtnntnangnngcctcgcctccgaaattcgtcgttccgaaacgctnngnnannaggctcaancccgncctcgtcgcgcaccgtnttgcnggttcccgtgcggnngtncaagcctgcgancagtcntcgcgcgcnnagctctncttgtgcngtgcggatgctcagantggcccggctcggacagcttcgnagcgtgctgggngagnggagncgncccgtgtgtgnnatgngccntcgnaataacgcngnaggagtcttcnggtgcccaannggnggtgtgaantgtgagagagtcncgggtnccttaccgnntggtgttggnacgctc

SEQ ID NO: 77951 - DNA, 125 bp, Glycine max
  unsure (1)..(125): unsure at all n locations
  Clone ID: PAT_MRT3847_41406C.1
tnaaacngggttctgggntnatcgnggctgntcacatngtctggnagaaactggtntcacttactgtnactttccngcaggggantaacttatacnagcatagnggccattggtaagggttgcat

SEQ ID NO: 77952 - DNA, 618 bp, Glycine max
  Clone ID: PAT_MRT3847_41407C.1
ttagaattctcgcacctaggccgaatatcccacgtgtcgcacattctacaattcgctacgcatttcattccattccattccattttgtgtgggtgctacgaatgaggaaggagaagaagcggtgctagaatagatagatacatagatagagaagagacatcatcgaacatctcgaaagagagggaaaatgggtagttacgaggcgttgacggagaagccggcgacggcgacgaagtgggtggtgacgtgcatggtgggaggggtgatcgtgggggtgtcactgctgggtgcatactcgagccagctctggaagagccgaagacgcaacaagaagcccgttcgcgtctacatggatggctgcttcgacatgatgcattatggccattgcaatgcccttcgccaagctcgtgccctcggcgaccagttgattgttggggttgttagtgatgcagagatcattgccaataagggcccccccgttacccctcttcacgaaaggttgataatggtgaatgcggtgaagtgggtggatgaggttattcctgaagctccctatgcgataaccgaggagttcatgaaaaagctttttgatgagtacaagatagaataccttattca

SEQ ID NO: 77953 - DNA, 409 bp, Glycine max
  unsure (1)..(409): unsure at all n locations
  Clone ID: PAT_MRT3847_41408C.1
aattcggctcgagattaaatgttacagcagtggtggagtgaatcacataaaaaattgagaagttaagacagaaagccgtccttgtttgtgggctgatatttaggaacccggtttcgtatttaaattctgttggatgtacccgtgacttcttgtgggatgtacattctatggttatgtgaggcacaagctctcccaacagccacaagtcccaggaactcctcggacacccaggactcccaggacccctcgtagtaggatggagttgcttctcttgtaaatgataattagagataggtctagtcattagctcatatgatgagttcagccttttgatgcagtatagcataggtcaatacataaatacttcgtatattgtagatactcgaatttatcaggtctttttccncct

SEQ ID NO: 77954 - DNA, 578 bp, Glycine max
  Clone ID: PAT_MRT3847_41409C.1
ctggctgtgcctcctgccggacacggaagggctgttccgggccgccatcatcaagagcggcagcgcgctggtgagctggggctactcggagaaccaccgcacgctcagcaacggctccgtagccatcctccaaaagtggttcccgggacaagacaccttgaacctgctgcactactccaacacgctcctgctcgacctcgcgttcacgtacgcggccaagcacatgagcgccctgtcacctgagacgtttgacccgcccacgataacggtggagaggcgctccgccggccaggagcccgtcctggtggagagggacccggagagctacatgctccgtcccgtccgctccagagtccccaagctgatgggcatcacgagctgcgagtacaacccgatggcagacatgtacttcatgatgggggagctgcccccgaccatcctggagccgatggcgccccgcagtgccatccccctgagggaggcgcgccgcgacctgggcctcgacacctacggctacacgtacgccgacgtcaccacggacctgcgggccacgctcttcaacctcaccgccatcgacc

SEQ ID NO: 77955 - DNA, 423 bp, Glycine max
  Clone ID: PAT_MRT3847_4140C.1
gtagaaagtgtcttccaacaagaacgaaccctcagactagagagggtgggttgttctagtctatgtgtcatatgtgaagggcatttggagactacgtgaaatattctaattgggggtgaatttgctcatagctgctggaaggaggtaaacttatggcacaaagtagaccaaatgctaaatggcgtggagagtctaaaagatttgatcttcaagtgtactagagccttctctgaccaacaacgataacttttatttatgattttatggagtctacggaaaagtcgtaatgttaaattgtgggggaacaatagtgaggctcaagtgtaatgttggcgcatctttgcatgaacatcaggggtgtaagccaatgagcatgtgtatttgagatgaaaatgaggagtttctaatagctcgaacaaactt

SEQ ID NO: 77956 - DNA, 263 bp, Glycine max
  unsure (1)..(263): unsure at all n locations
  Clone ID: PAT_MRT3847_41410C.1
ttcaaatctagctctgatattcgaaacgcactttctagattttaattatcatcttggttcatcaatatattctctaacacatctatcaatttatantcntgaaagcctcaaattcctaacattttctatatgcttttcccaaatactacttcactctccaattcttctaatcccctacataacaacactcactacttttagatctaccaatgccacttatttatatccttatctaaaaacagccttagaatctcaaacactca

SEQ ID NO: 77957 - DNA, 269 bp, Glycine max
  Clone ID: PAT_MRT3847_41411C.1
cagatatattctacattcttctggatgagctcagaagcaagcgggctgtgttgtgtgggcttaggcttacgagactgttatctgcgttttcatacgcggatactgttggccttgtttacgccaatcatttccctaaccatagtgtttagcttttccgatcatacctttccctttatttctacttctatcgcactacactctgttgtgccccatttgtcgatctctctttttctttcgaacattggacgtttcactacaagatgtgaatg

SEQ ID NO: 77958 - DNA, 403 bp, Glycine max
  Clone ID: PAT_MRT3847_41412C.1
gtaccttacgtaagctctcaattcgactcgaggtagcatcacattcaaccataccctttcatcacacgccactttcccaaagaagaatgacccattatattcaggactaccaaccctctaaccagtaactctgcaactaatttattcacatgccacaaaagatttaccaatagacgtacaaaaatctaacatgcagacaccaacggatatattcttaaaggattacaaaatacctgactactactttgacactgtagatctaacatttttctcgctagaggagaagacaataactagtctctaaaattgccgtgtattctcacattgtatgtactactccccctctagttttagatggaccaaacttatctttagtttgaattcacccgaatggcatggcttt

SEQ ID NO: 77959 - DNA, 559 bp, Glycine max
  unsure (1)..(559): unsure at all n locations
  Clone ID: PAT_MRT3847_41413C.1
gtacggtttttaggtttggaggtngttnacaaacttatttttacttggaccattgtntatnaattttgggatccgtntgntaatgatagtaaggnatggtgtctaacttgagaaaggaccatttgattgacggantggtgattttttgtggatgatgatatttggtgnctttgtaatattggntttgnatgatatcacnatattttggttnnnatttttggaagtancanttgtttttatgctnntttatgtntnggagtagagaattttcaaatgngcaaattaagatatacgggnttggtgcnttaagggtttattattttcatgggagatgctgggttttggatgtgatttttggatcggctattatacctggnntattaggtattattgnaggganatncggtactactttttttanagtgnttggatncaantagcaggtggaaaagnaaaattttggaagactncaatgnngggtacntnaaattatatttggaagatggnaggaattgggagtgaaaacaaattaggtgtngggnagggttggtaataacct

SEQ ID NO: 77960 - DNA, 451 bp, Glycine max
  unsure (1)..(451): unsure at all n locations
  Clone ID: PAT_MRT3847_41414C.1
gttagtaccaaaaggtaaacctgggaggctgatatgcaatttctttaacaaataataagagttacagttcagaaacactcacattaatacactcacatttttaacatcaatataaataagggggggaaatgacacaacatatatgcctatatctaattgctaaaacaatgggtaaacaatactaaagatacatctggagaaatgacacgtggaaaacctaacaaacagatttgacagctaacacctattaccaaagagtgcaactgttgagtcaaaaccattgtgtgacactcatatgaccatcagagttggctttgtaaattaattgacagctgtcagtcaagcatgagtgagagcctaaatgaggttgactctgcataacatcnaatattcacagggaatttgtttagcatacagcctcagaattagattggcttaggttagactcctt

SEQ ID NO: 77961 - DNA, 773 bp, Glycine max
  Clone ID: PAT_MRT3847_41415C.1
gtccggaaaccccgtcgaccgtgcgtccgttagttgcaattggccataatgtggacacactaagggctttcaaggtggaaggaactacatacaatccagccgatggccaaatagagaactggccaactagtggattggatgctaatcttcaaatgatagcaaaaatagctgcggtctgtaatgatgctggagtcgcacagtcagagcataagtttgtcgctcatggaatgcctactgaagcagccttgaaggttttggtagagaagatgggccttcctgaaggatccaaggttgcacagtcagcaagcacacgtaccttgctgcgttgctgtgaatggtggagtgagcatgaccaacgacttgctactcttgagtttgaccgtgataggaagtcaatgggtgttattgtggactctggtttaggcaaaaggtcgcttctagttaagggtgctgtggaaaatgtgttggacagaagctctaaaattcagttgcgtgatggttctatagtgaacctagatgataatgcaaggaaccttgtattgcaagctctccatgaaatgtcgactagcgcattgcgctgtttgggatttgcatacaaggatgaactccccaaatttgaaaactacagtggtaatgaagatcatccagctcaccagcttttgcttaatccttccaactattcatcaattgaaagtgaacttatttttgttggcttggttggattgagggatcctcctaagggaggaagtataccaagcaattgaagactgcag

SEQ ID NO: 77962 - DNA, 319 bp, Glycine max
  Clone ID: PAT_MRT3847_41416C.1
gtagttgcgaagtaagaaggacatccaaatggcttcctcaatgatctcttctccagctgttaccactgtcattcgtgccggtgccggcatggttgctcgattcactggcctcaagtccatggctggcttccgctccagcaagaccatcaatgacattacctctattgctaccaacggtggaagagtgcattgtatgcaggtgtggtcaccagttggcaacaagctgtttgagactctttcctagctgccattccttgatgatgtccaattggcacatgaattataataccttcttatgaatggatggattccttgcttg

SEQ ID NO: 77963 - DNA, 305 bp, Glycine max
  Clone ID: PAT_MRT3847_41417C.1
cgaagctcgaatttgctcgagtctatatacatctttttccaccgaaaaaacatatccatatgaaagattacccttaataggggccatctccacattatctataatccgtaaatatacccccatagaatctacctattcagctttccatcggtatgtatccatgcgaataactcaacatgcctctttctgaaacaaaataactaccctctatccatgcctcaaaagggttgattatatgtaaaaacaaccaatgaatccatgattaaacccttctacatttttttattataaacttattcatcaat

SEQ ID NO: 77964 - DNA, 419 bp, Glycine max
  Clone ID: PAT_MRT3847_41418C.1
tttattttttttttatttttttttttttatttttttttttttgggtaataggggatttacaccttcatgaatagaaagaaccctggtttcaaccaaataactgaaggtgcatcacaaacccattaaagcaaagggttttagagataaaagtactgtaccgaccgccctttctaacatgtgctcttacagaaatggccaaagggtcacgacataaaaagaacgcataggggaaaaaagactaaggaaaacccgcagcggaaccgtctctcttgacagtgccctagcgtcccctccattagttaaatataccacctttattaccaagtaaaccggcctttcccgtcaagctttaaataaggggccccctttatggtttcaatttaatgcaaaaaagtaccctgacccctagaaaacaaaaa

SEQ ID NO: 77965 - DNA, 327 bp, Glycine max
  Clone ID: PAT_MRT3847_41419C.1
agacaagaggcatctaatgcaatggctcgttactgtgagggctacaagcggtggatcgagcaggaccagtcaagcacaactaatgtccacatctggcattgttgcaagaccaactgtctccactggtgcaagacctacttaacagcgctacctactaacactggatattctcgacagtaggataacctttttctcaatcgacgtctgattgctacctcgaccgctagtcctacatcgacgtgctaaaggggaggatcatctaaggctactagatcagactcactcataattgacatggataggccaaaggcactctatgaacatctc

SEQ ID NO: 77966 - DNA, 909 bp, Glycine max
  Clone ID: PAT_MRT3847_4141C.1
tacggcccgagaagacgacagaagggggtttttatccttccttaaggttaagatttgggtggcatattttcaagtggttgagaaaaattatacagcgggagtgttgtgatttctaaatctgagattctgaatctgaagctacgatgagaagttgaagttgaagaagcaaaatggtgaagcattcgcaagcgtggttgttgtgatttctaaatctgagattctgaatctgaagctacgatgagaagttgaagttgaagaagcaaaatggtgaagcattcgcaagcgtggttggcaatgcggagcaagacttgtgcgctaacactcctggcactcttgtccctctccaccctcaccctcctcttcctccgaaccacttccgattcctgcacccaacctcaggttcggaatttggatgcgcttcagcctcggactgattccaagttaccgaaccctctggaattcatgaagtcgaagctcgttctcatggtctcgcacgaactctccctctccggaggacctctcttgctcatggaactagcgtttctgctacgctccgccggatccgacgtcgtttggatcaccaatcagaaacctcctaaacccgacgatgtcatctacactttagaaaacaaaatgctcgacagaggagtgcaggtggtggatgcgagaggtgaaaaggctgtggatacagctcgtaatgcagacttggtgattttgaatactgctgtggctgggaagtggcttgatgctgttctaaagaaaaagtttggaggttcttccaaagggtttgtggtggattcatgaaatgcgagggcattatttcaaagtggagtatgttaagcacctccctttgtttgaggtgccatgatcgattcgcatacgactgctgaatactcggaagaataggac

SEQ ID NO: 77967 - DNA, 3205 bp, Glycine max
  unsure (1)..(3205): unsure at all n locations
  Clone ID: PAT_MRT3847_41420C.1
ccacgcgtcggctcgtgggaatttgggaggtcatgtaagctggttcgaatcgtatgtttactaaactaaacttattatgcgacattgcgactcactcacgcactcaccgacccaccctcgatagtcaatctattcttgattgccaattcgcatcgcatcgctgactcaactcaatttgcaaaacactgattaatcaattatcagatagacagagaggaaatacatcgcatcgctgattgattttcaattccatagaaatccaatagaagaaatacgaaagatgaagaggtctcttagaaagttgggagttctggcagtagagaagcatgagcgtgaccgcagaaacattatgcctttgtcccagctagaggagctcgctcaggctacccaggagatgcaagacatgagagactgctacgatagcttgctttccgcggcagcagcgaccgccaacagtgcttatgaattctcagagtccttgggagatttgggctcttgccttctggagaaaaccgccttgcatgacgacgaagaaagcggcaaagttctcataatgctcggtaaaatacagtttcaactccagaagcttattgataaatatcgctctcatatcacccagacaattaccattccttcggactctcttctcaatgaacttcgaattgttgaggagatgaagcaacaatgtgatgaaaaaagagaagtatatgagtccatgttaacaagatatagagaaagaggtaggtctagaagcggaaaagcagagaatatttccttgcagcagttgcaaattgctcgtgatgaatatgacgaggaggctacattatttgttttccgcttgaaatctctgaagcaagggcaatcatggagccttctaacacaggcagcacgtcaccatgcagctcangttgtgtttcttcaaaaaagcagttaaatctcttgagacagtggagccacatgttgttattgttctgttagcgaggataattgatggggttgccattgctcttgctgttactcttactcctctctacatatccgaggtagcgccggccgatatcaggggccaattgaacactcttactcagtttgcttgttctggtggaatgttctttgcttacatcctggtgttctcaatgtccttgtcagattcgccaagttggagactcatgcttggggttatttttattcctgccattgcttattttttactggctgtgttttacctgcctgagtctcctaggtggcttgtgagcaaaggccggttacttgaggctgaaatagttctgaaaaggcttcgcggcactgaagatgtttcaggggaattggcgttgctggtggagggtctcagccctgggggtgaagccacttccatagaagagtatgtggttgccccagctagtgagcttcttgttaaccaggaagcagggaaagattatataaagttgtatggtcccaatgatgagagttacaatggttgctcaaccagtgaatggacagggtagcatgatatcccgtagtatgttgtctcagcaaggaagctttggaactctgactggtggtggtcttaaggatcctattgtcactctctttggaagtttgcatgagaatactctccctgagagtggaggttcacgcagtatgctacttcataatgccaacagtatctttagcattggagagacgtcgagtccctttggtaccagtgacaacctgcatgcgccactaatgtcatttcaagggggtgctggggagaaggatagggcttatgggtccaaggacatattaggcatgaggagcaatagcagcctgagaagtaatagtagtttggttcatgggaatgctgttgatgctcctaaaaataccaacattggtggaggttggcagttggtttataaatcagctgatggtgctgggggtgggaaaagagaaggactccaaagggtttatttgcacgcagatactgctgcactttctcactctcagcatgtttcatttgtttcaacttctggctatgacataccgatagatggcggtgaagcatatcaagctgctgctcttgtcagccagtcagttctaggtactcatgatatgttgcatctgacagaagttgctgcaaaagggccaaaatggagagctctgctagagccaggagtcaagcgtgcattaattgttggagtaggacttcaaatacttcaacaggctgctggtataaatgggtttctctactatgctccccagattcttgagaaagcaggagtaggggatcttttatcaaatttgggccttagttcagcatctgcttcttttcttgtaaatatcattacaacattctgtatgcttccttgtatagctattgcgataagactcatggatatttctggcagaaggtccatcatgctgtacactgtacccattttgatagtttgtctcctgatactagtgatcaagcagttctttcaaatcaattctgtcgtcgatgcagcaatcactgctattagtgttgtggtttatgaaagcgtcttctgcatgggctttggcgttattcccaacatcatatgtgctgaaatctttccaacaagtgttcgcggaatctgcatttctctgacttctcttacatattggggttgcaccttgattgtcactttgatattcccctacttgctccagcttctcggtctcactggtgtctttggattgtttgttgttggctgcatcatttcatggatatttgtctacttgaaagttcctgaaacaaaaggcatgcctttagaagttattattgaattctttgctattggtgcaaagcctggtactgatcctgccgcattgggaatcaaaggctgataccttagtgaatactgataagtttataaattcagtaggttctgattcctcctaaaatgagttgagaagtatggaagattgaaactatttggcattgggacatatgtcagcatgcagcgacttccccttttgtgcttttaggagaaattgagtataatctagtaatttatttatacacattatgattaatgtttagaatattccttgtattcttttatcttttcactccttagcatttgccctttggtttttcaccatgctttggaacaggtgatgtgctctagtgatatttgaggtctgaaaaggtcatcagtaaaaaaaaagtaaaaaaaaaaataacgagtctatctatcggtct

SEQ ID NO: 77968 - DNA, 259 bp, Glycine max
  Clone ID: PAT_MRT3847_41421C.1
gctctctctcagactcatacaaacatatatatcgctctccatccaatttacatacgcgaacccaagaggcgctacgatgatcgatatccactcgaccgctagacaacgagtcagtagttaatacgcttcctaggatggactggtaaaggaatcagctcaatggagtctcgctacagtgaaggtgcattctatactaccggggctgatagtgagccatccgcagtctgaaagctctcacagcttacacgagagtctgatg

SEQ ID NO: 77969 - DNA, 1641 bp, Glycine max
  Clone ID: PAT_MRT3847_41422C.1
tgctcggcaccaggcaagatgttgcaacaattactggagctgaaaatgttttggatgctccagaatccgaggaagtacaatcagagcaactggctgaagcaggaaacttagaagcaacggttgcacaagaagctgccaagttgcaatattatgaattgacccattcagcacgattactccatggtggatcagtaccctatatttggtcgtggtgaaaatgaaataggtgagactcacgtaccagtatgggacgctgatgagagtgatgctgcctcagatattgacagtgatgaggttgttaagggggatattctggaggagcattatgaagtgtatgaagaacaagttcagcaagatattgcaacaattactggagttgaaaatattatggtggctccagaatcttgggaagtactcaaaatgctcgattcagagcaagtggctcatgcaggaaatttagaagcaacgattgcacaagaagcagcagcaaacttaaatgttgaaaatcagctcagcttgaattcatcccctgctgaaatctgtgttgaagcgtatgagtcagatacaaagcaggcacaagaaaaggatgctaaactcaatgtcaatgagcaaagtgacataagtttagattcagatgttgctgccgtgaacgatgatgtagcaaaggaaaaatcagtaagcatagatgctgcaattaaagggaatgaagggcgattaggagcaattgacattcctccacatgtgatgctatgtttgctactcggtgcaggtactgttttaattgcagctgcagctttcaacttgtcaagaaagggtagcaaaagcatgagctccatggagaagcccctggagttacataatgactcctttccatctaagaacaagcagatttctccagagaagtcatctgggcccgtagaaatggacgtgcttgaagattcatcatgcccttcagaagcgagcagcattcagcaaagctcattctacagtgaaaaagaagtgaatgaaggtcacaggctaggccctgagaagaagcgcaagaataactacaggagagaatctttggcttcttctgcatcagactattccatgggttccccatcctatggaagcttaactttgtatgagaaaattccaatcaagcagggacattgggaggacgagatcatcactcctgttaggcgttcaagtagaattagaaaccaagccacttctccttcataacctggttttgtttgtgtttggtttttaattcgtgttccaaagcatgttcaaacttcaacccaatccatggggtgtagtttcattgaactgaataactgtctgaatcttctgaatggaatcaaactcataccttggtgttcaagtaggattagaaacctagccggctacatttatccgttgtaatatgaccagcataactggttactgtaagcagaagtgtcctatcttctgaatcttgattcttctgtagcagaagaaatttattgttgagtcaatctgattggttattaatttgtattaatccaatggcctcaccataattattattaatttgcatattccgtaagcttttgaaatgaattgtgcatatccttgaatactttatttaaatgtactaccacctattaacctcgccaa

SEQ ID NO: 77970 - DNA, 705 bp, Glycine max
  Clone ID: PAT_MRT3847_41423C.1
attcatcatgccttcagaagcgagcagcattcagcaaagctcattctacagtgaaaaagaagtgaatgaaggtcacaggctaggccctgagaagaagcgcaagaataactaccggagagaatctttggcctcttctgcatcagactattccatgggttccccatcctatggaagcttaactgtgtatgagaaaattccaatcaagcagggacatggggaggaggagatcatcactcctgttaggcgttcaagtagaattagaaaccaagccacttctccttcataacctgattttgggattagtttgtgtttggtttttagttcctgtcgtcaaggatgttcaaacttaaacccaatccgtgggtgtagtttcattgaactgaataacgtttgaatcttctgaatggaaaaccaaacatcccttagttttcaagtaggaatacctagccaaattttatccgttgtaatctgacctgacccagcataactgttaatgtaagcagaagtatcctatcttctgaatccccttgatcttctgtagcagaagaaatttattgttgagtgaatctgattggttattaagttgtattaatccaatgacctactgcattttccttcttattttgctctgtaagcttttgaaatgaattgtgcatatccttgaatactttatttaaatgtactaccacctattaacctcgccaa

SEQ ID NO: 77971 - DNA, 678 bp, Glycine max
  unsure (1)..(678): unsure at all n locations
  Clone ID: PAT_MRT3847_41424C.1
cttatacacactcattttaaggctgttatatatatttctgttattgaaacttaggttgtcaaagctgctgaaggtcgccttcctgtatttttggatggtggtgttcgccgtggaactgatgtcttcggctcaagctcgagccgctcgagccgctcgagccgcaaagctgctgaaggtcgccttcctgtatttttggatggtggtgttcgccgtggaactgatgtcttcaaggcattagcactaggtgcctctggcatatttgtgagtacttcatgaccttttccaaaagcttagtataattcttggcttttttcatattgggataacattttcagatattagttccctattaattgtttgttgttatacacatatattgtcatttattgcaagagccgaccacgaatttggatcccatgtccatgttatttactaccatgaaaatagattgatggaaagtgatgagatagaatagaatgaagtaaaatacaacatcatggaataaaatttccattttattatttgaatatgttatgatggaatgaacaaaattcttattccctgtcattcctaacaaatttaggaaggtaaagaatgaaataagataaaataaggttatattccatcctcattntatcattccanacaatgaaacagaataccatcatattccatttc

SEQ ID NO: 77972 - DNA, 565 bp, Glycine max
  Clone ID: PAT_MRT3847_41425C.1
ggattccggaaaccatgaaaaaacccaaacccaaaaccccccggggcggggggggggcccggccgggaaacccggaaacgggacccggagccggaccggcttcccctataccgaagggggaaaaaacttggagcagggcgggacaagggggaaaccgggggaaaaggggaaaagggtaaccgttcccaaaaccaaacaaaccggaagccgaaagcgtaaagccgggggccccgggggcctaaacaaaccccaaaaaaaggggatgggccaaccgccccctgcccagttggaaaaccggaaaccccgcggcaaaaaagaaaaagaaaaccccccacgcggggggggaggcggtttgggccccaggggccctggtttttttacctttgaaaaggggaaacgggaaaggcccttacccccctgcccccgggacataaaaaaaaagccgcacaacgggtgatccccgcctggcccacaaaagcccaaaatcctggtggaaaagagggaaaacaataaagaaaaaaaacccgtggtcccggttatcgggggaaaccccccacttaccccc

SEQ ID NO: 77973 - DNA, 813 bp, Glycine max
  Clone ID: PAT_MRT3847_41426C.1
atcggaggacaccaaatctcacgagttaactgaaactcatgtgaattcgatgaacaagaggttggttctcaagttgccaaatcgtgatatatccaggtccacaaatgagtttggctaccaggctgagttggttggctcatcatcaaaaactgcacaagaagctaccgattttaatgggaacagaccaagttctaaggattcagggtattgttctggaagtacaagttaccctgcagttgaaaaaacagatcaagcaaaactaggccaggtgacagaccatgtagacttgctggggaaaattagatggggaatggttagggctcgttcatctaaacctttgagagtgggagaagctatgccatcagacacagatccctactctggaaaatgtcctaatcatctcgatgaaaaagaaaatgttagcagagggcatgggaaagaggacaagaactttagtgcactaacccccgaggtaacccctgagttagaaatccataaggatgactatagggtatatagtttgacagagattaatggtaaaaaagaaaatgctatcagtgggcacgagaaagaggacaagaactttagtgcactaacccctgagttaacccccgagttagaaatccaaaaggatgactataaggtagatagtttgacagagattaatgaaaattgtgctggtactacctcacagccttttaatcttactgaagatggaggagagatcacagcttccagcaattgcagggacaaaaatgaatcactaatttctgcttatgtgattcctcacgatattgtaactgcttccatcgg

SEQ ID NO: 77974 - DNA, 321 bp, Glycine max
  Clone ID: PAT_MRT3847_41427C.1
ggatcaagaacgagaacagcaaagtggcgtcaaagagagagagatggaggttattgtgcctagggtggatttgcaaaagctttcatatgaagatgaacgcaagattgtgatacaaacatttgagtaacgattgtgttatagagacatacactacgaaagttcactaacactcttggatgacatgtagatagtggttaaattcttgcatgatgttcacacggtaatgagaatgcatatcataccgttctgtccctaaagtggatatagtgcgtcatcttcaacaaatcctatatacgagggcatggtaatatatgatatgca

SEQ ID NO: 77975 - DNA, 337 bp, Glycine max
  Clone ID: PAT_MRT3847_41428C.1
aaagaaactattaataaatcgcataggattttgtcttttgttgttggaaacattgagatccccaacatgttgttattgccaacactaaaattgttgttctcatatataatatatgtacatgtaacctattattttctctgcaaaccggggtttgtcgatttctttttactaggtggtttaaaaggtggcctattaatgttgtgagggaatctactaacgactaatttgactgcgatgcaagcaacatggggtgaccccagacacctctggttgagggaccctattggggtggggggtctggtttgtgggggggggttttgggcatggttgtgggtgg

SEQ ID NO: 77976 - DNA, 205 bp, Glycine max
  Clone ID: PAT_MRT3847_41429C.1
acgagtgatcgaagcttcacatcagtccatatccagtttatggtttccgatccatagcctacctttgacggatcgaaaccttaaatttgggattaggtttgagcaatctggttggtagaacctttggtcttagagagttaagtcttatgtctggattagacgatcaaattcttactgccttggatccttttggtgatgcaaatgc

SEQ ID NO: 77977 - DNA, 284 bp, Glycine max
  unsure (1)..(284): unsure at all n locations
  Clone ID: PAT_MRT3847_4142C.1
gatgcgtgcactcgtncgtggagctntgngntngggtcnagctcgngccncnttntntntcgannntggntnngtgtcattgangtggganangctntggcatggctgnggtagcctntcggtttgncgtgggngtgacggggnncnggncacgncncntgctgcgngngggggnnggtntgggagagttggngnagnttgnnggcccctcngggagttgtggcgggggnatcggggcgggtntgggagnnggggntaggggtnngnggcngggggnncgcngc

SEQ ID NO: 77978 - DNA, 524 bp, Glycine max
  Clone ID: PAT_MRT3847_41430C.1
ggacagaaaaaatgttatgttcatatattagcgacataattattagaaagttcatattcctcttaattttgtaaccatgtatcttagctaggttgtcattacaaagccaatctaaataagtatagatattaaaatgatataaataaataacatctagaactaaatttgtccatgactgcatgcaaatgattttatcctttagtctttctgttttgcattttctccctcctctccattgttgtaggcagtagggatgaaggaattccactgatctaagttgcgaatttgatggtgcccccatcaagtgtgatattgcacttgttttttggggcctaatgtttgtccaagcactattttagtctaagaacgaataagtactttatttctaggctgcttctgcttctgttcttctcaaacagaatgttgaagaaacataatgcacacctaatgagtaggacttggcgttttgttctgaaatcgtagggagctggatgaactaataaaggattgtttcctaacaagtg

SEQ ID NO: 77979 - DNA, 1798 bp, Glycine max
  Clone ID: PAT_MRT3847_41431C.1
cccgcgtccgacccagtggcttcgaaatcacagaaagttcagcatcatcgttgcgcttcgtcggaggttgccgctcggtgcatggaagacattaccaccaccggagaatgcacgacgacaaaagagaaagatgaaggcgttgttgctcggtgaaggtgagggataaagggaaagacttccattccactattttaattcctagcatccgcgccacagtacaaccagaagcagttcgttgcttaattgaagaagaccctgatcgcaactgagtgaaggcctatgcgtcaaatttaaattcccaagtatcactttggaacatggctgataatgtagttacctccaccaattcttctacgccctcgctgaaccctactcggataatctgccacgtatgtcagaagcagttttcccagtacacgtgtcctcgatgcaattcgcgatactgttccctccaatgttacaaatctcatagtctccgttgcactgaatccttcatgaaagaaaatgtagttcaggaacttcagcaaatgcagcctgatgaacaaactaaaaataagatgctggacatactgaaaagatttcactcacaacaggaaatggatgagaattcttttgcagattcaactttatccgaggagacaatggaaaattttttgtctggacaggaaatcagctttgatgatttatcacttgaagaaaagaaacggtttcacagagcaattgcttatggggaactgagcaagatgatcaaaccatgggatccatggtggtcaaagccttctgccagaaacatctgtctcagtaaggaaggaactcagcttgttcaacctcttccagatcaggaattgctagatgatgatattggaagtgatgaattcagcaaagttcctcttgggcctgaaactccacttcctcctctaagcaggcttagttccaaggagccatcaccccttttaacagttcacctagttgacattctgtatagctactgcttcactcttcgtctctacaatggagattggaagtcagatgccttagggtcagtcatggttgtattgagcgtgtccttggtgttgggtcaaggtgcacagccggagacagtactagaagcactttctcattgcttggagcaggtatgctgtccagtttacagacacatgggaggattgcaatttggtttgggtgtcattgatgatgtgatcagtctgcttggtttgggaactcctgcattggtgtgtgccctttgtgatatgcatcggttgattcaagaaggggaaaaggaggccaaatcagaaagaccgagaaagttgcggacagatgggactagaagtgctattaagctggcagaaaggaggatatatttcatcacgtgttgggttcatgagcagccagaggaagcatggttttctttagcggccattgtaagagcagaaaagacatcagccatggaatttcaacagagcaataaatctgaaaatttgaacaataaggcagaggccaaaggcaaaagtttaattcaggagatttaatgatttacgtagactgctgccccttactgttgaccatatttattttagtcttatagaatatatgtagactgaaaatggttgttctcaaagcagttgtaaatgtacttttacatatagaaatccttattgacgagatattcaatctgggtagtattttttaggactaggaggggtcctggagttccaaagtggcaagaaagttaagtttcaaactaggtgaattgataatctatttacatttaacgaaatatcagaacgtaattattcgc

SEQ ID NO: 77980 - DNA, 441 bp, Glycine max
  Clone ID: PAT_MRT3847_41432C.1
ggccgccctttattattttttgggggttttttttaataggttaggcgttttatacacgacagacatttaaccaaagtcacgttgaagtttttattcacaggagaatacaatatctagacacctcctttttaaatggggatggtttgcttctctacataggaaaactagtaaaagaaaattgatatggaaaaaggccatatttgctgctatactagctgccaagtacgaaatttatctggtattgggggcttgacattagcacatttacgctgtttgttgcacattccgttgatatgttcagatcaattatcagcccatatttacagtccttacatggttcacccacttactacaatacaagaaccacccctttttttagtttcctgaagtgcccttaatgttcttgaaggaaaccctgcttaacttgatttttgacggatt

SEQ ID NO: 77981 - DNA, 610 bp, Glycine max
  Clone ID: PAT_MRT3847_41433C.1
acggtcatgcttcttccctctctctgctcttctctgcctctttgtcttccctctctttgcctcttctttgagtctttctcttccctctctctacctctttctcttctcttcatttccgatgttgcctcaattctcagtaaaaggagttcgttggtaccacacatacaaacgacgcatccttctctttctttcggcttcaatttctctctcctcttcctcctcaactcgatcccaattccactagggttagggttccatcaccctttccccttctcaagctttcctcttttatccgctattgttttcgtttattaattgatcattctttctcgttttgttcttttttggtgaatctaggattcaattctgatgcgattccgagcttgttagatccacgacaaggtttcatttcccagatttttttgtaaaaaaaaattcttcctctatctcaactttcttacgggaagtcatcaaactctcaattttttgggatattccactggcgctttctcttcactctcctgagaagctaagtttagtgtcattatcatagtactggaaagttgataggtgaaaccccttcatggttgccgaagctcatttccataat

SEQ ID NO: 77982 - DNA, 1144 bp, Glycine max
  Clone ID: PAT_MRT3847_41434C.1
cccgattttgcttccgtgccaaattctgaataatcaaggttgtccaaattctaccatttccatacccaaacttcttcaaaattggtcattcatttccataatccaataaaggtttcggatttggcttttcacaacatcatcaccaaagggctcgagcaaggaagcaagtgctcatggctactacagtggcatcatcaatggtagtagcatccttttgttccttttcaaaccccatcaccaccaccccatcatcactctctttcaaagccaaaaccatcaccagaacaagaccaagaacaaaaaccagaactagaacaacgaggttaacatggctgaatcctcaccctcgtggtgctttggttgaggcaacaccacaaccaacaagttcacctccttcaccgagagatggatccatcaaggtgcttgcgtttcctgagaaccgtgctgatgacattcaagctgaggccagagcactggctcgtgctgccaatgcaacttcgtacacccctcagcttgtggcctccaaatatggctcccaacccatcaaggtggtggggagggcccttcaggttctgggtgcggtgggtttgtttgggttgaagctgttgttggaccagaaaagtggagtgcttgatcagaataaaaggattcgtgctcttgagcttagggacacattcactcggctgggaccaacttttgtcaaattgggtcagggattgtctactaggcctgatatatgcccagctgagtatctggaggagctctctgaacttcaggcattgaatttatgtacccttttagctcttaatttgattgttgtagtgtagccagttagacttttctggtgaagcatgttctaggggttaaataacttggcattgtgtgagaattttgattggtccagtgattatgtacatgtgcaacacaagaagctattgactatttcatttgactatatggtctctgaagatttggtcttaaactgaattgactgatgtcgtgtgatccatgtagctgatttcacctagttggataagtcttttgttgttgttgttgtatatgttattgtattgtcaatggacaatgttgatgatatccaatgaaaatttattcacttatgtagtttttttttattggcttaccc

SEQ ID NO: 77983 - DNA, 695 bp, Glycine max
  unsure (1)..(695): unsure at all n locations
  Clone ID: PAT_MRT3847_41435C.1
cggactcgtgggtttattttacttattctgaaaacaaatttattctacgcagtgaatcaaatgacaattttaaacacacaatatagcataatcgacaaatcaattttgagtttctttatcattttctttatttattgacatatttgcactttctgcaaagactctgactcgtggtgatatagggaaggttatagaagttatttttgtgtcatatctagccatttttgcttattggaaaaagccttccctttgtttacagatctggataaggttgcatgcttatttttctcaactgtgaatggttatttctttgcattttttgttttgtttttggttatgggattaattttttaattacgaagaagcttttagagcatcacccgaatctaattcgttttggcttttgtgatcttgataaatctatactaacttggtttgggcaagagaaattggtccttgctcaagtccattctaggacgaaaataaaaatataacagggtatagcagatctctattcgtatgtgggtaacgatagcatgtttctattggtctcttattcttcattggtcacgataacctgctaattatgccacgattgagatgaanagtaacgaactagtaaaccatagtgagaagaacatttcgctactattgttgaaacgtttacaccaggcacttgagtatgatgcactata

SEQ ID NO: 77984 - DNA, 807 bp, Glycine max
  Clone ID: PAT_MRT3847_41436C.1
aattaatgactccggcgataaaagagccactttggcaaagaattcagaatttagaggcagtggtaactgagatggctaataaacctaatacaattcctcctgaaaaagaggatattcttcaagagtcattgagtcgcataaaatgtatagaatatgacttgcaaaaaacaaagaaggccctgctagccactgcttcaaagcaagttgagcttgccgagtcattggaaagcttaaaggagagtaaatttgacggaagaaattcatgttggcctaaaaatagaagttatgccccaggaagatgagcccgtttttcagcatcagtttgcagtccattgtttttgatactttacagctgaatcactaccagagctaaacttctattggcttatataaaagaattactctcattatcatataggcttgaggaatgtgggctatggggagtgcatagccccaatgtatagaaggcaacaagaattttttatgaagattctggactccaaatactccttttaaatgtataactgagtgtgttaaccacatttattttcttattggcttttctgtacagaggacatatattcaaagtatgctactcaaattcagatgtattttaataccagatgcatatatgcccaaaagaaatattttctgtaatacattgtaacaaatagcgagcgcttaactgtaaatcttggattttactagaggatgtgctttccccggaaatttttagttttggattaagctctctcctgaaaaaaaaaaaatgaaataaatagaaaagaaaaaaaaaaaaaaaaaaaa

SEQ ID NO: 77985 - DNA, 233 bp, Glycine max
  Clone ID: PAT_MRT3847_41437C.1
ggataccgcgcccgaatttatcggtgcgaccacccgtccgcccacgcgtccgacaactggcagtaaattaactaaccgagcggtggctaatagagtgagatagcttacagacagtgcaaggcaaggaggataggatccgctcttctcttcccatcatgcagcgcagcctgatccgaattctaccttgcagatgcacatggacttggcgagttaaccttcagtgaagcagaagc

SEQ ID NO: 77986 - DNA, 323 bp, Glycine max
  Clone ID: PAT_MRT3847_41438C.1
aaagcggccgctttttttttttttttttttttgtatttcgggccaccattcatgttaaccctttaaaatctgggttcttaattcttaagcggagggaggggtcccaggaattcctggcccttagccttttttgaaccaggtgcttggggtaaaggaacaaatggaattccccccatttaaatttaaagtgctcgggagtaccagatttaattcgatcccaaaaactttgctttggaaaaccaaaacctgggaaatttccagagctcagggcaaagttacaccatagttcaaattcaaaaaataaaatccttctgactggcctg

SEQ ID NO: 77987 - DNA, 1168 bp, Glycine max
  Clone ID: PAT_MRT3847_41439C.1
agaaaatggagcagttcattgataacttgccgccgatggatctgatgcgatcggagaagatgaccttcgttcagctcatcatccccatcgagtccacgcaccacgccatctcctatttaggcgaactcagccttctccaattccgcgatgtggagaggattgcaagctaaggttatggagtatcaagtctggtgaactgctttttgaggacaagttctctgattcagttatcttcattgtgtgctataaaacatatggacatagttttaaagcagaagaggaaaaccaatacaagcgtgactcatctcagggtgcatggcttggatcacttgaaggactattttatatgtgctggttatgagtgtgaagggtcctgcagctatagaatctgaagctaactagatgcccacaatacctgataaatactaagtttatagcatattactcacatgaagcagcttaagtcctgagattctagaaggtttactaagatcaggtttgcaatgatacggcatgtagatgtcacaatggatcaggtttggggatggctttcatgtctgcaaggtttatgtcaacaaaagtcggaaggagttgatcggccgcaatggtccacatttagtgatgttaactactcaggttctctttcatccacatttggtagcaaggctttagcaactgaaggagagaaggaaaatttgatgacagattatgtcttaagggactggaggtctgtgctgatactattgtaggaaatgcaatgttaagggggatatctggtggacaaaggaaacgtgttacaacatgggagatgctggttggactagctaatgcttaattcatggatgaaatatctactggtttggatagctcgacaacttaccaaattctaaactcgctcaagcaatgtgttcacattctcaaaggaacaacagtcatctctttgaattttaatgaaatatctactggtttggatagctcgacaacttactattccctcttgcattttaatgatatgcttgtgtgatgctactaaaaaattttcaggggtcagaaagactttgaattcagagttatggcatgcttgtgcagggcctcttgtgtcattaccctaggttgggagccttttgttttacttcccttagggacatagtgagcacgtgaatgaatt

SEQ ID NO: 77988 - DNA, 578 bp, Glycine max
  Clone ID: PAT_MRT3847_4143C.1
ggctcgagcggatcttttcaagcattttttggtatatgatctcttatgcctttgggttcatattatagtgatattatcattattggtggtgagaactggttttgtttgccttcgcatttgtactgtacaggttatggaagtgaatgaattccttcatttggtttcttcaattatgttgtctgaatcacagatgacgtatcaggaattttgagtcttgggttaatggggtgactatagaaatgatgactttgtcatgagcatttatgtcaggatttattaacatgatatgccgctgttatggattggtatatgccaactttcatataggaagaagaaagaatgtgacaccaaaaatcctgttaattggaagaattgcataggctttattcaactagaacgtggcctttagatcaagctcgtccatctactgggactgggtgcctttttggtatgaaatgtcctagcagttatgctgaggatgttgttgcaataactctgtcacattccaatgtttggtgaagcaacaatgtggtgttgagtgttactggcaatctaaggaatgatgtgcacttaccata

SEQ ID NO: 77989 - DNA, 111 bp, Glycine max
  Clone ID: PAT_MRT3847_41440C.1
tctaagaaggcagttttttctccataccacacaagagtttggatttgcaatggatcaatatcttccacttgagaacgagagataggccctattcccagggcccaaggggat

SEQ ID NO: 77990 - DNA, 533 bp, Glycine max
  Clone ID: PAT_MRT3847_41441C.1
ggcataaggagtgcctgcagcactgtgcaactttatggatgtgtcaagaggtgtgctagcaggtttgcacccaagtaatcctgaatccttaagcagatccagacaatatttcctctgtgagatggtaatacccagtctagaatgagcaacttcaagcccaagaaagtatttcaacttacccagatttttaattttgaaagctaaatcaagaacattcttgatcctgtcaaattcatcaattgaatcacctgcaagaatgatgtcatctacatataccaacagtgcagtgaaagtatttcctttggtgagagtaaatagggagtaatctgaaattgattgtatgtaaccttctttgagaagcaaattagtcagcttttcataccacttcctacttgcttgcttcaacccatacaagctcttttgtagcttgcaaacagaattaggcttggcacaagttaccccatctggtattttcatgtaaacatcttcttgaagatctccatgaagaaaagcattattgacatccaaaaaaa

SEQ ID NO: 77991 - DNA, 398 bp, Glycine max
  Clone ID: PAT_MRT3847_41442C.1
acctttggtctgatgtatgtgcttgcatggtcgtgagaagatgatagcacgggatccctagcctgaatcaaataacctagcttagctcgttctgactacggagagggaaatacacgggcactagcctccgtcttcttccgctccagtcctcgacgcgataccgaacagagtagacgttaaagaccgtccgataaggaagtgtcagctttagggcacacgtccacctcataggtaacgcgtatacccgcgtatcactgacagacctactggcggctatcgctaaagtttcacctgtaaacgtcactgtagtaggttacgctgactgataccatcatcgttaaagacgttacgtaacaaatacataaataaagctacaataactctcaatctctatacac

SEQ ID NO: 77992 - DNA, 252 bp, Glycine max
  Clone ID: PAT_MRT3847_41443C.1
acagccgtccgatttgacttttgaataagtccgcagggtttttttgttaatatggtccatatccaccactgggccgggcccacgtgggctaccattgttctcacttaaaaaaaaaataccaaatgtttcttaattggtttcaaaattaataaattatttaatattaaaaatgggggggccgttttaggggttccaggttttcgtcctctttctggcaacgtatatagttttttatttggtgtacttaattta

SEQ ID NO: 77993 - DNA, 623 bp, Glycine max
  unsure (1)..(623): unsure at all n locations
  Clone ID: PAT_MRT3847_41444C.1
ggctcgagataagcattgaatgaagatgaagttattaggtttacttgtgttggtattgggcagtacaatcagtgccaatggtgcagtttctgaagtttcttggagagaaatcagcaaaatcaatagggaaggaccatacgttggtatagcggttccaaatgcctttgagctgaatcctcttcttcgttcacctagctttgtgccacataacaaatttccttactttgattttgccggtaacttatacaaccatgtgttgttcaattatattgtaatacgcttctacccaaatagatatcctttcttctacttgtttttttttttatatcaacaaatgttaatggttgattttttgttagtagatgaatttgaacctacaatctcccctttcttcattaaccactagatcaactttatatctctttttcttgttttagttgataattagtaaccatgaactgaaacaaatctgcattgattttgaatccttttagactctctgtaactccccccataatcattatngataattntgcatgaaaatagacacatcagccataaatcaacaatttcaaatcattcggtgagttgattcagcgtgaagttgagatttggaaataact

SEQ ID NO: 77994 - DNA, 629 bp, Glycine max
  unsure (1)..(629): unsure at all n locations
  Clone ID: PAT_MRT3847_41445C.1
agctcagtggagtcacatgggaaatggagaggaagaggatgaagaggaagagaattgggctgatttctttgattccttagttcctgcaaatattgctcaggagcctcaaggcagtagttcctcctttggtgtgttctattaaaataattgcatccttaaatcagcatggctagataattaagttgtttgtttttccatgttttttttttttaagttttgaagttggtaatgtaaatatatatctatatatatatataggtacttacttgaatcatggatgtgaccatgtgcagttttagacttcaatctggggtgaagtttttagtgcccttttatggttttatagactaggcctcagtagcagcagcagcattgtattgtttggacaaaaaagcttttgcaagttgtacttggggtttatttcctannaaaaaaaaaaaaaaaaaaaaaaaaaaaaaaaaaaaaaaaaaaaaaaaaaaaaaaaaaaaaaaaaaaaaaaaaaaaaaaaaaaaaaaaaaaaaaaaaaaaaaaaaaaaaaaaaaaaaaaaaannggggggggccccttttaaaggacccaattttacttcccggggctgggaagttaaaattttttttatggggcccccaa

SEQ ID NO: 77995 - DNA, 418 bp, Glycine max
  Clone ID: PAT_MRT3847_41446C.1
ggggatgaagataggatgcttctgaaattccgatgtcaataaggtccttaagtaaaaaatactactgtcgtcacagatctgaatctggtcccctctggtatcgtgtagtactagtattttagttgcatctaataaatgaggatacccaagaagttgatttaataaatgttcaccaacttaacataagctatttgattttgctgacaaatacagaggcaaatatgacagcagcatcacggttgcccaaaagtattacagatccatcagtggttacaatgatgaattgctctgggctgctgcttggttgtatcaagcatctaacaaccagtattacttggattaccttggaagaaatggtgattccatgggtggaactggttggagcatgactgaatttggttgggatgtcaagtatgct

SEQ ID NO: 77996 - DNA, 356 bp, Glycine max
  Clone ID: PAT_MRT3847_41447C.1
ttgtccccatgtgtttaggtgcacttctatatcaaacatcaactgtctgcacaaccataggaaaagggcaactgaaagtcaaacacaatataaaattacaaactaccatcaaatattgtagcacaatttcaaattccaaaaaagaatcaatcattaacaagaaattttacacacaataaccatgcaagcaagcatacaagaaattgttttcaggaatgctgatgtaaattctgatataattcttgatactgttatgttcagggcttggacgtggatgactgcaaaagtgaaaggttttaagtactactttatacagtggatacaaggtatatgagcatgcattcaagcactgattt

SEQ ID NO: 77997 - DNA, 2486 bp, Glycine max
  Clone ID: PAT_MRT3847_41448C.1
ccacgcgtccgctctctctctctcccttttcttgaaacttccctctttcctttaaggattccctcctaatttggtgggattatccctcatcagcattgccattccctgtttcactcaccacattgaagacatggaaaagcttattcgcatgttccctttgctccttgttcttcttctgtgccccaattttgcttttgctggccatgactacggccaagctcttagcaagagccttctgttctttgaagctcagagatctggttaccttccccacaaccagagggtcacatggagagcacattctggtttgcaagatggcaaagcaagcggggtggatctagttggagggtactatgatgcaggggacaatgtgaagttcgggttacccatggcgtttaccgttacgatgatgtcgtggagcatcattgaatacggcaaacaaatggctgctagtggtgaacttggtcacgccatggaagccgttaagtggggtacggactacttcatcaaagcgcaccctcaagccaatgttctctatggagaggtgggagatgggaacactgaccattactgttggcaaagaccagaggacatgacaaccgaccgtcatgcctacaaggtcgatccgagcaatcccggttccgatctcgccggagaaaccgccgccgcaatggccgccgcatccatagttttcagacgctctaaccctgcctatgccggcgaacttctccgccatgcctaccagctatttgattttgctgacaaatacagaggcaaatatgacagcagcatcacggttgcccaaaagtattacagatccatcagtggttacaatgatgaattgctctgggctgctgcttggttgtatcaagcatctaacaaccagtattacttggattaccttggaagaaatggtgattccatgggtggaactggttggagcatgactgaatttggttgggatgtcaagtatgctggtgttcagacattagttgccaagttcctgatgcaaggcaaatctgggcatcatgctccagttttcgagagataccagcagaaggctgaaactttcatgtgttcatgccttgggaagagtagtcgcaatgttcagaagactcctggtggcctcatcttccgccagagatggaacaacatgcagtttgtcacaagtgcctcatttttagccactgtctactctgactaccttgcttcatctggtagaaacctgagatgcagttcagggaatgtcccccctgctgagcttctctcccttgcaaagtctcaggtggactaccttcttggggacaacccaagagctactagttacatggtgggctatggaagcaacttcccacaaagggttcatcacagaggttcatccattgtttccatcaaggttaacccttcatttgtcagctgccgtggaggttatgctacatggtttagcagcaaaaggagcgaccccaacctgctcactggtgctcttgttggtggacctgatgcatatgatgactttgctgatgaaagagataactatgagcagacagagccagcaacatataacaatgctcctcttattggtattctggcaagactaggtggaggtcatggtggctataaccagcttcttccagttgttgttccagctcctaagcctgctgttaccaagcctcaaccaacccccagtcccaagacaactccttctccagcttcatggtcaggcccaatttccattgaacagaaaaggaccacctcatgggttgccaatggaaaaacttattacagatactcaacagtcgtgactaacaaatctaacaagagtctcaattctctcaatctttcaatatccaagctttatggtccaatctggggtgtcacaaagtcaggtgattcatacacattcccatcatggctcagctcattatcagctggcaaaagccttgaatttgtctacatccattctgcttctccagcagatgtctccgtggcgaactacgtgttggcctgaaagtggcatgggaatggtttactgctttcttgtgtaagactgtgtagccatacaaatgtgcagcgaggggagtgtctttacgtttttccttctataatttggtgtcaaatcttcttcttcttcttcttcccttgtgtattttgcatttcagtaggttagatcaaaataggtagattatataagatggaaggaccggagcagaaaggagtgaagagacaaaaggcagagctcatcctctttcttctccgctttacaacttatatacagtgagtgatacaagacaggtagtgaaacagtgttgttgagaagttaaaaaaaaaaaggtgaacttctcaatatttcagagaagagtcatcacttgtatttttcaacagctttggatgtcttttctgtgtttgatgttgtaagctttgcagcattttgtaatctctacagagaaacagtttgtgctatatagtattatgtttttgtgctgtgc

SEQ ID NO: 77998 - DNA, 3160 bp, Glycine max
  Clone ID: PAT_MRT3847_41449C.1
ccgactgtcaatttgggggttcttgataccttcctttttcccctctcctctttaaatatatagcgcctaatttgcctcggttatccctccccggcatccctctctctcttccttttcttgaaacttccctctttccttaaaggattccctcctaatttggtgggattatcccaagtttcagctgctaccactcatcagcattgccatttcctgtttcactcaccacatggaaaagcttattcgcatgttccctttgcttcttcttcttcttctgttccccacttttgccttcgctggccatgactatggccaagctctgagcaagagccttctcttctttgaagcccagagatctggctaccttccccacaaccagagagtcacatggagagcacattctggtttgcaagatggcaaagcaagcggggtggatctagttggagggtactatgatgcaggggacaatgtgaagttcgggttacccatggcgtttaccgttacgatgatgtcgtggagcatcattgaatacggcaaacaaatggctgctagtggtgaacttggtcacgccatggaagccgttaagtggggtacggactacttcatcaaagctcaccctcaacccaatgttctctacggagaggtgggagacgggaacactgaccattactgttggcaaaggccagaggacatgacaaccgaccgtcatgcctacaagatcgatccaagcaatcccgggtcggatcttgccggagaaaccgccgccgctatggccgctgcctccattgttttccgacgctctaaccctgcctatgccgccgaactcctccgccatgcctaccagctatttgattttgctgacaaatacagaggcaaatatgacagcagcatcacggttgcccagaaatattacagatccatcagtggttacaatgatgaattgctctgggctgctgcttggctctatcaagcatctaacaatcagtattacttggattaccttggaagaaatggtgattccatgggtggaactggttggaagatgactgaatttggttgggatgtcaagtatgctggtgttcagacattagttgccaagttcctgatgcaaggcaaagctgggcatcatgctccagttttcgagagatatcagcagaaggctgaatctttcatgtgttcgtgccttggaaagggtgatcgcaatgttcagaagactccgggtggcctcatcttccgccagagatggaacaacatgcagtttgtcacaagtgcctcatttttagccactgtctactctgactaccttgcttcctctggtagaaacttgaggtgcagttcaggcaatgtgccccctgctgaacttatctcccttgcaaagtctcaggttgactatcttcttggtgacaacccaagagccactagctatatggtgggctatggaagcaacttcccacaaagggttcatcacagaggttcatccattgtttccatcaaggttaacccttcatttgtcagctgccgtggaggttatgctacttggtttagcagcaaaaggagcgacccgaacctgctcactggtgctcttgttggtggacctgatgcatatgatgactttgctgatgaaagagataactatgagcagacagagccagcaacctataacaatgctcctcttatcggtattctggcaagactaggtggaggtcatggtggctatagcccaatttccattgaacagaaaaggaccacctcatgggttgccaatggaaaaacttattacagatactcaacagtcgtgactaacaaatctaacaagagtctcaattctctcaatctttcaatatccaagctctagggtccaatccggggtgtaacttactacagatactcaacagtggtgactaacaaatctaacaagagtctcaattctctcaatctttcaatatccaagctttatggtccaatctggggtgtcacaaaatcaggtgattcatacacattcccatcatggctcagctcattatcagcaggcaaaagccttgaatttgtctacatccattctgcttcagcagcagatgtctccgtgacaaactacgtgttggcctgagagtgacatgggaatggtttactgctttgttgtgtaagattgtgtagccatacaaatgtgcagtgaggagagggtctttacgtttttccttctatattttgatgtcaaatcttcttcttcccttgtgtattttgcatttcagtaggttagatcaaaataggtagattatataagatggaaggaccggagcagaaaggagtgaagagacaaaaggcagagctcatcctctttcttctccgctttacaacttatatacagtgagtgatacaagacagacagtgaaacagtgttgttgagaagtttaaaaaacaaagtgaacttctcaatatttcagagaagagtcatctcttgtatttttcaacagctttggatatcttttctcgattattggaccataaagcttggatattgaaagattgagagaattgagactcttgttagatttgttagtcacgactgttgattcatacacattcccatcatggctcagctcattatcagctggcaaaagccttgaatttgtctacatccattctgcttctccagcagatgtctccgtggcgaactacgtgttggcctgaaagtggcatgggaatggtttactgctttcttgtgtaagactgtgtagccatacaaatgtgcagcgaggggagtgtctttacgtttttccttctataatttggtgtcaaatcttcttcttcttcttcccttgtgtattttgcatttcagtaggttagatcaaaataggtagattatataagatggaaggaccggagcagaaaggagtgaagagacaaaaggcagagctcatcctctttcttctccgctttacaacttatatacagtgagtgatacaagacaggtagtgaaacagtgttgttgagaagttaaaaaaaaaaaggtgaacttctcaatatttcagagaagagtcatcacttgtatttttcaacagctttggatgtcttttctgtgtttgatgttgtaagctttgcagcattttgtaatctctacagagaaacagtttgtgctatatagtattatgtttttgtgctgtgc

SEQ ID NO: 77999 - DNA, 188 bp, Glycine max
  unsure (1)..(188): unsure at all n locations
  Clone ID: PAT_MRT3847_4144C.1
cacggctgcgagaagacgacagaagggggcacctttccattttaatactataaatatattctctggccatcttcctctccaaccaacaaccattcatttccttgacactctcagctttatatatcctntacattgtcataagcattatactgatcaaagaaactcaaaatggtgtggctgaaattggg

SEQ ID NO: 78000 - DNA, 161 bp, Glycine max
  Clone ID: PAT_MRT3847_41450C.1
caaatcccttttttatgactcatgtgcatgcttccaacgtgttggagcatgggatatccattattcttcgtgtcttacaagcttctgccagattcccattgaggtcaatggtgagttggaaggcagcttgggcctttatggatttaagtttgtagagccca

SEQ ID NO: 78001 - DNA, 707 bp, Glycine max
  Clone ID: PAT_MRT3847_41451C.1
ctcgagccgattcggctcgagctcctccctcctccggcgttgctttcacgtcgcttcgctggccgaaaatatggcaatcaggatgggaggcaacagggtccctgttcgcactccatttagagatgggggagctccaattctgagaatctgtgactgctcccttttgagcagcggctcccccatctcaagcaatcatctcagcagcctttagatggattttttgttttgcaatctcgttctttttgcatatcacttaccggcgttcatcaccactctacgcccttgatttaagtgcgcacccgagaatgatacctttgttttttgttttaatccatctggaggtaaggggcaggaaccaagacggcgcatccacaggatggaatggccgtcgagttcttctaacgccccccttttttggttttcacatctttagacagattggtacgcttttgacataccccccgactgtcgtcatgttatttcctttgtcatctgaggatgcgcattgtgggggaagcgcgacgatgtgaaaaaaagaaggaaatgtgtggtggactgtatacatcgcccaggattgttgtttgtgtttttgtagcaggtctttacgattggaacacttcatctatggggtcgcgtgcgatccgcctgggtgtggtcatgttcagagctgttatttttttgaggtaatgagagagtcggcccgcctc

SEQ ID NO: 78002 - DNA, 586 bp, Glycine max
  Clone ID: PAT_MRT3847_41452C.1
gggggaatcggcattttagggagaaaaaataaaatcgtaaaggtttgagcacattctcgtacaagaccaaaattctaacagaactacttttagcattggccttcagaaatttaaaacacaacgaccccgataaccctaggggggggaataaaggcgatcgaggaacaggccgcctcccccgaaaagaaaaaaaataaaagaaagggggcggaatatccatagttacccaccgtaaggtgggggatatgacccgatccgatcttaatcggggggggcctcacgccccgggagctggatttttgaccttactttggaaatagccgccgtattccctggcgtaatctttgacgtgggtgggggggtcgtaaatgcggctccgcgcgtaatcaacacggtcggaaccgggcggggggagccccctgaagtaacggtacattcacgacagcgcggccacgagggcaacgccgaaaccgcacacggacaaaaaccctgcggtgacgatgaataagagggtgccgggtgggaccccactgggcttgatacgatgattaaggggaggaaaaatatgaggcccaggacggcccct

SEQ ID NO: 78003 - DNA, 436 bp, Glycine max
  Clone ID: PAT_MRT3847_41453C.1
gattgtgtgctaatgtgaaaatccctctcaatgaacaggcttcatgtcctccgcttcctgaaagatcaccacttcggaaggaaagatcagacaacagaagcgagttgttgagagctacgttggtggaacatcaccgaatcgaatcgaataatcaaacatgacttgtccttccatttcgatttaaaccccgagacgatctatcgaagccacttcaaagattattcttagatcgcttcgatggtcgatcactacaacaagctggttaaactagcggcgagggctttctacgatgatctgacgagtaaaggagagaatcaacccaaatcgggaaggagtgataacagaggaatcgctgtggtgattctcgatgccctcacgaggcgacaatgggtccgagaagaagaactggcaaaagatctcaaattacacacaaaac

SEQ ID NO: 78004 - DNA, 256 bp, Glycine max
  unsure (1)..(256): unsure at all n locations
  Clone ID: PAT_MRT3847_41454C.1
caaaattggatgtgttggccatttgacctgtttttatcctcggtaactcaatacacaggatttttgtgatgaagtacattataagtcaattacttaatggattccattttttaattggtatatccttaaatttttttaggctcaatttgatcctctaaaatttacgaagttaaaattttgttctttaaaaaaaaaaaaaaaaaaaaaaaaaaaaaaaaaaaaaaaaaaaaaaaaaaaaaaaaaanaaaaaaaaaaa

SEQ ID NO: 78005 - DNA, 298 bp, Glycine max
  unsure (1)..(298): unsure at all n locations
  Clone ID: PAT_MRT3847_41455C.1
tcngntcgagatttnnttatttaaaagagacccttacttgttttcttttttgacatgcatcacttaatctctttcaaatttgagttttggtaacccgatcactaaatctttagaaattaatttatttaaatgatccatatttatgtgagcaattctcttatgccataaccatgaatcattatctttgcttaaaaagcattaaacatgatttgatgttttatctaaatttatcatgtatacattattagttctatatcctatgtnttatattcttgtcagtttattttcaataaaacaa

SEQ ID NO: 78006 - DNA, 300 bp, Glycine max
  Clone ID: PAT_MRT3847_41456C.1
tattgtggtcttttttttttttttttttttatgtagcaatattatctaaaaggactgaaagcaacataaacattgagcatgtctaatacaccccttctgtcgtctctcgcagccgtatccttctgtcgtgttctcgcagccgtacccttctgtcaactactggaggccgtatacttctggcgtcttctcgcagccggacccttctgtcgtcttctcgcagccgtatccttgtgtcgccttctagcagccgtacccttatgtcggcttctcacaaccgtagaacgcgtgggtcgccccgga

SEQ ID NO: 78007 - DNA, 681 bp, Glycine max
  Clone ID: PAT_MRT3847_41457C.1
cttgggaagctggacgcctgaggtgcccctccggaatatccgggtggacgacttccgttcgaggcttccaccaaattgtcagcaggtaaacatctattgtctatagtcttttaatggcaaaaacaactcacatagctattgtttcaagtcctggtttcagccacttggtccctataattgagttcactaagcgacttgttaagcttcacccaaattttcatgtcacatgcatcgttccctcacttgggtcaaccccagaatcctccaaggcctaccttaaaactcttccttcaaacatagactccatttttctccctccaattagcaaggaaaatgtaccccaaggagcatacgctggactcctaattcaactcactattaccctttctctgccatcaatatatgaggccctgaaatccttgtcctctaaatttcctttaacagcgttggttgcagatacttttgcatttccaaccttggaattcgcaaaggagttcaacgcactatcctatttttacacccctttatcagctatggtactgtcactggctctacacatgtcaaaacttgatgaggaagtttcaggtgagtacaaggacctaacagaacctataaagttacaagggttgtgtaccaactctttcgggtgatcttcctgctccaatccaaaatcgatcaagc

SEQ ID NO: 78008 - DNA, 361 bp, Glycine max
  Clone ID: PAT_MRT3847_41458C.1
caacgctcctcttatgtgtgcacataccaaagatgaggtttgaaaagcaaatatcccacatactcaccttgtacactaaaagttttaccagatttgcatgactgtaaatgctgaaaaaataatgttttctggatgcaggactcattttcattatggcgctaacaagaacatagcatctattgtaaatatgctcaacttttcaaacaataatctaaacaatgaaggatagttgcagacagtgcttgatgttggttgtggcgttactagtcttacatccaagcttatatgatcttatataattgaattgggctgttccccaaatgatgggctttaaagtcgcactcacattgctctaagaaga

SEQ ID NO: 78009 - DNA, 542 bp, Glycine max
  unsure (1)..(542): unsure at all n locations
  Clone ID: PAT_MRT3847_41459C.1
atataatctatcaagtgtcatgcttttaatagaagtagttacttatggaaaactgagttttatttatttgtttgtttggtgaatgaaaatagactctaccaattcttatagatgtattttttttacagcattcttagagatgtattataaaattatttatacatcttgacttggctgattaagctttaaggataattcattgcatattataggaggttttataataaagttgtctagaatttggtttctgacagttttaaaggattatgccttgaaaatgcttaaggacacttataaaaagatgcttaaggaagagtactagtgcataatccacactttaaagatgaacatatttttgaagttaatcagctgaacatattagcaattttgaaattgcaaagtacaaacacagtaaaattttctacactcatcttctttcttttggtaattcttcttggactggcacttgtctagcaacaacttanatcgagacaatntcaaataattcacaatgaatgagtaaatcatggtgctaatagagc

SEQ ID NO: 78010 - DNA, 995 bp, Glycine max
  Clone ID: PAT_MRT3847_4145C.1
tttagctctttctctcttcatcatcttcccctctctctcttcctttgccttgtctccgtgtgaaagatcacaactccaccgtcaccgatttccaaggtttcttggtgctgctggtgtattatacatgcttacatctgcatgtgctggtgagatgtgcttgcgttggaaattctccttcattctctctattccccacttttctttagcaatttacccttcacggatcttttcaagcattttttggttatggaagtgaatgaattccttcatttggtttcttcaattatgttgtctgaatcacagatgacgtatcaggaattttgagtcttgggttaatggggtgactatagaaatgatgactttgtcatgagcatttatgtcaggatttattaacatgatatgccgctgttatggattggtatatgccaactttcatataggaagaagaaagaatgtgacaccaaaaatcctgttaattggaagaattgcataggctttattcaactagaacgtggcctttagatcaagctcgtccatctactgggactgggtgcctttttggtatgaaatgtcctagcagttatgctgaggatgttgttgcaataactctgtcacattccaatgtttggtgaagcaaaatgttggtgttgagtgttactggcaatctagggaatgatgtggcacttaccatattttattgttatagttctaaatgggctctggggtgctgagataagattcttgtaaaccttgatactatttgccccagtgacttgtaaatgcctagtcaaattcgtctcattcttagttttgaatttgacattatgtttcctgttgtggtgatcttacttcgtggggctgtataatgagtgtaacagtgcagtaacagtattcatataaagaattccctgtaaattggtatgccctatggaccctgcaatgttggaccaatagtgtatatgattgatgaagactactgttcaatgttccccccc

SEQ ID NO: 78011 - DNA, 430 bp, Glycine max
  Clone ID: PAT_MRT3847_41460C.1
gcggatcattcgcgccgcggtcgtcgtccgttcgggggggctttaacattggcccgggggcattgaaacttgtgcgactactttttggcggcgaacagtcgcgaggagatggacgaatgggtgaacgcgtgccaacaagtggcggccgaggcgagcaacaaaatgcgacagttgcgcagtcgcgagaaacagtcgcgcatcgccagcgaactgtccagcctcgtgatttattgccaagcagttccgttccatgccgatttcgagttgcaagacccgcgcagctcattctacgaaatgtgttcctttagtgagtccaaacatgacaaattggtcgagcgtgggcttcagctgttcaacaagcgtcagctgtcgcgcgtgtaccctcaggcgagtcggttcacctccaccaatttcaacccggtgccaatgt

SEQ ID NO: 78012 - DNA, 492 bp, Glycine max
  Clone ID: PAT_MRT3847_41461C.1
cctgggctcaaaaaaacccccccccccccttttttaaaaaaaagggccataataaacccccccccataatttttggaagttcccccaaaagccccaagggcattttttttttttgaaagcggttaaatttttggccccccccggggaaccccaacctaaataaaaaaaaaaacctgaaacctaggggccaaaaggccaaaccgggaataaaaagttatcctttggggggagttttaccaacctcccatgaccattaaacaaagccctggggggccccacccccccccccccaaaattttggccccccatcggaaacccccttaaaaccatcttggcggagttcccctccccaggacccgattttcctataaaaattttttatcttagttgtcccaggggggggccccacatcctccccttaataaaaaacccttccaaaaccaagttgcaaaaatgcccccccctccttctctgccaatttttctatccaaa

SEQ ID NO: 78013 - DNA, 370 bp, Glycine max
  unsure (1)..(370): unsure at all n locations
  Clone ID: PAT_MRT3847_41462C.1
accccaacaaccatacagggttaatattggcttatgtgacaaatgccaatatgatgtagcttctcatctcaaagattgtcgggtctcacactttatgggattaaagtaaaactttttgaacttaaaaggactaaactaaaatgataatattaaaagtaaaatacgataccaaaagtgtattttattcaaagatttacacaagtttttgaataaattcttatgtgataagctcttgttaaatacagcataaaaagagagctcttgttaataaataagtgtttaattaagctattcattgaaacatgcccttaaaatatatctacgtatattctatgatcaccccattctncaaatttttaattagttatca

SEQ ID NO: 78014 - DNA, 495 bp, Glycine max
  Clone ID: PAT_MRT3847_41463C.1
aattcggctcgagtacggctgcgagagacgacagagaggaagaatgaagaaattccaaaggtttctccctactttcgaaatcactatgggaacaatggaggcaatggtgaagagaatcaaggaaaagttgcaaccagaaagatcgttttagcactgcctgcctactgtccccagaaattaccaactgtggttgacttaaaggagccgatgaggacgaataaagaagcttataacaacattaagattggacatgatttgcaaagtagtggcaatgaaattggaactggaaacactacaaccaataatgggaagagaacatctataaagcatgaggaagttcaaaaggtttccccatacttttggaatgactatgggaagaagggagacaatgggaaagaaaatggtgatgaaattgcaattgaaacggtcaaatctaaaaggaagagaaggttgaagaaccggttgaagaagtatgagcttcatggtgacaacgag

SEQ ID NO: 78015 - DNA, 591 bp, Glycine max
  Clone ID: PAT_MRT3847_41464C.1
catccatgtctacatcttcactgcttcaatgctctgatctctctctctgattcaggacattagtatgcttactcttcttttgctacggcgttcggattcaagcgaacgtgtgtcagacatgacagtattcagagggtggccttgttagggttgtggccttccttggaggcccctccttactgatttgtttactgggaattgcacacaaactcaaaaatggaagaaccccgcaagcaactaaacaagaaataggatcatgtggctcttggtcctgctgctggacaaggctagtgaaatcgtgggcaatgccaacggacaaaatcacttaatacgatccattcttctaacagcagatcaagcgcagatggaagtatcacatacggcactggctttaccatttataattcttctctcaatgatgtacacgataaatgattaaatacaatgcgctggcaatgcttcatataataagatcggcaagaccatggcttcgttgaatgtcttaattaacttcattcacgtttgcatgcgccagagcaaagtgattattctgacagatccagtgcctgacctttcactgcaacgaaacgg

SEQ ID NO: 78016 - DNA, 453 bp, Glycine max
  unsure (1)..(453): unsure at all n locations
  Clone ID: PAT_MRT3847_41465C.1
cagatcaactatatttcattaaaagaaaattcggttattattaagagagttcattacttgttcctaaaattaatgggaatttggtatggctatagttgatttgttctgcttcctcttgttttgtcaccttgtactcattctctccgctggttatggaaatgggcaccaagattgtccacactcctttacttgtggtaatcttggaactttccattaccctttcaccaaggcagaaaaacctgactgtggcttgctagccatacatgattgtgataatcctcatcaacacagaaaaatgatccagctcgagctaaatggaaaaggcatagtgcttataggcgtggctcagcagaatgcgatttcaattttggatgaagattttcacaagcgtttacaacanaacccttgtggcactttgaagaataattatagtcttccttcccctttttcttc

SEQ ID NO: 78017 - DNA, 572 bp, Glycine max
  Clone ID: PAT_MRT3847_41466C.1
gtcgacccacgcgtccggttgtgcgttttggaaatcgttgtaaagatcctcaatggcacaacctggatcgctattttgagaagttaggttcagagcttacaccacaaaaacaattgaaagaggaggcagagatggtgatgcaacaactaatgacctttgttcaatatacagctgaattatatcatgaattgcatgccttagatagatttgatcaagattatcggcgcaagtttcaagaagaggacaattcaaatgccacacaaagaggagacagccttgcaattttaagagcagaattgaagagtcaaaagaagcatgtaagaaatttgaagaaaaaatcactatggtccaagattttggaagaggtgatggaaaagcttgtagacatcgtccattttctatacttggagatacatgaagcatttggtagttctgatactgataagcaagcgaaagattctcaaggcaaccataagaagttgggatctgctggtcttgctttgcattatgcgaacattatcactcaaattgatactctcgtgtctcgatcaagttctgtgcctcctaataca

SEQ ID NO: 78018 - DNA, 740 bp, Glycine max
  Clone ID: PAT_MRT3847_41467C.1
aaagagaaccaaactcctccactgcctctctctccgtcgcctcctccggccacttcatcctcccaccaaacagcccctcaaccaatccctaacggacgcaaccttctctcttcagctcctcttttcaacctctgccggaatccgccaattaggttctgatcaacctttcacagattagaggggcaggggctgtaagtgaggatgaatttgcaacaagctgggcagtctaaatcctccaatggatatggccgccgaaaatctgaaagagaaggggcaactaaatcggagaataagatcttgtctgggaaattaaatgccaacagattggcaaatgcaggcgcagtgactggcagtaaaggtggcagttatgagagcccttcacatgaccgattagtatatgtaacaacatgtcttattgggcaccaagtggaagtccaggtgaaaaatggatccatatactctggaatatttcatgcaacaaacacagacaaagattttggaatcattttgaaaatggcttgcttaacaaaggatggttctttacgaggacagaaatctggcacagaatttgtcagcaagcccccttcaaagattttaattatacctgccaaagaccttgtccaagttacagcacaggatgttgctattaccagggatggcttagctaatgagtatcaccatgatatgcatcaggaaatcatggttgattcattgatatctcagtctcgtcacgttgatct

SEQ ID NO: 78019 - DNA, 379 bp, Glycine max
  Clone ID: PAT_MRT3847_41468C.1
ggctcgagggagcataaagttattctctttgttattttctgggggccctcagaccactgctacacgggggagagaggtatcagcatcaaccccggtggcccccgtgtctctgtcatggacacctgcatggagttgattccatgatttatgggtcccaccacaggtcttatgtatggctacgacctaccactcaccagtggtggggcgttgatgcccccgtacatgaacaagatggtgctgacagtgaacatagagacaatgggcgttaaacgactgtatgacaatgactggaactacgacgaccacagcttacatgtatgtggctttctccatgaacatgactgtttggactccagcggacttacatatctacgcaaat

SEQ ID NO: 78020 - DNA, 459 bp, Glycine max
  Clone ID: PAT_MRT3847_41469C.1
gtggagctaccttcttcactctcagctcaaaacgaagcatcatggaatggaataaatagaaccaggaatttgactccttggacgacatagattgcacgggtgggtatcgagataggcaatctctataaactctaccatactaacactccaaacagaacactgcaccttgccatactcttttatcgagggacatagctacacaattacaccctctatggaaacataaaagtctaaagaaacccaatgctactactagtcggtttttcaaatatgacggtgaaccataccacactaaggatctagatcagcgaatggagagattttcaaacattgtgcctccaatatgagctgactgctggaattgtggagggccacaacgttgtcggatggagagcgaatgctcttgcggcaaacaacgctgggggttatcatgtatgcacagacataagacgtggccaa

SEQ ID NO: 78021 - DNA, 1539 bp, Glycine max
  unsure (1)..(1539): unsure at all n locations
  Clone ID: PAT_MRT3847_4146C.1
cggctcggccgctccgcctcctccgttgtcccctcctccgtctcctgccgtcacgcctatcttccgccccgctggaaccgacggcaacgctgctggccctgctctggatcccggacgcgtgggcaaaccttcttcctctgaatgggttgctttttcggttgttttggttcctccaaacatagaaaccacaagcacaaggttcaaagaaatgatagtagcaatagcaagcaagagcaacatagtgtctctttggttcatggttgctccacaaatgctattaaccctataccccaactccaggatgaaagtgaggagcaactaagtgttagcagcagaaagaaagtgacatttgattccaatgtgaagacctatgagcctgttttagcggatgaagttgtggagaggaaaaatgagcaagctttggcccaaccaaagtcatcttcctctgaagatagttctgtgacttcaacggggtcgaaccctcccaaccataggtaccagaattgccgcgacagtgacgatgaggaggaagagattgattatggagacagtgatcttagtgatggtgatgaggatgatgatgatgccatcaaagaagaatgcaatgaagtgagtgaggactttggggaagatggcatagtggcaactactgtttctgatgatcatgtgtttgttgaagaagaggttagtgtgaagtccattgggtccaaccctaatgtgagagacagaagtgcttatgttcatcctgtgctgaatccagtggagaatctcactcagtggaaagttcttaaggctaagagaacaccaataaggcctcagaaagagaatgattttggggttggtgtcaaaggatcacctttcagcttgaattattccgaaagcgacacaccgaagaagttgaaccgggagatccgagttgatgccagcctgtcaaattggttggtctcaccagaaactacacctgttattagcaaggctggctcagtggcatcctttgctggtacccctgataggagcacctcacagggttcatattctgtgataagtcatgaagataggcccattttaggggcattgacattggaagagatcaaacagttctcggctacttcgtctccacggaagtcaccaagtaggagtccagatgagatgcctattattggcactgttggaacctactggaatgctgcaggctctgctgaggatcctggctcagtctcttcctttaaaggaattccgaactcaacaagcaagtacagagaggataagagagtgaattggcactcaaccccttttgagacaagattagagaaggctttgaatagaggtgcttcttctgcttatgttcctcgtgtattttagaagtttgcaatactgtgttgattcaaggagagtgtgaattgtgcagggaatgtattttttttattcttttaacatgattgagtgtgacttttccttttctactgcaatttgtacttggctttgaagttatactataaaaattcaggtgcagcttataacacanaanaaaaacaaaaa

SEQ ID NO: 78022 - DNA, 455 bp, Glycine max
  Clone ID: PAT_MRT3847_41470C.1
cggctggaggaaaaagcttctccaaagaatacgctggataagcgattctatttttcttcaaagtttccttttcccctgcgcgcgcatcaagtgtgtgatgggtgtgttttcactcacttcatctttattcattcttcttgctcttttcagctatttcatccacattaggatctttccggatcgcttttttcgaatgcactttctctactctggattacgcattttatttattgttttgctagataattatgcgattcgagtaatcggtatgcttgcgttttctacaagacgatatttttacgactattaagctgcgttttcgccggtgtcagttcacacgatgatggggtcactttctgaactatgcaaaaaggggtgaagatctttcttcagcattgaatctgtgattacataggttgggtactctggaatcaattcatttcaataattggtcc

SEQ ID NO: 78023 - DNA, 214 bp, Glycine max
  unsure (1)..(214): unsure at all n locations
  Clone ID: PAT_MRT3847_41471C.1
agaaaatctaatctggggtatattggggaccgtgctgtacgtgttaaatggttcaaaaatccatattcaatatcaattaccagtctnctgtatgtcacccactctgttggagctatcttgaagtcctatagataaacatatctgctcaaagcactcccacctatgatggttctattcctcatctggcctctgcttacgccagaagtgcaaccct

SEQ ID NO: 78024 - DNA, 622 bp, Glycine max
  unsure (1)..(622): unsure at all n locations
  Clone ID: PAT_MRT3847_41472C.1
ggctcgagcaattatgtttctctttttctctctctacaccttcaaaaatcaaaagttccttgttgctcatcaaggggtgttatgttagatgatttgaaaagatagggtcaaatcaacagaagttcccctattttgatctgttcgcagttgggatggaattgcaggtgatttgagcctgacacagagctttcccgcttataagtagtagtgctagtgcagcagagacgatcatgaaccacgtgcacactctaatttccatcacacaggatcttttgtgtgaagaagactagaaaaccagcttcaattatcgagaattgtttgatgggttgatcaaaaatcgctctccaaaccagattcgtaacactgaaagtgtgaacaagtaacaaagcaagagaaaattatctccgatggcgacatattttcatagtaactccgaaattcaagccggcgctgacggccttcaaactctcgtactaatgaaccccggctacgtccaatactccgacacgccgccaccgccgcacggcggaaacctcgtattcctcaactccgccgccggcaatgcctccctacaaaacctntcacacgcgccgncaccttacacgcagcaattcgtcggcgt

SEQ ID NO: 78025 - DNA, 1099 bp, Glycine max
  Clone ID: PAT_MRT3847_41473C.1
cttgtttacaagttttcattttatacacattttattctatacatctagatttcttatcccaattatgtttctctttttctctctctacaccttcaaaaatcaaaagttccttgttgctcatcaaggggtgttatgttagatgatttgaaaagatagggtcaaatcaacagaagttcccctattttgatctgttcgcagttgggatggaattgcaggtgatttgagcctgacacagagctttcccgcttataaggtgaagacacttatacaataaaatcccaaagatagatagaaaacatagatcacaaacacacacatgttgtgacagtagtagtgctagtgcagcagagacgatcatgaaccacgtgcacactctaatttccatcacacaggatcttttgtgtgaagaagactagaaaaccagcttcaattatcgagaattgtttgatgggttgatcaaaaatcgctctccaaaccagattcgtaacactgaaagtgtgaacaagtaacaaagcaaaagaaaattatctccgatggcgacatattttcatagtaactccgaaattcaagctggcgctgacggccttcaaactctcgtactaatgaaccccgggtatgtccaatactctgacacgccgccaccaccgcacggcggaaacctcgtattcctcaactccgccgccggaaacgcctccctacaaagtctcccccacgcgccgcccccccacacgcagcaatttgtcggtgtcccactctcggccgccgcgcatgagccgccggcgtccatgcaccacgacgtctccgccctgcatggcttcctgccgcgcatgcagtataacctctggaacacaattgagcacaacgcggcggcgcgtgaggccccacgcgccacccagggggctgtcgctgagtctgcacggggaccacatgcgcgcgtcaccgtcctcggcttccggggcctccaacggcggcggcgtggcggggattcagagcgtgctgttaagctccaagtacttgaaggccacgcaggagcttctggatgaggttgttaatgttaacggcggaattagggttgaacacgcgaagaagctgaacttcg

SEQ ID NO: 78026 - DNA, 537 bp, Glycine max
  unsure (1)..(537): unsure at all n locations
  Clone ID: PAT_MRT3847_41474C.1
ctcgagccgattcggctcgagggatggaattgcaggggagatttgagtctgacacagagctttccctcttgcaagtgatacaataataatcccaaagatacatagaaaacatagatcacaattcacacacatgcggtgacagtagtagtggtagtgcagcagagaagatcatgaaccacgtgcacactctaatttccatcacaccaggatctttgtgtgaagaagactagaaaattagtttcaattatcgagaattgtttgatgggttgatccaaaaatcactctccaaaccagattcgcaacactgcaagtgtgaactagtaacaaaagcaaaagaaagattttctccgatggcgacatattttcatagtaactcggaaattcaagctggtgctgacggccttcaaaccctcgtactaatgaaccccgggtatgtccaatactctgacacgccgccaccaccgcacgggggaaacctcgtattgctcaactgcgacgncggaaacgcctcactacaagactcccccacgcgccgtc

SEQ ID NO: 78027 - DNA, 712 bp, Glycine max
  unsure (1)..(712): unsure at all n locations
  Clone ID: PAT_MRT3847_41475C.1
gctttatacataattcatgatttcttccctccttcactttctcaggatcttttgtgtgaagaagactagaaaaccagcttcaattatcgagaattgtttgatgggttgatcaaaaatcgctctccaaaccagattcgtaacactgaaagtgtgaacaagtaacaaagcaagagaaaattatctccgatggcgacatattttcatagtaactccgaaattcaagccggcgctgacggccttcaaactctcgtactaatgaaccccggctacgtccaatactccgacacgccgccaccgccgcacggcggaaacctcgtattcctcaactccgccgccggcaatgcctccctacaaaacctctcacacgcgccgccacctcacacgcagcaattcgtcggcgtgccgctatctgccgccgccgcgcacgaacctccgccgccgccggcgtccatgcaccacgacgtttccgccctgcatggcttcctgccgcgcatgcagtacagcctctggaacacaattgaccccaacgcggcggcgcgtgaggctccacgcgccacccaggnggttgtcgctgagcctgcacgggnagggaggtgcgcgcgtctcccgtcgtcggcttccggngcctccacggcggcggcgtggcggngattcagagcgtgctgttgagctccaagtacttgaaggccacgcaggaacttctggacgaggt

SEQ ID NO: 78028 - DNA, 577 bp, Glycine max
  unsure (1)..(577): unsure at all n locations
  Clone ID: PAT_MRT3847_41476C.1
gaagacgacagaagggggaggaaaggaagagattcaagagaagaaaggaaagcgaaagtgtgtcacgttttgttgatgctgttgctgtgaatgaatctgcgatacgatacgcacacacatcatcatcatcgccacatgcatattatgcgtatatacgcgtagatctgataaagaaagtagaaagaacagacagaagaagaagaagaagaacgaggccatgtcgggattcagagacgctcgctgttttccgcgtccaatcctcgctgtgaatctcgccctcgctcttctccacgttgtcgttgcgttcctcgcgttctttcagttgctgagaattcacatgaggaatgcgcagcttggttggactcgtcaaaaagtgttccatgtattgattggctcttctaatttgggttacgtcatttatttggcattgacacttgttgctgcctgcaagggatggacctgttggtcgcattcttgtggntttgtatttatggctttccccaagtactttttttggagcatttcttctcttttatcctttgggtggacctttgcatcggcagatgatgatgatgac

SEQ ID NO: 78029 - DNA, 393 bp, Glycine max
  Clone ID: PAT_MRT3847_41477C.1
tagctcaaaccggtgatcaggtcgaggaacaataaaccacaggagggatggcgaacacacttctgcccgtgctgtggttgaccagatcactacaccgtctgtgttatagaacactgtcataccttccgccgactcacccaacaccgcttacagtttttcttcttgttcgacggagaatacctctcatgtatactatatacacaagatctcctactttaaaggccgagttgaaaccaaaacctatgacatagcgcatgtgccgaacctgcgatcgattcaataccgactgattaacgaacacgctgaagatgcttactatgagtagtaaaaccctcacgagcacatccaagcttatgactttgaactaactccagctattgtatccgagaatca

SEQ ID NO: 78030 - DNA, 810 bp, Glycine max
  Clone ID: PAT_MRT3847_41478C.1
cggctgcgagaagacgacagaagggggatgctgttgttattgttgatggtgttgcggtgaaagaatctgcgatacgatacgcacacacatcatcatcacatgcatattatgcgtatatacgcgtagatctggaagagagggtagaaagaacagagagagaagaagaacaacaacgcaaagcggtgttcgttccgtacgcactcgcgcacgcacgcacgcacgcacgaggccatgtcgggattcagagacactcacggttttcctcgtccaatcctcgctgtgaatctcgctctcgctcttctccacgccgccgttgcgttcctcgcgttctttcagttgctgagaattcacatgaggaatgcgcagcttggttggactcggcaaaaggtgttccatgtattgattggctcttctaatttgggttatgtcatttatttggcattgacaattgttgcttcctgcaagggatggacctgttggtcgcactcttgtggtttcatatttatggctttccccaaagtacttttttttgcagcatttcttcttcttttatccttctgggttgacctttgccatcaggcagatgatgatgatgactatgaaggaagtttttgtgacaaccctttgctggagaagactttaaatgaatcaaatttagcaagcatagatagccatagaaagtgctttccttttcggtttgctcgtgttggaaatcggcaaaaaattgtgattttggttactttgctagttatcatcatccgggttgcttttgctgtagaaatctggattgggctaggaaagaatcccatt

SEQ ID NO: 78031 - DNA, 293 bp, Glycine max
  Clone ID: PAT_MRT3847_41479C.1
agctaataatggcgcattgcctctctcaaggttatgtttgctgcggcgctccatacccctgcgttcggacattcctacgctggtgcacactcaacactaattcaaaatgctgtttcccataatgcaactccaaggcaaactcctaacactgttcttcagattattccttgaggagcacaatcaccctggaccacgattactggggactaaactccatatcaatagaacctttgaacctggaaggccaaacactacctccaatgcttactatcgggctactattggagcacaat

SEQ ID NO: 78032 - DNA, 642 bp, Glycine max
  Clone ID: PAT_MRT3847_4147C.1
ccacgcgtccgctttcatctctctctctctctctctctctctctctctctctctgtcttttcctttgcctgtgcgtgtgaaagatcgcagcaactccaccaccatcacaacaggaccgtaaccgatttccaaggtttcttggtgctgctggtgtattatacgcttacatctgcatgtgctggtgagatgtgcttgagttggaaattctccttcgttctctctgttccccacttttctttagcaatttacacttcacggatcttttcaagcagtttttggtatatgatcacttatgcctttgggttcatattatagtgatattattattattattattattattattattattattggtgagaactggttttgtttgccttgacatttgtactgtacaggttatggaagtgaatgaatttcttcatttggtttcatcaattatgttgtctgaatcacagatgatgtagcaggaacgtttgagtcttgggttaatggggtgaccatagaaacaacgactttgtcatgagcattaatgtcaggatttattagcataatgatatgctgctgttatggattggggtatgccaactttcatataggaagaagaaagattgtgacaccaaaaattctgttaattgggaa

SEQ ID NO: 78033 - DNA, 763 bp, Glycine max
  Clone ID: PAT_MRT3847_41480C.1
acggctgcgagaagacgacagaagggggctgttaaaaaaaatgtgccaactatgctcatgtgaagtcccatcctttctcccattcattattacctcaacaagtccatatcataattaatgctccgtgagtgaatgagtcagtgtcttcatattatcactgcttgccagtgtcatggacttaagttgtgaaaatcaatgaatggttggtttgtgtaggatgctttgcttgaaaggatggggtgcacttactctgtgtataggaagaaaaaatcaagctttcctgaagtggtggtctttgttccatcaacaagaattccggttcaatctgatctccaaagggtgcttaagggagtaattccaagggatcttgctgataaattggctgcactaaggaatcagatagtgttgattgcagaggatactggtgggtcagctgtaactgaattgcagcgagctttgaatgaatatttgtctgttctgattggacttacaaagaaagagtatggtcctgaaggactaatagatttcaagtggaaaaatttagaagatgggagacaagatagcagtatatcaaatacctggtttgaggtgctatcttcagttcaccttatggctatgctgacactctctgacgctgactcactgatgattccaaaggatccctcagggtctggattcagggttgtatcttcagatagcaagagggaagcaattgatttgttactcaaggcatcaggatacctggagttctgtgtaagggatg

SEQ ID NO: 78034 - DNA, 505 bp, Glycine max
  unsure (1)..(505): unsure at all n locations
  Clone ID: PAT_MRT3847_41481C.1
ataaaaanaantaaggtctattcattattaaaaataaaggatacttttttactgtctatagagcaaacaaaagcgcatggggcctgccccttttcccccccacaaaataaaatttgggcccaaaaaaaaccccccttcttcaagggggaaccaaaactcccccccatgctgggaaacccaaaacctaaaaaatacacccccccccaaaaaacccgggctgcccaaaaaaaaaaccccttcttttccgcccccaaatttatacccaaaattgttgaaaaaaaaaaaaatttaataaaaaccctggggtgggaatggaaaaaacccccttctgtcttgaaggggggcccggtgacaatcccacaccccatgggagcctaaagcaacggccccattttaaaacccacccccccaggggacaaacccgaaggccctttaaaaaaccccccccccaagggcccgccctaaaaacccgggggccccctggaaaaaaaaacccccccaaggg

SEQ ID NO: 78035 - DNA, 161 bp, Glycine max
  Clone ID: PAT_MRT3847_41482C.1
gatatggtaattgttagatattgaaaacgaactgcaaacagggtgacacactaagctttgaacttgaatgctagatgcattgtgcaaactgaagtgtaaggacctcttggatggatgaataaagtgttaagctttaaccttatacaaaacacatgggtgca

SEQ ID NO: 78036 - DNA, 131 bp, Glycine max
  Clone ID: PAT_MRT3847_41483C.1
attatgatctacatttgaaagctggataggtgatgtggtctctacgtgtggtaagaacctatctccagactgggacagatactagttaagtcaatttatcaatgtggcgtactccatatattagctgttgg

SEQ ID NO: 78037 - DNA, 171 bp, Glycine max
  Clone ID: PAT_MRT3847_41484C.1
gccacgcgtccgcttcaaccagcttcacttgagccagagttgttgctgtctttagtgacaggcctaaggtggcctatgtatacgcaccccgcgatttgatggtttacatactgcacaatgtctacttgtgacaaactaccgagatagcttgcacgaggtcacatatattct

SEQ ID NO: 78038 - DNA, 252 bp, Glycine max
  Clone ID: PAT_MRT3847_41485C.1
cggacgcgtgggaaacaacatcgacactgatcattgttgacacccatataagtaaaagttacgtgtattaccacctaggcgaagatcacaaatcagagccgacatttataggacaagatcactgctccattcacatcatctgcaggttacctatatagacttttcaaagggaccaagccgcttatagttcgttaatgttctgatgtgtcaaatactctattaactgatacaaaggataatcgtcaaacccat

SEQ ID NO: 78039 - DNA, 789 bp, Glycine max
  Clone ID: PAT_MRT3847_41486C.1
gttctaggtatgggatgttatggtctcccggaattcgtcgcaatcctacgtaaattataacttacatagaaataaaatatgtttaaaattaattattttattacttcataataaatatgggataaaaatttctacctgtattcgtgggattacaaaaattaattgagtaagaccgcttctccatctgtcattattgaattgttgagaagatatatacaaaatattttggtaaaaaattacagggaataaaaaaattgtataaggtataatacttttaatgaaagatataagaagatattttattgttattatttagtcattgagtaaaaaatattttggtatatatcttctcaacaattcaataatgacagatggagaagcggtcttactcaattgtagagaagatatatacaaaatattttggtaaaaaattacagggaataaaaaaattgtataaggtataatacttttaatgaaagatataagaagatattttattgttattatttagtcattgagtaaatttttttttaagaaatatataaggacctcttacaatagtgcaaatagcatttcacatttgagtatagaaagtatttcgtcaactttttctcttctttaaatcaaatcgtcctctagccatactttttttatctaaaaaagtttaagataaatatgaagagatctacaccaacttattaattatatttttattttatttaaaaagttaaaaaaaaactacagagagacttgcctcttattttcttccaatatagaaataagaataat

SEQ ID NO: 78040 - DNA, 649 bp, Glycine max
  unsure (1)..(649): unsure at all n locations
  Clone ID: PAT_MRT3847_41487C.1
cggattcccgggtcgacccacgcgtccggtaaagggaatattctagaaatcattaacaattctgcaatttgtatttcattttcacaattcaggtttgctccctttcacgtcactattcttcatacgtgcaccaaccttgaagtaggcttgctgtttgcaccacattttctgctagttgagcatggaacccgtgtgtttgctacccctatgcctccttctacctatcactctcaaccccatcaaaaacaccttgtcctcaaggtgttggggctacgaccacggcttcaaaattcgaaccgggatcccaaattaaaatgggtgaaggaatgagggcgtgaagataagtgttgcggaagcggagccatccaacagagtcgatggtgatgtcagagggaaggaaatggtagtcgagctccgtgtccgtggttatggcgatgaacatgacggaagggaataagtcaaggtcggagaggaggatatggtggctgggggaggacgcctggggctggttgtctgcgaggaggtggacagtagcaatggtaagtggatccggtaaagggacggggtgttgcggcatgagtgcggggcgtggcgactgagttggtatgggcggaggtgcagtgagcgtangtgactgagttgattggag

SEQ ID NO: 78041 - DNA, 270 bp, Glycine max
  Clone ID: PAT_MRT3847_41488C.1
tacgcagtcgcagtgagtgaaaaggaaaaccctaattgcggtattctcagtgccttcgagagaacgaaacaatggcagctaatcttgttctacgtggacacatgcgcgacctcaccgacgttgtgacggcgaatggaactcccgatcgacaatccgacatgatcattaacgactcacgcgacacatccctcatcctctggcatcctaccaaggaagacaagacttaaggtgtccaccgcagccggctcaccggccattctcattttgtcc

SEQ ID NO: 78042 - DNA, 475 bp, Glycine max
  Clone ID: PAT_MRT3847_41489C.1
atagcagggtaccaataccttaataaaattaaaagtggaaggaaagaaatatcctgtaattacatattaactaaaactacaaatagcataaagatatggatcttaacttaaaggtaagcattatggtaaagtaacgaaaatgggaacattaatcttaaataaattcccagaaacagcctgagagggaaggtccagaccgtctagtaggatacaaatcacaactacaaatgaaacaacgtgaaatatgaacaaattaattgatcattaaacaatacatgggtagtgtactaatctagagtctagtttcattcctaaactaaaaacctctctaatcaaagttttggcttgtattggcactcttggttgccaactgtttcattagaaagattaattggaacgtttcaagaagtgggaggaaaccacatgggactttgataaaacctaaaaagctgactttccctgacatcattacaaa

SEQ ID NO: 78043 - DNA, 386 bp, Glycine max
  Clone ID: PAT_MRT3847_4148C.1
aacaaaaggggcccaggttttattaaacaaaaatttagccaaaccccccccaactttgaaaaaattcaaagtccccccccaaatgaacaaatgccaaccttatcttccctttaaaaaaaaaattttaaactttaggctgaaaggacttgatttgggaaaattgctttcctggggtcaacccctttgggcaggccccaccccagttcaatttggggggcccccaaaaaaacttgaattcctcattaagggcctccaatctctccttaaggtacccaaaccgggtggcgcttatccacctataaccggggaacaacccaccgggccccaaaaaggactcggggttccaccaatagctggggcaaaaggtgctacaactggcccaaaaa

SEQ ID NO: 78044 - DNA, 266 bp, Glycine max
  unsure (1)..(266): unsure at all n locations
  Clone ID: PAT_MRT3847_41490C.1
attaggctgcatttcgagccgaataggctagcggtttgccgtagattacagcagcattaagggaaccaactagagttgccantattcgagctatgattatgcccatgtctatgctagggtttgcagcaggtcatacttacaatcgtatatctctgcaagctgagtcaatgagtgagattcgtagaactacttgtccaaaagcatccagagtagaatctgcagctttagaacgacttgaagtatgcgtatgaccaatgtgttacaga

SEQ ID NO: 78045 - DNA, 237 bp, Glycine max
  Clone ID: PAT_MRT3847_41491C.1
ggctcgttgatatttcccataaactcaatgatttttgacccatctctcagaattttccaacttaattttacctttatcatccttcatggccaaccttggaggcagaactaataatggaatttcaacaaacccatgttgagatccctatccatatttcaaatggtgtaaagctaaaaccaatccaagaggttgcacttgcagagagtagtagcattattgactactctcaaagggccc

SEQ ID NO: 78046 - DNA, 493 bp, Glycine max
  Clone ID: PAT_MRT3847_41492C.1
actctagctttggacccagcttctttattactcagtgccttattttgaggaacattcatataccgaacgattgcaagtgcaaaattaattaccaatggcactatgtacctcctttaaataaaggatacgacagccttaaaacatatatcgtcccttattaagttaattactaaaaatcattgatcacccactgagaacacgtcatggctcctacatcctgaacctttatgtgcattaatgatgattcatggtaaaagcgagtaactgttttggacatcatcaaactccatccgtttctggtgacatagcatggatgccacatagatgatgccctaggaacgcgtgtagttggaacaaatgcctgagcacagaaggctggatcaatctgcagatggcgttttctggcagaacttgataaagggaacagcttaaacatatggtacactctaattacacgatcgccctttaaaagccggcccatctttactacaaa

SEQ ID NO: 78047 - DNA, 420 bp, Glycine max
  Clone ID: PAT_MRT3847_41493C.1
acggctgcgagaagacgacagaaggggacacactcaggaaccactagcaccatatctatcaacaaccaccgcatcgcttctcttgctgtgtttctatccctactcgctctgtccattgggcccatggtggctcacaagccacactctatgttcgaagctgatactccctctaatccccatccttatttgactcacactcatacacgggtgatcatttgaagtactacgtcggagggctctagcacattccatgccttgacatctgatgctggatatgccaatccttttatctctcattccagatattcttgcttgcttgaacacatctcttccatggattgttactccctgcatagatgcctaggacatgggaactaactcactggtaccaccatttacgatcctggccgtggtgaagat

SEQ ID NO: 78048 - DNA, 369 bp, Glycine max
  Clone ID: PAT_MRT3847_41494C.1
tggttggaacctttgggctgatttatgtgcttgcatggtcgtgagaagatgatagaagggcatggtcgtgagaagatgatagaaggggtctaccgataacctataataatatataatacaccaccaagatatattttaaattaaattatcctatatagaatatacacttaccggcgaaggagcactacgggcgaataaccagggtcatcaaaagctacggccgcgtaagggaaaaggccggcgacttgggaccctaagattagcgacttccacgcagcatctaaatcagggaactagatcgtaaagattaaggcaaccaacagtcgtccgaacttcgcccggaacgaagagtcgaaccctatctcgata

SEQ ID NO: 78049 - DNA, 384 bp, Glycine max
  unsure (1)..(384): unsure at all n locations
  Clone ID: PAT_MRT3847_41495C.1
cccacgcgttcgcttgtgacaaaattgctagtgtcttgactacaactgatgagagattggttggcacataacatgagggatatgatccttttcttggtggaattgaaaaatatgccactaccatgatgcctctagatgaagaaattctttctaaggatgcacaagacatggttgaggaatggtttgattgtgttgatgaggaggattcctttgcggaagttattttaaccgctgcacttaatggtgttgtgggtgtggactatatagaaagtattcctcttgacacatgctggggttttacttatgtgctatcacgcaaaagtggtgaaacatggcacanggagatttgtttcttgggatggcgaagagatgacattgatttca

SEQ ID NO: 78050 - DNA, 537 bp, Glycine max
  Clone ID: PAT_MRT3847_41496C.1
actttactttcaccattgagatggggaatttctaaacttgttgaaactattctaaaatggaagctgccattaaagaagtatggattggtacctaatcacaactttcttcaagacctctccacgtgcttgcttagtctgctgcctgataacttctttgacaaactaaaagaaggatccatccttataaagaaatcacaaagctttagtttcagcagagaaggtgtaatcattgatggagaagctaaggtcctagaaacagatgtagtaatttttgccactggatacaaaggtgatcaaaaaatcaaaaacatgttcaaatctccgatcttccaaaattatatcattgggccaacaatctcaacagttcctctctacaggtcggtctgttcttagtgtggctcatttttcttccacaacctgctatttattatagccttaaacatgttctttgtgattaaattttacggttaactaagtttttagtccctaaattttttaaggttgcctagtataagagagatggatatgggtgtgaaa

SEQ ID NO: 78051 - DNA, 170 bp, Glycine max
  Clone ID: PAT_MRT3847_41497C.1
ctaaaataccactccatgagaaacgcatagataaccaacttattttttcgcaaacacttgtacgccacagctagaggaactcagagacggaccctagctgaccaaataaccttcggaaagaggaaacagaagagggacccagcgggaccacgccaaaaaacacccataag

SEQ ID NO: 78052 - DNA, 415 bp, Glycine max
  Clone ID: PAT_MRT3847_41498C.1
aaagtagttgaaaagggttctccatcttctgataagtcttccaagtagcttacagtaagataatccttatgatggtcaggttgtctagtttacttccatcaatatcacctctcttctctttaacattgtagttgcctagggcatgaaataagtttttttttttttttttgctttgctgatcaactgattcattagaggaattcctcatattgagctttgtagaaaattgttaaaaatgatctgatatttttcttcctaaagttgtgacaatattattgcactgaatactgtttacacataattgtataaattaacctaataagacattttttacaaaaaaaaaaaaaaaaaaaaaaaaagaagggcggcctacgcgagcagttagccccgggaatcagttccggaccgggacccg

SEQ ID NO: 78053 - DNA, 291 bp, Glycine max
  Clone ID: PAT_MRT3847_41499C.1
ggttctaatgtgtgattgtctgttgttgtaaatcgttcatcatcatatgtgtcagtgttgtgtatgtttgatctctcaccggaaaatgtcttgctgctgtggtaactgttgtttctgaagctcttgcaagtgctgcaacggctgctgaggctgcaagatgtacccagacttgagctacaatgagtcaactagcatcgagatcttggtcataggagtggcacctgttaatgctcaatttgatggtgctgaaatgggtgtgcccgctgacaatgattgctgcaaatgtggacc

SEQ ID NO: 78054 - DNA, 605 bp, Glycine max
  Clone ID: PAT_MRT3847_4149C.1
ctaaaactcaccttacagaaaaattaaaatgaaatattgaattagagaaaaattttccctgactctctaagaccacaggttccaccaaccagattgctcaaacttaaaattacaataaaaaaattagctagattgaattactatgatagcacactttaacaaattacaaagcaagagcagtgtcattaatcatcgcatcaaaataatcttcaacacaccaaacaaaagaagatatcaacaatgagcaacccatgtattcccgcaattagtctaaacatttatagaaattaatcattcaattcatattcacaatatttgctaatgccagagtttaccaaaagaacacaataaattattagaagaaaataattaatttgaaatgaatacctattttaggattatccaggaactgcaagtagtagtgaaggcaccaggaacctcaaagatgatgactttcttgcagttggttgtgttctacccacatgatccaaatgtgaaccagatgagaagagatgaaaatagaagaagaaaggaaggaagaggcagccaaaactgtgtgggactcgcgggtgcagatgaaaatccaaatggggcaaaaggaacag

SEQ ID NO: 78055 - DNA, 600 bp, Glycine max
  Clone ID: PAT_MRT3847_414C.1
caggttcaatcctaatttacctttgccttttctagagatggctacatcatagctcaatagtgaacgggttgtggtcaaggaaaaaatcaaccctaaagaaaggtcagtgcataatgctttgcaattttctaagaaaacattttggatgatgataaggttttaatcaaatttcgttctgatcatagtattggatttgttgcatttgatggagcattatatatggtcatgagtcacaatttatctcattattatgatgtggcaagccataatatgatctttgaacttgtctggagtatacatattgaatttaaatttttctttaagaaaaaaattgtgaggtatgtgtttttcatcttttgattgataatgaaacaggcctgtagttttagttagtggaacattttatcgctagtaagctaaatgctgctaatattccaatttagttcgttcttaattttgaagtccatgtattggtttagtccatgtcatttgtatattctaattgccacattaatacaagaacatatacatattactatattatgataacatgagggggccttgtaaagttttgggaggatagtgattttagagtagaaa

SEQ ID NO: 78056 - DNA, 613 bp, Glycine max
  Clone ID: PAT_MRT3847_41500C.1
cggctcgaggcatattagtgtggaaagtagtaggtcaggactcaggaacgacgccgccggctcgaggtttcatccttcatctatttgctatactctctttccttttccatttccaatgccatctttctcgttcttaagaacactcaggctctctctttttccgccttatcccccaattgcaattccaactgcaaccctccattctcaacctcactatcaccatcatgctgttgcctcattcaatctcatgcttcttatgcgccctcccccacccaccttcctttttaacaacattctgagttcccttgtcaataacaagcattatcccactgtcatctccctttttaaacaattcgagccaaatgggattacacctgacctttgtactctgagtatcctcatcaattgtttctgccatcaggctcacatcactcttgctttttctgtattcgccaacatcctcaagaggggttttcatccaaatgcaattaccctcaacacactcatcaaaggcctctgttttcgtggggagattaaaaaagcactttactttcacgatcagttggtggctcaagggttccagttggaccaagtcagttatgggacgttgatc

SEQ ID NO: 78057 - DNA, 3203 bp, Glycine max
  Clone ID: PAT_MRT3847_41501C.1
cggccacgcgtccgcggggtttgttgagaaaaatgaagtaaagatggagggtgatgttggtcaacatggtgacagggagattgatgattcggtgttggatggggaaattgggagccatgtggaggagattggtggcaatggtgagagggagattaatggttcggtgtcggatgagaggggtgatggactggtgtttggaagcactgaggctgccaataagttcctggaggatttggaattacatcaatcgcgtgatgctgagaggattgttactgactcggacgaagaagaggagtctgacgatgaaggagaaggcaaggagctgtttgatactgctacattggcagctcttttgaaagcggcatcgggtgcggaccaagatggcggcagcatcacaataacctctcaagatgggtccaggcttttctctgttgagcgccctgctggcttgggatcaccgctccagtcaggtaaacctgccgtgaggcaaactcgtccgagtctttttactccttccatgagtagacctagtgccatttctgatagcaatttgagccaagaggagaaaaataaactggagaaattgcatgaaattagggtcaaatacttgagactagttcataggctgggttttactacagaagaatcaatagcagcacaggtgctgtatcggatgacacttgttgcaggcaggcaaagtggtcaaatgtttagcgtagagtctgcaaaggagactgcttcgcgtcttgaagctgagggaagagatgattttgatttttctgtaaatattctggttcttgggaaagcaggtgtgggcaagagtgctacaataaattcaattttcggcgagacaaagaccagcattaatgcttgtggtcctgctactacttctgtgaaagaaattgttggggtggttgatggagtgaagttaaggatttttgacacaccaggcctcaagtcctctgcatttgaacaaaatttcaatacaaaagtcctgtccgcggtgaagaaattgactaaaaaatctccccctgatattgtgctgtacgtggatcgcctggacctgcaaactagagatatgaatgatctgccaatgttaagatcaattactagtgtcctgggttcatcaatatggcgaaatgtcatagtcactctgacccatgctgcctctgctcctccagacgggccatcaggtgccccattgagttatgatgtatttgttgctcaaagatctcatatagttcaacaaaccattggacaagctgttggggacctacgtcttatgaatccgagcttaatgaatccagtttctcttgttgaaaaccatccttcttgtcgaaaaaatagagatggccagaaggtgcttcctaatggtcaaagttggagacctctcttgttgctcttatgcttctcaatgaagattctctctgatgctagtaactctacaaaaactcaagaatcatttgaccaccgcaggctgtttggttttcgtccccgctccccaccacttccatacttgttatcttcgttattgcagacacatacatacccaaaactccctgcagatcaaagtgggcctgacaatggtgattctgatgttgaaatggctgatttatctgattctgatctagatgaagatgaggatgagtatgaccagctcccaccatttaagcctatgaagaaatctcaggttgctaagcttactaaagaacagcagaaagcatattttgatgagtacgattatcgggtgaaacttctacagaaaaagcaatggagagaggagttgagaaggatgagagagatgaagaaaaaaggtaacacaaaagaaaatgactatggttacatggaagaagatgatcaagagaatggaagtccagcagcagtgccagttccattgcctgatatggccatgccaccatcctttgacagtgacaatccagcctatagataccgtttcttagagccaacttcacaactcctgacaaggccagtcttagacaaccatggatgggatcacgattgtggttatgatggtgtaaacattgaacagagtctagctatcatcaataaattcccagcagctgtcactgttcacgtaacaaaggataagaaagacttcaccatccagttggattcctcagttgctgcaaaacttggagagaatggatcagccatggcaggctttgacattcaaaacgttggaaagcagctatcttacagtgttagaggagagacaaaattgaaaaatttcaaaagaaataaaacttctgctggggtgtctgtgacatttttgggtgaaaatgtgtgtactgggctgaaagttgaggatcagattgctgtggggaaacgcttggtattagtgggtagcacaggggttgtgaagtctaaaactgattctgcttatggtgccaacgttgaagtgaggcttagagaggcagattttccaattggccaggaccagtcttcactgagcctttctcttgtgaagtggaggggagaccttgctttaggggccaatcttcagtcccaaatttctgttggacgaggttataaggtggctgttcgtgctggattgaacaacaagctcagtggacagatcactgtgagaacaagtagctcagaccagcttcagattgcccttgttgctatccttccgattgccaaggctatctacaaaaacttctggcctggggctagtgagaattattctatctactagattgtgtcttttgtttgcgttgctagcaaggaaaagtagactacgagtttatcatatcgtgttgcttcttttcatgactgtcttaaataatgagtttttttttagtttcgtctagactattgaattcctgctatattagtgcttttatgtgcctgaaaattgttctgctattgagatggaacctacaagaaattgattcataaattttgttagcatctatttttgaataatgttgatataagattatgctgtttttcctgaaaaaaaggaaaagggcgggccgccccccggcccaaaaaaaaaaaaaaaaaaaataaaaaaataataaggccgtctcatctaaaaaaaacaaaaattacatacccgtgtatgccacgcaatactttttctaatattgcacccaaatcaaattcacttgccctttttttacaacaaacttacttaaaaaaaaatttaaaaattccccacctttatttaaatattc

SEQ ID NO: 78058 - DNA, 582 bp, Glycine max
  Clone ID: PAT_MRT3847_41502C.1
ccacgcgtccgcggacgcgtgggctgcaggagcgctagcatggcaagttcgcgctgctttgagaacccgccggtgctggagccggccagcggaggaggcgaggtggttgacgacttcggcgggcagaaggcctacgtcagcggctccgccgggtccaaggccgccgtcgtcctcatctccgacgccttcgggttcgaagcgccaaacctgaggaagatagccgacaaagttgcttcgctcggttacttcgttgtggtgcccgatttcctgcatggggatccatatgaccccagcaataatgcccatagcaatcctggaacgtggatacagtcgcacaatccgcaaacggcattcgaagaggcaaaaccggtaattgcggctataaaggagaaggggtgtgtcgagcatcggagctgcaggttactgttggggcgcaaggtggttgtggaactggcgaaagttcacgagatccaggctgctgtgttggcacacccttctttactaactgtcgatgatatgaaagatgtcaagtgccccatttccatacttggagctgaaatcgacaggtcagccccgcctgaa

SEQ ID NO: 78059 - DNA, 1261 bp, Glycine max
  Clone ID: PAT_MRT3847_41503C.1
tttttacaaaggacaaaatgtgttgtgttgggtgtactagcaattgtgctgggggagcgtagcaacaaccaaatctcaaacatgaacatgaaagttaaaacaataaatacacccacaaatctatacaaattaatgcaaatcccaggatataaaaatactaaaaaaaaatcttcagcaagtaaacagagctgtccaacctcaagctattatcttcaatgagcatttccagctaccttcttgtacctgtacctctttgcaacccagagatacacaaggaaattgagaaagctgagaacggtcaaaagccagtagaagtagtcaagatgacctctatttagattgtctggaatccaaccaagcttaccatgtcttgtggtaaccttagttacaataatgacaagaagggtgctaatgtaatttcccaacgcattagttgtgagtgagagagccataccaaggcttctcatagcatctggtgcctgaccataaaagaactctaaggaaccaatgttggtgaaaacttctgcacatccaacaagaaaatattgtggtacttgccagaagattgacaaggggatggtctcaacatcatagtagttgtttttcctgactatgccgaggcgatagacttctagaatgccagcaacaaccatggctatagtggagatcacaaggccaattcccattctttggagttgtgtgaatccttgtttgtggccagtgtacttgcttgcaaatgggacaatgaagcggtcatacaccggagcccagaagatgacacttagggtgtcaaaaatggtgagggatgctgatgggattttgaagtgaggaccaatgcgctggtccattgtgttgccttggagaacaaacatggtgctcatttgaccgtacacagttgcaaaggcaatcaatgatgcccaaactgggagtaatgagattactgatttgagttcctcaacttgtgttactgtgcaaagcctccaaggatttgacaagtctttggtatgatcagattcggtctctacagctgccttatccaaacacttgaagcggtttgtgtgatcaagcttgcggctccctttgatgacagattctagatctattgtctcatgaagaagagatttatcattgggcacttgaagaccgattttcctcaaggctgcaactattacttgacaaatccttgtaaggggactgcctccaggtatttggagtctgtagagccggctaccaccaaagaaaaatataattgcaatgacct

SEQ ID NO: 78060 - DNA, 260 bp, Glycine max
  Clone ID: PAT_MRT3847_41504C.1
gccgaaaacacttgcaaactaggttttgattttggaacatatcgcattacattacattagattggtggcaaagcaatggcatcggcactacaagcagcaggtacttttcatgcaacccaccaagtttttgcagctaaagtctactcaggccatattctaagggttttggtttggaacctgctagagataataatgtcacattcttccttcatgctgatcttaaggaacttgctcacaagtgtgttgatgctaccaaatat

SEQ ID NO: 78061 - DNA, 192 bp, Glycine max
  Clone ID: PAT_MRT3847_41505C.1
ggtcgacccacgccgccggaacaacttctactttccttctatgctaaaccataggccttagactacctaatctagcatgtctatctaggtactgtcattcggactgacaggcatggctctgacaacgcgacacctctgtgcattacgcagagcatcatcacgaacctctccctcaccacgaactaaaaaccc

SEQ ID NO: 78062 - DNA, 202 bp, Glycine max
  Clone ID: PAT_MRT3847_41506C.1
agagatcttgaggtggtacgttcaagccgagcttgggaatggacgttgggccatgttgggtgttgcaggaatgttgcttcctgaggttttcaccaagtttggaatcatcaatacccctcaattgtataatactaaaaaatcaaatgacttgtcatcttcctcaaccctcttcataatcaagttcatcttattgcactacgtg

SEQ ID NO: 78063 - DNA, 939 bp, Glycine max
  Clone ID: PAT_MRT3847_41507C.1
aaaattaagaacatttaatatattatactttgtcaaaaatgtattgtcatcttttagtttttaactccttcattttcagtttttcacttggtcacatgaaacacacatcatatcatacaattactgttattgaatatcatgtcaagtagttcaacaaactttagcccaaaaggaatgtgggaagataacatttttttttgtgtgtacgccttggaacctatgatctcatgtattctatcccaagtttcccaccactaggccaacccagtgggtttgggaagataacacttgaaaactaaagaggaaggaaaaaaaaaccctcaatattcattgtccgaatcactcttcttagggtaatatctacacaagagtgcatacaatagcaagctcactgtacttaaccatgctagaagccaatagtaactgtccaagcgtgcttcaaccatatcatcacagaaccagcttggtattccctttgaacttgtgtacacttcaactagtgtgatcaacagtgcactcacaaagcttccaaccccaaaaacacttgtatacaacgcaattcccattgtcctcatatgcctgggaacttcaccataaaagaactcttgcatgccaacaactgtgaaaatgtctgagatgccaagaagaatgtactgtggtagcagccagaaaatgcttagaggaactgtttctgattgtgaccctgcacttctcatttggcttccaatctcaagccttctcatttcaactagagcagcaataatcatggctatgattgagagaaccattccaattcccatcctttgcatcacacttatacccctctcctgcctagtgatcacctgagtgattggtatgaatattttgtcatacaatggcatcaagagtattatggaccgtgttatagcactttggagtgtagctggtggaatcttgaag

SEQ ID NO: 78064 - DNA, 660 bp, Glycine max
  Clone ID: PAT_MRT3847_41508C.1
tccccaaggactagttgaagattcccacatatgtatggtgaaattatgacccagtaattgcagtctgagaatcaacatgaccatttaatacttttgtgcccgtacttccagaccttcgcacttcgattcaatcttgtcatctgaggatgcgtcactagttctgagtggcattttccctttttttttttttttttttttttgggttaccctactctccagtgaggtgatgcataacctgtttgattgcacgtgaacatttccaccaaagttggttagtggttttcggagcactggtgaagaaatagatgccctgtggaaagatgcgtgtccattaagtactggttgatcaactgtacctctcacctcaagcttcaaatctgcgttgccatgaagccaatttgcatgaggagacaaagccgtaaccaatgtcattcccccatcttttatatcagcatcaatcctgacttctccaacatctaaaatttgccaatttaaacctttaaggctttctgctaactgagtattccaaccttcttcatttctatctctagaaacttttttgtcgctggcatcatcgacggtccctctattcttctccttgacccaatcaggaacccaagtaacttgactcttatctaattctacatcctcctgtaacgt

SEQ ID NO: 78065 - DNA, 1046 bp, Glycine max
  Clone ID: PAT_MRT3847_41509C.1
agttggagttgttacttctttcctgaaacctccctggaatgtcggcggcgtgcatttgaactcatgaaaagtgaagatgcgtggagtaagggaattgtgaccacaaaagaaaattatacaacaaagcatatatgggcaggacctactccaaggaaatggggtcttcagtggaattatttgcaacctactactgatataaatgggactctgttagcttctcatagaaaaatggatatacggtggtggagagcacaggcagtacgctacttaatgaggttcccaaccgaatacacatgcaatttaatgaatgaggcccgccatgctagctttggaaaattagctgcaaaaatggtccttcaaagtcttgctggggattggccaaaggaaagtagtgccagggcaaggcctgatgatattgatgaatacgtgtggtccaatcacaagccatgggtccctaggcctcttctgtgtatgcatgtaaggatgggagacaaagcatgtgaaatgaaggtagttggatttgaagaatacatgcagcttgcggataggactcggagacacttccctcaccttaataacatttggctgtcaaccgagatgcaggaagtcattgacaagaccagagaatattctcattggaacttttactatacaaaggtaagacgccaagctaagattaacatgtcaatggctgcctacgaagccagtctgggtagggagaccagcacaaattatccactggttaatttcttgatggctgctgactcagatttttacgttggggcattgggttcttcctggtcctttcttatagatggaatgagaaatactgggggaaaggtaatggctgggtacttgagtgtcaataaagacagattttggtagagttacgtttgtaaattagatcatcagtggttaggctaccaagcaatatgattctctgtatgtataattattgtacatatgcaaaaaataaaacaacgcgatctctaattgatagagtgatgatgatacaatcaaaatgcttgcaccttgtttttggagtc

SEQ ID NO: 78066 - DNA, 399 bp, Glycine max
  Clone ID: PAT_MRT3847_4150C.1
gttggatctctgttgatggtctattgacaagaaatgtcgtggcatatgagccatgaactttgtggattgatttggccaatgactttgactgatacccgtctgtgagatcaactactcgttaaaaagcgcatccggggagatagcggcagggaccatacccgacccgagatcattgaatgcccaggtgctgactatgggggatgtggctgcgatgcgatggggcatagagcatattgaagagcctggggtaagacattgactatagaatggatcatggacaggtttttgacggtggtgtcattgggaacttcagcagtcctttgtctgagtagggggagggccaacctccctccctcttttacaagtttggccaatcctctcccgcagagttattatttt

SEQ ID NO: 78067 - DNA, 313 bp, Glycine max
  Clone ID: PAT_MRT3847_41510C.1
gctgggaaggcgtttttacttgattggccgaagttcataagtggattaggacaagtaataatcatcactaaaaaaaggggccaagactatttaaaccacaaacacaatttagacaaatgaatgccggatcccagggttactgtacgcctgaatagcgaggtgaacccacccggagaaaccatagacgaacaaaaaccgcccggagggggggggggcagcaacgccacagtactgcccgagcagagggagggagccggaccgggcacggaaaaggagcgcaaccggagcagccggaccgcccacagggagccca

SEQ ID NO: 78068 - DNA, 343 bp, Glycine max
  Clone ID: PAT_MRT3847_41511C.1
gggatctgacaggataggtgcggcgatggcttttgcagcgacgcccaagataataacggagtcactcgatatgcaaatccaaaggaggagcatgaaaggattgtatgggaaaaggtatctggtaacgatgaagcgaagtcaagatcattcaacgaaatgtgttattgagcgaatcatcagcgactgaaagaaaagcctcacaggaagaggcgcttcaaaacataactacatactgacattggactacatgtcgaacagatcctgcataacacgtaactttaactgtgatactgatggacctgaataaatgaatcccggatactatcatcaaacatgatcgctt

SEQ ID NO: 78069 - DNA, 573 bp, Glycine max
  Clone ID: PAT_MRT3847_41512C.1
gttctaggaaggtttcccgtcatcactgtatgacgtcctccttctttggggggggggggggggggggggggggaagaagagtcaaagaagaggaaagacagaccggaaaagtaggatagtaacacgcgggccgcccgcaatgtttaataagacaaccgggacgggtgtaggcgtaacaaacatggataaaggtaaaaaaacataaaccaataggcaaccaaacaagcaacagcgaagctgtgaaagcaagactagaaaacgaagatggagttggcaaggggcagtatgggattttacagttggtagcgtgtggttttcgggcggtttggaataagagggcgtgggacgtggtattatggtaagggtggtttttactagaaggccattaaaagatttagaaatacttccaagttaagtgaaggaaaaattgctggaaccgacgcaagaagatgaaggacaagcacgccccgaaaagcagaaacaaaagaactagagcccaaaccaccattgccgttagtttaatggatgaagtagaaaagggatgagggatgggataaagtagaaaagaaaaat

SEQ ID NO: 78070 - DNA, 255 bp, Glycine max
  Clone ID: PAT_MRT3847_41513C.1
tgattcgagacaattgaacaattggggtgtgaaatggttctttttttcgctttgattctcctcgggtttcttcttggggtggtggcggttgtggctgccgaagctcttgggtttttgtgggtaataaaacgattgcaaagcaagatcagcaaagaccaagcgaaaatcgcgtcgaaaacgcaactgggtggtgctcaaagtgatcatccccaacaacaattgctaaaaacggagggtgtggtttgggttttggag

SEQ ID NO: 78071 - DNA, 269 bp, Glycine max
  Clone ID: PAT_MRT3847_41514C.1
aaggaaactaaaataagacgatcaaggcaatgatctgtcattatctcatgcttctccgacttgtctccagagggacaagtcttgagcttgcacactcgtcttagtatgccacaagccaatcaagaatgtatccgaacccgatgaactcacggtcgccaagtataccatttatgaacataacacgtacccgaacaagaaaccattcttcgctaaggttgctgagagaacgacacatgtgatattccttacagaggacgatctcaaaatta

SEQ ID NO: 78072 - DNA, 242 bp, Glycine max
  Clone ID: PAT_MRT3847_41515C.1
tacggctgcgagaagacgacagaagggggagggtttcccagttggaagccatagctaagatgttagaagaaaaaaaaaaaaaaaaaaaaaaaaaaaaaagcggcccccaatagggggccccgcccccccgggatttatttcgggtcgggaacctttgggggcaaggtttcccctagagggggccgtttaaaccctgggcgaaataagggaaaaactttttccctgtgaaaaattgtaacccc

SEQ ID NO: 78073 - DNA, 252 bp, Glycine max
  Clone ID: PAT_MRT3847_41516C.1
gatgtatatatcatgttctgttttttgtatcgttgtattccacacccgatattgccggagtacctactcatccctatcttgattatggctcgcattgtgcccaactccagaaaaagcccggccccgggggaacaccgggaacaatccatccagcaccatctgcgtggcccgtttaatcacttgacaaggcccttaagcctcctgcgcgacccaggtcaaatgaatttccttgggaaaaatgtattcttgcca

SEQ ID NO: 78074 - DNA, 231 bp, Glycine max
  Clone ID: PAT_MRT3847_41517C.1
cccacgcgtccgcccacgcgtccgctcactctaccgcccacgcgtccgaaactaaggaggtggactcatatacacaagtttggggaaaaaccagaaatggcaaatgacatcatagagtttgggagcctctatgagtatatttagattccaagtttggtctgccgagaaagttattcaccatactatacacacacgggctaaacttgaatattctctagcaagacagaaatt

SEQ ID NO: 78075 - DNA, 781 bp, Glycine max
  Clone ID: PAT_MRT3847_41518C.1
ccacgcgtccgcttagcccccacacactttgagatatctagatctccagcatctctatgtaaccaccttccccatgaatctctcctatattttagttttaattttggttttggtttgctgcatggaagaaattatggtcacgccgagcaggaagcggagtttccaaagagaacaataatcaaccagtgttttgcttctgcttgctgctttccattctaccagtttttgttttttgtttttattattaattgatcaattgagcataaacaaattcttcgatcccctttacagttactgagttgttacatgcttcatctaggttcaactgtgaagatgctccttccagcgaggaaaaggtcgaaattgaacaaagttgtgacctttatcaggaaattggtcttctgagaccaccctgaaatagtcccagtcaacaattttgattattttccctatttctttgcctttttcagtgaggattggagtgggagagtgaatggaggttggggaaatggacagaaaggagccacaagttgaggttccttggagccccggcacccctattaaggccggttcctatgaaaccaatgccgatctgctcgcctggggagaaaaatcaaatgggtcatcatgcaaatggagcagttgcatgtgatgaattttcacacggccaagacaaattggtggtttaagtgatgggtcaaatgttgccactgaccgtggcaaaacttgtgaaccgacagattcggtatgctggtttcaactatagcaaacttgggttttg

SEQ ID NO: 78076 - DNA, 370 bp, Glycine max
  Clone ID: PAT_MRT3847_41519C.1
ggtgttttgcgttggtttgggtgtaaatttgtgtggatgtggatcctggatggggagatcaaacacacacgtaaacacactttattagccaagtttactgaagagaagtctgaaagaaggttgaggaacattgtatttcctgtttgtaattatttaataatgtgaaatcattacatttgatttgattgtgagttcagtgctgaagaagaaacttggttgtgaacttgtgggacctctgtagtttatcaggaagcaaaagtttcttgaagggttaatattgtagggaacattttgtttgttgtgatcaatctggcgaccacatgttataattgaaatttttcttggacaaacatttgctagtttttgcttt

SEQ ID NO: 78077 - DNA, 125 bp, Glycine max
  Clone ID: PAT_MRT3847_4151C.1
atcactccgcctttcactccctcatcccgtgttcctatctccacattcattccttgttattttttaggattcgtctcatcctcacagtgactatcacctcaaatcaccactacacatcatcaccc

SEQ ID NO: 78078 - DNA, 568 bp, Glycine max
  Clone ID: PAT_MRT3847_41520C.1
tcctccaccatatgtttataagtcaccaccaccaccttctccatcaccacctacaccatatgtttacaaatcccctcctccaccatctccatcacctcctccgtcatatatttataagtcaccaccacctccttcaccttcaccaccttctccatatgtatataaatctccacctccaccttctccatcgcctcctccactatattactataagtcaccacctcctccatcaccctcaccttcttctccaccatatcatccttacctctataactcacccccacctccggtatattaagtttgcggctaaagcaattaattcggctcgagctcgagccgctcgagccgcaacattgttgcacttaatttgtaatcacttatgtattaataaaaagggtctacactaaagtgagagccttattttggctgtagtgtagcccatgcgtgtgtattggttttaattgatcaaaagtgtgttttaatctctcttaccatatgaatatcaaaatttgttcttcattggtgttggattccaaaaaaaaaaaacaaaaaaaaaagggggggcccc

SEQ ID NO: 78079 - DNA, 298 bp, Glycine max
  Clone ID: PAT_MRT3847_41521C.1
aagcatcctacctaccttaaccttaaatttaccgttcattatctcctcagcgccggtgcattcgtacacctcctgctctactacatacaatcctctttcttatcatgcacccccttttattattagacaactaaagatacctactcttcataccttaactactacacaaaccgcatttcttctaacgttcagatcaataataagcaatgtttatataacatactactactactcacttcacatattattgatcattgcaaaataactattaaatacccttaaaattccaacaatattt

SEQ ID NO: 78080 - DNA, 336 bp, Glycine max
  Clone ID: PAT_MRT3847_41522C.1
acctttgtcttttacaagaaggggaacaaccccggggggacttttttgccctatgggtgattcaccccccgggggcgtctttgcaggcaatgctacttcagcctgcacaactataagagcgcttgaggcccacagtataaagcccaacacatatgaagtttcccaacacagatatagcattgtgccaatcaagcgcagatcatgggttgaaggccacatatccttcaatcagacggcaggagcaaccatgtcttaacgcaaagacagcatgagaatgggaaacactgatgctgaaaatctgatggaaccagggaccaaatccataactcatgaaca

SEQ ID NO: 78081 - DNA, 329 bp, Glycine max
  Clone ID: PAT_MRT3847_41523C.1
atcgggcaatcggctctgaatagaatgagcaggaataccgaacaactgtatattacgcagccattcattcatggaatcactggcgatttggccaaacacaccccctcaaacgtacataaaaatacggggggtaattcatgttctcaccgtgcggggctaacataggacacggagatatctggaggcgcagagggatccaatctggttctttatcttgcaggccatcactagcaaaatggggcgcacaagggcattctgtccggatggctaaaaaaccaaggctttctctgagggtttaaggctcgggggtgcgccttagaaacggccaa

SEQ ID NO: 78082 - DNA, 231 bp, Glycine max
  Clone ID: PAT_MRT3847_41524C.1
cgttcaatagaattttacgattaagatcacccactcgaggcattacgtggcacaaaggttcaggagtgggacctcttgagccaagtaatgcgtcgagttggtgatcttaatcgctctgtacaattgtacgataacgcatatggtatggatctgcatcgtacacgagatgatccagcttacatgtccatcatagcagttcttgggtatggtcctgcagatgcaagcactgtt

SEQ ID NO: 78083 - DNA, 180 bp, Glycine max
  Clone ID: PAT_MRT3847_41525C.1
cggacgcttgggctcgtgctagttaagagagttttcatttacctaggctgaaacgtgaaaatcatttgcaggttgtagcttaattcattctcttgcggatcctcacttccactgtacgaccgccatttgctgcgcttcaaacagaccaactaattgtgaaacaaatgaattttgtctaat

SEQ ID NO: 78084 - DNA, 174 bp, Glycine max
  unsure (1)..(174): unsure at all n locations
  Clone ID: PAT_MRT3847_41526C.1
cccccgcgtccgttcttttttgggcagcccccggcgggggggcgcgtgcctttgcccgccctgtgcatgttcgtggtttttccgctgttcttcctgcgtggtctttcttgcctttgtgcctcggtgcctntgtgccatttgttctattacctttgggggcctctttctttacgg

SEQ ID NO: 78085 - DNA, 672 bp, Glycine max
  Clone ID: PAT_MRT3847_41527C.1
ccaagttgtgtttctagattttcatagactaacatgatgacgacttacaggccaaaaaaacccacgcgtccggcagaatgcaaaccaattatctgggagtggtagtgagattcacccttggcacttgcatggacatgacttttgggttttggggtatggagaagggaaattcaaaccaagtgatgagaagaaattcaatttgacacatgcaccgttgaggaacactgctgtgatatttccatatggttggactgctttgaggtttaaggctgataacccaggagtttgggccttccattgtcacattgaaccccatttgcacatgggaaatgggtgtgatttttgctgagggtgttcacaaagttggaaaaatcccaagagatgcactaacttgtgggcttactgggaataagctagtaggaaatagacactattgaaactagctagccacatatcaacatcaaaagaatcttaaatggtgtttatttaatttaaaatttgaacgttgaattgatattatgttttaattttacctttttaaatatatatatatatatatatatataatttatatatatatgggtgtgtggagaatttgttaatgtagacctatcttttttttttttttgaaagtgtatgttaacaaactataactccaattgtttttaatat

SEQ ID NO: 78086 - DNA, 2084 bp, Glycine max
  Clone ID: PAT_MRT3847_41528C.1
cgcaattcgctcagatccttatatctatatttcagttcattttgttctccaataatttcttctgctactttagagaccttgctgcaaaggttctctcttagcatggtaacaatgggtttgaaagcactttttgtttggtgcataatatggttggcgtttgcacagttgtcactaggaggaagagtgaggcattacaagtttgatgtggagtacatgatcagaaagccagattgcttggaacacgttgtgatgggaatcaacggccagtttccaggcccaactattagggctgaagttggtgacatccttgacattgctctcaccaacaagcttttcaccgagggaactgttattcactggcatggaatcagacaggttggaactccttgggcagatggtactgctgccatctcacagtgtgcaataaacccaggagagacttttcagtacaggtttacagttgacaggcctggtacatatttctatcatggacaccatggtatgcaaagatcagctgggttatatggttcattgatagtagatttgccaaagggacaaaacgaaccgtttccttacgatggtgaatttaaccttcttcttagtgatttgtggcacaccagctcacatgaacaagaagttggcctctcttccaaaccattcaagtggattggtgaagctcagactctgctcatcaatggaagagggcaattcaattgttctcttgcatctaaattcatcaacacaaccctaccccagtgccaacttaaaggtggtgaagaatgtgcccctcagattcttcatgtggagccaaacaagacctatagaatcaggattgccagcaccactgccctagcttcactcaacttagccatttcgaatcacaaacttgtagttgtggaagctgatggaaattatgttacaccatttgcggttgatgatattgacatctactctggggagagttattcagtgctccttcgcacggaccaagatccaaacaaaaattattggctttcaattggggtgagaggaagaaagcccaacacccctcaaggcctaacgattctaaactataagcctatatctgcttcagtttttccaacttttccaccacccatcacacccctttggaatgattttgagcgtagcaaagcattcaccaagaaaatcattgccaaaatggggaccccacaacctccaaaacggtccgaccgtacaattttcctccttaacacccaaaatcgggttgatgggttcaccaaatgggccattaacaatgtgtccctaacattgccaccaaccccttacttgggttctatcaagttcaaaataaagaatgcctttgacaaaacacccccaccagttaccttcccacaagattatgacatctttaaccctcccgtgaaccctaatgcatctattggcaatggggtgtacatgttcaaccttaatgaagttgttgatgtgatcttgcaaaatgcaaaccaattatctgggagtggtagtgagattcacccttggcacttgcatgggcatgacttttggattttggggtatggagaagggaaattcaaatcaggtgatgagaagaaattcaatttgacacatgcaccgctgagaaacactgcagtaatatttccatatggttggactgctttgaggtttaaggctgataacccaggagtttgggctttccattgccacattgaaccccatttgcacatgggaatgggtgtgatttttgctgaggctgttcaaaaagttgggaaaatcccaagagatgcactaacttgcgggcttacaggaaagatgctaggaaatagacactattgaaactagccccaataccaacatcaaaagaatgttaaatagtgtttatttgattaaaatttgaatgttgaattgatattatgttttaattttacatttttaaattttatatatatatatatatatataatttatatatataggtgtgtgtggagaatttgttaatgtatgttgaataatgacaactccaattaaatttcatatatctaaaaaaaaaaaaaaaaaaaaaaaaactgattgggggtggcgatagg

SEQ ID NO: 78087 - DNA, 319 bp, Glycine max
  Clone ID: PAT_MRT3847_41529C.1
aataggacgacagaattggaaaggtccaaggagtaattgacacagttcagaacacagccatccacgagaaaagggacttcatcaatgcaccaatgttctgttctccgaaatattctcaaatctcatgcatgggattcaaggctttgactcagcactgtctacgtttttgacttcagtgcttttggacatggccgtggtgttcatcagagaagaactagcactagcattatgtgagacagctttgggaattaaacttagggtttctaatgctctcaacaagcaactagctatagtgttggagcatctttgtttctcttgg

SEQ ID NO: 78088 - DNA, 571 bp, Glycine max
  unsure (1)..(571): unsure at all n locations
  Clone ID: PAT_MRT3847_4152C.1
ttttttttttttttttttttttttttnnnnnntttttttttttttttataacccaacgagggggggttattttcaaaaggaaacaaaaccaaatttgatttccataaaaaagaaagggagaaaaaaaggccaaccccaaaattttagttatttggcaaaaaggattacccactgttgtaagcacacacactttttcacacgttttccatttacaggttcatttacaaaaattttcctgtttttttttgaaaccctttgttggtggaaagaaaaaaaaagtaaaccaaagcttgcaacttaacttccctttgttactttccttttcgggtacacttttttttttctttttttctaaaactggttttttttttttttcggaaacactgtccttagttccgttcgttaatttgttggttcctcgagagattttgaaaaattctattttgtacttgtaccgcctaccccgccgaaactgcccccgtacggaacgagtaattttgttgccccttgtttggcgacctggatctattattatttctctgctccttggtcctcaaagcctttattgatg

SEQ ID NO: 78089 - DNA, 681 bp, Glycine max
  Clone ID: PAT_MRT3847_41530C.1
cgctcgagtccgactccactccgaggtttgttaagctgaagactaagagcggttttgaactcgcacgcgagattattcatagtaaacattaatatttagaaatgcttgtagctcgaagcctctccccttcaaagcttaaaccactcttttatctatcgatcctttgtgaatgccaaaatcatttccactcaagcttaataccatactcaaaacctcatctccaaaacttcccaaaattttatcctcagccatcaactaatctgtttagatttttctcttcacagcctgcagattcaactgagaaacagaatttgcccctctctcgtgaaggtaattacgatgaagtcaattcccaatctcttcatgtttgccctggctgtggggtttatatgcaagattccaaccctaagcaccctggttattttatcaaaccctctgagaaggacttgagttatagattgtataacaatcttgaacccgttgctcaagagcctgagttctctaacactgttaaaaggggaattgttattgaaccagaaaagcttgatgatgatgatgcaaacttgattaggaaaccagagaagccagtggtgtgtgcgcgctgtcattcgttgaggcactatgggaaggtgaaggatcctaccgtggaaaacttgctacctgattttgactttgatcaca

SEQ ID NO: 78090 - DNA, 220 bp, Glycine max
  Clone ID: PAT_MRT3847_41531C.1
ttggaacataaaagcggccttgcttttacacccgaaaaatgaacacctatgctccaacaacgggtcatgtcacacgaaaccactttcaagttatggaccggaacagcatccacgcccctgtagcgctttatactctgcccaggacgtttaacacacctgcgatgcaggaccacaggggttactacgctctactctattctggaggcgtgtggaacctccg

SEQ ID NO: 78091 - DNA, 415 bp, Glycine max
  Clone ID: PAT_MRT3847_41532C.1
gagaagcactatatgtgagaaatatcttctataacagagctccatatgtattaaggatatagaccctacaatgaagtataccaacaatgaaaggactacaatacaagtatgcatgcactatagaccaagtgtgactcatagaatgtaagaagttattgctcttgatgatatgatacatgacaatatagatcaaatgtgcatcagaatccagactgcagatatagtcacacttaaatgtatgctgcaaaatttctaactaacaagctcagttgtaggagcccatacgtacacgcagctggccaccagcatacggctggaagctatccctggcgcttgattagtcaatataggattgtacataaactatgctagcgacgaaaataagagccctatctgaaactgacactcccttact

SEQ ID NO: 78092 - DNA, 755 bp, Glycine max
  Clone ID: PAT_MRT3847_41533C.1
cccacgcgtccgttcacgcgtttctccacgcgctagtccacgcgtgcatccacgcgattcaccacgcgtagggccacgcgtagtgccacgcgtccgtacgtccagaagacgacggaatcagacactgattgagagaaaaataatggaggcttacactaaggttgtttgcattcttggacttttaatttttgtaagcatttcagatattcatagagtggagggtgcaggggaatgtgggaggtctactactccagataatgaagcaataaagcttattccttgtgtctctgccgcaaaagatgaaaatgttaaagttactaagaattgctgtgctcagatcgagaaacttggcaagaaccctagttgtctgtgtgctgttatgctctccaacacagcaaaaatgtctggagccgatcctaaggttgccataaccatcccaaaacgctgcaaccttgctaatcgccctgttggttacaagtgtggaccttacactcttccttaagatagtactgaggacaaggagggatttgggcgtgaaggcacaaaagctgttggctacaactgtgactacaaaactatgttttattgtccttgaaacaatttgatcaataatggcaagtagctatatggtgttcttcctgaataaaactagaaattttaatgtttaatgtttctattcctatttaatatattaacatctaccttttataagcccaaaaaaaaaaaaaaaaaaaaaaaaaaaaaaaaaaacttgg

SEQ ID NO: 78093 - DNA, 429 bp, Glycine max
  Clone ID: PAT_MRT3847_41534C.1
aaaaaaaaaaaaaacgttttttttttaaattttgggggcaaaattttggggggaaaaaaataaaattttcccaaaagggggaattcctttaataaaaaaaataggggtttaagccttaaagggtttatttttggatttttgtaaaaaattcccggttgaatgtttgggggcattatagggaacctttttttctgttaaattaccagggaaaattgtccccgggggaaaacccaagttgggaaaaattctgggggttgtaattaaaacgggcctaaaaagtttttgggtttgcacaataaaattaaagggggccattgataggtttaatgggtggccccaaaaccttgttttatgacagggcccatttttttcttccagtaccaaaggggttttttgaaggaaaaaaaaggtgttttggcccccgttttt

SEQ ID NO: 78094 - DNA, 1268 bp, Glycine max
  Clone ID: PAT_MRT3847_41535C.1
cccgcgtccggactccctcgattgattgtttcttattatatgtccaccaaattgatttctattatgtgtgttgtctggtattttgtttgctttggttttcttgtttgtttgacaattcccctcccctctccctccctgttttgtagggctttgcttcatttccttgatccggacaagttcaggagcaaggatgaatttgttcagaactataagaatctgagttcttttaatgagaatgagcttgcaaatctgcatatggaattgagacctcacatacttcgaagagttatcaaagatgtggagaaatcattaccccccaaaattgaacgtatccttagggttgaaatgtctcctcttcagaaacagtattataagtggattttggaacgtaattttcacaatttgaacaaaggagttcgtgggaatcaggtttctcttttaaatattgtggtggaattaaagaagtgctgcaaccatcccttcttgtttgaaagtgctgaccatggctatggtggggactcagaagtagtgacaacagtaaactagagagaattgtttttagcagtggcaagcttgtcatacttgataagctgcttgttaaattgcatgaaaccaagcatcgtgttctgattttctctcagatggttaggatgttagatatactgggagagtatatgtcacttcgagggtttcaatttcagaggcttgatggcagtacaaaagctgagcttcgacaacaagcaatggatcatttcaatgcacctggtagtgatgatttttgcttccttctttcaacacgggcaggaggtctgggtatcaatcttgctacagcagacactgttataatatttgattctgattggaatcctcaaaatgacctgcaggcaatgagtagagctcatagaattggacaacaagaagttgttaacatttatagatttgtgacaagcaaaagtgttgaggaagatattttggaacgtgctaagaagaaaatggttctggaccacttggtgattcaaaagctaaatgcagagggtaggctggagaagaaagaagccaaaaaaggaggaagttattttgacaaaaatgagctgtctgcaatcttacgattcggagcagaggagctctttaaggaagaaagaaatgatgaagaacaagaaacaactcttaagtatgaatatagatgagattcttggcccacccggaacgggcggctcctgcactgtgtgaaaaatgccaacagcagagttggacggaagccttccaag

SEQ ID NO: 78095 - DNA, 266 bp, Glycine max
  Clone ID: PAT_MRT3847_41536C.1
cttatcatacaatcgtttgctttatttcaaggcataagtttaataactaaatgatgtgagttttctattcagatgtggttacatccctatttttaaaattctatttactaacttatttaatttcatttaactttataatatcataaattctttataatctacaaatttcatttcatctaattaaatatctatttcttcattcttaaatcatccttttatcttctttatactttcaactatcctatctacacttattaccattttta

SEQ ID NO: 78096 - DNA, 1044 bp, Glycine max
  unsure (1)..(1044): unsure at all n locations
  Clone ID: PAT_MRT3847_41537C.1
cattcttaaattataaatatttcggtctgtgaagatatatgtccataagttccttaattttctcgaaccttcattttcagctcccaacaacaatggcttcaatggcatcttcaagctccttctgcaacctcaagttcatcaccaaacccaacaatggtagaagaagctctcttccccgtattgtattctgtcagaagcaccacgatagcacacccaccgaccaaatcaaccgaagagaactcatattgagaagcagcgaaatagcgaccattggtgccatcttgaacttcggtgggaaaaaacctgattatcttggagtgcagaaaaacccaccagcattagctctgtgcccggcaacgaagaattgcgtgtcaacctctgagaatatcagtgatcgcacacattatgctcctccatggaactataatcctgaaggtaggaaaaaacctgtgaacagagaggaagcaatggaggaactgatagacgtgatagaatcaacaacaccagacaaattttcaccacggatagttgaaaggaaagaagactatattcgtgtggagtaccaaagctcaattttggggtttgtagatgatgttgagttctggttgccacccggtaagggttctactgtggagtatcgatctgcatctcggttgggaaactttgattttgatgtgaacagaaaaagaataaaggcactgtgaccagcggcggcgaagcaaggatggtctcctctactttccgtccgtgtattcatctctggctgattcaactcccgcagcttcgctgatagcattcctttctctgtgtatcctggttgcctttggattagggacaactcgccctcgatctctcctgcgacaagagttggagaagaaaggatgggcatctncagacaccatatgatgaatanactcagagaaatcattgagaacagtactttcaactctcggggaaaggaaatgaatgagaccttgccccatatccttttctcagttcattaattggtccgcttatttactctttcacaagnntcatctaaca

SEQ ID NO: 78097 - DNA, 408 bp, Glycine max
  Clone ID: PAT_MRT3847_41538C.1
aaaaaaaaaaaaaatagggtttaaaaattctaaactttaaaaaccccctaaatttttttttccccccttttaattggggtttaaagggttaaattttcatcaggaacattttccttttaggcttaaacagggggggccccttaagggggggcaaaaaactttttttggtttttaaaaaagggttggggggggggttttgacttccgggggccctacctttgggcaatttggtcaacccttttaaaaataaccccccctaagcaattttttttcataaattatggggccacaaagggaaccagggggggcacttttggggggggaaaaagggcttaagaatttgaggggggggcgggtggacaaaaccttaaatagaaacttgcctttaaggaacccccctttaccctt

SEQ ID NO: 78098 - DNA, 346 bp, Glycine max
  Clone ID: PAT_MRT3847_41539C.1
ccggctcgacccacagcgtcagtcgggtggcaaaaaaccaccaaaggggaagtcaaggtggggtggacgaccacggagaagttatcgcacgacacgtgaaagaatccatctggtatgtgcgatcgatcatctcctctgctaaatacaatggaactgatagcccagcagctaagctactacaatggcactgacccagcgaagccgatctacgtggcggtgaacggacgagtctacgacgttaccacgggaaaatccatctacagccccagcagcagcaaagccatgttcgccggcacagacaccggcaagaccctcgagatgatgagcaagaacgacgatgacatct

SEQ ID NO: 78099 - DNA, 503 bp, Glycine max
  Clone ID: PAT_MRT3847_4153C.1
ggtggttggtgaagttaatagcggggagggagatgcagaagcgcaactaccattggtgccgaagggaagcagcagcataagcatgacatgtctatgccttacccattcaatcactcaaactcataaccataaccataaccttccacacgctactactaccttctcttcttctctccataaccgtaaccccctctttcaattattctccgtaagtaaccaattccctcttctatctcgcgctttgtttcagagtattattctccgacctcgaattcgaccattttccaccaacttaactgcttcttattcttcttctgccttcgcccaaatcatggcgaatttcgacgctgattccgtcacttaccttacgcagcgagatgccgcggagatcgacgagacactcatgggtccacttggcttcagcgttgaccagctcatggaattggatgttttgagcgtcgccacttccatttctgaggtttacaaaccatgtgagcatagtc

SEQ ID NO: 78100 - DNA, 435 bp, Glycine max
  Clone ID: PAT_MRT3847_41540C.1
cagattggggacccgaattaccactttcccgataaggactggaagcaccagcggccggaaaacaaacctgggctcagggggggaaaacgggttgggggtcctcaaagctagaaaactgggttggggtttccccaccgagggaagggggccttcgccagggggcaggggggggggacgcttccccaaaagattggggcggggtttgtccttgggaccccttttagcctcccttggcggaaggggggacccaaaaatgggcgggagcaaggggggcctccaaaactggtaacaggtggaacaaaaggcaatgttgggcgggggcccaaagaaccgcaacattaatcccccccggggggcagaaaaaggttttgtccccacaggggggaaaaaaaagggctgaggccccccaggggcgaaccccgggccgaggagaca

SEQ ID NO: 78101 - DNA, 199 bp, Glycine max
  unsure (1)..(199): unsure at all n locations
  Clone ID: PAT_MRT3847_41541C.1
aaacacacaaaatgtgctctttaaaattgcttgtgagacaanggccaccggtcatagtcttacttcattatttcctcctttcctccttccttcatatttcttttcagaccaaaccctatctacacatatcaaccgttttgaacaacctgttttaaaaaattaaaccttttagtaaacccaacccttataataaagatta

SEQ ID NO: 78102 - DNA, 329 bp, Glycine max
  Clone ID: PAT_MRT3847_41542C.1
acgaggctgcttctcctatggcaagccaactcaagtccaccttcactaaaactcttgtagctcccaaaggcctctctacctcttcaccactccacctcctgccttctaagaggcaatttagcttcactgttaaggccatccaatcagaaagaccaacctatcaagtaattcaaccaatcaacgataatcccttcattaaaagccttaaaaccccagttacatccagccccttaattacataatacttatcaaacctccccacatacagaaccacagtaagcccactactaagaaaaaatcaaataaacctaacccataactaccttcta

SEQ ID NO: 78103 - DNA, 505 bp, Glycine max
  Clone ID: PAT_MRT3847_41543C.1
tcttatcctaattctttatagagtacattttacatacctgtttcaatttttatttttcagaatttgtcggaatcatttatatgagaccaaaattaaggaagctatgcataactaactctgacacaattcagtatttcattaactgaacatcaaccacaagaaatttgtatggaagtttattctctgaaatgattttgcattccattaaactgattcaactttatttgagtttttttctctgaactacatatatttcaatgtgcagatcctgagaagcaaaaatcattggattggacaaggcgatacaaaattgttgaaggaattgctcgaggcattcaatatcttcatgaagattccaggcttaagattatacatcgtgaccttaaagctagcaatgtcttgttagatggagatatgaatccaaaaatctcggattttggcatggcaagaatatttggagtggatcaaactcaagcaaataccaacaggattgtagggacatatg

SEQ ID NO: 78104 - DNA, 410 bp, Glycine max
  Clone ID: PAT_MRT3847_41544C.1
ggcgctagtcgaccatgaagccggatggatgaatacgttggcgcagccaaatgcaacttctctaatctatgcggttacacgacggcatgcacatggcgtagaggagcagacgtctacggatcctactcaactggagatgactaggtacaacggcaaaaatgcgctacatttagctggacgccagggacatgtgagtggtgtaaagatactactaccgaaggatcaacaacttgctcgacggactggttacaaaggacaaactgcgctacacatgggtgtcaaaggggttagctgtgaagtggagaacctgatacttgctgcggatgcagacattgtcatgctttctgacaaaattgtcaatactgacttgcatgtggccacaatgaaaaagaggacagagatagtgcatg

SEQ ID NO: 78105 - DNA, 239 bp, Glycine max
  unsure (1)..(239): unsure at all n locations
  Clone ID: PAT_MRT3847_41545C.1
gtaaatcacaaccaccgtgacgtgcttattcttccgccctcggtggaggctctgatcgagagcatctgccgcgaccagatcaagcctccgctcgattacagcacccgccaccgtctcaaactacagggcgaggaacaatcccttcgcattctcaacaaaatcgccgccacccgtatccgattatctttcgcaggcttcgtcaaccacatgctcgccgacatcaancaccaacacaataa

SEQ ID NO: 78106 - DNA, 256 bp, Glycine max
  Clone ID: PAT_MRT3847_41546C.1
gtaaccgcacacttccactcaacctattatatatgttcttgaagatttaaaataatgggggcattttatataaggaggttttcaagaatgatgcatatatcatttcaagtattttattattatcacacattatctatttattttttttcattaccaaattactctttacctcatatattttacaattttttttatcaaattattaaaataaatttttttcttttctaatcattattatttattcatattatttata

SEQ ID NO: 78107 - DNA, 355 bp, Glycine max
  Clone ID: PAT_MRT3847_41547C.1
ggaaacaaagagaacccaggacagacatatccactgcatgagatgcccaaagcaaatgcatcatactataattaatactacaacattcacttacttcactctgtttccatgcttccgatcctagaaaccgctactttctctattattatcatcaagtgtgagatgcatgctcctgacaaattcccaaccccttttgtgcgagtgagacccatctaatcaaattaattaactcctaaacccggttcattaaccaaaattgagtacttgaccaaatttcacaagcttcaaaccaaggaacccaccaaacctaagaaacatcatcgtcagctccgaaagatcgcaagcttgttgcggt

SEQ ID NO: 78108 - DNA, 112 bp, Glycine max
  Clone ID: PAT_MRT3847_41548C.1
caagagaaggctcaggagcgaaatgagagagtctcaaaagcagctaacgcagttgccagagagagtcacaagcagacaacatctggctaagctgtcatgcgagtgaagggtc

SEQ ID NO: 78109 - DNA, 688 bp, Glycine max
  Clone ID: PAT_MRT3847_41549C.1
tactgcgttatcacttcgacacacatatagcacatcttatcacacatcgtggatagatctatcccctgatcagatgcttcacctagcattaaaggacattgagaaacaagatgatatcacctatttcgcgagctctctcgcagatctccacttacatgagcagaggattattgccacttgccatggtcttttggctactcgccatcaaacatctgcgtgtagagcacatagatgactgacccatcgatctagtctcgcttcgagaaggttactcgaacttacctacacatctcggacaacgtctagatacccattgtaaagaatgtctacccgagcaaacgaatgaccaatgatggatcacttgcattccctgctatctggccaatgaactatcccgtattcctctttctgaatagatctgctacaacctcgcctacgctagtctgctaatgcactgggaattatgctcatccgtcccttaaaagcaccatacgacatgagctcaccttatgataattacttcatgtcgacataaccaatagaaagatagccccgagggccacttacttcctacaactatcggatcccccaaggtgctaaacacctatatccacctcatcgataaccacgacccccaccttgatcccggtaccccattcctcctagaatgcgtaccattacacgagct

SEQ ID NO: 78110 - DNA, 371 bp, Glycine max
  Clone ID: PAT_MRT3847_4154C.1
cacttgttcactcatttacacactcttcccttctccttcttcttattatatctcactctatggttctgggttatactccaccaaactaacctctattcacctctacatattcatacatctgtaatctcccatactactcctacattgcccatgaatcccataacccacacttctattaatacaattcttcccctaacttaccatttcctactaacttgctcttctctgcaccttcctcgctaattccttcattctaatattatcatccgccaactatgttgccttcttccatttgaactcaacaactaagcttcagacggaaacaactgtctccttattactcttacacgagtacactactttcattgtct

SEQ ID NO: 78111 - DNA, 471 bp, Glycine max
  unsure (1)..(471): unsure at all n locations
  Clone ID: PAT_MRT3847_41550C.1
atgagtntgantatcataggcattgtcnctgccctcctngcngcgctcacacgcctacctagccttgttaacaccctgaacatgcccttctacccagctctaagctacttgcgatgccttcctatctaatatccttattgaagttngngttgttccctctgtgccatcggcggattagggggcgtagcctcttaatcctcccatccccctgaacctgcagtggtctcggttccttggccccgcccattcttgggatnngaccttagttattttttgcgtgctgtgttacggattttcttcctcgctccttgccccgggggggaaacttcaagggtcctggtcctggtgcttgttggcggcgttgcgctggtttctgtcctcgccctttgtgcctgtgggggggttgttctctgggggccgggtgctggctctggggaactccttaaagaggtcggcttggctctgggccct

SEQ ID NO: 78112 - DNA, 483 bp, Glycine max
  Clone ID: PAT_MRT3847_41551C.1
cacaactaataatgaacaaaaaatcagaatttattgttcaagatgatttgtccttagttatgaaggaaaacaatagtttttttttttttaccaaaaacctgataaagttagaaaagatacttcatactatttcaagtgtcaataatgtttaaccacatattgaaaatataaaacattatcaaatttaatgaagcagatcagtaaccacatatttccagattctaaatcaacactgatcaaatactgcatgtgtcaatttatagcaccagaacaagtgcaaccaaccaaacatccactttcgtggtagaaattcaacccgaatcagcgctactctagaataggaagaaattaggcccattttcaacagttaaatttgaaactttagaagaattgccacaccaatcaatatataaccagaacaagtgcaaccaagcaaacatccactttcttggtagaaattcaaatgcattcagagagtaatgc

SEQ ID NO: 78113 - DNA, 238 bp, Glycine max
  Clone ID: PAT_MRT3847_41552C.1
gatttcacgcccgaaaacacacacgtggaattgaggggtggaaattcagacgccgacccgacaccagcatggcctgacaccaccccttctgcaccatggccctcgctgacaaacttcgggctttcgctctcgttcatgttgttcggggcccccctgtcttccaagatgctaggggtgctgcatgactactcaaatgatatcgacgctgctggagaatatagtgataactgtggtgatg

SEQ ID NO: 78114 - DNA, 353 bp, Glycine max
  Clone ID: PAT_MRT3847_41553C.1
catgcacatcttctgatgcctaatccacttccaccatgatgcttggaccatgttacgtagcctcaactgctaaaccataattaccttatgctacagatactaccagcacacagcctggttttggagacatactactgcttcaacattctggagggtcaactctagctactgtcaataatgatcatatcaacatggaggacaatatggacctggactcacatacagcgaactacacccaaactatcctttatggtcaaaaacacaccccactcaaatcaaaccatacatttggagcattagctaccacaagagtgagtccttcacatttcgtaactcatcataacatatatcca

SEQ ID NO: 78115 - DNA, 202 bp, Glycine max
  Clone ID: PAT_MRT3847_41554C.1
accggaattgaatggccggaccgacccacgcgtgcgtgcaggagaaaacacgacagggaggggatgtcacgtatcacctttcaagacccctttctttggaggaacgcttattcacccaaattttgcctttctttgtggaggaccaccaggaagattattcccatattaccaccaccattattattaatatatttttggtggt

SEQ ID NO: 78116 - DNA, 726 bp, Glycine max
  Clone ID: PAT_MRT3847_41555C.1
ggttggaattaaatttgttttaaaaggagacttttagtgcaaattaaaaaaaaaaccaaaatgaaattccttaattgattaatcaataatattttaagataaagtgattttagtaatgtagtcataaggaccaccctaattgattaattgtgtttccactttttgttttattgttaatcaggtggatagtcgacactcggtagtggtgccggacagcaacattttctacattatagccttgctccgatttattccaccacccccaaagggaccacctacagaactgttggtggaacaaaaccatgagattattcagttatgctacaacagaggctttgatttcaagttatatctccctcactaccagtcacaggagaactggatgcgacactatggagataagtggaccagattcgtcgagagaaaggccaattttgatcccttggctattcttgcacctggacagaaaattttttcccgaatccctcaaaccttgtctatcacataaatattatttagattaatatattgttttttcttttttcttctcaacccactgtgatcattttgtcctgatttcatttttttttcttctttctcttgactcccccttccttttgtttctgtccccaatcgctccaaccatttaccacaccgttgtagccatattgtaaatgaatattttgggggtgaaattaatatgaatctctatcttttgcactgtcc

SEQ ID NO: 78117 - DNA, 585 bp, Glycine max
  unsure (1)..(585): unsure at all n locations
  Clone ID: PAT_MRT3847_41556C.1
ggctcgagcttccatttcgggtatggaggttagttcgttgattataggtaataaaaccttgcttcattttgaagtaagctgttacaagcttaggaataatgggaaggttcagttagcctataattcttcagagaacagtggcaaggcagctgagatgttgtttttattgacctttggtgaagaatatctgcatcatgggaaacttaatgcatatgaagttgctcttggtggaagactcaataacatcaatattggggacttgaagctttttgaaaggatgaaattgtgtgatcctgtgtctattcattctatagaagagagagcctccgaagaccacattagttcaaatgtatctnttcttggttggatggagaaagctgcagatgatgttatcaacagngatgttgatattgnntatgttctgcatctgggttggnggtttggctcacacaacttaccactncccggacatgttctgatatatggaccttctggctctgggaaaactatattagcaagaactgtggcaaaatcccttgagaatcgtgaggacatcttagcacacataattttgtttcctgctca

SEQ ID NO: 78118 - DNA, 633 bp, Glycine max
  unsure (1)..(633): unsure at all n locations
  Clone ID: PAT_MRT3847_41557C.1
cgctacggcccgcaaaccgccaacgtaacggaattggaggtggtgagcggcaaaggcgaaaccttagtctgttccgaatcacaaaattcggaactcttcttcgccaccctgggaggattaggccagttcggcatcataactcgcgctcgagtcccggttcaacaagccccggacatggtaggttaaataaaataattaaactaaaatattacctatctaataaaaaaaaatatttttttgttattaggtgagatggataagggtggtgtacacagaatttggcgacttcactcgagacgcagagtggctggtgactctccgagagggtgatggttttgattacgtggaaggtttcgtttttgtcaacagtgacgacccttgcaacggctggaccaccgtccccgtgggccccaaccaatacttcgacccggttcggattccttcaaccgccggcccggntctctattgcttagaacttgcccttcattatcgtaaccaagaccatccttccgcagttgatatggaggtggatagattacttggacggttaagattcgntgagggtctaaagttcagcgtggatgtgacgtacatgggaattcttgctacgtgtgaaacgtgtggagggagatg

SEQ ID NO: 78119 - DNA, 2235 bp, Glycine max
  Clone ID: PAT_MRT3847_41558C.1
attacccggcgtcgacccacgccgtccgcacacaacacacaacaacacaaaaactctcaaaagctcaaactcaaacggtacttacaaaaaaaaaaaaaaaaacgaaacgaaacccactctcaccatgatagcgtacctagaacactttgtgcacggaaatgacacagaatcgatgccaaacgacgacgtttcagctctcgatggagcttttcacttcggcgccaccgccgccgccggcaaggacttcggcgggatgaaatccgttaagccgcgggcggttattcgccccgccttggccggcgacgtggagagggcggtgaaggaggcggcgcgcacgacttacctgactgtggcggcgcgcggcaacggccactccatcaacggccaggccatggcggagaagggcctggtcctcgacatgcgcgccatggaggaccacttcaccctcctctctctcgacgacgggtcactatacgtcgacgtttcgggaggggcattatgggaagatgttctcaaacgctgcgtttcggagttccgcctcgcgccgcggtcttggaccgattacctcggcctgaccgtcggcgggacgctctccaatgccggcgtcagcggccaggccttccgctacggcccgcaaaccgccaacgtaacggaattggaggtggtgagcggcaaaggcgaaaccttagtctgttccgaatcacaaaattcggaactcttcttcgccaccctgggaggattaggccagttcggcatcataactcgcgctcgagtcccggttcaacaagccccggacatggtgagatggataagggtggtctacacagaatttggcgacttcactcgagacgcagagtggctggtgactctccgagagggtgatggttttgattacgtggaaggtttcgtttttgtcaacagtgacgacccttgcaacggctggaccaccgtccccgtgggccccaaccaatacttcgacccggttcggattccttcaaccgccggcccggttctctattgcttagaacttgcccttcattatcgtaaccaagaccatccttccgcagttgatatggaggtggatagattacttggacggttaagattcgttgagggtctaaagttcagcgtggatgtgacgtacatggaattcttgctacgtgtgaagcgtgtggaggaggatgcaaaagccaatggaatctgggacgcaccccacccatggctgaatatgttcgtctccaagtccaacatcgctgaatttgatcgtgaagtgttcaagaaaatcctcaagcacggagttggtggccccattctagtgtaccctcttttgcgaagcaagtgggatagtcgacactcggtagtggtgccggacagcaacattttctacattatagccttgctccgatttattccaccaccccccaaagggaccccctacagaactattggtggaacaaaaccatgagattattcagttgtgctacaacagaggcttcgatttcaagttgtatctccctccctaccagtcaaaggagaactggatgcgacactatggagataagtggtccagattcgtcgagagaaaggccaattttgatcccttggctattcttgcacctggacagaaaattttttcccgaatccctcaacccttgtctatcacttaaatattaattattttagattaatatattgcgttttttttatctttttctttttctcaacccactgtgaccattttgtcttgatttcatttttttttctctctttctcttgactcccccctttccttttgtttctgtccccaatcgctccaaccattgatttcaccgtttaacccatattgtacatgaatattttgggggtgatgcgacactatggagataagtggaccagattcgtcgagagaaaggccaattttgatcccttggctattcttgcacctggacagaaaattttttcccgaatccctcaaaccttgtctatcacataaatattatttagattaatatattgttttttcttttttcttctcaacccactgtgatcattttgtcctgatttcatttttttttcttctttctcttgactcccccttccttttgtttctgtccccaatcgctccaaccatttaccacaccgttgtagccatattgtaaatgaatattttgggggtgaaattaatatgaatctctatcttttgcactgtcaattaaaaattcttttttgatacta

SEQ ID NO: 78120 - DNA, 234 bp, Glycine max
  Clone ID: PAT_MRT3847_41559C.1
tttttgaagccaattaaaactatttgagaaatcacattgttcacataatccgaatcatgtcatcttggatatggatctatatccggggttcctaaatcttggctcgaaagtcaacatactctcgtctttttatttggacattctatttcacttgaagttcatatcggctccacacagagacattactcaagttgcttgaaggggtttatcacaaccatcgagcccacagggcaa

SEQ ID NO: 78121 - DNA, 819 bp, Glycine max
  Clone ID: PAT_MRT3847_4155C.1
tctagctagcacatacacacacttgttaaagattataagatagtgatgaagaggaagttcatttcggtggttgttttgggagtatgtttggtgctgggaatatcccaatatgttgatgcaagaaacttggaggcatttacaaaggaattggatttggattgttttgaggtggtgtaggtgctattggtggtgcccacgcgtccggtggtggtggtttaggaggtggctatggaggaggagctggaggtgatagtggtttaggtggtggatatggaggaggagctggaagtggtggagttggaggacttggaggtggtagtggtctaggtggtggaattgggggaggcatttacaaaggaattggaattggaggaggcatttacaaaggaattggatttggaggggttggaggtggtgtaggtgctattggtggtgttggtggtgtcattggtggtttcaagcatgttgaagccaacaagccttgaaaaatcaattgagttaattacgtacgtacgttcaataattccagatttgtgatgataattactaagattagtgtttcattttcacagttatggtttgctattgttaatttgttttctttctaatgtcgttttgtaccccacaaatttaaataagttcaagtatgtactagatgcatgcttcattttgcgttcatttgatgtaaaagatatatcccagaaatacgggtatacccgtgtcgttctacatcattgtgttatatatatgccatattttacgggttgtaactaaaaacaaaaaaaaaaaatactaaatatatgagaatatgcatctaaa

SEQ ID NO: 78122 - DNA, 1168 bp, Glycine max
  Clone ID: PAT_MRT3847_41560C.1
ttctaatatggcctggacacaagtgaagtatataagggcaccttgggctgggcaatttctggcacaacacccaaattgcaattccatatattggtctcttggcacaatgttgtcgattttccggcaatacacgttcgacgactcgttctcgcaagtgtttgtgtcggcgaaattcctgaaggagtaccagatcgctctgaccttcgccagcgactacgacgacgagggtgcccccaccaacggcgttttccgaccgacctgggacctgagcaaggtcacccccgaatccatcgcgcgcttcaaggacaagaaccccaacgttgacatcaaagtcttcatcagcatcggcaaccgcggcacccaacaccccttcaaacccttaaacaacaaaacctggatcgacaacgccaccgagtccctcacgcacctcatcaagaacgaagactacaacctccacgtggacggcatcgacgtgctttacgagcacatcgatgcctcccccggtgactttatcgagtgcgtgggacagctcataaggaacctcaaagaaaagggcgtagtgagcgaggcttctatttctccctcgtttgctctgaacgaagaatattatcccttgttgtacagcgctgtgtccttcttcgttgactgggtcgattaccagttccaaagcgagctcaaaccagtgttcgacccaaccacgttggtgaagcgctacaatgaactaaccaagctttatcccagaagaaaactctttgctggctacagcgccgagaacgaggactgggccactctgtcgccgatcgtcttctttctcggtggcatggacattctcaagaagagaaaggctcctggagtttccattcattaccataattactatgcagatgctcccaataaggactgatttcattcactctgctactatcatcttaattgccttactccatcatatatatatataaattgtgtttcttatattatttactttcatgtaagaccccatacagggtaatcgaatcagttccatatatatttataaaaataaattgtatcgtgcgtaatatggtatgtatatatatatatatatatacaattaattcttgttcttttaatttgtttttttctttttatatacaatgaaacaagtttttatatatcacttaatgtt

SEQ ID NO: 78123 - DNA, 1341 bp, Glycine max
  Clone ID: PAT_MRT3847_41561C.1
cttttatatttcatgaaactccttcaagacctagacgttgtatgttcctactcattggacccatcattagaagctgctttactctttgtggttaaattccagaaatctcgacctgatttggttgctagagctcatcttcagcttctgctggtccaggatgggaaactctatggtcgggatcctatgtttactatgaccactggagctgctggattacctggagtcacagagaattatgactttcagaaaaatgcatttatggtgcaactaggacagttgtcgataaatttactcaaaattctttgtacaaatgctgcttggcaaaggcgtaagctagggaaaatgttacaagactggcatgtcacctatcaagagtccagatgacttttaaaggagagtttgcagaagcctcaaaaacttcaaacaataagaaaatatgtttcaaaatataccaacacattctcgcatgggtagaagagcaaacttattggatagcgtttcgatttctcaatttgggatttgaattggagctctactctgtccatgactattgcatggtatactggtatatttatgttgtgttgatcaagcttgcagagaagaaacatctccggatggcaatgagcagtgactctgctaagaagaagacaaagaaaaaaagggattcttttaaggatggggaaatggattatcagatcccggcagctgttttgtttcttcaaagccaaatatatcttgctgaaggtctaagcatgatgtttgctgctttgaggaatgagcgcagaatagttccactgcaaagccctttcaacacagaacatgagatatttattcagcaattcgagcttttacagaaagcttgcgttcctgatcacatctcatatgtgacattcaaggagtcaactatgcatgctaatttctctaccctagccatctgtgatcacttcaaggaagctcagaagatagcaaaagaggtgaaaagtagttttgccaatgaccctgacacgatggccgagctgcgtagagtagagcaagtagcagaacgcaacagcattgccttgaatgtttgtcgggcaggagcccttgatccaaagttgaagactttttttacattctgtcatcatcctttctatgctactgctattgtgaagagatcctgatagtagattcaaccaattttgaaacatgttatagggtgttaggagcaaatgagttgtggcattagcagttgtaacactagtatttattcaaacaatttttgtggttcatattattagattgaaattgtaatttttttatcataaataaataaataaaaatatttatggtaattttccttcc

SEQ ID NO: 78124 - DNA, 312 bp, Glycine max
  unsure (1)..(312): unsure at all n locations
  Clone ID: PAT_MRT3847_41562C.1
cttggaactgcctgactgtgtctccaccacaattcccctgtttggttttgttccttctctggttggccttgttcctatgtttgtgaattttcctttcctgtctggtaagagtactacttggattggtgattaaatgttggactccggtgacaccattttacggtaaaaaaaatggcaaaacaataatctaatgcatcttgcttactcatacagttganaaaaaaaaaaaaaaaaaaaaaaaaaaaaaaaaaaaaaatataaaataataaaaaaaaaataaataataaaattaaaataaattaaaaatatttt

SEQ ID NO: 78125 - DNA, 1864 bp, Glycine max
  Clone ID: PAT_MRT3847_41563C.1
gagaagacgacagaagggggcccccaccatttatatttgctctcaatcttttttaccacccacgtttttaaaacctcttcatacacacaccttctttttcttccttttctttctatatatagtgacaaagaaaattggtgttgggtttgatttcgatggagaattattccatgttgttctctgtttccaattcctcaagctacccaattggagttggaagctctcaaattggttatagtggtcaaagctccaatgcgtttcttggtctaaggcctagtaatgaattagctagtgatgatcatgagaagagacaaggtggtggtgatggcaacatgttaatgtctcagatcagtggtggtagcattaatgtgagtgatgagttaggtggttcgggaaatagtatcaataagccaaagaaaggagagaaaacaaggagccagcctagatatccttttcaaggttaccgatagagggaagttcttgatgatgggtaccgatgaagaaaatatggccaaaaagctgttaaaaacaacaaatttccaaggttagttgtttcaactttatttcatgttattgcattttttttttgtctaaaaagaggaatcaaacgcagatatcaatagtagagaatttagaataattcattcacactattcaaccagacctccagaatctaccgaactactagacctttcttgattgatttcatgctgtttgttgttgatcttgtttagttttcgcttctgctgcttctgcttcatcttgtttagtttttatcttgtggcaatggcgcctgctaagtttgacttggaaaattgatacgtgtgtaaattgtacaaagaatataacaagaccccaccatggatcttatcggtttgaattttgaattaagaatagaaaaaagcgaggttaattcttgttgagttcatactgggcaataatcaattgaaaacacttttctagctgcgcagtcttgcttcaattgttttttgttagtttaggataaatattttctaaaggggaaagaaagtatttattacttgatcttctttttttgctatttgcagcggctttcttcttcattcctattttctctagctgtcttttcttcggtcaaatcaaaagagaaaaggaatagaacaagaacgaaattaacctgtgtatgcatccctgcgtgctcgagatatatatatatatatatatatatatatatatatatatatatatatatatatatatatatatatatatatatattgtacttatacactatacactgtgcatgtataattttttgtataacaaagagagatagaaaaatcaagtctaaaggaagatgatttatgtgatgaagaaagataaaaaaataacaaaagaaaataatgccataattcatataattctaattaaaagggttcataagagacaattggatatatatgcatatgctatgttcctttaaattttatggaaaccattgttcttctgtaataaataatccagtccaaactcgaagaaactacatggtggatgaaatattcaacaaacccataaactttcgtctacatatgcagaatatctagacgatcgatgataactacttgcagtacttttgttccccctttgatacaaaaataaaactgtgtcaatagaaagtaagatctagtttattgcaaaactcttcttagacaatcttctttttttctttctttccatttgtttttttaaattggaatattattaggttatgtaaattcagctgtcaagttcagtactgctgaaaatatatacaggtgaatatcctttaacttattccttttattgtggtggttattaatacaatgttggaatacaagctagctag

SEQ ID NO: 78126 - DNA, 260 bp, Glycine max
  unsure (1)..(260): unsure at all n locations
  Clone ID: PAT_MRT3847_41564C.1
cgaccgctggggtagacgacaacaacggatagtggtatgtggaaaaacaaaaacatgagaacgaggaactaaggagatggctttggctaggctcaatgtatctagttgctacctgcgaccaccgtgaaccggcccggagccgtgctggattgctcgattcacacatccattgaaatgcattggcctgcacgtaggcagaacacaggnatactacacaatctagtgtacacattacgctatgcattcgcgtaggcaagcag

SEQ ID NO: 78127 - DNA, 1032 bp, Glycine max
  Clone ID: PAT_MRT3847_41565C.1
cccttatattggccacgttaacattaagcgtcgcccccaccatttatatttgctctcaatcttttttaccacttccatttttcttttccaaaacctcttcatacacacaccttctttttcttttttctttctatatatagtaacaaacaaaattggagtagggtttgatttcgatggagaattattctatgttgttccctatttccaattcctcgagctacccaatttcaacgagtggtgttggaagctctcaaatcggctataatggtcaaagctccaatgcgtttcttggtctaaggcctagtaatgaattattaggtagtgatgatcatgacaacggaggcgaaggtggtggtgatggagatggcaacatgttaatgtctcagataagtggtggtagtaatactaatgtgagtgatgagttaggtggttccggaaatagtaacaataaaaagaaaggagagaagaaggttaaaaagcctagatatgcttttcaaactaggagccaggttgatattcttgatgatggttatcgatggaggaagtatggccaaaaagctgttaaaaacaacaaatttccaaggagctactacaggtgcacgcatcaagggtgcaatgtgaagaagcaagtgcaacggctaaccaaagacgaaggggtagtggtgaccacttatgagggagtgcacacacacccaattgaaaagacaacagataactttgagcacattttgagtcagatgaaaatatacactcccttttaaaccttcttctccacaaacagtgtacctcaattgggaactacttgtagtacttttgttcccccctttgatacaaaaataaaactgtgtcaatagaagtaattaagatctagtttattgcataaactcttcttagacaatcttctttctttctttccatttgttttttttaaaaaaaaattggattattattaggttatgtaaattcagctgtcaagttcagtactgctgagaatatatacaggtgaatatcctttaacttattattcctttt

SEQ ID NO: 78128 - DNA, 1434 bp, Glycine max
  Clone ID: PAT_MRT3847_41566C.1
ggctcgaggccaagagtcttgtgcagcaatggaattttaccacaacctactgaagatcaggttgttgaatgagaaagacatctgtgtttatcagcgcgccgattggttggttgacaagttgggtacaaaagtccattcttatttctggcttgatgagtactcagaaaaagatgattttgcgcgatactggaaaaatgaatggatgagtggtttgacgtcatggcgcaaagcactgaagattccagatactgatgtcataatggaagatggatgtgctaaggtcactgatcaagataaagcttttgttgtctggaatactggttcaatgttgagcatttgtaattgtagttgggcacaagatggcaacctttgtgagcatattctgaaagttcttagtatctgccgaaagagggggtccattttaccatctgtcactttatttcagtatcaccaggcactaaataacatgctgcattgccctccttttgattcctttattcgtgatcacgctgtgtcattggcagtttcagttcagaagcagttaaatactctactcgataaagaaagtgaccagactgtcatggatcctaatgagaaacggatcattattgatattccacaggaatggttcaaggtagtctcaactaaccgggatcaggacttggttagtaagaagcgtgtcatcaatgatattttatctgaggatgataatggctgtgaggatagaaataattcaaatgatgcccctggatgtgcaagtgcaatgaatgatatcgctgatcaggaggttgtggatcacggcattgcaagaaatggcaaactgtttgagagtgctggagaggacagtttgcctgctgacatggatgttgatccatcatcaacttgtgttaaccctcctgggttggaccctgttgatgaatcccgtttcaggtgatgcattccaagaaaacaaagagaggggcttggctactatagaaaacgagatctccgcttctgaaaatggtgctttgcctaatgataagattgaagaaaatatttcagataaaggtggcagagattgtgctatggatgtggataccccttcatcaacaacagaggatgtgaagcattgtgaaatacatcaaaatggtgtcaatgaggttcccagagtcatttcttgcactaaagatgctgatagccacttgagccccccgtcaacagttacacctgccgagccacttgcagttgatacgggtgaaaattcaggtaccatcaaggaggatgtctatttgggatcaaatacctgaaattaaatcgtgaatcagtacacaggacaattagagaccaatgccattaaagatagagtttaattttgataaactctttgtaaagatttttcattgttaattcatttgaaaatcattaattattacaaaagtcaataattttcaatta

SEQ ID NO: 78129 - DNA, 183 bp, Glycine max
  Clone ID: PAT_MRT3847_41567C.1
ccacgcgtccgcccacgcgtccgaccacgcgtccggttttcaggtcatatatgttaacagattcttaccatcatcaaggaagcatgcttctagggaaataaatttatctgttttcaaggcactgaataacagtgaaggttcatttgtgattacttaactgtggttctattatttcttgaagca

SEQ ID NO: 78130 - DNA, 325 bp, Glycine max
  Clone ID: PAT_MRT3847_41568C.1
ccctataggcacacgttgctacgcctggaggccccggaccggaccgcccggttcgtttttttttttcatgaaccaaattgattatttaattgattacaatgttccaccttggcctcagagacctgaaatgcctacaatgggaaagccgagggcatagggaataagctctcagttcttatgatagaaaggggagagatgttgccacctgaccagcccaggacactgcagatgaaggacgaatccttgtttagaggaaaaattgcaagggggaaagctgcattgggaacattcggatgtccccaaaagcaatggctgaggctgaaac

SEQ ID NO: 78131 - DNA, 235 bp, Glycine max
  Clone ID: PAT_MRT3847_41569C.1
ctttttcgtttttggacgcgtgtgcagacgattgggactgtgtaagaatgttgacgatgatcgcccaaattgaaatactgaggaggaacgggcatattttcgctgtgatgaaccacgttattgtgataatggtccccaaccggtggagggtgaagaggaagaagaattgtatgatttttactggagatgccatgaaaaacaagaggtatgagaaaagtccagaaaaaatagcgta

SEQ ID NO: 78132 - DNA, 1125 bp, Glycine max
  Clone ID: PAT_MRT3847_4156C.1
aaaccaactcactaagtaaatatatcttgcaagttacaactgaagatacaaaaatcacatctactaaagatttcagatgagatatgcacccgtaaacgtaatagttattgctacaacagaaagatcggagaaggggaagtataactagctagctacaacagttaatagaaatgatttactggtgcaagtaaaagatcaggattattcaagcagtctgaagccaaaagcttcattctacttaacccagaaagaaatggggaattagagggctaaagccagcataaccaacactttccttcaattttttgtaatttttttttctatttagtgggaagtggaagccttcaccagtcaaagtagaagagaagctacaagcacaatcagagtggacaaaaatacgcaaacagtgaccttagattgcgcattttgcggtggttgtgctccttgtccagtcccagcaatagggctagatggggctgttttagaaagaggaggcagagggggttctgtcactttagcttctgtcaggggaggggcaggagccaaagctggtggcaaggaatatttgtccatggctaataaaaggctacctactcgaactggttccatgtaaggaggtttgctgtcacccaaacttaagcatctgttccttctgtatctattagctgttttcgggaagtctgtgataacaccatcaatttcagcatcttgaacaaatgtgttaatctccacagttgcatctgacatgaaatcccaagcctgagatacaaactcatttctgaatgtttctacgtaaacagagagattagaagatttgaactttggcacaatctttgtagagccagtcacgaagaatttactaacaggatatacagaggccttcttgacaaccacagaatgagcaaatctttttatatccaaaatagctgaatcaacagcatcaccaactatctcatcaatcttgtagacaagctcatacttggttttctccttgaatttcagtagtacagaactattagtggattgaatcataacttttggagcccctggtttgtcataacctgctttgctcaaagtatcaatcactgcttcagtcacacttaaattttgtttccttgcaagata

SEQ ID NO: 78133 - DNA, 365 bp, Glycine max
  Clone ID: PAT_MRT3847_41570C.1
ttggcgtttctcacccccagaatattcccccccccggagcgaaacccaacggggcaggttttacggagcaacccacaaattgcccccttctcatgagtcattagatgagaattggatatcttaacatttaaaccacaatactccattaagtaattagcactacccatctaccatttcagggattcaaaaagagaaaccggttttatactccttcaatcgcataaaataaactctacttttacaattataagcttaaaaaccatactcataatgagtcccttatcagctgagagtataaattttggacaatattaacctcgactagctattaaacttgttaaaaaatggctgttaacacattgagt

SEQ ID NO: 78134 - DNA, 239 bp, Glycine max
  Clone ID: PAT_MRT3847_41571C.1
gtcgcgggtttgaagcatgttcggctgtggactggtgatggtcgatcaccagcaatgggtattggaacgagaagcgatggtggattgacgatagtgtgttcgtttaggccgcacaataatgcgatggcgcatcacatgaacactccgcctcggaagacgcacgcatgggatggataccgaaggcccaccggctacgatgcactccctactcttaatgctgattggagagcttgttattc

SEQ ID NO: 78135 - DNA, 243 bp, Glycine max
  Clone ID: PAT_MRT3847_41572C.1
tgttatctgcatactatccatatcccagctgcactttattttatactttccctattgatcttcacggtccaatgtgtttacgtgtaacccataatgttctatccgattcctccgctcactaattctatagcattgactccgtacatatacaaaccataaaggtcggcccttctataggatccctgcttaccttctcttgcctgccacgttatagctctgttattgtggcccctaaattcattt

SEQ ID NO: 78136 - DNA, 240 bp, Glycine max
  Clone ID: PAT_MRT3847_41573C.1
ggctcgagggaactttcctcagtcctcggccctggctttgatacatgtcaacttccatttccttgtgacaaaggtgatttactggcctgtgcacagtctctctaatgcagatccgctctctactccttatcccgtatactcaacaaaattttcgtcgtagacagctagggattggggcacacgaacacccctctagtcattgggctgaaatagcctgcacccacaacagttgctgcgatt

SEQ ID NO: 78137 - DNA, 1246 bp, Glycine max
  Clone ID: PAT_MRT3847_41574C.1
ccacgcgtccgcccacgcgtccgaattcgagcgtccgcttttttttttttttttttttttttttttttctctgttgtctgtcatggaagttaatactactacaaccactgtaccttcagggccaccaactaggaaccattcttacacacaacaccgtttacattcagaaagacatagccataaccatagccatggccatttcccctccaaaaccattctcataatcatcgcattcgtcaccttagtcacggtcctatttatcattttcgtggtcctattcttgatccgtcgccaaaaatcctccagcaagaatggaacttgcgaagaagacagcagagagcttcctgacacaagcagcaggctcatcacttcaacaacgttgaattctagcccaaatgtgaaaagtgggtgtcttcatgggggaaatttgagcaggaccccagcacctaaatttcgtggagtacaagtgttcacgtatagggagttagaaattgccactgatggattcagcgaagcaaatgtgattggtagtaatggaattattggagggcatggtttgatctatagaggtgttctaagtgatggcacttttgcagcaattaagttgcttcccgctcaggggtggcaaggggaacgggccttcagtgcacaggtcgatctcttaagtcgcttgcactctcctcatttggtggagttacttggctattgtgctgaccaacaccacaggttactgatttttgaatacatgcccaatggaacactccactaccatcttcacactcccaacgatcaatatcagctgttggattggtgggcccggatgaggatagcccttgattgtgccagagcactggagttcttgcatgagcatgcagtctcacctgtgatccacagagactttaagagtaacaacgttctactggatcaaaatttccgtgccaaagtgtctgattttggattggctaagatgggatcagagaagaggaacggtcgtgtgttggggaccactggatatttggcaccagagtgagtattattaccccatttcatatgtcggaagcaccttgccttatcttcagtctcaccccacactcccagtacataacctgtttggacttgcatgacggccccagggctgcacgcccgggtctccccggctcgcccgtgggcgccacacggagccctgctcgtcgtatcggtggaccctgctcgacgtggacagcacccaaagccggatttaattcag

SEQ ID NO: 78138 - DNA, 456 bp, Glycine max
  Clone ID: PAT_MRT3847_41575C.1
tttttatattaaatgtagggtcttaaggagccaaaacgtggtttgtccactttttatcaaatttatcgggacaatcctttaaacaagagatacaattgcatgtaatatcaagtccaatacttatatactataacagtcagacaactgacagtgccttctaccttgctctcatcttcaaaaagctaagaatgggctgcggccgagtattgaaatatgtggccggaaccaaatacgcacagactagagacacataaagtttaaaccagaaagaggcaaaactgtagtacatcattgtacctgtcactgtaacaattgtcatacaatttaaaatgctcgtaacagcagagaggtccctttctgatgcttgatctggaaactgaccttgagtttgaaaattggaaagtaactgatcctttgtctggaatctttgtaccttttcctcccatgtagcaaacc

SEQ ID NO: 78139 - DNA, 1704 bp, Glycine max
  unsure (1)..(1704): unsure at all n locations
  Clone ID: PAT_MRT3847_41576C.1
cccgggtcgacccacgcgtccgggaatggcggatcgggtggtgcatgtgggggcaagggcgagaagactgcctggggagggtctaatttggggaaggattttccctcgcccaaggaaatctgtaagggtctcgacaagtttgttattggccaacagagagccaataaggtgctctctgtcgctgtttataaccactataaaagaatataccatgccactttacataaagggtcagccgcagattcttgagcttcaaaagtattagatgatgacgataatgttgaactagaaaagagtaatgttctcttgatgggtccaacagtgtcagggaagacattacttcctaaaacactagctctatttgatgaatgtgccgcttgacattgcttatgcaacaaccttaacacatgctggacttgttggagaagatgtcgaatcaatactgtataaactacttgtggcagcagatttcaatgttgcagcagctcaacaaggaataatttacattgatgaagttgacaaaataactaagaaggccgagagcttaaatatcagtcgggatgtttctggtgagggtgttcagcaggcattattgaaaatgctggaaggaactatagtaaatgttcctgagaaaggagctaggaagaatccacggggggataacattcagatggacacaaaaaatattctttttatatgtggtggagcatttattgatcttgaaaaaaccatttcggagagacgacaagattcttctattggttttggagccccagttcgtgcaaatatgagagctgttggaataacagattctgcagtaacatcatctttacttgagtcagtggaaagcgctgatcttattgcatatggcctcataccagagtttattggacgattccccattttagtcagcttgtcagctttaactgaagaccaacttacgatggtcctcactgaaccaaaaaatgctcttggcaagcagtacaagaaattatttagcatgaacaatgttaagttacacttcacagagaatgctctaaggctgatagcaaaaaaagcgatggccaaaaatactggtgccaggggtttaagagccctactggaaagcattttaaccgaagccatgtttgagattcctgatattaagacaggaagtgaccgagttgatgcagttgtaatcgatgaagagtcagtaggatcactaactgcccctggatgtggagggaaaattcttcatggagatggtgctttaaagcagtacctcgctaagatgaaggattcagcggtgaatgtagacgtaggtgaatcagatttacaagagggggatttggagctttcatcaagagccattagcttgtgatattactacatctaccatattcggggtataatttatcattgtcattgttatttgtaaaaatcacataaaaattgctgtaattatccctttgtataacagcatagctactggtctaagttcactggataggaaagaaataatagaagataaagaaaggagtagtgtagcattgctaatttaggcagcacatcatacaaaatttcaattattttttaggaagtctcactgaagacattttttcctttgtactagatattactagatttccactgagcaatttacatattatggatttattgtaagcaatcttatgctgatttcatcgactntatatattttaactc

SEQ ID NO: 78140 - DNA, 241 bp, Glycine max
  unsure (1)..(241): unsure at all n locations
  Clone ID: PAT_MRT3847_41577C.1
gggaagaagcaagaccgggattcttagagaagaacgacaaaaacagagacggggaacagaacagaggggggggggacaaagaacacaacgagaacgngaanggganaaagagcacgcacgggcccagacacggggacgcacaaaacaacaagagggaaacgagcgaccacacggacgagggggaaacgaaagcgacggcgggaacccccgcaggacaacgcgagagggggagaccgcaaga

SEQ ID NO: 78141 - DNA, 449 bp, Glycine max
  Clone ID: PAT_MRT3847_41578C.1
tcgatctctgatgcttccggaaggacgtcctggcgttgcttataaccttaatcagccccaagagaaagataagctggagggaaatttttcctttgatataaatctcgctctagattggaaaaagttgccttctacaaaagcccaatttgttagtgcaaaaaccttcacaaatgatataattggtgctggttcacattcttgagaagaacttcctgaaaaggaagatcaagaaaaacccaaaaagattgatgccagactgagacaaataatatatcctcaatacaatgaggtttaagctcagatggaaacaaatttgtttaaattgtctattgaagatgcagaaactcctaaaggttccttgatgctcctaaaaatcctcaagctaaaagagcactttccaagaacacacttggaggaaccattctgcgaagtgatctattggcaaattt

SEQ ID NO: 78142 - DNA, 170 bp, Glycine max
  Clone ID: PAT_MRT3847_41579C.1
gtgttttgtttagaggaaggaaacaacacaaatgtctatattttcactactatgacacattatcgctacaacagtagtaccatcaccccaagaccaggccgcgtgcttgactttattgtcagactctttgggtcaaaatttagagagaactgagcctaggccctttaaga

SEQ ID NO: 78143 - DNA, 363 bp, Glycine max
  Clone ID: PAT_MRT3847_4157C.1
ggtgaagcacatcaatggaaatgtgttcttactatggctggtattagaatttttgaggatgtttctgatcacaagaatggtaagggtgttcttgcggagtctgttggtgttattgatgcaactgcagatactgtttttgaagtgattttgagcactgaacaacagaaaagatacgagtgggatacattgatgtgtgacttggaactgatagattcttatgatggacactacgatgttgtttatgggacatatgattctaagtatctatcccggtggcactcaaagcaggattttgtcttctctaggcaatggtttcggggacaagatggaacatacactatcttgcaatttccagctatacat

SEQ ID NO: 78144 - DNA, 259 bp, Glycine max
  Clone ID: PAT_MRT3847_41580C.1
caagtggtatggtcctgacacaaggatcttgttgcctgagggtctatcggaccgatctgatatcccatagtacttgaccggagaattcccgggagactatggttatgacccatttggtcttagcaagaagccaaactatttttccagatatcatgcattagaattgatccacgccagatgggcaatgcttggtgctgctggattcatcattcccgaggccttcacagatatagacacactgctgcctgaggctgcttgg

SEQ ID NO: 78145 - DNA, 570 bp, Glycine max
  Clone ID: PAT_MRT3847_41581C.1
atttacctatgatgaggcagagtgtttgatgccaaataacagtcaattgattgtttgatcaagagaaacaaggaagtcaatttgatctataattgggagatcatattagctactaatattttcaccagttcttgcagttcaactgcaaagactagtactacagaaggataaatacttagtaaagaaactcttatttcatcatttttttattctttttttaagataaatttttttctttctttattcaactttttttcaataatttttatcgaacatctataattgaattcagtcaattcaaccataagtacctattcataaatgattgtttttcattttcattgtttccttctttattttaatcagtcttcattgtttccttctaaaacatgtcaatagttaacgtattttttcttctatttattcaatttctacagaaggataaatataagacacaaacacaaatttattagtcttattattctttctttaaggtaaacttcttcctttttattttttaatatattttgtctaatatttagaattaaaaatttgtttgttgagtttctc

SEQ ID NO: 78146 - DNA, 316 bp, Glycine max
  Clone ID: PAT_MRT3847_41582C.1
ggcttcagagaagaaactgtcaaacccaatgagggagataaaggtgcagaatctgtcccttaatatctccgatggcaagagtggagatcgtataaccaaagccgctaacgttctggaacagcttaatggccaaacccctgtgtttgccaaagcaaggtgcacgggtcgttcctttgggattagaagaaatgagaagattgcgtgctatggcactgacagaagtgacaaggcgatacaacttttggagagtggtttcaaagtgaacgaatatgaacttctctcaaagaactccactgatactggttgctttggcttt

SEQ ID NO: 78147 - DNA, 268 bp, Glycine max
  Clone ID: PAT_MRT3847_41583C.1
tctaaaagtgaactttcttccccaactctcgtcgtcagtgagaatattaacattcatgaagctgaatctggatggtctctataactcggtaaggcttgtagtgtctgcatctgatgattatgaagctttcaaaagagatgtggattaaaaaggcttagatgtgatcgaggcaggctattagtacgggaggagaattgggtcaaagaagatgggatctgaatcgatgtagcctctgatgattgcttctttgattggaagcgccaatgtg

SEQ ID NO: 78148 - DNA, 731 bp, Glycine max
  Clone ID: PAT_MRT3847_41584C.1
acgagggcaaacacaacctttattcaaaagtctactgccttagccatggagacattatgtcaagcttcaaaggtcgatcatgatcgccctattacaaaatttcgacttaactccaaagtcaaatacaattgcttctctcttccagaacaaaacttgggcttgaggtttcaaaaagacgccacaaaaaagatgagcatggttgtctacgccagcatacctccaggaaatttaccctctgctgattcttttcctggtagctggaaagcttggatgattggaacagtagtcgctgcacttctttccttcacgacgaacaaatggggacctttgctactattgaaagagaaaattgagacaacgatagagcaagcagaacgtgtggcagatatagtagaagaagtggccgagagggttgataaaattgcggaaggggctgccaagaatcttcccgaaggaaaacttcaggatgttgctgaatttgttgaaaacgtagctgaaaatgtagacaagctcgccgaagaagcaggggatctattggaaaaggtagaagacaagcaagaggaagtggtttcattctttgaatcaaccgttcgtcaacaaaaaagtaatgacgggactacggctacagattcaaaagataaaaaatagaggaaatcacggtttcaaatccatgtaacattttagcacattactcttataatgagataatccctttgtatattatctttctc

SEQ ID NO: 78149 - DNA, 374 bp, Glycine max
  unsure (1)..(374): unsure at all n locations
  Clone ID: PAT_MRT3847_41585C.1
nggcagggcagaggcgaagggagaaggcaaaancaccaacagggggaagaacgaagaccacagngcganaccaagnngaagacaaaagcaaagcgaaacaagaacncacgaaggcagcgacagaggaaggaaacgaagcagcaaaaccacgggagagcagaagaacggggacgggggaggaacngaaagcccggncaaaggaggagcaaaagaacgcnggacacagggccgcgcgcagaacagcagagcggcggccagagcnaaaagaggcgcacagacaacncgaagggcgaaannaacaccanncagcaagcaaggancagaagggggaaagagcgaggaaaggagaacgcgcggaaggcgagccgaagcag

SEQ ID NO: 78150 - DNA, 794 bp, Glycine max
  unsure (1)..(794): unsure at all n locations
  Clone ID: PAT_MRT3847_41586C.1
aatgatcaatatcaaaagcatagcaattgcaacaaaacaaaaacacccaattccgatacaaaccgggccaaaatcttacatttcaagtgagcgtacggactgactacaaacaaaccaattgaaacaaaatactatcaccaattcagcatcttgacgtataacatgactgagtttaaaaatatcagtactcatatggggaaatgacatcatcgattttcagtatcatcttgacaacttgagtagcaagtaagagctgttgctgctttccgatcaaagtttcgaagacattttgctgagacttaacagcagataatgtttcaattggttgcagcccactattttcagcaagggccattgggatggcctccaaagcattcccaaatgctctaatagcatactgttctactccagggtatctatcagcagctgccttcccggctatagagcaagaaatctcagctgaaccaccaccatatacaatagaattgttgcggataagattcctagccacgcacaaggcatcgtgaaggctgcgctttgtctcctctatgatcattttgttacctccacgaatgaatatggttacagcccttgaatttgcacaatgttcaatgtacagcattcggtcttttgttgtaccaaaggacttttctcgaaccataccagcctttcccaacttttctggagataactcctggaacctaggaacaattcttccaccagttgctatagntatgcttttgatattgatcattatggattagttgttttttttcnacaaaaacctngagggg

SEQ ID NO: 78151 - DNA, 306 bp, Glycine max
  unsure (1)..(306): unsure at all n locations
  Clone ID: PAT_MRT3847_41587C.1
nnnttnnnnnnnngcnnaaaaaaatgagcaaatgtgctaaaagcaaattactggccacttatcttcttcaaaagtgatcagtcatcaagttatgatgatgatgagtattcaaaaccatgctgtgatctctgcatgtgcacacgctcaattcctcctcaatgcagctgcgaaaatattaggctgaattcattccactcatattgtaagagctgtatgtgcacacccttacatccaggacagtgtttttgtttttacaccaacgacttcttctacaaaccttgcaagttcctatattactacaaaaac

SEQ ID NO: 78152 - DNA, 3707 bp, Glycine max
  Clone ID: PAT_MRT3847_41588C.1
cgaatgaatatagttacagcccttgagtttgcacaatgttcaatgtacagcattcggtcttttgttgtaccaaaggacttttctcgaaccataccagcctttcccaacttttctggagataactcctgaaacctaggaacaattcttccaccagttgctatagctatcaattccaactctacaccaccaacccatctaacagctggcaagttcctgtgcattaagagatgatttgcttcatcgtcaaaaccccattggcaaatgacaagggttgcacccacatccttgcatttctgaaccatgtcatcaaaatacttctgttcctgcaacctcaacgtctggaacttctccactgtatcaatgtcaaccttatgcttagtctttggcttgggaggctcaaaggggcatgtgaggatagcaattttagcatcctcaatttgcttaggcatttgaggatgactcatatccttgtccacaacaatcccatagatcaactcggtatcctccaatttacccccaactttcccttccactttaattagatccaaattaacatccttcctcgccagatcagcaacagcaagaacagccttaacagcaatctcagccaagctacgcttacaccgattcacaattttggaggagagtgtggtcatgcaagtttgaatgaggggctccaaattagactcgtcgaactcgaacttgttggcgacgcgctcgagatgctcgacggcgatcctggacgccatttcgtaaccctcggcgatcctgatggggtgaattccccgctcgaggaggcgctcggccttctcgagaagcgcgccggccatgacgacgacgccggtggttccgtcgccgatttcgtagtcctggctccgcgagagctccaccatcagcttcgcgatttggttgtccacgtccatctggtcaaggatcgtggcaccgtcgttcgtgatagtgacgtcgccgtcggggatctggagcatcttgtccatgcctttggggccgagggaggttcggaggatgcgagcgacggctttgccggcggagatgttggctttctgagcgtccaaacctcgaagtctgatcttctgctcctgttccttcaggattatgaaaggccttccgaactcgtcgaaagccaacgccattttcgatctatcttctttcagtcgcacaacagaacaaagcaactggtgttagcaaatgttttgggtttgtaagttatgataccccagaggctgctcaatctgccatcaattagtatgatgaatggatgccaattaggaggtaagaaattaaaggtccagcttaagagggataacaagcagggtaaaccttactgatgaagctgaacaatggaattttgtacaattcacattgtaattcatgacccatctgcagaacccaaagcacacgatgtatataaacatgtaattaaaagcattgttagcgactgatagtcaagcattgggtattaatgatggccaacgggaagggagagacttcaatgttaaggaatgaattttgattcgtaataaagactacaaactaagacaaattttcactccgtcaacaaactaagattaaaacgtctataaaaaaaactaatccgtaatgttaaatatcaaaagcatagcaattgcaacaaaacaaaaacacccaattccgatacaaaccgggccaaaatcttacatttcaagtgagcgtacggactgactacaaacaaaccaattgaaacaaaatactatcaccaattcagcatcttgacgtataacatgactgagtttaaaaatatcagtactcatatggggaaatgacatcatcgattttcagtatcatcttgacaacttgagtagcaagtaagagctgttgctgctttccgatcaaagtttcgaagacattttgctcacgcatgtcattagtgccaacatcattacaatcaatgccaaagtgagggttattatcctttatttgctgagacttaacagcagataatgtttcaattggttgcagcccactattttcagcaagggccattgggatggcctccaaagcatccccaaatgctctaatagcatactgttctactccagggtatctatcagcagctgcctccccggctatagagcaagaaatctcagctgaaccaccaccatatacaatagaattgttgcggataagattcctagccacgcacaaggcatcgtgaaggctgcgctttgtctcctctatgatcattttgttacctccacgaatgaatatggttacagcccttgaatttgcacaatgttcaatgtacagcattcggtcttttgttgtaccaaaggacttttctcgaaccataccagcctttcccaacttttctggagataactcctggaacctaggaacaattcttccaccagttgctatagctatcaattccaactctacaccaccaacccatctgacagcgggcaagttcctgtgcattaagagattatttgcttcatcgtcaaaaccccattggcaaatgacaagggttgcacccagtttcttgcttctccgaaccatgtcatctaaacactattgttcgtcttaggctagggtctcatcattcgggcatgtgaggatagcaattttagcatccttattttgcttaggcatctgaggatgactcatatccttgtccctcatcaattccatagatcaactcggtatcctccaatttacccccaactttcccttccactttaatcagatccaaattaacatccttcctcgccagatcagcaacagcaagaacagccttaacagcaatctcagccaagctacgcttacagcgattcacaattttggaggagagggtggtcatgcaagtttgaatgaggggctccaaattagactcgtcgaactcgaacttgttggcgacgcgctcgagatgctcgacggcgatcctggacgccatttcgtaaccctcggcgatcctgatggggtgaattccccgctcgaggaggcgctcggccttctcgagaagcgcgccggccatgacgacgacgccggtggttccgtcgccgatttcgtagtcctgactccgcgagagctccaccatcagcttcgcgatttggttgtccacgtccatctggtcaaggatcgtggctccatcgttcgtgatggtgacgtcgccgtcggggctctggagcatcttgtccatgcctttggggccgagggaggttcggaggatgcgagccacggctttgccggcggagatgttggctttctgagcgtccaatcctcggagtctgctcttctgctcctgctccttcaggattatgaacggccttccgaactcgtcgaaagccaacgccattttcgatctctctcttctttctctcgcacaacagaacaaagcaaccggtgttagcaaatgttttgggtttgtaagttatgataccccagaggctgctcaatctgccatcagtatgatgaatggatgccaattaggaggtaagaaattaaaggtccagcttaagagggataacaaacagggtaaaccttactgatgaagctgaacaatggaattttgtacaattcacattgtaattcatgacccatctgatgttaatacatttgtaatttgttgtaacatgaaagttcaattagacattgattattaatttattgatttttccctcgccgaattccgagcttacgtgttcgcgtgc

SEQ ID NO: 78153 - DNA, 1759 bp, Glycine max
  Clone ID: PAT_MRT3847_41589C.1
tttccgtgtgcgagccaggtagggttttcggtgttcccctctttgtgttcgttcgcgacgatggggtccatccccgatccaggcgagttgagcgagttgactcagccgagcttcgacgagttccagcgccaaacctctctcatgaccagctgcaccctcctctggaaggagctctccgaccacttctcctccctcgagcaagacctcaaccacaaatccgaagccctcaagcgcaagattcacaccctcgacaactccacctcggactccctccgcctcctcgaccaccactattgcacttcttcctcgttctccctctttttcttcttcttcgctaaacccttttttctatctcactaacacaacaatgggagacgagaagaagggcaagcctgctgcttccggcgtgtggtccaccatcaagcctttcgtcaatggtggagcctccggcatgctcgccacctgcgtcattcaacccatcgatatgatcaaggtgaggattcaacttgggcaaggatcagctgcgcaggtcacttccaccatgcttaagaatgagggttttgctgccttctataagggtctatctgctggattactcaggcaggctacatacaccactgcccgtcttgggtcatttaaaatcttgacggccaaagctattgaggctaatgatgggaagcccctgccactgtatcagaaagctctatgtgggctgactgctggtgctatcggagcaactgttggtagtccagcagatttggcactcattcggatgcaggctgatgcaacattacctgctgctcagcgccgaaattacactaatgccttccatgcactctatcgaattactgctgatgaaggggttttggcgctttggaaaggtgctgggcctactgttgttagagccatggcattgaacatgggcatgcttgcatcttatgatcaaagtgttgagttcttcagggattctgttggtcttggtgaagctgctactgttctaggtgcaagttccgtttctggatttttcgcagcagcttgcagtttgccatttgactatgtgaagacccagatccagaagatgcaacctgatgctgatggaaaatatccatacactggctctgttgattgtgctgtcaaaaccttcaaagcaggtggaccgttcaaattttacactggattccctgtctattgtgttaggattgctcctcacgtcatgatgacatggattttcctcaaccaggttcagaaattgcagaaatcctacgggttgtagttccccgtggtaatttgaacattttgtgttgaattcaagctttgagcatattgaataatttgttgggtgtagttccctttttggcagctaaacaccaatggagctgatcatttttaagtttaattaatcatgcgactgaagcaggaatttgcatacaaacattgtattagtgatataatatagaattggatgcggctggagcagaatagtataattccattttagcatggatgtcattgagaaacttgtggagatgtccaaaactagaataagtaatcctatctcagacagcattccgacatcaagttttgtaatttctttccatatgtgggaagtatttttttcaaccatattatttcttattgagcagtgatacacgtaccccacccaacacctgaaatattaaacgggtgtagttgaaataataaaataatatatttaaaggggtggctaattgaggtaaaaaaaaaaaaaaaaaaaataaaa

SEQ ID NO: 78154 - DNA, 252 bp, Glycine max
  Clone ID: PAT_MRT3847_4158C.1
cgggggggtgtttcttttgtttgggttccgcggaaaaaaaaaaatcggccctggaactcattaaaacaacctgggcggttgtttttcaacaagggttttttccttttttggaagggtaaaggaaactgccaatattcttaagggcctgtgacaactaattcccaatttagaccccgagtgtcccatttctacttaggggcattttttatacaaaagggtgcccttaacacaaactttttttaaaggggaagc

SEQ ID NO: 78155 - DNA, 308 bp, Glycine max
  Clone ID: PAT_MRT3847_41590C.1
ctaaaatcaacttttttctcttaacccattttttccgtgcctggtttttttttttttgtttttttcttaaaaaaaaaaaatttttttaccccctaaaacctccccgtttaaaaaaaagaaccccctttttgccttggtggggggggggggggttcttattctttataataaccaatctctatctttgctcaaattcttgaaattatcctcactttcctcttcaccttttccactttttgaatttagcatgcccttttccatccattatttgctgatcagattttatgtatagctccctcactttcttt

SEQ ID NO: 78156 - DNA, 1493 bp, Glycine max
  Clone ID: PAT_MRT3847_41591C.1
ccacgcgtccgattttattaaaatgttgttctctcatttgttgggggagggagagagcacgaacaacaacaacaaggtttacaatttataaatgcgcttctaaatactgtggcctctctctctaggattcccccatacctactttcagctcctaagagcacgcatcactgttgcacttcttactcgttctccctcttttttttcttcttcttcttcttcgctaaaccccccctttatttttcctatctcactaacatcgatgggagacgagaataagaccaagtcccctgcttccggcgtgtggtccaccatcaagcctttcgtcaatggcggagcctccggcatgctcgccacctgcgtcattcaacccatcgatatgatcaaggtgaggattcaacttgggcaaggatcagctgcgcaggtcacttccaccatgcttaagaatgagggtgttgctgccttctataagggtctatctgctggattactcaggcaggctacatacaccactgcccgtcttggatcatttaaaatcttgacggccaaagctattgaggctaatgatgggaagcccctgccactgtatcagaaagctctgtgtgggctgactgctggtgctatcggagcaagtgttggtagtccagcagacttggcactcattcggatgcaggctgatgcaacattacctgctgctcagcgccgaaattacacaaatgccttccatgcactctatcgaattactgcagatgaaggggttttggcgctttggaaaggtgctgggcctactgttgtaagagccatggcattgaacatgggcatgcttgcatcttatgatcaaagtgttgagttcttcagggattctgttggtcttggtgaaggtgctactgtgctaggtgcaagttctgtttctggatttttcgcagcagcttgcagtttaccatttgactatgtcaagacccagatccagaagatgcaacctgatgctgatgggaaatatccatacactggctccgttgattgtgctgtcaaaaccttcaaagcaggaggaccattcaaattttacaccggattccctgtctattgtgttaggattgctcctcatgtgatgatgacatggattttcctgaaccagatacagaaattgcagaaatcctacgggttgtagtttgtagttctccgtggtaacggatattttctgttgaattcaagctttttgagcatattgaataatttgttggctgggttgtagccctttttggcaactaaacaccaatggagctgatcattttttaagtttaattaatcatccgaatgaagcgagaatttgcatacaaacattgtattagttatatatatagaattggatgcggctggagcagtttagtataattccattttagcatggatgtcattgagaaactagaataagtaaactcccgacatcaagttttgtaatttctttccatatttatttgttgcaagcttttccttta

SEQ ID NO: 78157 - DNA, 567 bp, Glycine max
  unsure (1)..(567): unsure at all n locations
  Clone ID: PAT_MRT3847_41592C.1
ggtttatccttcttgatttagctttttcagatctaaatatttgtgtggattgtatcaaggaaaaacatacaatgaaaagagctacaagaagcactcaacttcttgaaattatgcatactgatatttgtagaccttttgatgttaattcttttggaaaggaaagatactttatcacctttattgatgactattcacattacggttatgtctacttattgcatgagaaatttcaagcagtggatgtcttagaaattcacttgaatgaagtagaaaggcaattagacagaaaggtgaaagttgttaggtctgatagaggtggtgagtagtacaaaagatacgataaaattgagtaacacccaagtccagttgctaaactcctttagaaatatgacatttgtgcacaatacacaatatccggtacacaacaataaaattatgtatcggaaaggcataatagaactttaatggatatggntaggagtatgttaagcaattcaactttaccctatctttgtggatgtatgccttgaaaattgtaatgcatttgttgaatagggttcctagtaa

SEQ ID NO: 78158 - DNA, 334 bp, Glycine max
  Clone ID: PAT_MRT3847_41593C.1
gaaaatgaactaatttgggtaaaagctttttggggcttattaaaataagtgggagaataccatttttttcctaaaaattattagccaaccgtaactaaataaaaccttaatttaattataccaaaaatgttacttaaaataatatcttaaatactttatatacttaaattttacaacttgcaccctccattatattctcaaaggacattatttacctgcataaagataattcttacttcactaataattctatccaacataattaatttacaaataattcttttaataccaacttttatgcattttttccataataattcttttacacttttat

SEQ ID NO: 78159 - DNA, 321 bp, Glycine max
  Clone ID: PAT_MRT3847_41594C.1
cccacgcgttcgagacagctttcgtttttgcgactaatagctacagcagcgggccggagtccttacttatcggacaaaatgactcttggcataaaacacctttagaaagccaagatcaagaagaaggtctcgaagaaagagagtggttcttcttcatctttggcgcctgatatttctgcaatgggtgtcttaacacgggtgtggttaggatggaggaaggtgaatagcttccttgtgatccttctgattacaatattgtatatgcctttcacattgtatcgccatgtttgaggattggtattctacttgactctttgtgtt

SEQ ID NO: 78160 - DNA, 252 bp, Glycine max
  unsure (1)..(252): unsure at all n locations
  Clone ID: PAT_MRT3847_41595C.1
cgcgcgttactacgtcttgggttctntcgtgtttgatctctgnggtgttgtgcgaggatctnagttctgacttacatgacctggtgtggaggatggaatggtggtggaatcgtcttgctccgtctgtcgcataacacttttgacctgtactacctgtgttgactcagagttgacggcngtgctnaactcttatagnantcacctcatggcngaanagcttnaagganatgggncncntcatcggtcggatat

SEQ ID NO: 78161 - DNA, 452 bp, Glycine max
  Clone ID: PAT_MRT3847_41596C.1
ctatgctattgcaatatctttgattttcaatttcatacatagcttcactccaaaactgaactctcattgttcatgaaccgagtcattcattcattcatttcatttgttcattctctctagctatcagctacaagggtttttcttgttctgtgccacacgatgaaggaagaaaacccatcagagaacaggtccaaagcttcaaaattttcagaccaaaaccaagccccaaagcctcaaaacaccaaaggagccaacctcaacaacaacaacaaaacaaggttgtggggtgctcacattgtgaaaggcttctccgctgacaaaaaaaccaagtcatttgccagcaaaaaactaacatcttcaacaacaacaacagcaatatccgagaatgttgttacaaaccagaacaacagcaataaaccttttgtgccttcttctcattctcgagtgaaaag

SEQ ID NO: 78162 - DNA, 395 bp, Glycine max
  Clone ID: PAT_MRT3847_41597C.1
ctttttacaaaaatggttatattcggatttttccattataactgagggacaagtagctggctagggccattagacaatggttccttatcacaaaaaaaaagccctctgctgggaacaagaaacaagggcttatcaattattcatcatcaccacaacatatatatacaacaaacatacactatcatgcatgcatcgacccagtcacattacatttctatcaaagtttccaccacatcttccaccacagaagtcaagagggacttgttattggcatttctaacggagcaattggcacgaatctccccttgtttcccggtgagcacattaagctgacccatcttgagcatagcgaacacaaacttctcaaaaaagaggttctggttgacggcaaagtc

SEQ ID NO: 78163 - DNA, 469 bp, Glycine max
  Clone ID: PAT_MRT3847_41598C.1
ggtgttgcttctgcaccttttggaaattattggagagtgctacgaaagatgtgcaccatagagcttttgtcccaaaaacgtgtcgattcattccagccaataagagaagaagaactcactactctcatcaaaatgtttgattctcaaaaagggtcacccatcaacctcactcaagtagtactttcatcaatatattctatcatttcaagagctgcttttggcaagaaatgcaaaggccaagaagaattcatatcattggtgaaagaaggactcacaatattgggtgatttttttccttctagtagatggcttctacttgtcaccgatttgaggcctcagcttgatagattgcatgcacaagttgatcagattctagaaaacatcatcattgaacataaagaggcaaagtcaaaagtaagagaaggccaagatgaagaaaaggaagatttggtagacattctcctaaaac

SEQ ID NO: 78164 - DNA, 431 bp, Glycine max
  Clone ID: PAT_MRT3847_41599C.1
tcggttttatgggatgttgatggaaaccatggactacgaagaaagagacgattttgctgataaagattttgcaatagagcaaatgcatattctaatgggaggattaaaggacttatccacgcaagctaaggatgaattggaatccaatggctcagctttacaagataataataaaaactccaccctaacttggttgctagatacaatcaagaaaatagataatggagaagctgagcctcaaagcttttaccataaggatctcgcattgattgaactaaaggataaagtgaagccacctatggatgcagcagaagaagcttcaacctctggtcatcagttgcaagaaatgatgagagaaatattctatgatggaataactgatggacttcttgaagcacaaaatatattttcttctctagatattggtaaaa

SEQ ID NO: 78165 - DNA, 413 bp, Glycine max
  Clone ID: PAT_MRT3847_4159C.1
gctgaagcacatcaatggaaatgtgttcttactatggctttttttagaacttttgaggatgtctgtgatcacaagaatggtaagggggttcctgcaaagtctgttggcgtcattgatgcaactgcagatactgtttttgaagtgattttgagcactgaacaacagataagatacgagtgggatacattgatgtgtgacttggaactgatagattcttatgatggacactacgattgtgatcatgggacatatgatgcttaagatctatcccggtggcactcaaagcaggattttgccttctctaggcaatggtttcggtgacatgatggaacttacactatcttgcaatttccagctatacataatacaaagccttaaagatctggatatcgacgtgcaaaagataaaccatc

SEQ ID NO: 78166 - DNA, 1718 bp, Glycine max
  Clone ID: PAT_MRT3847_415C.1
cggacgcgtggtttcttttttttctccctttccccgtttgtttcccttcttctctcaggcaattcctcaatcacgcttttccttttttttttctttttttttttgcaattccttcgcaattttcccttttctttttcattttcccctctttttttcttcttcttacgtgttttacaccgcgaagaataatttgattgattgattaacgcatcaggagaaatttcagttacattgcaaacttatctgaacttgattcagttttctatatgcttcagcttttgtatattattatattattatttgtttttatttatactttgcctgacttgttgcatatataatgtaatagttcgatttccgtgcccttggtttgcgtgtttatctgttcgtgtttgggtaaagagagtgtgtagccatgatacatcatcatcttcttcttcttcttcgttctggacacgcgccaatcagcacgatcactgggtttggaattgatgtgcctgtctcgagccgattcggctcgaggaaaaaaggagttgatgcagagaaggtactagtttagtttcaccaaaataacccgcagacgcaaacgttgaaaacacatccgtctgccccaacattacaagggtttgagattataaagacttggtggaagggtaagctaaagttgaagagttgaggggaatacaagaagagaaggaggttgaggtactcaataaagttttgatttgtttgaatcggggggcttgatgccaatgttggatacagttgtatgtgctagaaacagtcaacagtggcttcataaggtgaaggtgacattctagtattggaaagggccagagtccatgatgattatagatgtttgattttcctctacacactggcaatccttaggtctgacagatggctttttataatgaagaagagaagactgaggactacctcttcaagattgttttaattggtgattcagctgttgggaaatcaaatttacttgcacgatttgccagggatgagttttatcctaattcgaagtcaactataggagtagagttccaaactcagaagatggatattaatggaaaggaagttaaagcacagatatgggacactgctgggcaggagaggttcagagctgttacatctgcatattataggggtgcagttggagctcttctggtgtatgacatcagtcggcgccaaacgtttgatagcataggccgatggcttaatgaacttcacactcactctgacatgaacgttgtgacaatacttgttgggaacaagtcagatcttaaagatgcaagggaggtggctaccgcagaaggcaaggccttagctgaggcacagggtttgttcttcatggagacatcagctcttgattcatcaaatgtagcagctgcttttgaaactgtcgttaaggaaatttataacatcctaagtcggaaggttatgatttctcaagagctcaacaaacaggatgttacccgaattgaaaatggaaagactgttgtactacaaggggaaggggacgtagaggctgcccagtcaaaaaaaggatgttgttcatcttaggtttcgatactatgtcgcctccaaaactgagtttttattatgattattcaaccaatcctgaaaatgtaactcagatattcaagatttatcgttaaatgttcactgagattttggagtagaattgctaatgccattggaagaattac

SEQ ID NO: 78167 - DNA, 173 bp, Glycine max
  Clone ID: PAT_MRT3847_41600C.1
gtaaaaagcaaggaacattaatttggggtccgagcacaaggtaatttagagttatcttaattacttcaccaaacacaaatctaaaaactcttaaaagtcatttcgttctttggcgctcacttttcgggggccaagtttgtggccttggcccaggcgttgtttttgacagggtc

SEQ ID NO: 78168 - DNA, 292 bp, Glycine max
  Clone ID: PAT_MRT3847_41601C.1
acaggacctgacaccctaccgaccttacacttactccgcacgcctctttgcctccgtgcggggttcctacccatgtccggtggttctacctccatacttgctgtcctctggccagtattacatgtacccgcctccgctcttccctgaccacgttcactacacccactatagcgaccagctcgacaacccctattactatcatagtcaccaggggactccttccacctacgtggaacacatcccgtctcaattccagcaccatatccatcacgaatgcataccaccaacaacc

SEQ ID NO: 78169 - DNA, 595 bp, Glycine max
  Clone ID: PAT_MRT3847_41602C.1
ctgatcttgtgtacgttgttgatgatgacatgattccgggaaggaagatgttgcagattttggcacatgttgctgggacagacaagtacaagaattctgtcttggggagtattggaaggatattgccctttagacagaaagatttcacctttccaagttacagaaaatttcggtctaaggaggcagggttgtatttgccctatcctgcttatgatatcactgttgataaaattgtgcaggtggattttctatcaagttcatggttcctctctgctgatcttgtcaagacactcttcactgagacaccttttaccttctcaactgctatcagcttcagaaatacaaaaatgctggttcatttgttcttccagtggatcctaaggacaaggaaacatggggtgatagtgagcacaggcttgcatatgtgtctgaaaccacagtgattgttgaattacttgatgatacatgtgagaacaaccccatcttaccttgtgatccttaccaaagagccttgccttagtgctcgttcagatacattagtgaacagacttgtgctgctgtattggaatctgttttcacggttgctgacagcgac

SEQ ID NO: 78170 - DNA, 248 bp, Glycine max
  Clone ID: PAT_MRT3847_41603C.1
tgggggggctttatattttatttttttttttggaaaggtaactaggcattaatcttcgtgaaaaacaaactccggggatatgaaaaataatggggacaacttcaactatctgaaacactttatttttcaaaaacaggataagatatacaccctggaagcaaaaaatatcttccttttcttaaaaggtagaaaatagtaattacttgtaaacatattgcacctataatgaaactaatctcaaaatttat

SEQ ID NO: 78171 - DNA, 674 bp, Glycine max
  Clone ID: PAT_MRT3847_41604C.1
ctaaggcaaagagtgaaaattgttagcccgttgaatttgaagctcacgagaaacaaaaatatattcaagacacatgaacgaaaggaggagaaatcaagcaatttttagcttccctagtcgaacatgatcaacatcatgaagagtactaatgaaagcacttggcaaggctatcaatggttggaatcttcttcttcacagaacttggagtacttttctgaatccatcaggttgtttagttcaccactgtcactcatctccactttaattatccatccatctttgtaagggcttgtgttgaccaaagcaggagaactggtaagtttttcattaacttcgaccacttttcctgaaacaggagagttaatatcactagttgccttcacactttcagctgcaccaaaaccttctccttgtgtcacggtggctcccacttcaggcaattcaacatacacaacctcacccaaatgatcttgggcatgatcagttatgccaacagttgcagaatttccatcaaccttcacccactcatgagaatcagcatacttcagatcattcaaaacgttagagaagcttctgtgaaacacggagatcctgaggtaggaagcagctcttgaagcccacaactgtctgcaagccatcccccttctgtcgtcttctcgcagccgtacggacgc

SEQ ID NO: 78172 - DNA, 216 bp, Glycine max
  Clone ID: PAT_MRT3847_41605C.1
gatagcattcatacgattcattatagcaaaatgtaagttcaaacggaaattaatttgctgattgtgacgattactcagaaaccctatttttaaataacgaaaaaagtgaagtcccacacatctgcttttaagaacccatccctaggacagaaaccattttggggcatgagacatattgatgcaaaaacttgaaacaattcgtaaatcataaacaac

SEQ ID NO: 78173 - DNA, 336 bp, Glycine max
  unsure (1)..(336): unsure at all n locations
  Clone ID: PAT_MRT3847_41606C.1
aanaaaaanaccaccaaaaaagggggtggttttaaatacaaaagccaaacatgcaaaatgttgttgaaggcttacattgttcaccctatgccaaaagctccatgaccgtgctgaaaaatcagctttccaacatataatgcattgtatcacttccactatctccaacgatgcttatacttgccaaatccaaacctatcatgcttacaacgcttgcggaattcaccgcacatgaactttccatgaccatggctggctcctgagccaaaacgaagaatctcatggacgaaggggtgagcacaataagcagggggactaaaatcaaaaccccttgaaaac

SEQ ID NO: 78174 - DNA, 198 bp, Glycine max
  Clone ID: PAT_MRT3847_41607C.1
ggatatttagcaaatgacacgcgcttttataacggctttgttgtactacatacgcgatggtcatcactgctgttggcaatacactgctgatcgccgtgcttatgggttgctaggtaccctaacagttgctaccatgtctcacgaggtagtgaacgctgtacatcagcgataccgtgggaactaggacactggactcat

SEQ ID NO: 78175 - DNA, 464 bp, Glycine max
  Clone ID: PAT_MRT3847_41608C.1
cgccctttatattctttttagctaatttctttttagaaatccatggggcataaattcataggggggagctcgttctgacccgtgaacacaataatccaaatattttgtacttatattctcgatgataatgtttatatcccattggtttgcaaactttaatatgagcagaatcgggggggggggggcttttcgatataccctaacattctttatcatccactacaagacgccgattacccaattttttccttaaacacaaagcccatatccctccttcactccaacttgccttttaaaactctcctgctcattaatttaacatttcttggttcgaatatactaaatagggcattaagttatatttgtgtctagatatattcttcaatagcttttcaaaccattgacaaaatgtgtttcttattccaattgcaccgttacaaattacaacttaaccagttgaccct

SEQ ID NO: 78176 - DNA, 325 bp, Glycine max
  Clone ID: PAT_MRT3847_41609C.1
acggggaaagtgttcatttttaacccgctattgtggggtcaaaccccaaatatgaaaaagaccaaacaaacacaaatcaaacaccttaaaccaaaagttcaaacccaactaacaccacctacaactgggggatccaaatttaacagccatccccggttcaaggttttacagctggaccctactcgcaagggcctgggtcacaggggcacctaggaccacaaaagccccccccggtgttagaggcaacacccatttcacccccctctaattgggcccttaaagggccaaaacccaaaacaaggggccttggggggggttcttccag

SEQ ID NO: 78177 - DNA, 252 bp, Glycine max
  unsure (1)..(252): unsure at all n locations
  Clone ID: PAT_MRT3847_4160C.1
caacgaccaccacttccaatagttcaattcgctctcgttctcttctcccccaacactctctttttgccactcctatttcaacccctctctcactcttcacaccccctaacaccgcaccatgactctctacatttctggagtcgtcgtccctctcttagtcactctcatcatccgcaactantcccacctcaaacgacgtcgcggcgtcccggtcgaagtctcgggcgngcccggtctagcaatccggaaccg

SEQ ID NO: 78178 - DNA, 263 bp, Glycine max
  Clone ID: PAT_MRT3847_41610C.1
tcttaactctggttggtttattcgttattgttcacttcctagttgtatttggtgtgccagcttttcgcatgagttgtttttcttctccactctttttcctgtgatattttgttgacgtgctgttgctgttctggaatcctttgaacctactacttgcttgatttttatatgtgcccggtgacacagataaaggtctttgtattatttatctgattcatgggaggtaaatatcgacagtgaaagtttcacagatagctcttctt

SEQ ID NO: 78179 - DNA, 409 bp, Glycine max
  Clone ID: PAT_MRT3847_41611C.1
tttttaagaacatgaaaacaaatgaatgcttttagagactaatttgtagtctatacgaacaaaaggtctaaacacgacataaaaaggtgaggctgaaacagacattgattgcaaccattggacaacttagccgcatctcggggcctttccttctggatctgacgggtgcacttacaagcgatgcgcacgtactccttaacaatctaatccttacgcctgatgccaatattgacatacaccatttgcatgtgggtattattcttcctcatctttctgggacaatgaaccatgccaatgttggacgtgcccaagttcatagggcaattgggcctgcagctcgacaatgtcccaatcctcaaaatccgaaaactgtacacatccacccttcgtggaggccacattggaccct

SEQ ID NO: 78180 - DNA, 310 bp, Glycine max
  Clone ID: PAT_MRT3847_41612C.1
gattgtcttaccactggcatcgctatttcagactgctcatttctggacaccagcgagaatttcattccaagtcaccgcttcaactcattctcccgcccccaaggctgtcaattataactgcagactggatccgtgaaagatttatgcacacgcactgaggtccatcatgaccaagagcaagagaggctgctagagcaaatccgagagctaactgctatacagagcacacagtgaggctgtcttttagatccggcttgacacctctgtgcttacaagaccttgtaccacaggctgctggctgagatcctgt

SEQ ID NO: 78181 - DNA, 1075 bp, Glycine max
  Clone ID: PAT_MRT3847_41613C.1
cccacgcgtccgacggctgcgagaagacgacagaaggggactacctcaagcataacttgcatagactattgattaagaaagctattgtcattgatttgctagctccaacaatgggttctagcagattatcattcattttagtacttgtgcttgtaacattttcatccatgatcattgactcaagggttgcagaggcacgtaccctgccaaaatcagccttattgccttccaaagttgatatacctactgctgttcctcttccagccttagtgccattgccaccactggcaaatttgcctgttactctccctccagtgcctgaactacctgcagtacctaaagtaccaattcctgaagtaatagttaataacgccaaaataatcccttgagtacctatgatctatccagtcactactacttattttgtcacttgctaaattaacttgttgttacctccagcataacttgcatagactattgattaagaaagctattgtcattgatttgctagctccaacaatgggttctagcagattatcattcattttagtacttgtgcttgtaaccttttcatccatgatcattgactcaagggttgcagaggcacgtaccctgccaaaatcagccttattgccttccaaagttgatatacctactgttgttcctcttccactggtggcaccactgccaaatttgcctgttactctccctccagtgcctgaactacctgcagtacctaaagtaccaattcctgaagtaatagttaataacgccaaaataatcccttgagtacctatgatctatccagtcactactacttattttgtcacttgctaaattaacttgttgttgccatcccagggtggttctggttctgttggggtttaatttctgtcattcaattacatgctatgttcagtttatatgttgcttcagtcagttgaacttcagcatattatttattgtgacctgtgtaatgtaatgtatcaacttatcttctagttcaataaattctggaatttctgaaaaaaaaaaaaaaaaaaaaaaaaaaaaaaggaaaaaaaaaaaaaaaaaa

SEQ ID NO: 78182 - DNA, 829 bp, Glycine max
  Clone ID: PAT_MRT3847_41614C.1
atggctgttagaagatgacagaaggggatgttctgttctacttgctctcaagtttcatcttgggctgtaggctgtagcataccatgaccaccaaggatccaaaatccgtgtacgactttgttgtcaaggatgctaagggagatgatgtagatctctccttttacaagggaaaagtccttctgattgtcaatgttgcttctcaatgcggcttgaccaactccaattatacggagctgaatcaattgtatgacaagtataaagaccaaggcctggagattctggcatttccatgtaatcaatttggtaagcaagaaccagaaagcaatgataaaattgtggattttgtctgcagtcgcttcaaatctgaattccccatctttgataagattgaagtgaatggggacaattctgctcccttgtacttcttaagtaaattgggaaaactctgcttctttggacaaaatcttgaagtcaggggaaatggggaattttttgtgatgatattcagtggaacttttccaagttacgtggttgataagaatggacaagtagtgggtcgctattatcccaccacttctcctctcagccttgagcgagacatccatagcttctgggaatttcctgaaggcaaaaagataatttcttcctgagctcattatgctgctcccttatgtggtggcaatgtaatgcaatatgcacaaactaatgcttaatcttacggacatcatatataccatgtcccatgacttcgtccataaaacttcgtttcctttaatttcatttctatcactctcccggcaataatccatattccttcgttagtttctta

SEQ ID NO: 78183 - DNA, 1103 bp, Glycine max
  Clone ID: PAT_MRT3847_41615C.1
ttcttgcgtccgctcaagtttcatcttgggctgtagactgtagcaaacaccatgaccaccaaggttccaaaatccgtatacgactttgttgtcaaggatgctaagggagatgttgtagatctctccttttacaagggaaaagtccttctgattgtcaatgttgcttctcaatgatatccttaatcttaactactctcaccgctaatgttataaatgttgagaaaatttacaatatgtttgggattgagacagcggcttgaccaactccaattatacggagctgaatcaattgtatgacaagtataattgttggcctggagattctggcatttccatgtaaccaatttggtaagcaagaaccagaaagcaatgataaaattgtggattttgtctgctctggcttcaaatctgaattccccatctttcataagtgaatggggacaactctgctcctttgtacaaattcttgaagtcgggggaaatggggaatttttggtgatgatattcagtggaacttttccaagttcgtggttgataagaatggacaagtagtgggtcgctattatcccaccacttctcctctcagccttgagcgagacatccatagcttctgggaatttcctgaaggcggcaagataatttcttcctgagctcattatgctgctcccttatgtggtggcaatgtaatgcaatatgcacaaactaatgcttaatcttatggacatcatatataccatgttccatatcatgaattcgtccatatgtcttcgtttcctttaatttcatcgtgtctatcactctcccggcaaaaatgggaattaaaaaatctcatctaaaccaataaaattacatagaattgtacataaaaaagtctatacaaattgatacaatattattgggtcacattacatagaatgagattgtttaacctcatttctagttgggattagatatacacaacctagttctaaataggttcacctatgaaagtttcaattttaatgatttttttcttaaaagaacctattaacaaaatatattacgacctcgatgttggattaagaataattaatgaagaagaattcaattaaattaggtctgtt

SEQ ID NO: 78184 - DNA, 1177 bp, Glycine max
  Clone ID: PAT_MRT3847_41616C.1
gtaactggaattcagaaccacagtgaaaaccagaatgaagatgggagtgaaatactaaatagcactactgccagaggtgctgaaagctggacagaatctgagattgcaaggcttcaacagttgagagctgagatggagacaaggtatatgcaaagtgggtgttcagaagaggttatgtgggaggaaatagctaccaaaatggcttgttttggttacgaaaggagtgctgtggtcttcaaagagaaatgggagagtataagtaactatgcaaggagtgtcaaggatggaagcaagaagcgcaaggaagactcaagaagttgtttttacttcgataacagtgaccaatcttctctgtataaccaaggaggtgcctattgtgatatcaacgatcaaaggcacaagactgggaggctgcaaacaaatgatggctcttcaccttccaattcaaatgttggaaatacagttgcgcttgataactgctttcccttcttgatgactgagagtggaaatttgtgggagaactatagcttaaaggttaataaagcaagccaaaaccagtgatgagagtgaaattatatggttgacacttgtaagaggcaagaaaatttcgcagccttttatctcagatgatctcacattatgtaagcaagagctaactgatgagggtcgtttatgtatagagactgatgatgataaggtgctcaatcttattatatttatggaatcaaggtgaaaaataatgtgttcaagtcacgtacgtaagtttaatgagggagactacacattggcaaatatcactgaattgttggggtgtgagtatgacactaattcaggtgaatttctccattagctgatttcttttatgcgtgcaaatggaatttgcagttatattacttcacatgtcgcatcttccgataatgttcatatcattcattagttggtcaccgtctttctcctagtttccaccttccacacctatcttgccttttttttaattaatttttttggatatttatactgtgctggccttttgtgtttgtgtactgaaaggtagcaatttactttggtatttatttattggtcaatagttttatgaaccgggagaaagtgatgtattgatggatattgttgaagcatcggacattgttacaagcataaaaaaggccagatttactta

SEQ ID NO: 78185 - DNA, 443 bp, Glycine max
  unsure (1)..(443): unsure at all n locations
  Clone ID: PAT_MRT3847_41617C.1
taagaaactaaccaaggaatatggattattgccgggagagtgatagaaatgaaattaaaggaaacgaagatatatggacgaagtcatgggacatggtatatatgatgtccgtaagattaagcattagtttgtgcatattgcattacattgccaccacatgggggagcagcataatgagctcaggaagaaattatctttttgccttcaggaaattcccagaagctatggatgtctcgctgcaatacaaaagaaaaagaatgcccaaagaattacttacattaatagaagcagcataaagcatatgaagtaatttcatggataatattgtctttacctcaaggctgaaaggagaagttgggggataatagcgacctaatacttgnccatttttatcaaccacaaaccttggaaaggtccactgaatatcattcccaaaaatttcc

SEQ ID NO: 78186 - DNA, 736 bp, Glycine max
  Clone ID: PAT_MRT3847_41618C.1
aagcattatacacattgtactttctctctctgacaataagtcattgagttgagtttgaagcctccgtccatgttcttccttccgaaggggcatcaattaacatctctcgtgtcaggtagcacttggaacgtatcatcatgaacacagttggagaaagaatgacaaagagagagacttcggagaatgatgaggaggaaagtttattgaagaatgagaatagcggaacagatgatgactctaagattaactacagagggtggaaggtcatgcccttcattataggaaatgagatttttgagaagctaggagccattggcactttatccaatctcttggcggatctcactacagtattcaacttggaaaacatcacggctacaaatattatcaacatctttaatggcagcaccaactttgctacattgctaggagcttttctctctgatgcctttttcggtcgctacaagatactggcattctgcacagtggcttcctttgtgggtttgtttgcaatacaactgacagcagcaattgagaagctgcatccacctcactgtgaagagtctaccatatgccagggacccacagaggggcagatgacatttctaaagaccggtttaagtttattgatggtaggagctgcagggatccgcccatgtaacttagcatttggtgctgatcagtttaatcctaacacagattctggaaaaaaagcgatcactagcttcttcaattg

SEQ ID NO: 78187 - DNA, 1942 bp, Glycine max
  Clone ID: PAT_MRT3847_41619C.1
ctcgagccgaatcggctcgaggagtgggaaaaagtgcagggagaagtttgagaacctgtacaaatattacaagaagacaaaggaaggaaaagctggaagacaagatgggaagcattacaggttctttcgtcaacttgaagccttatatggtgaaaacagtaaccaagcctcggtgccagaaaccaattttggcagtggtagccttcgtttccacacaagcagtcgagccaattagcctcgagaaacaaatcaagaaatgtttcagtctcagaagcattgtgacagcctaagcctcaccaacttcactgatttggacacttcatcatcggatgacaatgatcaaaatagcactggcagggaactcaacaaggacaatgactccatggagaagaggagaaagagggtgagtggaagaagctggaaggtgaagataaaggacttcattgactcacagatgaggaagctggtggagaagcaagaggagtggttggataaactcacaaagacactggaacagaaggaaaaagagagagtgttaagagaagaagagtggaggagacaagaatctgtaaggttggagagggaacacaaattttgggctaaagagagagcatggattgaagcaagggatgctgctttaatggaggctttgcacaaattaacacgaaatgagataatgaagagtactcattctcacgagggtctaatggtaactggaattcagaaccacagtgaaaaccagaatgaagatgggagtgaaatactaaatagcactactgccagaggtgctgaaagctggacagaatctgagattgcaaggcttcaacagttgagagctgagatggagacaaggtatatgcaaagtgggtgttcagaagaggttatgtgggaggaaatagctaccaaaatggcttgttttggttacgaaaggagtgctgtggtcttcaaagagaaatgggagagtataagtaactatgcaaggagtgtcaaggatggaagcaagaagcgcaaggaagactcaagaagttgtttttacttcgataacagtgaccaatcttctctgtataaccaaggaggtgcctattgtgatatcaacgatcaaaggcacaagactgggaggctgcaaacaaatgatggctcttcaccttccaattcaaatgttggaaatgcagttgcgggtgataactgctttcccttcttgatgactgagagtggaaatttgtgggagaactatagcttaaaggttaataaagcatgccaaaaccagtgatgagagtgaaaaaaagtttgacacttgtaagaggcaagaaaatttcacagccttttatcagatgatctcacattatgtaagcaagagctaactgatgagggtcgtttatgtatagagactgatgatgataaggtgatcaatcttattatatttatgggaatcaaggtgaaaaataatgtgttcaagtcacgtacgtaagtttaatgagggagactagacattggcaaaatttcacaggtgagtatgacactaattcaggtgagtttctcttgtagcagatttcttttatgcgtgcaaaatggaatttgcaattttatattacttcacatgttgcatcttcaatgatgtttatatatcattagttgttaaccctcaaaaaaaaaaaaaaaaaaaaaaaaaaaaaaaaaaaaaaaaaaaaaaaaaaaaaaaaaaaaaaaaaaaaaatttctcctagtttccaccttccacacctatctggccttttttttaattaattttttgggatatttatctgtgctggccttttgtgtttgtgtactgaaaggtagcaatttctttggtatttatttattggtcaatagttttatgaaccgggagaaagtgatgtattgatggatattgttgaagcatcggacattgttacaagcataaaaaaggccagattttctttaa

SEQ ID NO: 78188 - DNA, 407 bp, Glycine max
  Clone ID: PAT_MRT3847_4161C.1
catgcgtttgtttttgttaggtcaaaagcaccagatgctcaccttgaattccgaactaccttgcggattccgccagggacttgaacgtaatcagacatgctttcaacaatgtgtgggctcagctactaatagaaaatctcaagcgaggcacttacatcatagttttctggtagcgggccaacgactggaggatttaagacactgcagtggtaaactagctcaggatggccgatgggtgtgataactacgatgccgagcccacaattacagagtttctaatgaagcgatggactcactgccccgccagcatattatgaaagacaagctctgactagatcagaggggggcggatgcaaccaatggtggtaaagctgaatatggtgctgagtacagattggagaacggtc

SEQ ID NO: 78189 - DNA, 713 bp, Glycine max
  unsure (1)..(713): unsure at all n locations
  Clone ID: PAT_MRT3847_41620C.1
gttcctgttccattttaacgtgtatgttcagttcttggtctcaagtttcatcttgggctgtagactgtagcaaacaccatgaccaccaaggttccaaaatccgtatacgactttgttgtcaaggttggtcctcttatctgctttccctcatctctgtctctgcgttgagtgagtttatttatttggatgaactaggactcttactttcctatttttgactttggaagtgaaagaaatcatttttttctttctttcatttctaaacatacaataaataaatgttagacgccttaatctttaacaattacttgcaggatgctaagggagatgttgtagatctctccttttacaagggaaaagtccttctgattgtcaatgttgcttctcaatgatatccttaatctgtgctgtgtttgttacttcttctttttttttccctgattgtgccttctaattaatttaaagccttgatattttcatcttttctattcttttcagtaactactctcaccgctaatgttataaatgttgagaaaatttacaatatgtttgggattgagacagcggcttgaccaactccaattatacggagctgaatcaattgtatgacaagtataattgttggtcgtattcaacagtaaccatgataactntactgnttatctttgtttctttctggtggcttataatatatgactggttttgtaaactta

SEQ ID NO: 78190 - DNA, 441 bp, Glycine max
  Clone ID: PAT_MRT3847_41621C.1
cgaaaaaaaaaaaaaatttttttaataaaaaaaaaaaaaaaaaaaggggggatttttaaaaaagaggaaaacaaaaataaattcaataatttattaacttgcctccccccaactaaataacctcattaactcctaaattaatttcaaaaaagggccccccccccttaaaaaatttccctaccccgaatttaattctcaccccgttccttagaggcttccaatttttccttttatgaattcttttaaaatttcccctaaataaagccaaaccctttttctttataaaaattttatccctttaaaatttcaccaaaaaataaaccccaaaactttaaattgaaaaccttggcccccttaaaaggggcctcacctcctattattggggtgacctcaactccccctttcccaaggaaaaaccctttccccccactccattaaaaa

SEQ ID NO: 78191 - DNA, 611 bp, Glycine max
  Clone ID: PAT_MRT3847_41622C.1
gattcaataaagacaatttcaattatgtaaacttggggttcatctatatattacatcataattcataatccttaaaagaggggtttagtcaatagttacaaacaaataaaacaataacctttgatacgtgagaaagagaagggaataagaaaaattacaattagaaggctatgcaatcttccccctcgccttcttcccaatccaaaagagttcccacaatataccaagacattcagagtcaaattttgtacacaaagcaaaagatgaggtgttttggatgagtacgaccgtttgtggaaaatctgacgttgttttccaattcttgagaatcaaagcatggatgtgttggaatgagcaagaccattctcccaaagaccatggtcttgctcttcattagagttctcttttaactctttttcaaacccttttaagttgaatttctgcattctatcactctcaccctgtatcacactttcacagaattccattgagttttaccaataaaatcaaacaaaatgcattaaaacaaggacaaactcatgtacaaaattacacaataaccagtttatcactctgaagaaaaatgagaacatcgaataggattaaaattt

SEQ ID NO: 78192 - DNA, 193 bp, Glycine max
  Clone ID: PAT_MRT3847_41623C.1
tgaaggtgttgcagttggaaggagatttacagctttcaaaaactacaaagcggatggaaattatgaaatgatggcattaggatttatgaatgttgtcggctccttcacttcctgctatgttacaacatgtgctttctctcgggcagcacttaacaacaatgcacgcgcaaaaacagctgcgtccaaagtcgtg

SEQ ID NO: 78193 - DNA, 143 bp, Glycine max
  Clone ID: PAT_MRT3847_41624C.1
cacatctagcctgtctgacccatcccaccccgcctttttccatcgcactccactcaccacccaaaccctaccgttccatgccctaaaagaaggtgaacagccaactgaaaagaggtgccggatatttcaggggagcgaggaag

SEQ ID NO: 78194 - DNA, 390 bp, Glycine max
  Clone ID: PAT_MRT3847_41625C.1
ttcacttttgcgatgacgcgttcgaggacacgtgtggatactattcagggtgtgatgtggactcttcaagtgtgtacttgtatacaggaacttatgatactctcattttgtggagatacatcatgaacattcctacttatcagagagcattcaaaagccatgttgttagcaggcgttggcatccatgaccatgatcggccaccatgcctgtaacatctgtaacacacacaggctcctcaacaacattgaccaccacgccctgcctgcgttctgcgaacatgatgatgacgaacaagaactcgtgttcccactgctccttctgacattactgaaaccaataacgtatcgctcgacacgcttctacgtcggtgacaagcagtactcgtgctc

SEQ ID NO: 78195 - DNA, 499 bp, Glycine max
  Clone ID: PAT_MRT3847_41626C.1
cttcgttctttttttttttttttttttttatttttttttttttttttgagaattgatgagacgggtaaaattgttttccagtacaaaagcgcaactacatttaaaagcttctttctattagacataagtacttcctaatgtcattggcgttgctctagcacagggtgataaactattacacaactgattgatagaacatactgaaaactaagtgcacactttcaaaatggtaccacttcccttgaacgttcactgcgtacgatactggccatgttaactagaacaacatcaacgctacatagctctcattgacattagaaacacatttagaatccatcttatatgatgcgaccattttatactatatgaccacccttgtgatgtggaagggaaaatgaatatgaactcgctattattactaggagagtttccaccttactctaactatacctaggggacgtcctggtaaactgtgtgaaagccacactaccctgggggg

SEQ ID NO: 78196 - DNA, 303 bp, Glycine max
  unsure (1)..(303): unsure at all n locations
  Clone ID: PAT_MRT3847_41627C.1
ggcaacgttctagcgaaacnctagctagctctttcttaatccataatcnctcttctcttctnctcttctatcngcaanacanaaatgtctcatttcggacgttcgggtccccagannttccgacattancncttctgnnctcaacatnacttcgnaacaacggcgangaactattcctcnctngacaanacgggaagcntngactctnatcccaagatgannangngntcagggttgatcncgtacanattnagagncaaagcgtnaagcngcggaatgtatgccgnatacncattcnnaatg

SEQ ID NO: 78197 - DNA, 544 bp, Glycine max
  Clone ID: PAT_MRT3847_41628C.1
cccgttcttggaaaaaattgcaaaaaaggatcttgaagttttgttttggggggatccattaaatgaagttgcttttcaaattcttaattcttccaaggaaaaaaattttgttgactttaccaaggaaaacttggatttaggggataaaattgaggaaaaggaaaaggaattgaaccaggattttggccaaccttgtgactggatcaaaaaaaaattggaaaataaagttccaagtgtgcaaatttcaaaccggttaacttcttcaccttgggtcctggggtctggaaaattgggttggcctgcaaacttggaaaggctgttaaaggcccaatctttgggtgatccttccagtttgaaattcataaggaccaaaagggtgtttgaaatcacccttgaccttcttatattcaggacctggattgatccatttaaaccaattccgaataataagaatcccttagaacgcttggatctttgtgttaatcctgctttggtttcacagggttttacgcctgataatccaccccacctggaagggaggatt

SEQ ID NO: 78198 - DNA, 355 bp, Glycine max
  Clone ID: PAT_MRT3847_41629C.1
gtttgtgattttgtgattggaaagtcagttcagcaagcaaatattgtccatatttcttttgtttctgaagccattgcttcctttaacatacatcatgatgacaagtcaccatgtgaaattaggaaaatccaagaaaggatgaaacatttttcttgaattaaaaactaacaaacaattgaactcaatcattaaagtagggagaaaagagaaaggaccgaggagtgcgttacttgttgcattaatacacaacaaagcacaatgtaccactttagctagtacccaatgctgttggtcatagtctagaaaaaatcggtattccaaattgtgtttgcttttatccatgaaagcagtgata

SEQ ID NO: 78199 - DNA, 323 bp, Glycine max
  Clone ID: PAT_MRT3847_4162C.1
tatagggagacattaccgagcgtaaaggggagatgatgatgagaaatgagaggtgttgatgatggataagcaaatgagtattatgataagatcttagtatttgggattagattagattcatctatcacatgacacaacacaactcatcgattatcactttcccgcactttgctctcccatttggtgtcgtttgtactttttatgttatgctgctttttgtcattccctttgaatgacttttgtactacttgtcctataatctataataattattcaattacaattaaatatttatctttataataattataattaatctaata

SEQ ID NO: 78200 - DNA, 314 bp, Glycine max
  Clone ID: PAT_MRT3847_41630C.1
gacccactctaattaacaatcaaacccttcactctgcatcccaaaacacctgcacggagtccattcaccaatgggactatggtaaaatcaataaccttaatcagtgacaagtacttcactccaattacataaatccaacctttcgtacgttaatcttgcaatctgtacgctgcaacaataactttagcttcgttactcttactcactcaccggcccgatgtctccggtgccccgagcacacgctcttctgcttccggtatccaagtgcaaggatgatccgcctagcaccgtgttcggcgccatgttcaatgtct

SEQ ID NO: 78201 - DNA, 478 bp, Glycine max
  Clone ID: PAT_MRT3847_41631C.1
tggttgggtttggaagaggaggtcctttgggaagttggagctatgatagaaagcatggccatgatggcatccatggtttaaataacaaacttatcagacaaaagattgagggcatcatccacaacctcggctaaggttttggtagcatgaggcatgatggttataaaagcaccaaagtgttagagctactaggctaattagggtaagcattatagagctacactataagatagagaagtaaatatacttcatttatttcataatgaaaacatagcagttcctacattaatatacagatccttagattgggcaattttagaaaaatatgaaaattgttatcaacaaaggcccaactatttctggtagtagtccttgagtcaatatggctttcaagtgattcgaatgggcttggagttctctagcataggtggcccactaacaactatatcaactaaacaatcatttttttaaatttagt

SEQ ID NO: 78202 - DNA, 419 bp, Glycine max
  Clone ID: PAT_MRT3847_41632C.1
cccgaacggaaacttccgcaatcagcatacacgtttttacaaaaaaagcccaaattcattggccgggggggggccccaaaatttacccactaagaatctatttgctatcggggccctaacttagccaacgttccaaaatttcgaaatttcaaaaaccattaaacttgggaaaaagacgggttctccaatcattggttataaaaacgtaacaggcaattaagtcaaatttaatcaacttcttccatctggctaccctcagcatttgcatcagcgtcctaaagaggaggcatgttagcatttgcttcaccagcattttaataaatgctcaaaccaagcttaagcatcctgtgaatcctgttaccgaaagggttgggatcatcaaggctgaacccaaaagttttaaaagcagtcctaaaaag

SEQ ID NO: 78203 - DNA, 160 bp, Glycine max
  Clone ID: PAT_MRT3847_41633C.1
tcaaatatgacatttatatatagatatagatatgcatatgatgcatacttatagttaagcactagtttgaattttcattttcaacttttggaattgtagactggaatatgttcatatttgctccaaccatgattcccaactaagagtgagatctttacca

SEQ ID NO: 78204 - DNA, 297 bp, Glycine max
  unsure (1)..(297): unsure at all n locations
  Clone ID: PAT_MRT3847_41634C.1
tctttaaagaaaaagaagaaaggccctgttttcaatcacacatgatcgctcgtgtggttcacccgaaaacaatggttgtgaaaaccaaaagaagctatcaaattctttttctctgacggtgtgaaccaactgtgcaacatactntgttatatgtatttgcaagggagaggatgggaagaaagaaataaagcaaaagtcttcttctaacagggatgaaaaaagaacgagataaaaggaacttgtcctcgtttcaatgaaatactatactagtaaactcgttactactactgctaccta

SEQ ID NO: 78205 - DNA, 683 bp, Glycine max
  Clone ID: PAT_MRT3847_41635C.1
aagtgaatggcaagaaactggggccatcccaaccaaatgttgccccccatcggggctggtccctttgggtcaaacccaccattggtggtccattccggtagatcttgttgtcacacgcaaaccaggtagtgctatatagtataatagatatatagtattaggttctaggagtattattatttttatgactggttagtgtactagggtattagatagtatgctactaggtgaaggggtaagtttttttggtgattttaaaggccagggaattaagatctaagaaggggcatgttttaaattgctccttcattttaattttaatttctcgtgtcaacaagtggggacctaattttttaggcccctcttgattactggggtggattactcttttcactttttctaaagttttttttttaaccttcttgtggagagaagaagctagtggcagtggactttttaattagtttttactatgggtgagctactaaattggaagaggtggactttgttgtgaccacccgccaattagtattgggatagtcttatttcaatctggaagtgttactagtgttgttgtttttgattactgatccccttttgtaatcagccttggctgtgtatgtcttcggtttgtggagactgaatgtaaattttcctaatggaaagttacagcaattactagt

SEQ ID NO: 78206 - DNA, 268 bp, Glycine max
  unsure (1)..(268): unsure at all n locations
  Clone ID: PAT_MRT3847_41636C.1
tccatatctccctccttatacactangacttctgnnctgaggtggcagtgctngaagaagaaancgttangttgaagagcaggttgtacattttaggcnggncttgtaccaggaagctgtctacatgtcatcctctaagatgaaactcgagcaatcagcaagagtgaacaatgcaagcccaaatagtagtcccaaactgggtaaattgaagtccctatcccagacaatggatgatgctgcaacatctgaaactaggcctacaacaacg

SEQ ID NO: 78207 - DNA, 776 bp, Glycine max
  Clone ID: PAT_MRT3847_41637C.1
gaattcgagctctttacccggggatcctctagagtcgacctgcagaaaggacaagtcagatccgagatctgcacttgcctggcccttaaattagcttttgtaggtaatctgtcccatagtaatctccaagcaaacattaaaaatttactcgggatcttgatcttccaaaggtccttaaaacagtcgtgaaggttgtcaacagctacctcctcccaaaacgaagaataagcactacgagtagagaagatacccgatgcttctgctgtccatacccaagtgtcagaaccttgagaattaatggatataccttcaacttcagagaggaaggatatggctgattctatttctctgtcaaacagctgacatctccaactaaagttccagttccacccaaggttgctatgctgccccaaggaaccaaccagctggtattgatggttggaattcacatagagccgcgggtacttttcagctaaagattggtcgtgactaatccacctatcctcccaaaatctaactttatctccagcttctaccttccacttaatttgttgataaagagtctttccattgtatggcatatgcataacttttattaaatccctccaccaaattgactgacagcttgagtttccttctccaactagacctctccagcccccatatttagcttccaaaactgcaacccatagagccccttgttggtacataaagttccacatccactttccaagaaggccatgttaaaggtatggatgtcttttatgcctaaacct

SEQ ID NO: 78208 - DNA, 181 bp, Glycine max
  Clone ID: PAT_MRT3847_41638C.1
gaagaatgcttccctggtaagggcgtggactcattaggctgcagagggctctcatttgtatcatatcacccaatctgacctcacgctcgagagcgtgcatatgacggctgctgaatatgtcattgagctgagcgctgatcaccatcgggcctcttgaccttagcttcttcactctgaaagg

SEQ ID NO: 78209 - DNA, 376 bp, Glycine max
  unsure (1)..(376): unsure at all n locations
  Clone ID: PAT_MRT3847_41639C.1
gaacaggagaaccatggtangcataactagattctttcattgagcttnttcctcttgaagggtctagctaatgnttngttctgattctaaactttcgtatctgattaacgngtctggttnnnttgatnatntttgaaaanggtgcttgnggccctgatgatgacnacaatnngtggncaccgtggttgaagccactgctnaaaganagcttntttgttcaatgnaagntgcntgctgactctcacaagagcgaangcancatgtnttgcttggactgtatgaatgggcctatatgctntctntgcctcgctcaccacatggatcaccgccaatccatgtttgtcacatcacatcattcattngttnttgcacagaa

SEQ ID NO: 78210 - DNA, 348 bp, Glycine max
  Clone ID: PAT_MRT3847_4163C.1
gtggggggtttttgttgaaatgcacaaaaaatgaaaaaaaaaagtagttgtcgtttaaaaccaacaagacttcccagaattgggggggcaaaggggaggaaaaaacggagtgacgtcttagacacttaggaaacctactcataaaaaagtgcgaaagtgttgcagaaacgaccgataaccaaccaatagctttccattgcctctgggaagagcgggttgggcgcggaggatccggcgggaaccccatagggcccatatgctggccccatgaacattggcaaaactgggcaaaaaaggggcctgagggtgaagcgggtttaaagagtctacccccccagggcgcgaagc

SEQ ID NO: 78211 - DNA, 350 bp, Glycine max
  Clone ID: PAT_MRT3847_41640C.1
ggctcgagattgcgccctacctatttctagctgtgtagctctttgaagacaattacacgagatatatcatttcatatcacctgcatgtgctgataaagattacgacgtttggtcatgtggcacgggtgactctcgtggccgcagtccccgatggtgcactcttaccaagactttgacatagcatggtgagcagagcgagccacattatatgagagtgagtagcttactaccctctccctagacagaggcttaaggctctggatttcgtggcagtaaggaatactggatcggaaaaattgacatgcagctcaagctagtgcctggtgactgtgatggaacagaaactgcct

SEQ ID NO: 78212 - DNA, 688 bp, Glycine max
  Clone ID: PAT_MRT3847_41641C.1
gcgacgtcgtggtggagatgttcttctggaggggaagcagtaaccagcttcaatctactccttcttgtgggaagacttgtctacttttccaatttgtattcaatgtagcactccactccaataacaacgtcatcttcatttgctaccgccttaggttggattccaaacccccttttctttctcaggtacgtgaatgatgatcaagacattcgcaagtactttgctgccttccacctgtgtgatgcattgcctgcagctgttcttattgatgatttcggagatttctttgacgacaagcgaatgaatggtaattaattggcttcatttcatttctaaattctgtggcagtcaaaaagggtcttgcaaggttctcttgtcagatactcatactcaccagagagactccccaaggtttcacttcatctataagaaatggatacaaaccacttttactattaaagagggggacgtacctggatcatttatagtcaaagataggagtcattcaccaactgatcacacaactactattaaagctgcaaagtactccatagctcttcaatatctggtttttcatggaattgtcgaagatcaattacaatagacatttacatgtaactgagacatatattctctcgttccatttaacaattattaatcaacaatatactgaactccgatgcccagc

SEQ ID NO: 78213 - DNA, 504 bp, Glycine max
  Clone ID: PAT_MRT3847_41642C.1
accaaattagtggatcaaccacacgctgtcttgcaaaatcaaagcaatccaagatcgcaaaacccaaaaaaataaaaagtcaaacccagagatgcttgcaaagtgttttgaaaaaacgtccatttcgacggcgtcttcagattcgccaccagagcttcctctacctcgcgctgctaccgccgcagatgggtcatcgacctcaccaccgattgcctttcacgaagtctgagatctcgtcgagaacgacgacgagtcctcctcctctttcggcttcccaaccactcccatggcatggagcctctagaggtgccctcgcattttgtattctgtttcatcaaaagtgggtctgtgcaacaatgttgatggtgaagatggtgaggctttgtttacaaacatgattcagccaaaattgccacttgcaatgtttacggaaataccgccgtcggaaattccctctggcggtggcgagcagtggttgacggcagaagtgttgggggagaaagt

SEQ ID NO: 78214 - DNA, 856 bp, Glycine max
  unsure (1)..(856): unsure at all n locations
  Clone ID: PAT_MRT3847_41643C.1
ggaattctcctcgagtacgctgcgagaagacgacagaagggggatgtagaaaagtgaacggcagctgggaagctaaacgacggcgtggagtgatgatattggaggagatgttcttctgcagcagcagtagcagtagccagcagcttcaaccatttgaaaatccttcttccaatctactccttctctctggccctccttcttctgggaagacttctcttcttttccaatttgcattcaatgtagcactgcactccgactcaaataacaaagtcatcttcatttgcaaccgccataggttggattccaaacccccttttctttctcagggtattgacccctcttctcatgtattccaccgtatacagatgaagtacgtgaatgatgatgaagacattcgcaagtactttgctgctttccacctgtatgatacattgcctgcagctgttcttattgatgatttcggagatttctttgacaacaagatctgccaacaacgatattctaatccccgcggacgagacatggccatggtcaagacgctagccttatgccacaatgcaattacttttgcaaatcaaaaaggatcttgcaaggttctcttgtcagatactcatacccaccagagagactccccaaggtttcacttcatctataagaaatggatacaaacaacttttactattaaagagggggatgtatctggatcatttattctcaaagataggagccattcaccaactgatcacacagctacgattaaagcagcagcaaagtactccatagctcttcaatatctggtttttcatggacttgtcgaaagagatcaattancatatatccagaactgattgataca

SEQ ID NO: 78215 - DNA, 1204 bp, Glycine max
  Clone ID: PAT_MRT3847_41644C.1
tcattatctaataatggatcttacgtgaacatctgaatccaaacccatcagatccgaaatccacatccaaatcgttttctggctctctcaatccctcaatccaagtttaagctgcaaatccaaccgggtcattattggttcgaacccacaactattctctgtgcatttatacactaaacagatcccttttccgattggatcgacatggaatttcgtaattttgacccaagatacactggggagttattgaagcacatggatagtcagaatgaggtccttatggaagcatatagatccatgttccatgaattgcggaaacttcaggtcgaagaagagatgcttatgcgcaagatgcatgaagttatgtcagctcatggtcccactaaaagtgtagatgaagaagaatcagtagcacctgaagcagtactagcaactagagaaggggagcgaaatggcaagacaatttctgaagctcaactggtagaggaggcaacttgggaggcatcagagacagagacagagacgatcaaagagaagttcccttctctctgctttgaggaaaatgctgaaattagagagggtgatattgatgggaacccagttcctatggttcttggacagactacaagtgagaaagctcttaaggtctacaccaagaggcccaaggccaaagtgcctaaaagctagcacaacctaacatgaacccgtattggctgaagggaggagttagttatatagaaagagaaaaggacgtagaatctgatatatagggggaaagagaataagtgggggatatcttttgagattattgtcgattgtagcctagagacgtgtctctggcttgggggcatgttcttattttcttgtaattccttcatcatctatacacagtaatacaattccaattcagataggaatagttcatatcttagagggaaggaagggggggggggggactgtttttgtacaaaggaagttaggaaaaatagtggatacctttgctttgaaatttgtgagttgtgattgaggtagttctctcaatgtgtgggactgaatcctgtgttaggttattttagtttccttttgtgttgtttctgaattcctaagcgaagacttgtatgagttctgttatactttgggatttcaatcaatataaaccattagcaattttctcttttaaaaaaaagcaacaaaaaaaataaac

SEQ ID NO: 78216 - DNA, 216 bp, Glycine max
  Clone ID: PAT_MRT3847_41645C.1
gctattaaaataagaaaagaaatgtataaaggagcacagaataaaggggggggaggttctttggggggaggctctttccctctaacaaaaaccaaaaatggacaaaaggaaatgaatacaataaaggtacataaggggataagaaacgctataatgaaagaataaaagcgaagatggacaagggttttaccaaaacataaaacagtggagagaggg

SEQ ID NO: 78217 - DNA, 323 bp, Glycine max
  unsure (1)..(323): unsure at all n locations
  Clone ID: PAT_MRT3847_41646C.1
tgangcagcntacgtnagntcggaattcngntngaggttgaagntaatgatnttattgatgnaagntanngngtnnngatnntntnagnnntanttggatggtagttgatagntntagtngggattnggagancangnaagtggggatgnagatggancgaggntanggaggagnntgtntgngtnatgagtgatnngtangggggnaagagtgtgganaatggnattggggntggtgagagntnngntnntgtggagggatggntgatatgtttgnnattggagttnattnggggtnggatntgtggatngagtngtggtnt

SEQ ID NO: 78218 - DNA, 161 bp, Glycine max
  Clone ID: PAT_MRT3847_41647C.1
aggcgtcaggatgccagaagggggcagaagtgatttcatagtactagcattcaatctcaactgtcactcatctcacggtacttgaattctaactcgcgacactgttggcctcacggaaccgtcatgcatggaagaaagtccatcaccgaatctaaaatagc

SEQ ID NO: 78219 - DNA, 718 bp, Glycine max
  Clone ID: PAT_MRT3847_41648C.1
gcagaaaaataatttgtattataatttttttaagtaatttttaattaaaactagatttcagttttcaagtaattttttttatttcttagtttgcagtaaaataatttgtattataatttttttatttcttacattttactattttgaatttataatgaataattaattaaaatattgtttttgtaggtacatgatgaattcggttataacagtgttgtatttcaatggaagggtatatgaagataatgatggtgttatattcgaaggcagtaaaaaaccgattcagattaaacttggaattagtttcaatgctttgaagaaaaaaattggagacaaggtaaagttaaaaaattataatattattccagaattacagaccatgaagaagggccttatgagagacagaagattctggtagcagtaaaagagtactggacatccccaccaccagagagaaaccaacacagctagcacttagtttgatatgcttcaggattctgtttttcttttattgtgaattttctcatgagtcaattctttcaaactctcattcttgttagtggtaaaagtgaaaaattctttgtaaaattatgggccctggaatatttgaggcagcttttcatcaaattttaatatagtgggaaagcatgtaaattgattggaacaggaactggtaattagtaaaaaccaagttgtctcaatatgggccgtattgccc

SEQ ID NO: 78220 - DNA, 359 bp, Glycine max
  Clone ID: PAT_MRT3847_41649C.1
aattcggctcgaggtacaggtttgtatcttggccatgccgggacgcccttaggatgttatgaaagctgctctaagcgtgatggcgtgggttaccgaaaacctagctgtgatgtcaacctattataccaaccccctggcgtacttgggagactagcacatggaaattggattcgctcataaaaaggctacattctataaccatggaagtaggttttgattggtaataagaaatattgctgacatgggacacggcaacatgagatgagaatgactggctttcacgtttgagctgtttaatttcaccaatggcgccaatgtgttgaaatctgaaacccgaatgtcgatggaaaaagatggcc

SEQ ID NO: 78221 - DNA, 304 bp, Glycine max
  Clone ID: PAT_MRT3847_4164C.1
ggacaattggctatttatttgagattgacgctgctctcatggcactactattctgagaagtagttatggcctcatgctttgtataggctatatatcctcataccgttcatggatagaatcaatgtttaaagatgaaatggtcctctgcatgttttaacctttggattttatgcatcagatgcaccatttggacaaggcacaattcttgaagctaaagggggactgacatgatgcaatgtctttatttatttatttatttaattttcatttttttactggtaatctagcgttgtctattcttttc

SEQ ID NO: 78222 - DNA, 400 bp, Glycine max
  Clone ID: PAT_MRT3847_41650C.1
attttctcttcctctctttctatctctctctgctccaattcacagataacaatgcaaatttctcttagcaatttagctttcaagacccctcaactcttcccaattcagcaccccattttccctccaaaggcaccactgtaccaccaccaagtttcaacgcagagccatgtcaacaatgtcctgaaagggtcgtcggggtatttgtcagaaatcagcaaagcagttctgttgactcatttttcaccaagatatactatagaggatattcgtcaagctgcatcaaaattgcagtccaggttgtctgctaaagtggttcctctcacagaaggcttcaaatctatgtactcttaagtgttaaaaaaatgtcactagttgtatctccggttcattttttttatgc

SEQ ID NO: 78223 - DNA, 377 bp, Glycine max
  Clone ID: PAT_MRT3847_41651C.1
aatggaaactggggggttaataaaataaaacgcatcccataaattttttttaaaaataaaaatgtccccaatacaaagcctttacctttaccaacaggcaaaatgttcaaccttgaaaaatgtttgagccaaaattagtttttaaatgccaaaagccccactaagaactaatatcgggatacttaaagcgcccccggcatggaatgaacaattaggcggggtttgtaccaggggggctaaccccaagctttaccaacctctaatggatggcatttggggagcaaaatttttacttgattttcccacagggttaaaggaaaacctctgaaagtccaagcttttttgaggttaaacttgggctggccaaggttttaatt

SEQ ID NO: 78224 - DNA, 600 bp, Glycine max
  unsure (1)..(600): unsure at all n locations
  Clone ID: PAT_MRT3847_41652C.1
cacgcgtccggaactacaacaaaggacttcaacttaagaacaaggataaccaggaatcagagcagaattcacccagcagctctgttctcagtaggaaagtcgcgtgggttcaaagtcctaagctaggaggaagaccggcatctgagaactcctctaatgctgctaaggaaggacttggccggctaggaatccgcctgacctaacgaccttccttgtgcggtaacaagtcggtggcgaaggtagtaatccccggcactccttctcttctgagaatttgagttattcgctgcttccttactctgattttgactctggttagccaaagggcgaatacgatgtcggagctttccaatctctttcttacaaagaaagacatccatacgtagggtggtggtcgaagatcagtgactgcttcctttgctgatcagcgatcatgccccttattctagcggaggaacagcttcacatcggattcatttccacaagagtgctctaatggcaaagagcagtatccacttgaaactcggcattacttacttatcatacaaacctagcccgttatggngcactttcagccggtgtaaggagtccctaacttgg

SEQ ID NO: 78225 - DNA, 1820 bp, Glycine max
  Clone ID: PAT_MRT3847_41653C.1
cacaaactagcaaagtagcaacacacatcatggccatacattatacaaggcaacttcttcgttaatttcctcacacatccctatctggctttctccctctcttactctctttctctttccatcactcacttttcattcccaaccccaacccctcctctcctcagtgccataaatcaattctttctatctatctctgtccacaattctctttaattaattttctttcatttcatttcatcatttaatttcatatgaaaatgatttcatctgcctccaacgaaaacaagacggtggtggacatggacgaccacctcgccggcctgggatacaaagtccgttcatcggagctgtgtcaagtggctgcaaacatggagcgtttagaaaacgtgatttcatccaccgacctatctcaactcgcatcagacacaaccctctacgatccttccaacatagggttaggttcgtgggtggacacgctcctctccgagttcgaccaaacggcgtcgttaccgttacaatacgatttcgccacggatccaaaccataacaagcaattagcgctggtcaccaccgtggaagaagactcggggataagactggttcacatgctgatgacgtgtgctgattccgtgcaacgtggtgacttctcattcgctggctccctcattgagaacatgcaggggttgttggcgcacgtgaacaccaactgcggcatcggaaaagtcgccggctacttcatcgacgccttgcgccgccgcatctcgaacacgcttccaacgtcatcatccacttacgagaacgacgttctctaccacaactactacgaagcgtgtccttacttgaagttcgcgcacttcaccgcgaaccaggcgatcttggaggccttcaacggccacgattgcgtccacgtcatcgacttcaacctcatgcaagggctccagtggccagcgctgatacaggcactggcgctccgtcccggcggaccgccgctgctgaggctcaccggtgtcgggcctccctcggcggaaaaccgcgacaatctccgcgagatcgggctgagactcgccgagctggcgcggtccgtgaacgtgcggttcgcgttccgcggcgtggcggcgtggaggctggaggacgtgaagccgtggatgttacaggtgagtctgaacgaggcggtggcggtgaactcgataatgcagctgcaccgggtcacggcggtggacgccgccgtggaagaagttctcagttggatccggagtctgaaccctaaaatagtgacggttgtggaacaagaagccaaccacaacggggaagggtttttggagcggttcacggaggctttgcattactattccaccgtcttcgactcgctcgacgcgtgcccggtcgaaccggacaaggctgctttggcggagatgtatttgcagagggagatatgcaacgtggtgtgctgtgagggaccggcgcggctcgagcgccacgagccgctcgctaagtggagggatcggctcgggaaagccggcttcagacccttgcatttgggtttcaacgcctacaagcaagccagcatgttgctcactctgttctcagccgagggtttctgcgtccaagagaatcaaggctctttgacactgggctggcatagccgccccttaatcgcagcttcggcttggcaagccgcgccgctgagagatgacgaaacgctgcgttttgggcattgaggaatggaacgcttcacttgtttttgtaagtacttgtagtacacgggaagagtggtgaatctataaaactataactgcttttaatgtggtcaattttggcgt

SEQ ID NO: 78226 - DNA, 881 bp, Glycine max
  Clone ID: PAT_MRT3847_41654C.1
ccacgcgtccgaaaggggcagaaatgatattagcaccagtatctatcaatttgatgcattagtactcaacacatcatggtcataacattatacaaggcagtttctccgtcaatttcctcacacacctactcttaacttataataattactaactccacaattctccccatggagcgtttagagggcgtgatttcagacacaatcctctacgatccctccaacatagggttaggttccttggtggacactctcctctccgacttggaccaaaccatgtcgttaccctcacactaccatctctcatcagaccttcccgatttcgccaccaccgtggaagaacactccgggatacgactcattcacacgctgatgacgtgtgcggattccctgcaacgtggccacttctcattcgctgcctccctcatccagaacatgcaaggcttgttggcgcacgtcaacaccaactgcggcatcggaaaagtcgccgcctgcttcatcgacgccttgcgccgccgcatctccaacaagtttccagcatcatccgcttacgagaacgacgttctctaccacaactactacgaggcgtgtccttacttgaagttcgcgcacttcaccgcgaaccaggcgatcttggaggccttcaacggccacgattgcgtccacgtcatcgacttcaacctcatgcaggggctccagtggccagcgctgatacaggcgctggcgctccggcccggaggaccgccgctgctgaggctcaccggcatcgggcccccctcggcggaaaaccgcgacaacctccgcgaaatcgggctgagactcgccgagctggcgcgctccgtgaacgtgcggtttgcgttccgcggcgtggcggcgtggcggct

SEQ ID NO: 78227 - DNA, 626 bp, Glycine max
  Clone ID: PAT_MRT3847_41655C.1
gcggtgaagtccgccgttgaagaggttctgggatggatccggattctgaaccctaaaatcgtgacggttgtggaacaagaagccaaccacaacggggaagggtttttggagcggttcacggaggctttgcattactattccagcgttttcgactcgctcgacgcgtgtccggtcgaaccggacaaggctgctttggcggagatgtatctgcagagggagatatgcaacgtggtgtgctgcgagggaccggcgcggctggagcgccacgagccgctcgctaagtggagggatcggctggggaaagccggcttcagagccttgcatttgggtttcaacgcctacaagcaagccagcatgttgctcactctcttctcagctgagggtttctgcgtccaagagaatcaaggctctttgactctgggttggcatagccgccccctaattgcagcttcggcttggcaagccgcgcctctgggagacgacgaaacgctgcgttttgagcattgaggaaaagaacagaacagaacagatcacttgtttttgtttattctagtaactagtagcagtagtagtagtacacgggaagagtggtgaataataataatgtggtcatttttgcgtaaaaa

SEQ ID NO: 78228 - DNA, 635 bp, Glycine max
  Clone ID: PAT_MRT3847_41656C.1
cgtaagctcggaattcggctcgagcaaaccccattgaaccctattagctatgcggctcatgaacccgttcctggtttggtctacgctcagagccttgttggggatgattcatcttctgggtattgcttggaccataattgggttgccagagaggctgttaggcaatttggtactgaccctactctttatgcaccttcacgattgtggcttcgtcaccattgcgatcattgaatattgtggggaattgtggacaaatacggccacgactgtggttgtgttgaggtggcggagaccccaaaatccttgacgttgctgcggccaaaattgtggtggcagattgttttttaaaactttgcttgtgtattcaaagtagtttgatgaagtagttaaaaatcaagattgaaatgatcatgttcttgcctggtggtagctggttgaaggattgtgggaaattgatatgttgttagtgaggattgctttgctcgtagtgtgggcctgataaatggtgtatgactctgtgttgcttttattttctttggagttagggaggcagaatccatatagaattccgtggataccatattccaattgagaggaacttggtcccacccttttattgaactgctctgttttag

SEQ ID NO: 78229 - DNA, 360 bp, Glycine max
  Clone ID: PAT_MRT3847_41657C.1
aactactgtagccttcagagcccccaacaacttagccctcttaactttctccaatcttgtgcctctcatggaaggtcgtcgagtagccgtcttatgggactatgatacttgtcccattaccgccaacgttcctgcgtatcaggtagtcgacaacatcaacaacgtggctgcaagatatggaataccgaccactttcaacctttatctgtttgaccgatcgacagccaacaatgtcgtgttatccgagattgcatccaacggtgtctctctggttttcagtgtaccagccgtggacaaaaatcaagccgtcagggtgcgggctgatctaatgctcttcgcgggggactatggcgctgcctc

SEQ ID NO: 78230 - DNA, 416 bp, Glycine max
  Clone ID: PAT_MRT3847_41658C.1
ttggtttttttttttttttttttttttttgggtaggaaattttttcccaattttttaaaatcaaagaaagctctatagtaaccatgggtgagattaaatccccgtgataatttagacccataaccgaccgtaacaaaatacaaacatcctttcacagaacagaaacagaccgtaacaaagaaagaagaccgggataattgatgaagatgcttcacatatacagtccttcgggcactccttctttcttcttaaacataactttatcctttgccttcttaaagtcggcatgcgtcaccttcattcggcgttctcgtaaagcaagtaagccagcttcagtacatattgcttttatatcagctccagagaactcatccttggtcataacaaattcttctaaattgacatcatcagctaat

SEQ ID NO: 78231 - DNA, 290 bp, Glycine max
  Clone ID: PAT_MRT3847_41659C.1
tcttgctagcagacgaccgatgggcaatctggggccttttattcatggtccaaataatctaatatattctgtaaaatttacattctatcatttgatcctccctcccttcaacgcggggatcaaaagtgatttgcatgacaatgaaacacaatcatcggttgatcatcatgctgctgcctatcctacgtctgagatagctcttgcttttacccacaaccagcttatccgcaataacacacattatcatatactcatttacatcaaccagccctgcgataaaatgcctatcc

SEQ ID NO: 78232 - DNA, 215 bp, Glycine max
  Clone ID: PAT_MRT3847_4165C.1
gctgtgtggcgcagctgttaccactgtcaaccgtgccggtgcctgcatggtttctccattcactgggggcaagtccatggctggctttcccaccatgaataccaacactgacattaccttcattgttagcaactgggggagagtcgcaacgcatgcaggcgtggcccccagttggccagaagatgtttgagactcttgcctacctgcctgacctt

SEQ ID NO: 78233 - DNA, 568 bp, Glycine max
  Clone ID: PAT_MRT3847_41660C.1
cccactcgtccgcccacgcgtccgttaaatttgggtatctaaaatgaagctcaaactcaatgaaagctcggtctgttcaagcttttggtgggtttttgcggtctatgtctcgaaactctcttgatcagatcagactaaaaaagtctacttttaatttggactcacaatttaaagctcaaatccttcatttctttaggcagatttgggccaagtcaggcgatccattttgctacctctagatgagaatgaaattgattcattagcacataggggtgaattggtattttcctcgtttgagatggggttgatgtggggcccctgtgtaatttcatcattttctgttgttgtagttgtaggcccctcttgatcattaccgggtgctgttagcctgaaagagcttatcatagcatcagttggtaatgagaacattttccctcatgtgtggacctgtggtttgacattttgtattaatgcaaatttgcttgactttttatttttccatcctttgatagtggttcccatttcccttacctgcgcacatctttctagtgatatcttatgacacatt

SEQ ID NO: 78234 - DNA, 222 bp, Glycine max
  unsure (1)..(222): unsure at all n locations
  Clone ID: PAT_MRT3847_41661C.1
tcnncccttgacagatactgagaaaagtagggggacggttatactgttacannattttaattgaggcccnntcacaacaacattgcctctgagtacatatgattatcatgtttctgacccgactttttacatgcaatatgtgttacttagtaaaacatcactatctgctgacaggaattagattaactcgatgaagatcaatggtttgtgannacatgctgc

SEQ ID NO: 78235 - DNA, 706 bp, Glycine max
  Clone ID: PAT_MRT3847_41662C.1
ctcttttttttttttttttttttttttttttttttttttttttttttttttttttttttttttttttttttttttttattatattttcctttttggtttatatataaattttgttttttatttttttttttttgttttttttttttttatggtttttttttaaaaaaaaaacccccccgcggaaaaaaaaaaagggaaaaaaaaccctggggggggggcccgaaaaaaaggggaacactttaaaccccgggggccccccccctggcaaaaactgaaattaaacccccaaaggggtggaaccccaaaaagggttttttttttaaaaccgggtccccttccggggggtttaccgcccaaaccaaaccgaaaaaaaaaggcaaaaccctccctgtttttctctttaaaaggggcgaaaaacccaaggggtgtggccaaaaaaaaaaaaaaaagggggccaggcaaattgccccaaaaaaaaaattttttatttttccaaggaaagggggggggagggcaaaaaaaaaaggaaaggggcccccaaaaaagaggggaaaaccccccaaaagttttttcttaaggaggggggagaaaaatcccttttcaaaaggaaattggttggcgcttaaaaaggcggggggcccccaaattattggaaaagggccccgttaaatttttgggggggaaaaaaggaaaacatgttgtcccc

SEQ ID NO: 78236 - DNA, 263 bp, Glycine max
  Clone ID: PAT_MRT3847_41663C.1
cgcggtgaacccccgcgagaagaccacagaagggggggacggtgaaaaccgaaggccgcatgcaccacaagaagagacggaggggcgacaagcacagcggggacgccagcgaggggctcaccgccgacggaccggcgcaaagccgccacaagagaaccgaaggcagcgactccgaggacacctacgaggcgccgcgccccgacggcagactagaacggacagcccgccgaaaaggcgcaggccagcacacagcggccaaggaa

SEQ ID NO: 78237 - DNA, 191 bp, Glycine max
  unsure (1)..(191): unsure at all n locations
  Clone ID: PAT_MRT3847_41664C.1
tcnncanagcaacggcggtaacgtanagctccggganatttaaatttcccgggacccgggttaccctggccaggncgttaacccaggctttttcccctaataagtagaggtccgntatntaagaangctttgggcgtaaatccatgggtccataagctggttttccctggtggtggaaaattcgttnattc

SEQ ID NO: 78238 - DNA, 326 bp, Glycine max
  Clone ID: PAT_MRT3847_41665C.1
cttttgcttttgtagtcgtgtgggtgacaacctaggcacatgtctgattgagattcatgtacggagcaagatataaaggttgaattttactcatgtccaatttcaaatgattgtggcctattggttgttgccaaggtttgaatgtacaaacaaattgtctttttcgatggtggtggtggcagggaacgactggaagacgactaactgttgccatatggggggccaggggtgcatggtcacagagctgaagcagacgctgatgttttacatgtggaagattgatgctcgagatggatgtgttcacagtgctgaacaaacacctgttg

SEQ ID NO: 78239 - DNA, 363 bp, Glycine max
  Clone ID: PAT_MRT3847_41666C.1
agcccgaatggcccaaatcaaaattttaatctaacacaacccgttcaataaaactagaattaaatttcaagtccaaatggtgtctaataataaagctgaaacaaaacccccccaaatcctttttttatgatgaacaaaataccaccattttgaaagttttcaccaaccaagccccttaaaaaatacatttgcaaacttaagcattgtccaccggaccccccaccattgtttttaagttaatcccctaaaatagcccggacttgggcttaaactcctattggaactcccacttttgctgcgggtttttggtgcgtaaaatgattctaaaattgaaacgagccctattctttttttcccttgggg

SEQ ID NO: 78240 - DNA, 130 bp, Glycine max
  Clone ID: PAT_MRT3847_41667C.1
tacacgctgcgagaacacgtcacaagggaccaccattagttattcatctccacttgatactgttctctagacactatgaggtcgagtatgtacagctagcataataatgccccttggtagccattgtttc

SEQ ID NO: 78241 - DNA, 376 bp, Glycine max
  Clone ID: PAT_MRT3847_41668C.1
cagccgtgctctggttaaaccttccggaaaaaaaaacccccccacccttggtgaattcctccaaaaaacccgccattccccccaagtcctgcaaggccagaggcgctgaccttaaattgcttttcaagaacacttgggggactgcctttgccataaggaagttgcccctggttaaagctaaaaaatacctggaggttgttttggcccaaaaacaggccatccctttccgacccttttggggtggtgttgggaggacagcccaggcttaaagcaaacactccaatggtcaaggaccctggcccgccaaatcaactaaattcatcctaaatttgctgaaaaacgctgagagtaatgctgaggtaaaaggtttggatgt

SEQ ID NO: 78242 - DNA, 520 bp, Glycine max
  Clone ID: PAT_MRT3847_41669C.1
gtgggtttttttttttttttttttttttttttttttttttttttttttttttaaacaaaaaatatttgacttttttccaaactatgaaatacggcttttgttttcacaaacccttttaaaaaaagacaaaaaaattaaccctccccggtttaaaggggaaaaacagctggaacacttaaaaaaacatacttttttaaaggaaaaattttttaagccaaggacttttttggacatttaacatccccaagggggggatcccctccccaaaacccccattgaaaaattccctggaacaaggttttttttgggggggggccatgttggtctctaacccttgaacaagaagcaggggtccctgttccccattttatatcactggagtaactttttggatttggaggatggggatatttttttctattttattggggggggggtcaatcacccctgaaagatcattgaaacccacccacgctgggttgccaaaaatatccccatcctccaggttttgaaacaaaaa

SEQ ID NO: 78243 - DNA, 341 bp, Glycine max
  Clone ID: PAT_MRT3847_4166C.1
gagagacatatatattatgtcatattggcatactagattccaatgcttacttgcttcacattctatactatctaccctttgttggtccgcgaacttctttgttcctccaacatataatacctcatctatcatatttcaatatgatctcttcgctacactctgaatcacacacaatgggtctctgggattccttcctcaattggctacgcagctcgttttttaaacacgagatggaactttgacttgtcggccttcagaatgctggcaagacttctctagtcaatgcaattgctactgtaggctacagtgaggacatgatatcaactgcaggctcaacatga

SEQ ID NO: 78244 - DNA, 431 bp, Glycine max
  Clone ID: PAT_MRT3847_41670C.1
acggggcaacgcggaatgcttgctcattctacagttttaaaaatgcgtatcacacctactgcatcgctctcggggggcgtccttagctgggagggccctcaagctatacccatcatgccacgaagtcgggcgggtcagcatgaggaagaccgtcaccaagcaggcctgctccggaagcccatggtacggaccataccgcggcaagtactcagggcccattctctggcgagcccccgtgctacctcactggcgagttcccatgtgactacatctgggacactgatgggctttcggtcgacccagaaacctcaaccagaaaccgcgagctgaaagtgatccactacacctgggccatgctcggggccattggctgcatctaacccgagctgttgtcccgtaacggggtcaagtctggagaagctatatagatc

SEQ ID NO: 78245 - DNA, 173 bp, Glycine max
  unsure (1)..(173): unsure at all n locations
  Clone ID: PAT_MRT3847_41671C.1
gcgatccaaatcggatcccccggtgccccctccttcctcttggggggggggactnctcttcgggcatcctggatccatctcaactctccgggtctcccttagtttctcgcccccttgctcgcctaagttcctcctaacctccctcccgacgcgtttagcctcttctctactac

SEQ ID NO: 78246 - DNA, 292 bp, Glycine max
  unsure (1)..(292): unsure at all n locations
  Clone ID: PAT_MRT3847_41672C.1
cgtangtaagcncggaatncggcncgagagangancncgggangacaanganccgcntnangngnagnnccanngnancnangggncacngntnagcgnnnnnncaagnganncnagcgggantgcagannangnagggngnganngggangngagagangcngnngngcngnccgnnngaananggnancaggnnngangggncggcgnncggannngccgcgnnnggnnanggnncgnngnangggncangcnnnngggnncanggggagnggnnngnngggggngcnnc

SEQ ID NO: 78247 - DNA, 414 bp, Glycine max
  Clone ID: PAT_MRT3847_41673C.1
ggctcgaggcaatcgctgtgttgaagggtttgatcaccattgcaggtggctgaataactgtgttgggaaaaggaactacacaaccttctttcttctcatgattttcgtcttgttaatgcttttgattgaaggagggactgcaattgctatatttatcaggtgctttgttgataggaggggaatagaaaaagagcttcagaggaagctttatgtagattttccaagaagagttcttgccaccatatgtgtatttcttctcttattgacagcgtatagttcaacagcattgggacagctgttcttctttcatgtgggtctcatacgaaagggaatgaagacctatgactatattctagccctgagaaaagaaaacgaagcaatggatttggaatcattggatgattctgatttctc

SEQ ID NO: 78248 - DNA, 255 bp, Glycine max
  Clone ID: PAT_MRT3847_41674C.1
ggtggaagtaattaaatttttatttatataaaaacctgtaatgacttacattgatcaaacaggggggggaaaaagccaaactttttgaaacaacgataaacagcgggaaagataccatcataataactgttttattggctgaaagaagaaccaaaaattctttttggttaaccgtaaatattttcttttagccggcataaaccgggggggaaaaaatgcccaaccctttttatttttcacacaaagcctttttgg

SEQ ID NO: 78249 - DNA, 176 bp, Glycine max
  Clone ID: PAT_MRT3847_41675C.1
gctcgatcgctcggactagtatctaatatctatctaactaaaatcacttccctgctgatctcctagtcaagctaggtataatccgcccaggaggttgttttttctttttttctggggctggtcttcgtagatgtcggtatttgctaaggtttcctttagctgatgtgtgtattttt

SEQ ID NO: 78250 - DNA, 622 bp, Glycine max
  Clone ID: PAT_MRT3847_41676C.1
tcgaagaagcgacgcaaaaagttgaaaataaaaaaatagtctctcccgcgcccacacttggaccaatcgctatcgtaatggtattggtacgatgcgcttcgcctcttcaatgttgcgactgaggccgtgagagggttttgccaactcaagttgagattctacaaacatgatgcactctgtaaagggtggctgggggcagacgtttgcgcttgctaaacacaatgaatccgaagggagaaagactcggattcgccgctcaaagcaggaaaggaaggcaatggttgaatcctttataaagaagtaccaagagtcgaacaatggaaactttccatcacttaatcttacacataaagaagttggtggctctttctacacagtacgggagattgtacgtgatataattcaagaaaatagagtattgggtcctgctaagttcactctagaggagctaaacactgatcaattttttgaacaaaatccactgggttcaattgccagagatcctcaaccttttttggctgcatctttaattgaaaaccattgtgagcttgacaaacttcaggacacaaacagcaagatgatttccgtttctgatgtgtcttataccgaagctgtgcaccag

SEQ ID NO: 78251 - DNA, 1346 bp, Glycine max
  Clone ID: PAT_MRT3847_41677C.1
acggagaactgcacggaggcgagaagagggggacgcggatagtagggcccacgcttgtgattcagcaaaggacacaaagacacagacacagattgttatcccaacgttttatcctttcagctttaagctcaccgaactaactcagcattcaacaacaatggtgatgctcatccgttgctcttgcttcttcgctcgccctcgcttctcacaacctcaattctacgccaacaacaccaaacccttactcccaggaaaattagcttttctttctctaaaacctgacaagggtgttccacactttgaagatacgcttgatgggtcttctaagatttcatgtttgctgcactgctcaaagtgtaaggaagacatacaccaaaggttcccatcactgatatttgttgcgagcaatattttgatgttctctatgcctaacacagctttggctgaaacgtgtgaggctgatacctctgttttcaatatgcctatactgctggcagtagcccttattggagccacagttggagggttgcttgctcggcaaagaaggaatgaattacaccgggtaaacgagcaattgatcagcatcacaacagcgtgtcgtaagcaagccaaaattgagtcctatgcacctagcttgagttatgctcccattggcggtggtaggatacttgataatgaaattattgttaacccaaagaagcaggagctaatttcgaagttgaaaaatggaaagaactttctaaggaatcaacgaccagataaagcattcccggagtttaagaatgcacttgagcttgcccagaatctgaaggatcctattgaagagaaaaaagctgctagaggcctaggagcctcactgcaaagacagggaaagtaccgagacgctattaaataccattctatggttttgggcatctcggaacgggaaggagaggactcaggcagtacagaagcatttggtgcaattgctgattgttacactgagcttggagagcttgagaaagcaggccaattctatgacaagtatattgcaagactggaaaaggactaatctttacaccgtttaacatttcttgaaagaaataaccagtgttggattactagactttcatcatggcttgtcaccatctgtttcatgcggattttccctttcctttctgatcctctctatggaacttcagattattcagttcctatttatttttaggttggaaatgctcaaagctatatgtatttccaagattgtgtaatgttagtcctttagacgagcaagggaaatatttgtgtttatcggggaaaaaaaaaaaaaaaaaaaaaaaaagaaagcggccgctctagaggatcca

SEQ ID NO: 78252 - DNA, 111 bp, Glycine max
  Clone ID: PAT_MRT3847_41678C.1
cccacgcgtacggtactttcttgcgaaacagaagggcgaaggggcaaacacaacgggggtggtccactgaatagggggagtagaaatataagctcactatattaagataat

SEQ ID NO: 78253 - DNA, 468 bp, Glycine max
  Clone ID: PAT_MRT3847_41679C.1
ggggcccaaaaggggggccaagggttttttcccaaaaaaaaaaaaaaaatttttttttggccggaaaatccaaaaaaccccctacaaaaaaaaaacgaggttttggaaagggaaacaaacaaaacaggaaaaatgggtccaaaatggccggggcaaaaaggaggggaaaaacaaaagaccaaaacagggggaaagggaaaagtcttttaaaccgggggaccgggaaaaaaaaaacagggaaaaattctctcaggtttcagggggccccaggggggggggcccggaaacaatttggggaaaattggccccaggggtattcacccctgggccgggactgggacccagggaccccagggctgggcccccccttttaggggaacccgcgggggaaaggatttgggggcccccacccttttggaacaagggtccccccgggccgccccccagggaaaaaaaaataggggcccc

SEQ ID NO: 78254 - DNA, 664 bp, Glycine max
  Clone ID: PAT_MRT3847_4167C.1
ccaagggtaccttccctgaggtctacgtccccaccgtcttcgagaactacgttgccgatgtcgaggtcgattgcaagcacgtcgagctagccctttgggatactgcaggccaggaagattacgaccgtcttcgcccgctttcctaccctgactcccacgttatcctcatttgcttcgccatcgattcccccgattcgcttgacaacgtccaggagaagtggatctccgaagtcttgcacttttgccagggcctgcccatcatccttgtgggctgcaagaaggacttgcgctacgaccagaagacgattgaggagcttcacaagacttcccagaagcctgtagctcctgaacaggccgaggatgtccgcaagaagattggtgcccagaagtacctcgagtgctccgcaaagacgaacgagggtgtccgagaagtatttgagcacgccacccgggctgctctgctgaccaggaaagacggccacaagaagaagaagtgcttgatcttgtaaggtcaaacgcttccatgcttaattaggcggccacccagcagccgcgccctatgtatgaggaggagagactttagccatgacgaccagcagctttgacggcctcggttcattatgggtggtttcttttcacaaaggcttacaatgtgtgtgttgaa

SEQ ID NO: 78255 - DNA, 532 bp, Glycine max
  Clone ID: PAT_MRT3847_41680C.1
tgatcttaccataattgttttgctgctcgaaacaccaatcccatatcttgctcacagcatgacctatgtaaccgaacatagagatattactgttcctctgtccaatccattcatacttgacaggactatcatttgtgcttactttacaaaccacatgcttgatgatccatctcttatagagatgaaaagaaccgcaaatataccatctctgaatgacatggctatgcttttaatgagtggtacacaaatagtctgtattgctccaagtggatggtagggatcgcccagatccacacaccgggaaaatggtcaccggctccccttggatacttcttccgatgataatatgagaagacttgttgaacattctaggacaccaggtcatgcatatcctttagcgagattgtgccatgatataatgccctctacactgaacgttgatatcgatattgttgagaaaagaattatattctcttatgttgctggcatatcagtggcttcagcattaatctgtactgaaaccactgctact

SEQ ID NO: 78256 - DNA, 323 bp, Glycine max
  Clone ID: PAT_MRT3847_41681C.1
gggcaaaaacttgaaaaaatttttttggtccaagggttcccttttcccccccttttaaatttaaaggtttggggcccccccttttttttgggggggttcccccccaagaattttcccctgggctttactttttagggggcccttttgggcttttttccacccccccgggcccggggggcccccccgaatttttggggcgggtcttagggggttttcactttttctttatggggggctttttaaagccggggcaaaaaaggggaaatggggtttcctggggaaaatttttttccctttaaaattcccaaaaaaaatagggccgg

SEQ ID NO: 78257 - DNA, 226 bp, Glycine max
  Clone ID: PAT_MRT3847_41682C.1
ggggggttaaaaaaatcacctgttctctccacacaaaccaagatgtgaacacggacaaagaaaaccatggccaaagtgtataaaacagggacccaacctagggaagaggaccggctatctacaaaaaaaccatgggcacaagataaacgagagatcgtgcggcccgggctaataagatgaagaacaacatgatgttgccggggaagaggccgcaaaaccaaacaaa

SEQ ID NO: 78258 - DNA, 473 bp, Glycine max
  Clone ID: PAT_MRT3847_41683C.1
aattcggctcgagtaggctgcgagaagacgacagaagggggggggagcaaaaccaaaaacaagaacaagaacaacatcaacatcaagtttggttggtgttgtttcattttcaaataatctctctcaccatgatgaataacatggcctatcccaacaaggccttcttcctctttgtcatgttcttttctgcatctcttcaccttggcatgtttgatacttctcttgatcagcttctgcctggcctaggacaaggtgcgtttctacaagatgcaaaatgcatgcaaaggcttcttccatgccaagaatacctgaaatctccaaacaacccttctccggcttgttgtgtgccattgaaggagatgcaagaaaataacacgcaatgtctttgcaatttcgttaacagcactactctatttcagtcccttggtggttccaaggatgagatcttgaagctcccccaagcttgtggcatc

SEQ ID NO: 78259 - DNA, 997 bp, Glycine max
  Clone ID: PAT_MRT3847_41684C.1
aattcggctcgaggcaacttacgcaaagctgcagctcaggaagttgttgacaaagttcggcagcatagtggtgtactagtggatcaggcgcaacttgtatcgaaggaactgatcagagttgctattctttggcatgaaatgtggcatgaagcactggaagaagctagccgtttgtattttggtgagcataatattgaagggatgctaaatgtgttggagccattgcatgaaatgcttgaagaaggagcaatgaaaaacaatgtcaccataaaggagagaatatttattgaggcttatcgacaggaattattagaagcttatgagtgctgtatgaattataagagaactgggaaagatgctgagctgacccaggcttgggatatttattatcatgttttcagaaagatagataagcaacttcaaagtcttacaactttagacttggagtctgtttctccagaattgctagaatgccgcaatttggagcttgctgttcccgggtcataccgtgctgatgcaccagtggttacaattgcatcatttgcacgccaacttgttgtcataacatccaagcaacgacccaggaagttaaccattcatgggagtgatggtgatgattatgccttcttattgaagggacatgaggatttacgccaggatgaacgagtcatgcagctttttggtttggtgaatactctccttgagaattctcccaaaacagcagagaaagatctgtctattcagcgatatgctgtaatccctttgtctccaaacagtggtttaattgaatgggtcccaaattgcgacacattgcatcatcttattcgggagtatagagatgccagaaagatcacattgaatcaggaacacaaatgcatgctcagttttgcacctgattatgatcatttgcctcttatagctaaagtggaggtgattgactaatcgtcggcacatccacaaggtaattgaccttcgacggcactgtggttttggaaaa

SEQ ID NO: 78260 - DNA, 849 bp, Glycine max
  Clone ID: PAT_MRT3847_41685C.1
tacggctgcgagaagacgacagaaggggatatctaaccgaaatgataaaattgaaagctcctccctcagaatacataaccacatacacttcggttaatccgaaagaagctcatcggaatcgcaagacaccgccgacgacatggccgccgccgtgaccgatatggcccgccgtcacacgattagccaaatactggtcgacctcgtcaagttcgccgtcggttccgccatcgacggctcacgcagaatcatccctggtaggaagcaggtagataagatggtgccagaaggattaataaacatacccttgccaacccctttaaaggccaagaaacaccctgatttaaaggttgcaaatgacctcccttttgagacaaaaatggaggaagtgaaggaagacatgaataacctaaagcagcagtacgaagcatcaatcaaacgtgttgaagaatcacagccgccaaacaaatctgatggcggctttaaggaaatcaatcttgtgcagggcaatggaaggagggtattcattcgatctcgtctatagaatggaattttcaaaacctacactagagattctacacatccataagatagtgcaacataaaatgtgctttgtttttctattctcccctctgaccatgttagatgggaagggggataataactgggcttgaggtttgaccgtatgagcctgggtactgtcaccacttgaggtatactaggtttcttaggtcctataacatgtcctataatatcctataacatgtcttgtatgtaacatgttcaataacatctattttttttttccaatgaatatactacaatctacgccctgtatgtaacatgtcctat

SEQ ID NO: 78261 - DNA, 2013 bp, Glycine max
  Clone ID: PAT_MRT3847_41686C.1
aacaacacgtccaaacccaaaaatcatatcttccactccacaacctcaaacttctctctctctctcttcctattctaaaaatcccacaaacccctttctctattccatctaaagattcattctttctgcaatttcgatacatgggtcttcattaattcactaagattctgcataaatcatcgttttcattgaattttctgttccgatggagctaatttcaggattaccagaggatgttgcccgagactgtttaattcgggtttcgtatcaacagtttccaacggtggcgtcagtgtgcaaactctggaaatcaaaccatcatgaaggagattcacgcgaacacgaaactgaaccaactccggccttacatccaaaaccaaggaagcacccagcaggttatagcttcaagcattggtataaatcctcacccacgcgtttcttgagaacctcgtttacaaacgagaatccaccttcatcaccaccggaacttttttcgggactcccccttcaaataatgttcagctgtcagttagtgagtgtcgggtacgatctggttgtgttgggtgggttggacccgaattcgtgggaagcatcaaattcggtttttgtttataatttcttgtcggcgaagtggcgccgcggggcggacatgccgggtgggcctcgcatgttcttcgcgtgcgcgtcggattccgaggggacagtttttgttgccggcggacacgacaacgagaagaacgcgctgcggtcagcgttggcctatgatgttacctcggacctgtgggtcatgcttccggacatggaggcggagcgcgacgagtgcaagggcgttttctgccgcgggaggttcgtcgctgttgggggttacccgacggagacgcagggaaggttcgtgaagagtgcggaggcgttcgatcccgccacgcggagttggagcgaagtgaaggaggacttcttggattgcgccacgtgtccgaggaccttcgtggacggtggcgatgacgagggggtgttcttgtgcagcggcggggacctgatggctctccgtggggacacgtggcagatgatggcgaccctgccgggggagatacgcaacgtggcgtacgttggggcgtttgatgggacgctggtgttgattggatcgagcggctacggtgaagtccacgtgtcttttgcgttcgatgtgaagagttgctgttggaggaaactggagagcccagaagggttcaggggccatgtccaaaccggttgtgttttggagatttaagaaattggctttttgatttttccatataaacatgatacagttacataagcatagagtatatagtctttgttttgtaaattagcccttttcttacacattagagtttaattgatgaaaatatcctgagtgaaaaatatttttgcctcattctgtataatagtataaggtgaagattggataatttttcttcccttaatattttggtatgtttttgaaattcatttctactagattctccctttcctgtatagcaaacgtgaaaagataggattgagtctgtttttttcttacataattgatgtggtgttattcatttttgttatggagacgcagagaaggtttgtgggagtgagtttctttgcaatgagaatttgttggaggcaaatgggaatttggggcactatgtgttggaaaggatggatgagaatagtgtgcagtattgtaacaatcactcgtcttcatcaggggctgcttcatcaacataattagtaattagttattgctactctcagaatcgtgttagtcgcaattgtttcgtcgttatcatccttttcttttctttttttcaattgctacattttgtttactttatggctggagcctttaaaaaaataattcttttttgcttttgcctttccattttattgctctgaaagttgtaatttcctctgtgaattcaaatatccaaatttcaattgaggataattaatgtcaatcaatacaagagagacatagatttttttttt

SEQ ID NO: 78262 - DNA, 362 bp, Glycine max
  Clone ID: PAT_MRT3847_41687C.1
gtgttgctccaattcatcaactgaattgtgtatgcggccccaaaagattgaacatgatgacgatcatatgagagcattccagccgtcagattccgattgatcattgagaaatggagaagagacactgtgagggaagatactcaccgatgcttcaaccacacagacacctaatgcaggtgcttatgggagtgactacaatggtacccatcatcctaggtactgcagcacgtgttgtagtccgtgcatcactggccatcgtagagctgatggacattggacgatgcagatgcatgaccatagtgaccatggggaccgagaaaacgtcaccatgacgagttctagttgttgaaatggagacagca

SEQ ID NO: 78263 - DNA, 141 bp, Glycine max
  Clone ID: PAT_MRT3847_41688C.1
tcccaatcataatcttcatcatcctctattaattggtaatcttttggtttttttttttttccaaaatgagctacctaaatctttctaatcatgtcatcaaatcaaccatccttaaaccttacccaacccaaatttcccttt

SEQ ID NO: 78264 - DNA, 384 bp, Glycine max
  Clone ID: PAT_MRT3847_41689C.1
ggaaaaacgaaattgaaattagaagcagagaatggaaaatcgcattcacgtgaatagtaatcatcaagctcaaaacgtaaaactataaaaccctatgctctgaataatagaataacagaatagccccctttacatgaatcccaaggctgctatttataaaggtcactcaaagtcacagggccatattacattattatggcccaaaacgaaataaacacttaacaacctaaaataaaattgcgctctcttaattagaaattaactaagggaaatgttgctttattttccctctttaagtccacgaccaaaatccggattaagctcaatgcttcattaattcctcaaaaagcttctttcttctctttgaaaaagctccttctttac

SEQ ID NO: 78265 - DNA, 367 bp, Glycine max
  Clone ID: PAT_MRT3847_4168C.1
gtttgagcttcaattgacctaatccagggatagtgtaaataactaagcacacacgtgccatttttttttatttggtaaagtaaaagaaattatgccattatggtaatctttggaccagatgaagcctgcttaacttagggtggttctgcttgcttttagattttcctgttattgagtatgttgttaattatttttaaactttgattgtagaatatattaaaattattctttaagaatagactctaatatatcctggaatttaatttttaaaagaaaaattaatatattttggaattaattttttaaacaaatttaaatcttaaaccttaaattcttttttttaattaaatttttattgcatatttta

SEQ ID NO: 78266 - DNA, 699 bp, Glycine max
  Clone ID: PAT_MRT3847_41690C.1
ttagtttctttattttggtccttttcctatgagactcttttacatatttggtttgactgtagttgtttaaatgcttgttcaggggtttcaccaagtttagccgtgctgattatctcaagtacaagtcagagagcaagattgtgcctgttggtgtgaatgttaaggtaatgcaaatctgcaccaacatgtggatgaaatttcattgcatgttgttttcttgatgcttgaagacatctatttgtttatttatacttagatctgaatttgtttgaagcatattttttattcaattgatatttttttaaagttatttttagcttatctaatttacaagttccttcttgtggtcttgcaacttctgggtgccatgggccactgacaaaccgtaaacctggacaagcttttctatccagtgctactgctactgcttagatgtcttgttacttggaaatagtgggctttgaccaaaatggttgtgttcaactcaattcaagtttcttgattgctttactcgagtattaaactatgatgagtttatctcagcttttatgaaccatcttgaatggaaagaatgtcatattttgttcgtatttcattgttgttgatgattttttttagcgattgataattgcttaatgagaaagttgagattaaaatccgatcagacagcttaccaccattgtatctccccttctgtcg

SEQ ID NO: 78267 - DNA, 355 bp, Glycine max
  Clone ID: PAT_MRT3847_41691C.1
tgatactacaaaatgttatacagtgcagttcaaggttgttgttatttggtggatataattgtgtgcattattatctttttcattggaatttttactttcggctttggattcctcctttacctcatctatatccccttcagtatgttcgttcattgggccatttattccgtcagtaacgttgttcgtggaaggtgccagacatgtcatcaacattatcaataataatttgattattcttcatgtctcgaattaatttcgaaaataactgttgtttttcttattgaatcttttttgtaaatcaaaattttcaaaatgataaaatctttaagaaaaacatcttaaactcaaaaaaaaa

SEQ ID NO: 78268 - DNA, 1259 bp, Glycine max
  Clone ID: PAT_MRT3847_41692C.1
gtgtttcatcgtattacgagtagtatgttcctaaccaaaacaatgaaagctacttgcatttaagaacccgagaccaagagtggccatacaacaaagcctacatataaaattagagagaaggagagcgtgagtgtgtctgtgtctgcgcttcagaaatgtggcggtgcgtggctcgtgctattcgcgtaccagcttcggagagatccatacctaatcaccaaccacttagatctcacatttcaagatttttctctggtggtggtggtggtgggagctcctcgtacaacgtggtggatcacaagtacgatgcggtcgttgtgggcgctggcggcgcagggttgagagccgccattggactttcggagcatggcttcaacactgcttgcattacaaagctgttcccaactcgttcacacactgttgcagctcagggtggtataaatgctgcattgggaaatatgactgaagatgattggaggtggcacatgtatgacactgttaagggaagtgattggcttggggaccaagatgccatccaatatatgtgtagggaggcaccaaaagcagtcattgagcttgagaattatggattgccattttcacgaactgaagatggaagaatataccagcgtgcatttggtggtcagagcttgaacttcggaaaaggtggtcaggcatatcgttgtgcatgtgctgctgatcgaactgggcatgctttattgcacactcgcgagttatcaaccaatcctcccttggtggaaaatgccaatctgatgaatggataacttccgggtcccccattttttctgcaaaagaaaaagacacgaaaccacctttagaacttaaactccttattcctcttgaacttgccctccttttcttgcatctttctcttcttcctcttctcattctctgccaccatgtcactgaaatcctcacgctgatttcgtaacttctcttcctccctcgcttcttcatactttcttgtgtaaaacattttccatggcatctttagcctctggcaggtcctggacatcagtgttaacctcataagtgtgtgtagtttccagcaaagttcctggagcaattttttcctccttctcttcaagtacttgataaagaggcttttcaggttccttcctctgctgcttacgaaggtcaataacatcaggtgtctccactccagtgggagtgctagacaaactatcaacagactgaataccagcttcaagttcctcctcctccatttcttcttcttc

SEQ ID NO: 78269 - DNA, 669 bp, Glycine max
  Clone ID: PAT_MRT3847_41693C.1
ccacattaaccaaaacaccatcatcacaccaagaaaccacgatggatccctacgatgaaaagaggctaagagacgaagtgatttaccttcactatctctggcaccaaggccctccacgcccaccgccacaaaaccccatcacccaccgtccatttccctcaccttcgcaaccctacatcccccaacacacgtggcacgcgcgtcctcatcaacagcaacctgcgcccgcccgcaccagatcactccctccagcaatccccaccaccaccaccacctgcttcaagaagaaaaagaagcataaaagaaatacccccgaaaagaatgtttcacaacccgacccgggcccagaatggccgtgtccggttcggcctgagccaagcccaaccaccggttgggcccagcccaagcccaagcccggttcggcctctcctcctcccgaggtggctccagaagagaaggagaggctggtggcaatgcaggctcagcacaaagcgtgcaaggctttgaaggagtttctttctaataactatgatgatgatgatgatgatgatgatgatgatgatgagagtgaatgcgaggagattgaggagttctttctggtgctcttcttagaggatcatgaactgagagggtactaccagaggtgttatgagaatggattgttttgct

SEQ ID NO: 78270 - DNA, 1044 bp, Glycine max
  Clone ID: PAT_MRT3847_41694C.1
tacggctgcgagaagacgacagaaggggtccttcaaaaattcacctcaccttttcttttccctactagcaccgaacccgaatttgaaaaatggatctacacgacccgaaccggttccgcaaccgcaaacaaaccctctcctcgcgggaacgcttcctcggcgtcccatcatcccacgcgcctcgaatcgaaaactcttcctcctccgccaccgacgacgacgtcgtcgttttctccaacaacgacgacctaatcgaagacgatgtcgttttctccaacaatgacgactccaccgaaccctcttcttcttctcaaatccctaatcgccaccacaaccacaataaccaccacaaagccttcgcgttcggtccctccgacgcttcgttcggcatcctcgccgcgctgccggagaacgaccacgcctcctcgaacggctcgcacttcttccaccacaaaccctcggtttccgtctccgtctctgtctcgctctcctcgtcctcctcctcctccgccgccgcgcgcctcattccggcgatcccgaagcccccgccggagcggactccctcctcctcctcctccctcaagttccaccagtccgcgccggtgaacgtgccgcttatgccgatgagaagacaccaccgccgcgacttcgatgacgacgacgacgcgacggaggagatgctgccgccgcacgaaattgtggcgcggaattctgcgcagtcaccaatgctggcttattcggttcttgaaggagtagggaggacgctcaaggggagagacttgcgtcaggttcggaatgccgtttggcgccaaacgggttttctcgattgattgaattatgaagaaaatgcttttagattttcggttttttctgtttcattctttagatatgtttttcttttaggaagtgctaaaaccctaaaacctcgattgattgtaaagttgaagagttggtgaataatggctcagtgctttattattgtttgattattgtatatctcttatgcaataatttatttttgtggtccataatgagctctattgg

SEQ ID NO: 78271 - DNA, 296 bp, Glycine max
  Clone ID: PAT_MRT3847_41695C.1
tttgtttttttttctgtttattcgaatgttaactcacaatctcaaatgaatatcaccggacacctggtacggccagttctgactgatgcatgccgcccaaatgatatatgccatttccagcgaactacttgtagctcacttgataatccataatatttcgatctataaatggctattatgaattgaagcgaagaaagatgatagcatcagtcgacaagtattacatttaaggaagaatactatctacgaagacacataatgcaaagtacatacgtgtggaaaaaaaagtgtatata

SEQ ID NO: 78272 - DNA, 339 bp, Glycine max
  Clone ID: PAT_MRT3847_41696C.1
gacagaagggggagagatgtactgtccaggtcaatcatattcgttgagttgaacacaggggtcaagattctctctcttgggtgatggacatggtatgctgaaactgatgttgtacctgaagctctcagcaaagtcattcaagttggctacacgcatattgactgcactagtgcgtacaagcatcaagcagagattgggtctgctcttaagacacgttttgatgatcgtgtggtgaagcgtgaggacttatggatcacttcgaacatctggtgttcagatcatgcatcataagatgtgccaacagcactgtgtaacacattacaggaattgcagcttgac

SEQ ID NO: 78273 - DNA, 287 bp, Glycine max
  Clone ID: PAT_MRT3847_41697C.1
agcgttcgtttgctgtactcaccatttcgaccagctgtggacatagcagaagcatatactgggatgatagcagtgcttacaacatttgatgcatcatatttggtcatcgttggtcatcccgagaagctgctattgaacaggataatgctactcaaggatacttcagatgaaatcccaatcactaaatatgctagtgttatgcggagttgtgaacatgaatgtgaaaactagcagcgctctgtgatagacttacttcatagtttgctgtttatgctttacaaattgat

SEQ ID NO: 78274 - DNA, 198 bp, Glycine max
  Clone ID: PAT_MRT3847_41698C.1
cggagacctatcaagagcacgaaaaagtgagcgattcatatcacaacctcgcttagacaaacaaggtttggccgttttgcctggggaatatgccaatctagcataaacacctaaaagggttcaatttgttcattatggagactcaaattggcaaacagaacaaagccactatttggtagggaaaattgagggaagcaa

SEQ ID NO: 78275 - DNA, 344 bp, Glycine max
  Clone ID: PAT_MRT3847_41699C.1
tccactcgtccgacgacttcaaaaagacctccttttggtgacaacaaaaatgggagggggaattcacactaaatcagactcgtatgttactcagcaacatcatgtatcactcttcaccttctcgttcccctacactacttacactctactacgtccatagcccttctaaccacttcatttcataaaatttcttacgtttctatccccatagcttccccacaccaccatttacactactacctcttttcctccatccaccacttcccaaaaatcctccactctatctcttacttcagttacctcacaaatccctacaacaattcttttctcttctccttctcctc

SEQ ID NO: 78276 - DNA, 245 bp, Glycine max
  Clone ID: PAT_MRT3847_4169C.1
gcgcaagttaaaaccagcttttggggaagctaatatgagaggttttacaaattaacttatacataagctaattttagcttatgagaaaaacttatttcttgttttcttctcttataagtattcatgacccagcagaaataccctgcattgcttttagattgtttcttgtgctgctatatataaactgctgaaccgtatttacgtttgtacgactcacatttgcttttgtgaacagccaagaggtt

SEQ ID NO: 78277 - DNA, 449 bp, Glycine max
  Clone ID: PAT_MRT3847_416C.1
acgaggggcaagcatttcggttcttgaaggagaagattaaaactgcaaggctagcgctcacagatgttacaccagtacagttgtaagtctttctttttctttttttctgacctagtggtctcaactcaatcatgctttaagttgttgattatttgaagataaaaaagaaaccattctcctaagatgaccaggatagctgaaaaaatatgaagctctttgtcatgaaactaaatcatgcatgttttaagttattggttattaacaaaattaaaataaaatccttctcatagtatgaccagagcagtttcaaattctttgacaaggaaggaaatatattatctatatcttagaatttgggagtggatatctgctgctggcatggtccaataatcaattacccgataggctcaacaactactagataggatagattctatgtcaacatctta

SEQ ID NO: 78278 - DNA, 382 bp, Glycine max
  unsure (1)..(382): unsure at all n locations
  Clone ID: PAT_MRT3847_41700C.1
gcctgttccactgcaaacggcttgaacacgttattgttcttgcatagggcaatgtggtgatcatgaacaatgagtgcagcattgcaagtttttacacagccagcgccacagagacatgtggattgacatgccactggaccacacaagcacaatcgcagatggtgcacggcatttcaatgtcgatgcaggtagaggtacagaacgtctccgtgcgatgtcaggangattcacagcttcatattggacagcttgtctgagtgtagacgttggttgaacatcatatgcacacaacatctgatggcggataagtagcttgagacattcgaccaggtgtcatggatctcctactttcagcgagtgtcacactcttgtcagctaaata

SEQ ID NO: 78279 - DNA, 240 bp, Glycine max
  unsure (1)..(240): unsure at all n locations
  Clone ID: PAT_MRT3847_41701C.1
cgtaagnctcggnaattcggcttcgagggtaacatcgaactgaactaatgtaacaatagatgtttgaaacttctaagaatattgtcattaacaatgctacctattattctatccatctttagccaaggtgagtagggtagctattcacaggtctcgaggagattgggttgattatgcttgagatgctaacacttggctggtatggtgaaaaaatctcctttttatgggatcaaggatctt

SEQ ID NO: 78280 - DNA, 470 bp, Glycine max
  Clone ID: PAT_MRT3847_41702C.1
atcaaagcagatatctttgaggacatgaatggagtttcctcttcagaaatacagctttatctggacactctggacgacaaatggaccaaccaatacaagaattttgactatgttgtaatcgcaggtggcaaatggtttctcaagacagcaatataccatgaaaacaacactttaacaggctgccacaactgccatggaaagaatttaaccgaggtgggatttcgaacacgcgtaaccgcaaagcattgcagcaggtttttgacttcatgacacacttcagaacacaaagcggttgtcttcttcagaaccaccacaccagaccactttgagaatggggaatggttcagcggagggtactgcaataggacagtgcccttcaaagaggaccaggttgaagtgagttatgttgattccatcatcagaagcattgaacttgaagagtttcacaagactaagaattcaagtgccaa

SEQ ID NO: 78281 - DNA, 988 bp, Glycine max
  Clone ID: PAT_MRT3847_41703C.1
cgaggttattataaactctgaagtctgggatctgcgcaagttcagactgttacgcagtgtaccttcactagatcaaacatcaataacattcaatgcacgtggtgatgtaatgtatgcaatcttaaggagaaatcttgaggatgtaatgtcagcagtccacactcgtcgcgtcaagcatcctctttttgcagctttccgcacagtggatgcgataaattattctgacattgcaactatccctgtggatcgctgtgttcttgattttgcagctgaaccaacagattcatttgttgggctgattactatggatgatcaagatgagatgtatgcttctgccagaatctatgaaattggtcgtcggaggccaactgatgatgattctgatcctgatgatgctgaaagtgaggaggaagacgaggacgatgatgacgacgatcctgatgttgatcctctgttaagccctggtcttggtggggatagtgggagtgatgctgatgacatgagcaatgatgatgatgatagtgtgagtgatctggatgaagatgaagatggagatttcattttggatgatgtagactttgatggaggacctggcatattggagattgtgacagaaggtgatgaggaggatgatgatagtcagctacttgaatccctaagtagtagtgacgatgaggattttgtgggtaatggctttggttattaattttcaatcgaggagaagctgtaattatttatttcttcattatattcattttagagcgaaatgttaattttggctcaaaattttgctgttttcttttacctttttatgtcctctgcgattttatgatgctgaaagggtctagaagcgcagttgtatataataatgttagaaaagccgatggcctatgatctttcttttctgcttcggatgttggactaaagatgtcaatgttcgtagtaacaaggttatagatgaagaaagagtatattccttaacttgctt

SEQ ID NO: 78282 - DNA, 296 bp, Glycine max
  unsure (1)..(296): unsure at all n locations
  Clone ID: PAT_MRT3847_41704C.1
agagtgtctaatgttcttttgggtgcatatgcgcgcaatggatcantggaagaagtnaatcattacatctttcaacacattncaagaagggnggttgtcccaanctanaagacnttggaaatccccatggaaggntatgtgaattggcaaaaaatggatgaggctattattaccatgaaagagctttggctagatgaaagattgccattggaggccgncacatggattntgtnagccattgnagagtatttggngaaagatggnaatcccaaatatgcaaccaggtatattncggt

SEQ ID NO: 78283 - DNA, 410 bp, Glycine max
  Clone ID: PAT_MRT3847_41705C.1
gggggtgttgtttttttttttttttttttttcttttgctttttttcttcttttttgtttcttttttttgcccccaaaacacattgtcttataaaaccaatactgggggcatataaaaacctaaaccctctaactcccgatattaaaggggttttttctgtggggggaaaaagccaaccttagtttaggctgaattttttgtggggcctgggggggcgacttccccccttaaggggcccaaaaaatgccccacgctcccccaaaaaagagccaaaaatttctcttttggcccccaatcccccttaccaaagctccactttccaatgccctgggaaaaaaccctcccacccccccatcctttcctttggccctggatttccggtgaaacccccttttcgcctctccccctgg

SEQ ID NO: 78284 - DNA, 407 bp, Glycine max
  Clone ID: PAT_MRT3847_41706C.1
cttatactttttttaattttacattgctaaacattaattgtattaggggacaaaaaggatggagtgaagacctcaaacaaaaaactatctcatcccctaccccatttgactgaccgtacaggggaatgggatgaagacactgtaaacattacttacaatacaatattgaccgaagagcgtccgctcgcatatgttctaagcaagggccccattcatacacaggaaacgcacaacttagatgacccggaagagagacactgtgcaatctcttaacttgagcaggcttgacctgggatctctatctactgaaaacgtagagctacacctgacgaggctatggtgcaaatggcttgagtgcggcgacatacaataacattgcacactggtggagatgtgacatcagtatc

SEQ ID NO: 78285 - DNA, 149 bp, Glycine max
  unsure (1)..(149): unsure at all n locations
  Clone ID: PAT_MRT3847_41707C.1
gcngcacgcgtacgtnagctcggncnttncggctcgagctcgangccgnattgcgctttgattctnncnatntaactggacacaattttncnttcncnaattnagatttctacttcctatnaacctgaacaagttcgcannggggctat

SEQ ID NO: 78286 - DNA, 252 bp, Glycine max
  Clone ID: PAT_MRT3847_41708C.1
caatcacttgctgacgacaagatttagcaacttctggagttcactccgacgttggggcgagtcgcgccttttgcacaggggatactggcgcatttccctcgccattaaacacctactacattatcacggaaagattctcaaatccaaggaccacaaacctatctactaatctctccacaatatcaaagaacacctgacgctatcatggatcatatccctgcttttaagagatacacaaaacagcatcaccaa

SEQ ID NO: 78287 - DNA, 366 bp, Glycine max
  Clone ID: PAT_MRT3847_41709C.1
gcgacacctcccatgattgcatatcagaacgagcaccagttatttatacacgccttggttaagagagcggaaagcgagcaacaggaggctaaaagagtaaacaggatctatagaggatgacatgggtcggtgagacaacaactacctgtttgagagaagacagctgtcatgagagcgatcacttctgatagatagactgacgagatgaacgatctaaatattacagacgatagacaagtggcagctacaattacagatggccacacatcggcaacaggacataacactgtgactaccattgaacgtcgaaatggtactgctaagtagactataaattaaatagcatatctggttgctcggtatcga

SEQ ID NO: 78288 - DNA, 1227 bp, Glycine max
  Clone ID: PAT_MRT3847_4170C.1
cttcgcttgcctaaccttggatcctcggtccttggtttggtccggttccgcgtttggccttcttccgggaccttgaccaatgaagaatgcaaagggcaagggagcagcaagggcctcaaaagaatcactgaagcccgttgatgaccgctgttacaggaaataatgtagtgatggaacatatatctctgttgttttcagaaaggttggaaagcggaaggcttccggtaagcctgggagaagtagtgcaccaaagaaggagaagaaggccaagaaagaccccaacaagcctaaaagaccacccagtgctttctttgtgttccttgaggagttcaggaagacctttaaggctgagaatcctaatgtgaaggctgtatcagttgttgggaatgcagcattagggtttttcatctgcttcaatggggaagggaacagggagttttggtaagagaaggaacaagactcacactctctgtgtgaggtgtggccgccgcagcttccatctccagaagagtcgttgcgccgcttgtgctttccccgccgcacgcactaggaaatataactggagcgtcaaggcaatccgcagaaagaccaccggaactggcaggatgaggtacttgcgtaacgtgcctcgccgattcaagagtggcttcagagaaggtaccgaagctgcacctaggaagaagggagcagctaccactgcataaacctgtcaaagatcgttgtttgctgggtacggacttacaagaatagattgcttttttgtgcttatggcaagtattttggaacaattatttttagagtctgattgctactttgtccttcatttaatttgtagttgctttatatttcaacaagatcataagacttattgattattcagtcggctatgttacatttatagtttgtggtttaagcagttttcaattagtgaatactggatagaatgaaagacatccctacctggctatcccacaatactattctaggcatttgttatgaaatttgccatagtcataacgagagagctttaatttgttatgggaagttagtttaggtaaacctggtttgcttccgttgtgactgcataaacggttttcttcacttgtttcacaatgtgtatcctaaaaccaattcttctgatatattcctcaagtcaaaggcagtttctacgtttcttttatcatgtatgtaactttcatagtaaactgatttgtttggatgtctatg

SEQ ID NO: 78289 - DNA, 310 bp, Glycine max
  Clone ID: PAT_MRT3847_41710C.1
gacaaaataaactttctcaatagatatttttacataaacaaagacttggagattgaaccactaatacttgcttaatgctcaaggctatttttcaatcatgtcgcctcatatatgggtaatatataaacttattttgagactaaatgacgtctaaagaatcccggcccctacttcactaaatcctcgggtttcctgggagtgttttttctttcaacgaggcaacccttatttaatgcctcgcgtgtacatccaaaacaacatccagacaactgggcgttttaaataaagatgacttccacttccggacctt

SEQ ID NO: 78290 - DNA, 406 bp, Glycine max
  Clone ID: PAT_MRT3847_41711C.1
aatactctcccctcacacttttcgtgttctccgccaccctcttttctttctccattttttcttcagcgcctttgctacttcgcaacacaccacaatggccaccaatgcactcgctggcacatctctctccatgcgatctctccttcctcaaacacaggcatttacctcaatttctggcctgagatctgcttcaatttccagctttgggagaaagaatgtttcttttagcttgcagccacgctcgattcgccttaaaatttcctgtgctgctaaaccagagacagtagagaaggtgtgcaaaatagtaaagaagcagctggctatgcctgaaactgatgttgtgaccggggagtcaaaatttgcaactcttggtgctgattcccttgacacggttgagatcgtgatg

SEQ ID NO: 78291 - DNA, 1101 bp, Glycine max
  Clone ID: PAT_MRT3847_41712C.1
tcgacccacgcgtggctcgagctcctttccgcattttttctttgtactccttcgtcttctcaattctctttgcatatttgctcatccctcccttgccttctccattttcactctgcgcctttgcatttcagcagcacaccacaatggccaccaatgcattcactggcacatctctctccatgcgatctgtcattcctcaaacacaggcatttgcctcaatttctggcccgacatctgcttcaatttccagctttgggagaaagaatgtttcttttagcttgcagccacgcttaattcgccttaaaatttcctgtgctgcccgctaaaccagagacagtagagaaggtgtgcaaaatagtaaagaagcagctggctatgcctgaaactgatgtggtgactggggagtcaaaatttgcaactcttggtgctgattcccttgacacggttgagatcgtgatggcacttgaggaagcatttggtattgccattgaagataacagtgcacagtacttcgatacggttcaggaagcatcaaaccttatagaagtaatcgttcagaagaagattctggacagtgcacagagcatcgctactgttcaggatgctgcagatcttattgaagaaatcgttcagaagaagttcttagagtaaacatgtacctgaaggtttgtgtaaaacatgaactcatcatagtctccatgccgatcaatatttatggtgtggggcaattctgagtctcgagtgttttagttgtgaactctgttgcgtgattaaaacaagtctgagaagaaaaacaaattagtccaaccttttgtttgtttctggaagttagttatatcaagttgtgtttttgcattaaggggtttttgtcaatgatatgctaattttaatagatgtagatttatgtcaatgatattgtatgttaattttattcagtctcgtatctagctgaataattaagaattatactaaaaagataaaaaaatatttctgctagacaagcactagttttatatactttagtattgcggggtagtttagtcccaagtgttttatatatttactgcaagtctgtaacctaaccaataaagtagtttttgt

SEQ ID NO: 78292 - DNA, 862 bp, Glycine max
  Clone ID: PAT_MRT3847_41713C.1
gtggcatttgaggactatgggcttgagttgtatttgtaccgcacagcatatttagtggaccttgatcgtgagaaagttggaagagttttgaagcttgactctatcaagaacggtgactcttggatggggatggacgtgttggtcttcaacacgtggcactggtggacccacaccggaagttctcaaccgtgggactatgttcaggtgaataataagttgttcaaagacatgaaccgttttcttgcgtactataaagggctaacaacttgggctaagtgggttcaaagaaacgtcaatccagcaaaaaccaaggtcttcttcttaggaatttctcctgtgcattaccaggggaaagattggaatcaaccaacgaaatcatgtatgagtgagacacaaccattctttggattgaagtaccctgcagggacaccaatggcttggagggtggtgagcaaggtgttgaaccagataactaagccagtgtatttcttggatgtgaccactctctcacagtacagaaaagatgcacatcctgaaggatatagtggtgttatggcagtagattgcagccactggtgtcttcctgggcttcctgacacttggaatgaacttttgggtgcagttctttctgattgaaaacagtcactatgataactactttgtttattaggtccaacttgttagaggaaaaccaattgttttcaactgtaggaaatatttaaaataggcattttggttcttgtaattgttggggaataaaagggtttgatgctcctgattgtaaatgtagaatattgatttggcagaaaagaatgccttcaattgttccatataccattttgaattttgaaaaacattgtgg

SEQ ID NO: 78293 - DNA, 334 bp, Glycine max
  Clone ID: PAT_MRT3847_41714C.1
gggcaattattaacccctaggtctttaattaggggggggtttcctcagggcacgtggagaacatcatgtttatcaaaataacatattttaactttaatttaacaacagcatacaccaatttttctgtttccttttgaataaacccacagtccaacataaatttcaatttcttattatttcttaaaaagactcaaatgtacccaggcattacccgggaaatagaaatacttccattattatacacatttcctttccccaaaaaccttaaataaaaaaaccaaattatttgttcccttctaaacaatcttttaatagccctctttttataaatttc

SEQ ID NO: 78294 - DNA, 1174 bp, Glycine max
  Clone ID: PAT_MRT3847_41715C.1
ggaattcggcacgaggaaaatttatctaaaaaaaaagtatcacaatacaaattctgtgtatttttttcaggactatgggcttgagttgtatttgtaccgcacagcatatttagtggaccttgatcgtgagaaagttggaagagttttgaagcttgactctatcaagaacggtgactcttggatggggatggacgtgttggtcttcaacacgtggcactggtggacccacaccggaagttctcaaccgtaggatcattgtttcaaattttgaacgtagttgccaattccaatggttaacttaatttttggtcctgtgaaaaattcatgacaggtgggactatgttcaggtgaataataagttgttcaaagacatgaaccgttttcttgcgtactataaagggctaacaacttgggctaagtgggttcagagaaacgtcaatccagcaaaaaccaaggtcttcttcttaggaatttctcctgtgcattaccaggggaaagattggaatcgaccaacaaagtcatgtatgggcgagacacaaccattctttggactgaagtaccctgcagggacaccaatggcttggagggtggtgagcaaggtgttgaacaagataactaagccagtgtatttcttggatgtgaccacactctcacagtacagaaaagatgcacaccctgaagggtatagtggtgttatggcagtagattgcagccactggtgtcttccagggcttcctgacacttggaatgagcttttgagtgcagttctttctggttgaaaacaatcaaatcagagatgacaactttgtttattaggtccaacttgttagaggaaaaccaattgttttcaacagtaggaaatatttaatttgacattttggttcttgtaattgttggagaataatagggcttgatgctcctaattgtaaatgtggaatattaatttggcagaaatttgccttcaattgtaccaaataccattttgaatttcgaaaaacattgtggaaagatgtggtggctcattgtaaagtagtttatgaatgacccttttctaaagcattgaagtaatattgcagtaacagaatatgatgtagtggtgttgattgaggagttgtaaatttgagctataataagttttaggtaaatagtccccttctgtcgtcttcctcgagcc

SEQ ID NO: 78295 - DNA, 342 bp, Glycine max
  Clone ID: PAT_MRT3847_41716C.1
ataatatcacaagagcatgtaaggtgatctctatcagaaaatgatttagcaataaaaaaatatcacatgggccaatgggacagcaggtatatcttacagcataattctaacttgtaggacaatgagttacactttcaacatttcatctaacacttatgtgttcaggtggatggcataagggtcaagagatggcaatgttggtggctggctgtagtttggtccatttggcagatgcaaaacagagttatcttctccaatgcacttttcaatggcaacaagttgctcgaggatgctatagtcttaatgtggacttggctaagaaacatggagaaagattttaca

SEQ ID NO: 78296 - DNA, 1066 bp, Glycine max
  Clone ID: PAT_MRT3847_41717C.1
accagctggaattaccggggcaatgctactgacattcattaaaggcccagaagttaagatgctgtctttccatgtaaaccttttcaaccaccgaaacggccatgtcgtacatccacacgctacttctggccttatgaccatatttggtgctctcgcttctgtcgcaagcaacgtctcttatgccatgtggcttatcattcaggcaaagatgagtgaaagatacccgtgtccttattcgagcacagcgttgatgtccctaatgggggcagtgttatccatttcgtttgctttttgtgttgaaagggatttgagtcagtggaggttgggttggaatatcagactattgactgtggcttatgcgggtatagtggtttctggagtgatggtagccgtgatttcgtggtgtgtacgcacgagaggtccactgtttgtctccatttttagccctctaatgcttgtggttgtggcctttgctggatccactattttggacgagaaactataccttggaagcatcattggatcaatgttgattatttgcggattatacgtggttctttggggtaagagcaaagagatgaagaagaatcaatctggtcagtcagaaagcacccataaatctgacacaattgaaataatggtcaaacctcgtgtagaagataaaagcaacaataagagcaataccctcattaactctgtaaatgtgacgggggataataaagattcatggaaaaatggacgtgaaagcaatgtatcacatatacactgctgcaaggtgcaagaagaagtaacatctcagaatgtctcacgtacctaaacacttcatacatgtaagacacttattgtacaatgtagatagcttgccatccttttccaatcgccccaacatgctgtgggcttttttttgtattgttggagaaggaaaggcaaggctagattgacttctatcttttgtcttggtccgtcccgtatgttgtaattggtttcttaaacccaaattgcaaaaaacaaagcttgtattcaaccaacttcaacttaaacaaatggatctgctgagaacgccatc

SEQ ID NO: 78297 - DNA, 549 bp, Glycine max
  Clone ID: PAT_MRT3847_41718C.1
cggacgcgtgggataaattggaagctcattacaatggtaaaacgagaactaactgggtgggattctactttggagaacattaagatttgtttttagtagagacaccaaaaggaattatatcattttcaaagtgcatataaaaaaaaaaaaaaaaaaaaaaaaaaaaaaaaaaaaaaaaaaaaaaaaaaaaaaaaaaaaaaaaaaaaaaaaaaaaaaaaaaaaaaaaaaaaaaaaaaaaaaaaaaaaaaaaaaaaaaaaaaaaaaaggggggggccgttttaagggtcccaagtttacttcccggggctggcaaggtaaaactttttttttggggccacaaaaattaaattcagggcccgggttttaaaaccgtgggggtgggaaaacccgtgggttccccaaattaaatcccttggaaaaaaatccccttttccccaggggggaaaaaaccaaaaagccccccccagatgccctttccaaaaattggccccccttaatgggaaaaggggacccccctttaagcggcccttaaaaccgggggggtggggg

SEQ ID NO: 78298 - DNA, 379 bp, Glycine max
  Clone ID: PAT_MRT3847_41719C.1
ggtcttccgaattcgaagttaatttgcaagatggctaaggaaaaggctcagatcaacattgtggtggttggtcatgtggaccctgaggagggcccctctcatatccgagctgaagaatcctgttttggattaagaccctagggagcatccggtttgaagtaatgtgcatcttggctcaggtgtgtgccagcattctcgcgacgtgtggggtatagagccttattgagttggagtaattttgaaagcgtaatgctgtctatctgctctagaaatactagctctcacatctggtctttaatgatgatgttcatggaaccagcttcctcggtttgtgctgaacttgatgcagctttcacgttggttgggggtaacttagctg

SEQ ID NO: 78299 - DNA, 508 bp, Glycine max
  Clone ID: PAT_MRT3847_4171C.1
ggtatttaggtcatctatctgctatggaggcatctgttattttagttacaagctactctattgacattattattgagatgtgtgtttgaataaatactaattttctggacatcatcattgcatatcataatcttaattggccttgtgtgatattgatttaagggtgattcccctgtaaatttttatctgaaggagaaaagtctaactatattttgtggtttgagggtatgctagagctatggagttgagtatcatgttcttgttggatgtctagcatgaaatataaaagtcgagtaattgttgatgatgggaaatttagtgaatttttccaagagagcttttttaggacagcctgagtcttaaagcctaggtaggcatgtggaggaaattagacttgggctgctgctgggcatagaatagtttgaaagttcacacaattttatggtagcaatattcattggttatcttttttttctcccagaaaggagaaattggaaatgtagtttgc

SEQ ID NO: 78300 - DNA, 905 bp, Glycine max
  Clone ID: PAT_MRT3847_41720C.1
accaaaccaaaccccattttattcattctcaaaacttctctctagctagctagcaccgttcatcactcacattattctttctgagaatgcattatcaagcagcagcggcgtcgtgggggagctacgtggcgggggccccacggaacagcgcggcggcggcggtggtggtgggggacccactggagcggatagagaggctggcgtcggagagcgcggtggtgatattcagcgtgagcacgtgctgcatgtgccacgccatcaagaggctcttctgcggcatgggcgtgaacccgaccgtgcacgagctggacgaggatccaagaggcaaggacctcgaacgcgccctcatgcggctcctcggaaccccctcggttgtccctgtcgtcttcatcggtggcaagcttgtcggaaccatggaccgagtcatggcttgccacattaacggcaccctcgttcctctcctcaaagaagctggtgctctctggctttgaaaatgcacccaccaccaattaacgctatctaagtataaataaacaaaaaaatatgagagagggtaaaaaaaaaagaagaggttttattaaacagtgtttattgttattattattatcaatcagaggaaggggatgaatgaagtggtcttttgtgagtctcttcttcttccattcttccattttggatacactactactactacttgcagcagcagcagctgcttctaactgacttgttaatcaatcttttctttctttcttttctttctttcgagtttcatgctctttttattattattattctttttggtttttctgggtgatacttatttgggtttgttatggtttgcttgtttttgtaaagatagaaggcgaaatgcaaaaaaaaaaaaaaaagttaattttaaaaaaaaa

SEQ ID NO: 78301 - DNA, 373 bp, Glycine max
  Clone ID: PAT_MRT3847_41721C.1
tccggctgcaagaagccgccaaaagggcacacacaaaatctgccatacacaaaagactttatgatgtttgagtgtgtcttactatggccgctgcagtgctcatacaccttgtcacggatggagaagatcataagggccacctcagcatcacagaagccagagagttcgtaaccctttttgagcgaaccattcctcctgtatgcaaatgtcactagacggatgatgttgtactcaatcctattcaggtccagctttaacatacccacgttgatattaatggcttgctttatatctgtttgcgtacataaatcaaactagtctttttagaattccagatcgaaaagacataattgcgtatacagtagaatagatt

SEQ ID NO: 78302 - DNA, 257 bp, Glycine max
  Clone ID: PAT_MRT3847_41722C.1
actactcgcccggggacgcgagggcggacacgtgggggatgttagacaacagagacggaaagctctcccaccgaacgaaagggtgccaaaagaccgatgtgccgaccatggcacagatggaagaagaccaaccgatggagacgatgacaaaagcaccagaggcaaatgatcataacgaacaaccgatgagcagtgagtggttcgagacacaaggagcaggcaaagccaatccaaacaagaatgggctggatgatagg

SEQ ID NO: 78303 - DNA, 506 bp, Glycine max
  Clone ID: PAT_MRT3847_41723C.1
cccggggggaaaaacccaaaaaaaaggtttaagggggctatttcccgcctttgggacaccagccaacgaggcgcagaaggccaaagagggaccccccccccaaagggggggcttttccccccccccagaaaaaaaaaaaaaaagggggggggactcggccccagggggaattaaaaggggttcaaaaggggggccccccgggggaaaggcctgggggaaatcctccggggccaggccgacatgggaaaaaaaaggaaatttccggccccccaaaaactggggccgggggggggaaaacccccggggggaaaaccccccccttgggcaaaaaaaaccccgccccccaccattgaaattttaatttaaacccaaaaggggccccggggtccgaattaaaactcccataacacccccggaagggggctcgggcccattctgggtcaaaagcccaccctttggggcccggccttaggcattccaaaaacaaaagatttcccccccggggg

SEQ ID NO: 78304 - DNA, 410 bp, Glycine max
  Clone ID: PAT_MRT3847_41724C.1
cttaaaaaacacacttaaacatttgtactcttaaaaataagtgaatgtgtgacctgcagatgatcactttagatcaaagatgattgcttgtcaataattattacagcaagagccgcaaacagagtagtcaaagaggcatattacaaatacacacttaaaacatcttaatcttaaaatataagtgattctatgaacttctgcagatgatcatttaagatcaaagatgattgcttttccataggtacaaaaagagatgaaaactgaaaactagtcaaaaaggcataatacaaatacaactaaatataggaaaaactgtagaatcattgttaccactggatacatagccaagctcaacattgcagtgagactactaataaatgcacccaaataaaggcgatggctacacaagt

SEQ ID NO: 78305 - DNA, 333 bp, Glycine max
  Clone ID: PAT_MRT3847_41725C.1
agaaatagtgttataagcccaggatgaccagcttcatgatgtcctataagggaacaataccagtccaccatgtcaccactgcaagaattagccaactgccaactcattgaacccaggcaatgtggtatccaaaagcactcggggaatagaacgataggctaccccgacttattgtcctatcctactattgagctctcaatgctgatatgaacactggtaacatacgcctggtacaaaaggatcgctatccctgcccaatggcctctgcaatctataaagtgtcttagatcaccttgctggatccaacgacggtaaccattgtatgcaaatgac

SEQ ID NO: 78306 - DNA, 320 bp, Glycine max
  Clone ID: PAT_MRT3847_41726C.1
ggctcgaggtaaaatcacaaaaaatttgtatactttaaaatttgcttctgtaaaacctcaaaggggaaaaaaaaaaagaaaaaaaaaaagaaggaaaaaagaaaaggaagggggaaaaatggaaatagatgttaactgagggaaaatgaaaggacggtatacaatgtagagagaaaaggggggccggaagcatagggggttagggctggggggcttaatgagtgggctgggctcagagggggtgcgtggtgctcactggggggtttacagtcgggatggctgtagtgcgggctgtgttaatgaaggggggaaagaggggt

SEQ ID NO: 78307 - DNA, 203 bp, Glycine max
  Clone ID: PAT_MRT3847_41727C.1
cctaaaaagcaggctgttgccccgcccaaggccaaagctgcggccacgactgcaaagcccaggtctaagcccgctaaagtctccgacagtaacgctgcttctaaacccgctagtaggaagacccccgtcatggcctcgcagaagccgatgactggcttgttgaaacctatcagcctgctgtcgccaacgaagaacactaaggc

SEQ ID NO: 78308 - DNA, 1184 bp, Glycine max
  Clone ID: PAT_MRT3847_41728C.1
ccacgcgtccggtggggtgcaagccttgtgggaagtttggggattaccctgttgagaggtgcttgaagcagatggatagggcctataactttggggataaccagattttgcagatgtatggattcactcataagtcacttggtagccgtaaggtgaagagggtgaggaatgatactagcaatcctcttgaggttaaggatgagcttggattgcttcatcctgctttcaaagctatcaagctctcttcttcttgatatggtcgaggttttatgatcacaattgtgggaaattgctgacaaatgtggctgatgcaactacaattatggtcgtgctgtggttgtggttatggcaatggcaatgacaactacagaaaattgcagtgaggtccatttttttagaaatcttggtgatgttgatgttggttacttttcctaattcttactactgctacttgatattcattcatctgctaccacaccactatactctttgctttgcagttgcgtatgatcatgatgatgatgatagtgttgaaaactgtaatctttaatttatttttgcttttaagttatagtgatttttttttaaaagaacatatggtcttcttctctactctgtccttttctaatccgggacttgttagttcattttgtggataaattgatagatgaggaattgtcgaattgagaataattcctttctttgtttttggatgaatttgttgtccttgctatatctttgctcgtgttggttaaagggtcgaggaaggaatctcttgttagtaacggtttcttctgcttctttgatacggaatctgtttactaatagttcggaccgtcttgtcattgagatttcgctgaagacatggttaattaaaatggcaactaagatagagcttttaagtgtcactgagatagaataggtggttgttaattaaaggattttatagttataaacattgcagatattgacaggttaacttgcagatttatgtgtgaacagatttgccttggagaaagctttcgaaggatgcaatgaatccaatatcaattcctcacttttccatcatattttgaaaagcacacactcttgactcttgtgtagttgtattccagtaccttctattttcaactttcgggtgcccagccaggatgcccctgcctgcatagacctacgccctaccc

SEQ ID NO: 78309 - DNA, 178 bp, Glycine max
  Clone ID: PAT_MRT3847_41729C.1
agccttcgaagcatgtagtcaattactgttgtatacctagcttactgccattcattatattctcaacaaggtatgagggtgtagtttggtttctttctgattgtttaatcagtagaaagataaagaataagaaattgtagactttactgggtagttatgtggatgaagaaagttcagt

SEQ ID NO: 78310 - DNA, 561 bp, Glycine max
  Clone ID: PAT_MRT3847_4172C.1
gccaataaaacaataaaatagacttttgccattgagcaataaaatcatggtttgtgctctaaactaaacatgctaatacaaaattcaaattatttgcatgttggaaaaacctttccaagcatgccataatgaagttgttcatagttacatattttcattccgtttcgagctctatcttaatgtcccgaattgtaacaagtcctttcccatacttaggtaccaacgtcaccaaaatgctatcatcattttcagcttctaagtcttctaacaaatccgttaatcccactctaaagcaagttttgatcttcttgtttttgtgcacatgtgaatgaggcacactcacaaagcttcccgcaaactcagtattactaggtgttatcaccttgtcatcttcatcattgataaatacatcaaacttcaccgctttattcctatcaaactcaatcccatcaatcaccaacaccttctcctctttttccttctcctccttgctcctcaacagctttggccttttaacaagtgtgcttaccttttgatccaaagttaaagggaacttaacac

SEQ ID NO: 78311 - DNA, 550 bp, Glycine max
  Clone ID: PAT_MRT3847_41730C.1
gtcattaaccgctaaccgaggtctttcagattttctaaaactaaaagagattgataagaaagaagaccgctacgatgagaacgttaacgccttattcgaagagaatggactctaccgtaagaagcttccaaaggattcaacttctcttatgagagctgtatccgatgctttgtattttaacacgaatcatcatgcagaaattcaggaaattttgctaaaaaatctgacacaattgattgctagtgataaattaacacccagactgagtagtttccagggtaatagtatgatgttgaaggatttttgtaacaatccacaacttccaggcttcgaaaagactaacctggaacttatttctctactcttcaaggttagagtggtgctctacaccacgaatgaagaacacattctcactgctactattttcaaccataacttccctaatactatcgaacttttccgtactaaaactagtcactataatgctgtgtttactaaagacttcatcgaaaaatcaggtgtttgccaaaacatcctacttaatcttatc

SEQ ID NO: 78312 - DNA, 255 bp, Glycine max
  unsure (1)..(255): unsure at all n locations
  Clone ID: PAT_MRT3847_41732C.1
gaccgcacgnnngtccggtggtgggtgaatcatttaatcccnnttgggttctaggatgggaaanntgatggagaatannggcatgnccagtggagagaaatnnattacannagataaatgngtgtaaggggataaatnncctggggaaaatccattgnntttctgaggggaatnntatgctannattttttgggtatcaagtaccannaacaagaaactgtgaagnnggagcagagnnngagtattnnattcccg

SEQ ID NO: 78313 - DNA, 305 bp, Glycine max
  Clone ID: PAT_MRT3847_41733C.1
ttcgaccacaacactatccgttgggggggcttttaattaaaaaacagtggggccacccaacccactgcttttttttcataatccaaactcccggccatgactcatggagcttggaatttctgaagcgtccccctttaatcgcgataccatttgcgccactggatggaccgccacccccacttcaggacgttcaggctacaacttgattgggttatttcctctcaggaactttttccccccgaccccatcgtggctatgaatccacaaaatcctttttggtaaaatcaccgctatggggaaaactg

SEQ ID NO: 78314 - DNA, 400 bp, Glycine max
  Clone ID: PAT_MRT3847_41734C.1
gaatggaagcaggcttgatatattcatatccatgatacgggagacgcgctcgagttgctagatcagattaacgatgagcgtcatgatttactagaggtcgcatatcattgtggaagcgcgcaggagactaaggggcatgggcatgtgcgtggggagaaaagcaatactggcgagctatgagtatacagggtcagatagtctagggggcgccgttaggagctgggtacaattgtgatgccaagggtcccatgcacccaaaaggacttttcaagatcccacgagagattacgggaggccggttttccatagagttgaggtacctgctggtgcttgaggcgcaccaggacatgacggggtattacggacccaagcctacaggcatgaaacctaactggacgga

SEQ ID NO: 78315 - DNA, 477 bp, Glycine max
  unsure (1)..(477): unsure at all n locations
  Clone ID: PAT_MRT3847_41735C.1
ggggnnattgcggggagactgagcactcgaaacattgcggtcaccgctactcgcgcggcgccttttttttttttgttgaatttttctttgaagagcctatatgggagcttcttattaatacatggtgggtctgaactacctacagctaattacgtagctactgcccacctattgtataggcatgatataacagataaatggattaacctttgcttattgataatgggacattatactaactattgatgctgaacttctacgtctctatgtgtacactgactctagaatattttaatgctagtgatatatatacaaatcttttttatacaaacctaaagattctgaataggaaccttttattcatgtactagaagtaatttgagcttgccatgacacatctatctgaatgcatcgtatggacttccttcacactcgggatactagagtaattatgggaagttctagaggtggcattgg

SEQ ID NO: 78316 - DNA, 239 bp, Glycine max
  Clone ID: PAT_MRT3847_41736C.1
gatggattgcacattgagtacgcaaggtcgaagatgaggaaaagctaagttgttggactgcaaggattggcagtgtcatctcctgtctgtcttcctggaggctaccagtaggcatccctgcacacgtagctgcgtgtagctgcttgctaagcgtgagaatccagaacggtgctaattgtcctgtatgccattatacaatactccctcttttaaatcatgagatactctcttcgtttcaa

SEQ ID NO: 78317 - DNA, 221 bp, Glycine max
  Clone ID: PAT_MRT3847_41737C.1
cacgcgtccgattcatttttaatttatgtgaacactgctgttcattcctagttgtactgtcttgtgccttaatgcgaaccacacccatactgagattcacaccgagtgcaattacaaagacacctaatttgttcacgagaacacgagtggtatctataattggatttggatacccaaatgtgtaaaatacgaatttaataccaacattcatgttcctaaat

SEQ ID NO: 78318 - DNA, 363 bp, Glycine max
  Clone ID: PAT_MRT3847_41738C.1
gggggaaacaggaccaaaaacaaatccttttttgaataaaaaaaacacgccttttgcaacaactaattaacgttccgggaaaggaaacccccccaaggaactgaaagggaaggacatgaacccaaagcctcacatatccattaggactaaaacttaatccccctaacattaaaacatatatagagcccttaaccccccccttttttttttttttttgaaaaccattaacccaaaattttctttcactctctaggcccgggccaaacccttggatagatatcaagaggcctaaccgggcaaaaaaataaaaccctcttccaatttattaacccttacccccttgggaagggggttccacaaggg

SEQ ID NO: 78319 - DNA, 1347 bp, Glycine max
  unsure (1)..(1347): unsure at all n locations
  Clone ID: PAT_MRT3847_41739C.1
gaaaatttgtttgagatggctcctatgagggatgtggtaacttggaacacattgattactgggtttgcacaaaatggccatggggaggagtcactggctgttttcagaaggatgatagaagccaaagtagagcccaatcatgtgacatttcttggggtgctatctggttgtaaccatgcaggtttagataatgaaggattacaattggtggatttgatggaaaggcaatatggagtgaagcctaaagctgaacactatgctttgttgattgatttactggggaggagaaacagactcatggaagccatgagtttgattgaaaaagtgcctgatggtattaagaatcacattgcagtgtggggggcagtgttgggggcttgtanggttcatgggaacttggacctcgctagaaaggctgcagagaaactgtttgagttggaaccaaaatacgggtagatatgttatgctggcaaacatctatgctgcatctggcaaatggggtggtgccaaaagaatcaggaatgtaatgaaggagaggtgtttggagaaagaaccagcttgtagtcggatagagttaaggaatgcgagacacgagtttgtggccaaggacaagttccatccacaggttgaagagatatgtgaagtgaacagtaaattagttcttcattcgaaggatgctggatatcagccttatactgattacccttttcttcctgattatgatgatgatttctactttagttaggtcagtatactcgcattgatgagacatggtgattaccaaggatactactcttcaatcatactccactcagtaagctgtgtgagaccatctaataagagtgtggtagtttccatgtagagaacattcaaatgtcccttcaactcaatgatacaagactcatgtattggagtgaacatgcattggaatgtgtattaactgcaacacaaacacacattaatgcgtgtttgggagccaaatacaatggatgcaactggtattttttccaatccaacgagagttacttctatgtttgattcctcagacgccaagcggacgtttagaagctttcaagaattaatccaaacatatcctaagtaataactgaatgtgattatatttggattggttagtttagtggccttcactgtacttggctactgctgttgccgttgtctcctcatgtcttgagacgcaatactggcattacatttgtattgaaatttcaccctatggctacatccaagtacaatcatttgattaactgcagctattgatttggatagatcagaattatgaatantcactgcaagcaattaatgagcctatcacaatttattgccggc

SEQ ID NO: 78320 - DNA, 382 bp, Glycine max
  Clone ID: PAT_MRT3847_4173C.1
gatcaccccatgcaaggaatcaagactattcgctaaacgagaaacgcgatgaataaaggacctgtaatcgccggtcatgctctactaggcaagcaccgcacccaccactggacgatctcggcaatgcgtggaggaatacgaaaacgacggatcctattacacgaaaccagggtgggtgctcgggggcggtgggaatgcgctcttgatacagactggagaccaaatgctatggtgtgagtctatacatccacaaattctgttccttgacatctcaggatgggtcggatgagggcttcaaagataactaagtgccattgatcaccataacacacctaccatgcttgaaagcattatgaatgggtgtctggctgctcaatcgctc

SEQ ID NO: 78321 - DNA, 1496 bp, Glycine max
  Clone ID: PAT_MRT3847_41740C.1
cacgcgtccgcctcgagctcagggatttggcgccgtttgactctgtagtggaagcacgtttgggatggagccggcattgttattagggttggaagaagaggcgaaggtggtggttacagaatcatcatcattatcatcgtcatcaagcgcacatagattggtcccttggttgaattgggatgagtggctcttcgttaaaaatgctctcttctccgattctcctcactctgtttcctctgctctcaaacgaatatctgcttggcgaagtcgaggttccttgccagttctcatcgaagtcactacttccatcatcgaaattcaactcaaagacccctttttcagacatgatgaatggaatgacgcttctctttcggaggagatgcttgctatgctgtattgcatggccggttccttgccagttctcatcgaagtcactgcttccatcatcgaaattcaactcaaagacccctttttcagacaggatgaatcaaatgacgcttctctttcggaggagatgcttgctatgctgtattgcatggctatcatgaggcttgtgaatggtgttgttgagaagacacgcaagaaagaagtgacgtcaatagcagtggcagccgatgcgattggtattccgcgcatgctgattgatattcgccacgagggatcacatcgtgagcttccgtcacttaagattgttcgtagtgcttctgttaaggcacttgattggttaaaatcttattattgggaacctcagagcaaagcaattccttttcatggtgaaggaatagcaaatgtcaacaaagaaattaagtctaagattcgtgaactagctatctgcttgaaagtcaatgggagtgcccagtctagttcctcactactagcactccggttgcattccgcctgttcccttgggattccacgcgtccgcggacgcgtggggttgaaagctttaagttcctccgagttggaagagaatgcagatgatgcttcaattggtctaaccactcagaatgttttggctgattggatgcttgtcatactcaaattgtgcaataaaccagaattacttctgaaccttcttaaggaagtccttgatatgattgagagtcaggaagatatgaagtataaagaagataacccaaatatgggggtttcacactcgagaactgagtttaggctttcttctttgtttgcatggcttgttggaattctcagtaaagttccttctgcggcagcaaatatgccaaaaagagttttgcatgaacttcttcgtagatgtcttctagtatcacaactttgcaacaagcagcttgtggattcagcacttcagcttgcagagctgatgaacgacagctacttgatggagaaagttcgaaagttctctcttattagtttgtccaatttagagagtgcagatgatgaaagccctttattgactttaaagaacattttccacattggggaatcctgctcggagcaggtaaaaagctagcattagt

SEQ ID NO: 78322 - DNA, 254 bp, Glycine max
  unsure (1)..(254): unsure at all n locations
  Clone ID: PAT_MRT3847_41741C.1
gtnanattttatccaattganattttaaaaatgactgggataaacttnaganttcaattattganattgaataagtaaacantttaattggattggtcgantggtatcaaaaaantggagtactaactcccatttcttatttnntattganttnnccgatcaccttgcttngttatncgacacattnccnntntgattncaaaattnncnggaaaantttgantctntttttacangcgaancaatcctactcc

SEQ ID NO: 78323 - DNA, 614 bp, Glycine max
  Clone ID: PAT_MRT3847_41742C.1
acgccacgcactccaggtgaattgctttttgggcgtaataagctcttgtctcttatagttagcgggagtcaaacaccacgaactggaggatctaagaaacaaattacaaagatcttgaaatatgttcttcagttatattcctccttttcctcagagattgtttctgtgttattggagtatttgttgaaagctttaagttcctcagagttggaagagaatgcagatggtgcttcgattggtctaaccactcaaaatgttttggccgattggaagcttatcatactcaagttgtgcaataaggaaccagaattacttctgaaccttcttaaggaaatccttgatatgattgagactcaggaagatatgaagtataaagaagataacccaaatatgggggtttcacactcgaggacagagtttcggctttcttctttgtttgcatggcttgttggaattctcagtaaagatccttctgcaacagcaattatgccaaaaagagttttgcatgaacttcttcgtagatgtctccttgtatcacaactttgcaacaagcagctcctggattcagcacttcagcttgcaaagctgatgaatgacagctacttgatggagaa

SEQ ID NO: 78324 - DNA, 266 bp, Glycine max
  Clone ID: PAT_MRT3847_41743C.1
cggagaaggagctcagcaacagcgcaaagacgctctaactgcagctcgccgcccgctagcccgcccgcacgcatgcgcatatgctcgctcgcaccgccactgatgctcgaggtggcgatttgtcgtccgtctgttcgcgttaactcactagctccgactcggatacgaacgcacactctcacattgggaaaaaaaaaaaaaaaaaaaaaaaaaaaaaaaaaaaaaaaaaaaaaaaaaaaaaaaaaaaaaaaagaattcacaacaaa

SEQ ID NO: 78325 - DNA, 274 bp, Glycine max
  Clone ID: PAT_MRT3847_41744C.1
gtttccaccctttctctctcacaatggccaatacatccttcttctttttcttcatgttactcgctacctcctctctcgcccaatccccttcagcttcccccgccgcaactcccaaagcctcgccgtcgccaccacaggctgccgctcccaaagcctctcctccaaccacctcctccgctcccccacccaccacctccacccctcctccacccgctcccgctcccgtttccaagaccgctccggcctcttctcctccgtcccccacccctgtcct

SEQ ID NO: 78326 - DNA, 145 bp, Glycine max
  Clone ID: PAT_MRT3847_41745C.1
gggaaaagaatgaaatctcagtttatacccactaaaactgaaacaaacagatttgaaaacgcctgtaacaaaaaatcaacatctttaatacgctagcaatgaatatatatggctttgcaaaggcgagggggaatggaactgcatc

SEQ ID NO: 78327 - DNA, 368 bp, Glycine max
  unsure (1)..(368): unsure at all n locations
  Clone ID: PAT_MRT3847_41746C.1
ctcatgacgtaggcatgatttgaatttggaggatgtgttttttgtctcgttccgatgcagcttagtttttttggttttcttctgcttgtccgaaaactcgacaagtcgtagttggtagttccaataccattaaagggtcgattcgctgtggcctgcactcttcagaagagatagggaagagatctatctactgagattaataattaattttttaagagaaattagatttaaacattaattatatctgaaattttctctacaaaaatgaattttatttggacaacanaagagaaatacttttgtagtataataaaatacagatatgtgcgttaaaacatgatttctttgggagttaatattattaactt

SEQ ID NO: 78328 - DNA, 615 bp, Glycine max
  Clone ID: PAT_MRT3847_41747C.1
acaaggtggcagaggcagttattgtgaaacagaattacactacaaattgctcagcgttatattggataatgaatctactacaggtccctatcactataggcagcaactttttatgaagtcgtgcttctatactaaggtcagagtgtgatagcatcaaacggtgatcagcaagcacgttggcatgtacaccaattgattctatattgcatgtgtggcataatttctggcataattggtggcttgcttggccttggtggaggattcatcttggggccacttttcattggactaggaattcatcctcaggggaggagacgcccaataacacaaagagtctccctattgtaaagcagagttttttattcaaaggttgtcgtggttctcggtggttcagatgactaggtgaattgctttaaggaactttgtgctgaaggacatcgggacacaatgatctgataggatgtgacattagggaataagttactatattaattgtatgagatcttggacacccttgttttgagccgaaataatttattaattatttgaccaagttttattttgcccttacaaaggtgaatgtgagccttctactctcttgaaaggcttgtattt

SEQ ID NO: 78329 - DNA, 162 bp, Glycine max
  Clone ID: PAT_MRT3847_41748C.1
ggctcgagctaaaatgctgggttctctggtcaagggaccaacgatatttcctgatctgcttccgggtacggaaccagtactgaggccagcgacaagctgcactaccacgaagtacgaagatgacacataccacactaggctcttgggttcttgtattccgga

SEQ ID NO: 78330 - DNA, 409 bp, Glycine max
  Clone ID: PAT_MRT3847_41749C.1
ccacacccgtccgccaacgcgtccggatcgggttacctggaaccagggggatgaaaatgaaggtcctggtttttttcgtggttccaattttggaggcatggcaatgccatgcgtccgatttgttccttttccgaatgaacactggttttggggcccgtcctccggaggggaaatgcccaagttggaggcttgttgtggaagcccacacaattttgggttttgagaccattcctgaagagggcgttgaagcaccaaaggattccatccatggcgaccattttagatcagactccaaaccagttaaccaacaggtttactttattgccagagacctggaagtccatccaagggccacatttgtgttcagattagatggcaccgtactttttattttcccttactccaaaaa

SEQ ID NO: 78331 - DNA, 413 bp, Glycine max
  Clone ID: PAT_MRT3847_4174C.1
tcacacacacacagggggtgtggtcactcaattaaacataatcactactgatcactgatcaccacaaacactttcatcatctaaacctaacattttatcccatggttacctccaccgtatatgcttcaccatcaaaataaaaaggctcatcaacccaatggacctaaccttaccactgccaccatcttctgaatagaaacatcaaggcatgtcatattcacttccactaccctttctccctgatgaactcctttcttaaattctcctccagctcccaatgaaaacttctgttgcagtttaagagccttttgcaagataattttgcccctcatctattatccctactttaattataaaacaccttcacctgtcgtcttcaatcatccatttcacccatccacatgatcatattt

SEQ ID NO: 78332 - DNA, 569 bp, Glycine max
  Clone ID: PAT_MRT3847_41750C.1
cgacgctgaaccaacatcttctgacgatgcaacacttgctgaccccgaaaggacgtacccacgcgtccgcccacgcgtccgtacggctgcgagaagacgacagaaggggctctctgatctgattcaattgaatgggccttaaccttttcgttctccctccatggcaatggctaactctttctctgccgtgatcctccaccgccctcccatcaccgccctcgatcttctcctcatcttcctccataccctcttacagctctcacccgacaaagcaaaaaaagcaaacttttttttttctttctgttttcggtttttttttaaggatacaaaaagcagaacgaaaatcgattttgattgtggttccggatacccttttggattccgatggcgtcggtgttcgtgtaccacgtggtgggcgatctgacggtggggaagccggagctggcggagtttcacgggagtgagacgggggagtctgcgattagggcgattggggagtcccctgagggagcatacccatttggaagaaagaactcaattggggattgagaacagtgacatgagacagc

SEQ ID NO: 78333 - DNA, 472 bp, Glycine max
  Clone ID: PAT_MRT3847_41751C.1
tctttttcactcccaaacccaaccactggaactttcttccctctcattatcttcttcctttgttgtgtttctcaaatcgcctttattcagtatcctatgaggtatgcttttctgctgatccatggaaagtccatcagtgtggatggtcacacgctgcttctgtcccttctgaggaaccggaagccccaaaaggtaacaaaagggtcccaagacatgaaaggagagctctggtggagccttttgtgaacaattatagagcacagaatgctgggaaattcccaagaatatcagatacccagaaacaagtgggtggcagttactatgttatcccggaaatcattcaggagctagaatataaatctaaaatgaattcttcaaacagtgtgaagaagatttttgtggaaaagcattttgatgagagtaaactactcaccactgaatctgggaatgttcctccggttatattggattg

SEQ ID NO: 78334 - DNA, 424 bp, Glycine max
  Clone ID: PAT_MRT3847_41752C.1
gcagatcttcgtgaaaaccctaacgggtaaaacgatcacgttggaggtggagtcttcggacaccatcgacaacgtgaaggccaagatccaggacaaggaaggcatcccttcggaccatcatcgtctcatcttcgccgggaagcaaatggaggacggtcgcaccctcgccgactactacatccagaaggagtccacgcttaacctagtcctccgcctccgtggcggtgccaagatgcgcaagaagaagacctacaccaagcctaataagatcaagcacaagcactagaaggtcaagctcggtattcttcatttctacatggtcgacgattctggaaatgtacagaggctccgataggagtgccctaacgtcgagtgcggagcctgcacctttatggctcaccactttgacctgcactactgcgga

SEQ ID NO: 78335 - DNA, 319 bp, Glycine max
  unsure (1)..(319): unsure at all n locations
  Clone ID: PAT_MRT3847_41753C.1
ccatccagccacgcatgcgtaccagcgccaaacaagccctaaatttctcttttctatcttattcttcctttaaccagtaanagaggatcatgttcaattcaccgcaagccaatgtcctaacacaaatcgcctccaagaatctgcgaaagtgaactgcgacctagcacgccatancatcccaccgacaaagtacaacgaacgaatgcaacagcagaatccaacttgaaaggatcaatcagtattacaactacaaactctcccggaaggtacgctacacaagccattcttatggaactcgaacctgtaaccatggacagca

SEQ ID NO: 78336 - DNA, 347 bp, Glycine max
  Clone ID: PAT_MRT3847_41754C.1
attttcccagtttgaccttttactagaacctctcgtgaaatcctttcattctcaatgtccttatttgaaactttcacaccatcaagaagcaagagcttcaatcaaagatccaaaatccaaccctctttcaagcctccttggagatttttcatatttgacgatggatacaaaactgctccaacagcaactattccaggcacatacaaacagtgaaggcacactccgaacaaatgaatgcaggaaatcgaaaatcctagcgcactccctttgatcttcttcatcaaatcaatcggaaatatgacagcccacatgctaaaaatagctattctaaattttatcagcagaaa

SEQ ID NO: 78337 - DNA, 182 bp, Glycine max
  Clone ID: PAT_MRT3847_41755C.1
aaaaaatgggtgttaatgtgtatgcacgcaatcgcatagtgtgggtggccaaccttgcctggggaagggtagcaacatcgctccggggtgaagacggagatacttaatgtctagaagcatggatgtatggtaaagctgaagttgtctaagaaggtagatgactactactcatgtcgagcaca

SEQ ID NO: 78338 - DNA, 342 bp, Glycine max
  Clone ID: PAT_MRT3847_41756C.1
accaacggagactatactgtttattgacagaagatgttgacgctagcttctgccggtaacacgcgccggaaagataacgagaggcaccgctctcaggctatggcgactacgtcccttgtctcccgcaaccatttgtccggcggaatcacaggcgcggactccctctcaatcagactagggtcgaggatcccatatagtaacttcatcagatcgcaaccagggacaaagctctacttcaccgtaagcgcaatttctgaagtataaccggatttcacttgcttcaacgggaaaccagaaaagggcaaacttgaactggcagggaagaggaaggaagaaacggca

SEQ ID NO: 78339 - DNA, 207 bp, Glycine max
  Clone ID: PAT_MRT3847_41757C.1
gatccccaatcagagtcaaaagtcagggggcacagtgaaatgctgttgcttaagcttgcgaatctgaatcacataatcaatcacccattcattatacatcatgtcttcggtgaccacaatgacgctcaagagttctgacagctaggctttcgaggtacatgaggaggttgcgcacgaatcgcagactcttaagcacatgatcgaaga

SEQ ID NO: 78340 - DNA, 251 bp, Glycine max
  Clone ID: PAT_MRT3847_41758C.1
acacattataagagttcctgctaattcatctttaagactaacacaggcgactaaagcgcagttgttttcgttatggatgggtcaaggaaatactaagcatttgttcaacgaggccaaagcaaaatgagctagtcaaaagttcagtttgatcagataaaccaactttgtctattacaataatattcatgagtatgaggatttctatcagttgaaaacatacttgcaaagatgacatatgcttttgccacatc

SEQ ID NO: 78341 - DNA, 409 bp, Glycine max
  Clone ID: PAT_MRT3847_41759C.1
tcctttttttttttttttaaccaatgaatattagagacatctacttttatagtgagaatacggactacaaattgaatacaaatgacatcaatcaaattaggaacatacatttaaacggaaagagacactgatatgttcgcctgtgtcagatgttgaaactgtgtggacacttaggctcaatgcatgtaagtgtctatgtagtacaaactgagtgtcaatgacatatagcaggtgtataactggcaagttccaactaccgagatgctatctggggtatagaggacaagctactgaaccgattggggttggaatctgatcatgagactcgactagctatgtcattcaagtgcagaccatctaaagactgaagtgtactttcgatctcatcagggctaccgaaagtaacgaa

SEQ ID NO: 78342 - DNA, 177 bp, Glycine max
  Clone ID: PAT_MRT3847_4175C.1
gtagacgacatgcatgtttaggtatgaatgtcgtctacttgtgatagtgaaggtatttacacgtacaattgcaaggttaaaaaaagaaatggaattggaaacagtttgcgtaggttcatacctaaacatgcatgtgacttttcatcaatctcaaaataaattcttattttattttaa

SEQ ID NO: 78343 - DNA, 424 bp, Glycine max
  Clone ID: PAT_MRT3847_41760C.1
agcaagcgtacggcaacacgtctcacattgtcacagtatcagcatctggactttgatccttgccgtactcgagagactagctactctatgcacatgcagttatgatatacacacctagttcatttatatatctgaaatcacccatttcttagagcttactattcatagccataatgaaagtcaacccttaattgacacttggtaatgttccaagaaagaagttacttgggtatggcccttattcatcatgcgttctgagacaactaggttgcacgatgaagcgtggctggaagcaaaccatgggatggcgcaagagaggtccacaatacagctatgattttatcagttatcggcttaacttcactgatggtccttcaaacgaccatattcatatgcctccttatcttgcatgaatatatatctt

SEQ ID NO: 78344 - DNA, 766 bp, Glycine max
  unsure (1)..(766): unsure at all n locations
  Clone ID: PAT_MRT3847_41761C.1
attcggctccggtgatctggctcccacacattatgtcccttctatgagtcgacatccattaacaggagattggtacccagcaattaataaacctgctgcagtccttcactggcttaatcatgtaaatattgatgctgaattcatagtgattcttgatgctgatatgatcttgagaggcccaataacaccatgggagttcaaagctgctcgtagtcatcctgtttcgactccctatgactaccttatcggctgtgataatgagcttgcaaaattgcatactagccatcccgaggcttgtgacaaggttggtggtgttatcattatgcatattgatgatctccggaaattcgctatgctatggctgcataaaactgaggaggtccgagctgatagagctcattatgcaagaaatataacaggagacatatatgaatctgggtggattagtgagatgtatggttactcatttggtgcagctgagttgaaattaaggcataccataaacaatgagatactgatatacccgggttatgttcctgtaccgagtgtcaactatagagtctttcattacggattgcgattcagtgttggcaattggagctttgacaaagcagactggcgcaacgttgacatggtcaacaaatgctgggccaagttcccagacccaccagattcctcaccaattgatctgggccaacatgaggatttacagcgagacctgctcagcattgaatgtgctaagacgttngatgaagcactaaatctg

SEQ ID NO: 78345 - DNA, 249 bp, Glycine max
  Clone ID: PAT_MRT3847_41762C.1
cggcgatcatatttctctgcaatccgaacagacccacccttctctgcaattagttgctgagttttaggtgagagaaaagtgttcggaatttcccaaggtttctgtgaatatggcgaataacttagcggtgcaacaactggttggttcagagatacatggattccacacaccgcacgcctctaacgccgggagcattatggaggaagcaagaaccagatggctccgtcccaatgagattcatgccatgct

SEQ ID NO: 78346 - DNA, 580 bp, Glycine max
  unsure (1)..(580): unsure at all n locations
  Clone ID: PAT_MRT3847_41763C.1
gtcatgatgcagaagctcgtgcttcgtagtgcacagcacggcatgcgcgcatctgcggtgctgggcgcttcttgtcgtgtcatgatgactaccgagtcctctgtttcctcctccatatcggaagtatctcctgtttttgccaaagtggcgcgcgacattccgctgaaagtggtgccgcgagccgagcgacgagcagcgcgcaaagccgctaaacactcggctgatgctgttgagaacaaggtggtgcgtacttcgtcacttcctgctcggttttcgtttgcattgctggccggtagcatctctggctccattttgtggcactttatgctcgatgatagcactaaatcgcgtgtcaaggagacactgggcgccacgttccttggagacgtctatgtatttgtggccaagaaggtgcaggagacagtcaagccctttactgatccgtcacgacagaagctgctaccagattggccgatccctcaagtgccagcagacacaccaccagtttccgtcttggtgctggatttggaagatacacttgtgcactcttgatggagtcngaagcatggcttgcgccatg

SEQ ID NO: 78347 - DNA, 786 bp, Glycine max
  Clone ID: PAT_MRT3847_41764C.1
gtacgacctcgcggttccggtccgcttttgcgggtcgtgcgtcgcgtccgaaacctttggagctagctagggttttgtcatcgaatcgaccatggaaagcattgaaatggaggaagccgcattcggcatagacgaatccaatgatgatttgtgcagttcgatcctctctcgcttcgccaactccaccgacgaaacccaccaccacctctgcgccgtcgtcggcgccatgtctcaggagctcaaagacaacaaccaaccctccactcccttcgcctacttctgcgccgcacgcgtctctctcgataaattcacctccgaacccaatcccccaagccacgtcatcgacgcccttctcaccattctctctctcgccctccccagagtgcccctcgtgcttctgaagaagcagaatttgcagggagagccattctcggagctcctttcgcgagttctcctttctccttcggcgtcggagagtgcgatcgtttccggattgaagtgcctctcgcgtctgttgatcaccagggaaagtgtagactggtctgacgtgtcccctttgttctatgtcttgttagggttccttactgattcgcgacctaaggtcagaagacaatctcatttatgtcatcgtgatgtcttgttaaactttcaacattcctcacttctggcatctgcgagtgagggagtaacaagcctacttgaaagggttattctgcttgttggtggagcaaatgcaaatgctggtgaaggagctaaggaagctcagcagattctgtatattcttga

SEQ ID NO: 78348 - DNA, 329 bp, Glycine max
  Clone ID: PAT_MRT3847_41765C.1
cggacatggcaagttttgatgacaccatacttggccgaatgaactgtttctgccgagcactgacggcctaaggatattattattatgtgaggcaatgattctagggtggatgggttgacaacgaagcaaggaatcagcaagactgcaaaaatggtccacaaactttggagcagtcataaataactgatgcgaaaaacgacccacatggtgacatgctggtgcaaaaacatgacaatgtgaaaaaaggacaattggctagcaagatcttgaactaggctgttattggaaatgctaacgatgatgctattcataggggaacagactctcat

SEQ ID NO: 78349 - DNA, 299 bp, Glycine max
  Clone ID: PAT_MRT3847_41766C.1
ccatttattccacctttaaccccatcttatttaaaaaataaattttttcaatttaaactcgtaaattaaattatctttcattatcaaaaccttcatcctttcgaacaaaaccataaatttttatcaaacatccctaaatttcatattctaacatgtttaacccaaattcaatcattccaacaccctaaacaccgaatattacatctatattctctactataaatactaaaaattgttattcacacatccaccacctttaaaaaaaaaaaatatattttctaaaaaaaaaatttaaacct

SEQ ID NO: 78350 - DNA, 413 bp, Glycine max
  Clone ID: PAT_MRT3847_41767C.1
gaggtctttttcacgaggtcctgcaatacgccgcaatactgaatttgaatcgaatgggtctgtaggggacctgacccctggatttgaagacatggatggtacacagaggagaggctcgctcagtccagagcgtgatttggtcgtccgacctcgattctctaatacacaatctgtctcaccacccaggaatgagcctcattcagttgggccaagcatcggaccaaccaccatcgaaccttctatccgactactgccccctccgccaggggggtccttcctcccccgacgcctttcggggtggtatccaccgtttttcgcagtacagctgtctttggttcttgctaaaattgctatggcactgcagccttgctcgcccttggctgtcaacccctgggtgttgtactttttgatca

SEQ ID NO: 78351 - DNA, 1075 bp, Glycine max
  Clone ID: PAT_MRT3847_41768C.1
aatccaccttccctcaattgaacttcaaggtctattactttgatcccgagatcgtccgcaacctgatctccacctctgtcagacaagccctcgaacaacccctcaactacgccagaaattatctcgctgacctcctcgaaccctgtgtcgaaagagttatatacctagattccgatctggttgtagtcgacgacattgccaagctctggagcaccagcttaggttctagaaccatcggcgcccctgaatactgccacgccaacttcaccaagtacttcaccgcagcgttctggtcggacacgcgcttcgcgagggcgttcgccgggcggaggccatgctacttcaacacgggcgtgatggtgatagatctggtgcggtggcggagaatcgggtacagcaagaggatagagaggtggatggagattcagaagaacgatcggatctacgagttgggttctctgcccccgtttctgttggtgttcgcgggacacgtggcgccaattgagcacaggtggaaccagcatgggttgggtggcgataacgtgaaggggagttgccgggacctgcacgctgggcctgtgagtcttttgcattggtccggtagtggcaagccctggactcgattggactccaaacagccctgtccgcttgatgcactttgggctccttatgatttgtacggtcacgctcactgatttgggttgctggtcgccggtaaattccccccttcactgtttttgtcacttctgttcatttaatttaattctcatttcggtcaattttattattattttgttctctcttctccttctctctactatgaacagatacatcagatatttactttacccatttttattagacttcgttacccagtccatcatttgtattctatgatctttctgttttgtgcttcgtgctctagaaataaataagataaaaaaaaaaaggaatgggtggatcttctattttcttcttgtacgtatttcaagtatgaactaagcttatgcttaactttctgtatggtgtaaagtatatggacattaggatataataattgtgctttattaagaaa

SEQ ID NO: 78352 - DNA, 344 bp, Glycine max
  Clone ID: PAT_MRT3847_41769C.1
ttttggaaagttggtactcccgcacggacagttccggaataacccagacgtaccccgcgtccgtagaaacagcgtgtattaaaatgtatttgtccttgtcttcttggctgctacaattttggtagcaacgcgagtgtcatgcataccaaaggtgcatctctccggatctatgtcaaagcaaaaggtgcccgtactccggaggtgaaatgcgcaagttggaggcttgctgtggaagcacataacatctttggctttgagaccattcctgaaaagtgccttgaagcaacaaaggaatacatccatggcgaacaaatattgatcagactcccaaacagttaacccac

SEQ ID NO: 78353 - DNA, 430 bp, Glycine max
  Clone ID: PAT_MRT3847_4176C.1
ggaaaaaaaattttttttttaccccctaaaagttcccccttggaaaaagaaaaccccctttttgggggggggggggggggggaaaaaaaaaaaccttttaacaaaggaaaatggttgccccttttcctccgggggtaaaacaaaaatttaccttttgtttttggggggggggaagttcccccctggggggggggggcccaacatttatgtttgggccaatctttcccaaaaaccgcttttgggtttgcccggaagtaatgggaaacaaatgtttgaattacatggccaaattttcggtaaaaccttggtcactggctgaccccaacgggggtttccttaggaaagaaacttgggccagggccttttactggttgagccccgttattctgggggaccctttgttccaaaaaccaacccccccccaacaaaa

SEQ ID NO: 78354 - DNA, 1690 bp, Glycine max
  unsure (1)..(1690): unsure at all n locations
  Clone ID: PAT_MRT3847_41770C.1
cagacttacatgccttgttcctctttcatttttctccacaccgtttcttgttccttctgatcctgcggacattgtaaatttctcttactaagcagtacatgccaaaagaatatccccgagtatgaataaaaaaatcttataaagaaggatatgataacttatgtctccgagtatgaggcaattgcaaaggaaaaattgccaaagatggtttatgacttctatgcatgaggggctgacgatcagtgtactttgaatgagaaccgaaatgctttctcaaggattctgttccagccgcgtattcttattgatgtaagcaagatagacttgactacaactgtaatgggcttcaaaatatcaatgcctatcatgattgctccaacagccatgcaaaagatggctcaccctgaaggagaattagctactgctagagcagcatcagcagctggcacaatcatgacactatgacaatcgttttcttcaagtgtctgtgattaaagacagaaatgtggttgcatcagcttgtgtcaagagctgaatgagctggttccaaggcaattgcccttactgtcgacactccaattcttgatcgtagggaggctgacatcaaaaacagatttacattgccaccaaacctggtgttgaagaattttgaaggattggatcttggaaagctggacaatggttttgaagaattttgaagggttggatcttggaaagctgaacaagactagtgactcttttgctgcctcttatgctgctgaactatacgatcggtcactcaactggaaggatatcaaatggattcaaacaatcacttctttgcctattttattaaagggtgtacttactcctgaagatacaatgatagccatacaagctggagctgctggaatcattgtttccaatcacggagctcgccaacttgactatgtccctgcaactattatggctttggaagaggtggttaaagctacacaaggaagaattccagtttttctggatggcggaattcgccgagggacagatgtttttaaagcactagctcttggagcagccggtgtattcattggtagacctgtggtgttctcattggcagctgatggtgaggctggtgtgagaaaagtacttcaaatgcttcgtgatgagtttgaattaactatggcactaagtggttgtcgttcactcaaggagataactcgtgaccatgttctcacagagtgggatcgtccaagattttctcccaagttataatatggcaggactccaccttcttctatattctaaaataggagggattttagaataacctttgttcttatttcatgctttagtagaaatcttatgagtgaggcgttagtcatccattagtaattgctacttctttattcactgtacaaaataagtttttacttgaactcatttcattgcacttggtgcgatttggtaaactctagaaacatgatagcctataaaatgtacttttttcttgacaaaagattaagttttatgatcatggatctcccatttaggtgcgaaacttatacaaatcttagcttacctttgttctgatttactgtggaaacctttgtgttccctgggtgatgggattgcaacttgtgcttncttaattaattttcatcttttttggtctgaagccttttctaatatctatttggttacttaaacaggt

SEQ ID NO: 78355 - DNA, 1429 bp, Glycine max
  Clone ID: PAT_MRT3847_41771C.1
tttcgattttgcttcatcgtattccacccacctcggaggcctaagccaaagcagatcctgcggacattgtaagtaaatcttatgaagatggagatgataactaatgttaccgagtatgaggcaattgcaaaggaaaaattgccaaagatggtttatgactactatgcatcaggggcagaggatcagtggactttgaaggagaaccgaaatgcattctcaaggattctgttccggccgcgtattcttgttgatgtgagcaagatagacttgactgcaactgtattgggcttcaaaatatcaatgcctatcatgattgctccaacagccatgcaaaagatggctcaccctgaaggagaattagctactgctagagcagcatcagcagctggcacaatcatgacactatcctcatgggctacttccagtgttgaggaggttgcttcaacaggtcctgacattcgtttttttcaactttatgtgtttaaagacagaaatgtggttgctcagcttgtgagaagagctgaaagagctggtttcaaggcaattgcccttactgtcgactctccaattcttggtcgtagggaggctgacatcaaaaacagatttacattgccaccaaacctggttttgaagaatttggaaggattggatcttggaaagctggacaagactagtgactccagtcttgcctcatatgttgctgaacaaattgatcagtcactcaactggaaggatatcaaatggcttcaatcaatcacttcattgccaattgtagttaagggtgtacttactgctgaagatactaggatagccatacaagctggagctgctggaatcattgtttccaatcacggagctcgtcaacttgactatgtccctgcaactattatggccttggaagaggtagttaaagctgcacaaggaaaaattccagtttttctggatggtggaattcgccgagggacagatgtttttaaagcactagctcttggagcagctggtgtatttattggtagacctgtggtgttctcattggctgctgatggtgagactggtgtgagaaaagtacttcaaatgcttcgtgatgaatttgaactaacaatggcactaagtggttgccgttcgctcaaggagataactcgtgaccatgttatcacagagtgggatcacccaagattttctcccaagttataagatggcaggactccaccttgttcttctatattctaaaatagaaattttagaataacctttgttcttatttcatgcttctgtggaaaactttgttgttaccgtgagtcaggcattagtcatccattagtaattgctacttcattttgttgcatttggtgctaggatttggtactctagaaacatgattgccaataaaatgtactttttttcttagcaaaagattaagttttatggt

SEQ ID NO: 78356 - DNA, 582 bp, Glycine max
  Clone ID: PAT_MRT3847_41772C.1
ctgttgcgctgtaaaataaaatttccacactcttctcttctcttcacttcaattctttcccaccactttctccccacaccatcatcttcttcttcacttcttcaacataacaaaaaacaacaactcagctaatgactctcacgttccacattgttgggcacccttttcgtagatccaactccaaaaaaataacaactttccttcttttcagttgaaaaaaactacttcatttttcttatttctttttttatattccaagaaaaggtctttcttttttggtttttgttttttgttttttgttttagtttttcagtggcagcaatgacggaggtgcttcatttctcatcctcttcgtcgccagccacttcttcttccgatggcattctccaagaaccaccaccaccttcttctgtgagcgtggtggtggatgggttttctacggtcaccgactgtgacgcgcgcagggtcacggtcaccgacagaacgcaccaagagctttctcttctggcaattcttgtgacccttttgaggaaatcgctgattgcttgcaacaagagcgacgagggacagggcgccatgggg

SEQ ID NO: 78357 - DNA, 554 bp, Glycine max
  Clone ID: PAT_MRT3847_41773C.1
cttagaagaggagttctagcggttgactcgattttttaaattgtttttcattattaacaaaaggtaacaaagataacatacgagcttgttttatagcacctgatattaatcgatgttgttttaaggacaacctatttacccgtctgcataatatttttccttgatcactaataaatcgcctatttaaacccatgtttttataaacaatccggtcccccgattggatcgggggcatacgcctacacaaaagatcgcttgcatttcataccgagtcgcttagattcttccatggcttatttatccctattccaaacttcacgtttattccaagaaatactataaaggattctgcttttttattcagacttttttaataaatgccgatatttttctaatagatggggatatatactgaactttgaatatattcaactgtctctgataaaatacagatcgatctatctctctggataagaaaataagagcattctacgtgctaagttctctggttcgaagggtaacactcgagccatcaatcagacctatgtctttat

SEQ ID NO: 78358 - DNA, 855 bp, Glycine max
  Clone ID: PAT_MRT3847_41774C.1
cggctcgagcatatacattttttagccttttgttagccccaaacacccacacgggcacacccctgcaggtacaaaagggggagttcacaacaaaaagaaaacaatgagaaaaccttgttgtgacaaggaaaacatcaataaaggtgcttggtccaagcaagaagaccaaaagctcattgactacatccaagtccatggtgaaggctgttggcgttccattcctaaagctgctgggctgcatcgttgtggcaaaagctgtaggatgagatggttaaactacttacgaccaggcatcaaacgtggaatctttgctgaagatgaggaagacctcatcatcaaactccatgccctccttggtaacaggtggtcactcattgctggaaggttgcctgggaggacagacaatgaggtgaagaactattggaattctcacatccgaagaaaactaataaagatgggaattgatccaaatagccataagccacaccaaagctttcctcgtcctcatgtttcttctgctgatcatcagggtgcatcaacatctgagtccatcaacaacaacaaagtccctttcttcaattcccgtggttcagctgccactgatcatcataagatttcgttcactaaagaagaaacatcaattatttcatcaccccctttgaatcttgatcttacaatttctttaccttcgcctgtggaagaaaacaaaaattctgatcatgagtccgccaagacatgtgacgtggatatagatctcaactgttagtacttttagttgttggcaagagtattaattaccagcagtagtacttcatgtttgttacaaattaattttggagaaataatcagtttttc

SEQ ID NO: 78359 - DNA, 193 bp, Glycine max
  Clone ID: PAT_MRT3847_41775C.1
ggcctgtattatttttttttgggggcgagcggaaaatctttacttatatcccgaaaaaataatttaattgcttaaaaaaacacaattttgaaagtctagggggaattaacaagcaactaaaactggccggtcgctttccatcatgaatgcccaacagcgggcatctctcgaaataaaatgggcttttttaaaa

SEQ ID NO: 78360 - DNA, 178 bp, Glycine max
  Clone ID: PAT_MRT3847_41776C.1
ttaacaaaaaattacattttaaattcagtcttatcatgggagagactgcatctttgtggtaaatccggaaatggataaactgtgttacaaagatcaacccacaccgacacttttatcgcggcctaacctgctacatcgccagctagttaatccaagggtaatttggaacgtgtagccg

SEQ ID NO: 78361 - DNA, 279 bp, Glycine max
  Clone ID: PAT_MRT3847_41777C.1
agagtttctagtctttgtcgctgccatcattgctcttagcattactgttgcgtagaaaatcagggagagagaatgaccaccataaagaaaattcggatcctttgtatcgttcaaatgctaattactcgcaatctcgcatgaggctcgatttaacagtgaacaataattgcttacttatcttcgtgaacgttttgggatcaattaattacattaatttggtggagtttgcataatcgcgttctgtagatttttagaaatatctaaattaattgcagatat

SEQ ID NO: 78362 - DNA, 2782 bp, Glycine max
  Clone ID: PAT_MRT3847_41778C.1
ccacgcgtccgggatattattacacggctcgttggcgtcggaaatgaaagtatgaaatagcataacaacaggtcagggagcgggttttcttcttccaccccttctaatttctctcttctctgaagctatcagaggctagagttctcctattcagtatctcatgtgcttcaaagaatggctgttagctttactgggcttgacatagaaggcagagaccagacagaagagaacatgacaatatgacatctatctagtggagtaataatttatttgtgatggatgaaactgaagtggaaaatcccatattcatggaaattaattctgaagataagagaaatgaaaatcaagagtttgcatcagagaaaggagaaggtagcagtgttgttttctcaagagaagcaccacttatgaggaaagagtcaagaatgtccactccttattgttgcaatgctaagaagctcaaatccggggctgttacaatagattgtgatcttggaagtaatgagaaatatgggttggagaagaaactatgtagacaagacaggattgagttgggtcggttgtttcagagtgcagtgagttcccatgactgggaacttgctgaaagtttgattttggttgctgatccacagacgctcaatgatgccttgtgtatcacactggattccatctggttcttgagcacagagctagagcttaatggaataatgggatttatcaagaagatcattgctaatggtgcttatgacttcacaagagctgctctaaggacttcattccttgcttcatgtgtctctgcttgccagagtagaacaatgagtcttgctgatacagttactgtaatggcccaaaggttgcatgaacgtctccaggaatgcaatggagatgaagtattgaaggcagaagctggtgctaaggttcaaaagtttactgaatgggctctgaaatgtataggcatccattcacgactgcaggatgatagggaaaatgtgatacacagctcagctgttgaaatccagctccggttatctgccttcaagatgttcctcgatcttgctggcaaccgccttacagggaaggacttcagcgaggcctttgatgcggcttgttttcctcttactcttttctcaagctcatttgatccaggttgggcatttggcttgtcagctaccgtgatccaagggttgctgggcatgctagtggaggggggttcaggcaatgtcaatcagtgtttcttggaggcttcacgttttggcagtacagaacttgtgcgcatactattgcagattgctcaaagaaacagcttggatgttgatgttgacttggcgttgggttttgcctcccattatggcaagataggaactatggagtgcttggtggaagagggaaatgccatagcctttttgggccctttgatgagagctgctgagaggggttgcatgcaagttgttgagtggtttgtgcagaggggttgccgagacatggaactatgccttgcccttacagctgccacttctagctgccaagttcacattgcagcttatcttctgccgcacgtacctcagcaggtccttgcagcacttagtgttgaaattcttaaggcctgctggtgagcgcagcggtggatctcttgatggtgtagcatttcttctccaatctgacttcttaggtgatcctgcagctacttatgctgttgcagatattattgctaaatcagaggatgaggctgttgcacctgagttgaagacttttcttaaggagcattggtcagaaggagcttacaaggagggattaaggttagggcaagagcattacatgaaccttgtgagaatcattaaatggggtgagtctcctatttgcttaagagatcttccggccccactgacggtggcaattgcttacctcccactttatagagagtgtgtcaagacaggtggctgcttgttttcacaacggcttaggggacaactggttgaagccgctaggagggttggaaatagggttttggatgaagtgacccatggtagagagctagtggtcgttttggaacagcatcttcctcactttttgctccatccctcccgcattgcttagctagactcggttgtcgatgttatgtattttttatttcctttcgacacccttctttattatgtaatgtatgctaccattgataacaatttttatcttggagttagcctttatggtaggattccctctttatagctcagagtattaagagtaaagttatggcaagagcattacatgaaccttgtgagaatcattagatggggtgagtctcctatttgcttaagagatcttccggccccactgacggtggcaattgcttacctcccactttatagagagtgtgtcaagacgggtggcttcttgttttcacaacggcttaggggacaactggttgaagccgctagaaggcttggaaatagggtcttggatgaagtgatccatggtagagagctagtggtcgttttggaacagcatcttcctcactttttgctccatcccacccgcattgcttagctagactcggttgtcaatgttatgtatttttcttttttatttcctttcaacacccttctttattttgtactgaatgccaccattgataacaatttttatcttggagttagcctttatggtaggtttccctctttataactcagtgtattaaatgtgcatattttatgtcataattgttgtcatttatttcttggatggaaagtataaaaaaaatgaaggattagttggatgttgaagt

SEQ ID NO: 78363 - DNA, 475 bp, Glycine max
  Clone ID: PAT_MRT3847_41779C.1
acgtacggctgcgagaagacgacagaagggtatggctgcgagaagacgacagaagggactaataaccaaagtgaagctaatgctaaaattaactcacaaatcaagctttgtcattaaaaaatcacctaaaaaccattttaaggtccaacgccttgaatgatcctctttgcttttatttggttaaacgtggacttttgaaagcctatagccaacgcataactttgtcactactttcaagaaaccaagatatcattaatggtccaatgccttaatgttttctcttctttcaaaaagaatcaaaagatcatttaaatggtccaaagccttaaaacgaccttttttggtcataacatatcttgcaaaaaagataaaaacaacttaaccaacgtttagttcctaaagaactacgtaggtctgatttccttatcacaagtaaggaatacgtaggagtaagggaaacacccttgtcgacccc

SEQ ID NO: 78364 - DNA, 179 bp, Glycine max
  Clone ID: PAT_MRT3847_4177C.1
acgaggctattccggcaccgaagagaggtgagattgtgagacagattggtgaagcattgagggccaagttggatcctttgggtagactggtgtctcttgagatgggaaaaattctcccagaaggaataggggatgatcatgaaattattgctatgtctgattattgtgttgggctaacc

SEQ ID NO: 78365 - DNA, 229 bp, Glycine max
  Clone ID: PAT_MRT3847_41780C.1
gcggccggcggtaataatgacattccataactcccaagctatggctagatagctatataataaataaagatgaccctgtagcttcctaatttcccctaacttaaaaatttaaaaatttcccaaatttaatttggtaccaacctcctgaattctctccctccggaacttcccaaccaaatgttaatagaatatcatttacaaatttaaaattaaaattaattgtaatgtt

SEQ ID NO: 78366 - DNA, 908 bp, Glycine max
  Clone ID: PAT_MRT3847_41781C.1
cgagggcgtgttgctgcttacatttataagaaagctggaagatggaagcagtccattgctttgtcaaaaaaagacaatctttacaaggactgtatggaaacttgctctcaatctggtgaccgtgaactctcggaggatttgcttgtttactttattgagcaggagaagaaagaatgttttgcatcttgcctctttgtctgttatgatataatacggccagatgttgctcttgagctagcttggatgaacaatatgattgattttgctttcccatacctcttacagtttattcgagagtatactggtaaagttgatgagcttatcaaggacaaaattgaagcacaaaaagtggagaaagctaaagagaaggaagagaaggaagttcttgcacagcagaatatgtatgcccagttactaccacttgctttgcctgcaccaccaagtatgggtggaggagggtatgcaccaccaacaccccctattggtggtatggggatgcctccgatgcccccttttggcatgcctccaatgggcggtggcagcggctcctactgatctctctattcaagacaggagaaatttttgctataaattttattggagaagctaggtacattaacacgatgaatgaaagcatctaccttagcccttctgacgactgtggcttttttgcatggaaagttagtcaattgctgaatagattgggttgtctgatcaatcctgtgagatgattgaatcttctgaggctttagtttggtttctgtatgtatagttgattctttctcacaaataattgttttctttgtgtagtcatgtgtattctgattaggatttcactcaaattttgttcggttaatttggtatataaatattcatcaaatattagtaatgttctctttgtgcaaaaa

SEQ ID NO: 78367 - DNA, 212 bp, Glycine max
  Clone ID: PAT_MRT3847_41782C.1
agagaggtttgcgacagtgaatgcctcactctgctgccgtccctaatctgaacgctcccgccatctgcgataggatttcatggctccaaagatcgacaatgatctcctaccctcatgtaatcctgacaagtctggtcgtgcgaatcagaacaagaagaagtggagcaagggtaagcaaaacgaaaaggtgaataacatactgctcctccatc

SEQ ID NO: 78368 - DNA, 344 bp, Glycine max
  unsure (1)..(344): unsure at all n locations
  Clone ID: PAT_MRT3847_41783C.1
cacatctataaataaatcttccaaggttgcttatccattcaaactgaacaagaaagatgaagcattccatagcctccggataaaaatgaagaatactatcttctctgctctctttctactttgtgccttcaccacctcatacctaccttcaaccaccgcggtggtcgataccgacggtgatattntttagaattctggnacatactatatcttgcccgccccccgcttctgaggtggagtagaattcgccgccactggatacgaatcttgccctctcactgtcttgcatactctctttgggtggtggctttcctccattttatcccacatgttctaatcccttt

SEQ ID NO: 78369 - DNA, 817 bp, Glycine max
  unsure (1)..(817): unsure at all n locations
  Clone ID: PAT_MRT3847_41784C.1
tgttatcgcatttgtttgtcctttcccgatcgttaaacctcccccactgcaattgcaaatccctgataattaaaccaaagaaccattccgctccaatcttaaaagcacttcccagttcctagttcccactctctcattctcgcattcctctaatcacataaaccctatttttttctccacaatggatctccttcaccaatactcagacggcgacgatcccgactccccctctgaaaaccctagctcccctccgcgcctcctcccgggacgctccgccgcgcccaacgtcgacgacaccatgctggccctcaccgtgacctcctcctcctccgcggccctctctcggcccatcgacccgacccagcacctggtgggcttcaacccctcctacgaccagctctgggcccccatccagggcccggcccaccccttcgccaaggatggcatcgcccagggcatgcgcaaccacaagctcggcttcgtcgaggacgcctccatcgaacctttcctcttcgacgagcagtacaacaccttccacaagttcggctacgccgccgaccccgccgccaacaacttcgtcggcgacctcgacgccctccgcgacaacaacgccgtctccgtctacaacatcccccgccacgaacacaagaaacgccgcattgaggccaaggagaagaagaaatcagaggaagacgacgacngcgacgtcaacgaggagatcgaaaacccggcctcggaggcgtggataatgaagaacaagaagagcccttgggcagggaaagaaggaggggtgcaaggagaattgactgaagaacag

SEQ ID NO: 78370 - DNA, 2291 bp, Glycine max
  unsure (1)..(2291): unsure at all n locations
  Clone ID: PAT_MRT3847_41785C.1
ccaacatgcattgtggtttttcctctagtttttctaacgtttatgacttttctttcccttcttgggtagtcaggtcccgcagcatcgaaaacctggtcntggttcaacatgcataggtagttgagtgcagtgattcagattgcttttttggctctttttgctttatttgcactcttcttatcagaaaccaagacagcaagagtttcacgttacttcatcatctctgtctctttgctacttcttttgtacacttcttagcagaaaccaagacaacaagaggtgagtatagtgttcttgtaccacagacagcgcagggtgtagcatataccattccttgagctccttcaaatggcagagacaccaaagaagaagaaggggcacgtggttatggtacccttcatggcccaaggccacatcatcccattcctggcactagcaaggcaaatccaacaaagcacaagcttcaccatcaccatagccaacacacccttcaacattcaatacctccgatctgcactttcttcttcaacttctcccaatcatcaaatccgtcttgctgagttacccttcaactccactctacacgatttgccacccaacatagacaacacagagaagcttcctctcactcaactaatgaaactctgtcatgcatcactcacccttgagcctccccttcgctccttgatatcacagatcacagaagaagagggtcaccctccactttgcacaatatctgacgtgtttcttggctgggttaacaacgttgcaaagagtttatgtattaggaacctaagcttcaccacttgtggtgcttatggaatcttggcctatatctctatctggttcaatctccctcataggaaaactgactctgatgagttctacgttccggggtttccctcaaaactacaaattccaccatacacaactgcataagtttcttctagcagctgatggcactgatgactggtcaagattcattgttccacagattgcactttctatgaagtctgatgggtggatctgcaacacggttgaggagatagagcctttggggttgcaacttctcaggaactatcttcaacttcccgtttggcctgtggggcctctccttccacctgcttcactcatggattcaaaacatcgtgcaggaaaagaatctggcatagcccttgatgcatgcatgcagtggctggattcgaaggatgagagttctgttctctacatttcatttgggtcacagaacactataactgcatctcaaatgatggctttggctgaaggattggaagagagtggtagatcgtttatttggatcataaggccaccttttggttttgacatcaatggagagttcattgcagaatggttgccaaaagggtttgaagagagaatgagagacaccaaacgtggccttttggtgcacaaatggggaccccagttggagattctgtcacacagttccacaggagcgtttctaagccattgtggatggaactctgtgttggagagtctcagctatggggttcctatgattgggtggccactagctgcagaacaaacattcaatctaaagatgttggtggagaaaatgggtgtggctgttgagctcactcaaactgtgaaaactgtgatctctgggaagcaggttaagaaggttatagagatagttatggagcaagaaggaaagggaaaggcgatgaaggagaaggcgactgagattgcagctcacatgagagaggccataacagaggaaggtaaagaaaaagggtcttctgtgagagcaatggatgatcttgttagaaccattttatcaccctaggctttgtgatttgttgcatttagaatttgaatgataataaagttgcttgtaaagcatacttgttatgtactgctcagcaatctttagcaatagactatggtaatattgtcactatgaagataataatttaactcattttgaagggaagggaaaggagatgaaggagaaggcgaatgagattgcagctcacatgagagaggccataccagagaaaggtaaagaaaaggggtcttctgtgagagcaatggatgatcttgttacaaccattttatcacccaacaaggctgtatgatttgctacatttagaatttggaatttgaataataataaagttgcttgtgtaagcatacttttgaaactgctaagcaatctttaacacttgactttgatcatgtcactgtggagatcaaaagttcactttttttgattgatgattttaaaacaatatagatggtcaatggatatt

SEQ ID NO: 78371 - DNA, 272 bp, Glycine max
  Clone ID: PAT_MRT3847_41786C.1
gtctctctcgctcaaagttttgcataaaattctaaggtcttcttggatctctgcagttcaccaagggacccaggttaataactcctgttctagaaaacatgactttctgtgtgctgatttctttggattatccccagcacagctccctgtgggaggaagctgttgtcagaagcaagctgggggtagtgatggataatgaaaactgtgtagaggacactggtagcgactcactggtgagaaccctgaagcggcgtgctgggggccatctcatg

SEQ ID NO: 78372 - DNA, 582 bp, Glycine max
  Clone ID: PAT_MRT3847_41787C.1
gcggtctcgttccgcttctgtcggccagcgcttcccgctttccccctcatcttccttccccttgcggttcgtgtctccccccgacgcagtctacccgcgcctgtctgcctctctcccccccccgctccgcgtccgccctccggccttttgcccgccgtggctctgcttcggtccaccggccatggggccggcagactctgctcatcatcaccggccatgtttccggcagatgttagccgtcgacatcgccctcctatatgaaggtagtaggcggcgggtggtgcgcaccaagagtttgctctatcagctggctcggcttgctgggtcggcttccgttgagatcttgtccttcttctcctacctccaccgggctgagtggttcgtccgggctttttcacctgcccacgccctgttcccatcttcttcggcgttgtgcggcgtgttagcctccaagctggtctctgacctcccgccgcctgttcgttctactgaccgtagctcctcttcctcctcctccgcacccccgcggctcttgcggctttcctcgcctgctgctctacggctatgtcgttgtacatggtg

SEQ ID NO: 78373 - DNA, 432 bp, Glycine max
  Clone ID: PAT_MRT3847_41788C.1
acgagataagtagctttggcatgcatgatggtcagaattcagctgggccttcatctcagactcggagagaagatagagacttgcaaggtcaagattacagcggcatacattctgcacagcctttacaaagagcaccaccaactgatgttatccacccctcgaaggtcccaatccgtggctcgcggtttgggaaggagaatccgaatcagcttccctttcccatgcaaggtcctcttcataaatctcttagcagatcaatgtcacttacacatgaagacctgtcaattacaagctcaaatctaagctccattggttctgaatctctgggatggccttcaactgaatctagaaatgaaaatgatgttccttttgggcagcctggcagttgcagtacattcaagctttttggagttagcttaattgaccgctcct

SEQ ID NO: 78374 - DNA, 377 bp, Glycine max
  Clone ID: PAT_MRT3847_41789C.1
accacgcgtccgctcaccaatcgcatttgcatgaaaaagtacctgtgtaacatggagcatcagcacattcactgacacacatccacccattaaggctgacgcactctgaacggaaatagagaaagatgctgacaatatcaagagactactccaggaatgggacttggtcattcgcgctgaaggcccagcttgttgagagcctttcctatcgaggggcatcgcacttgtcgccgaactcactgatcggattgtgccatccgctatttacacaatgctatgcgcgttttacggatcaacggttcacggacacacatagttggacccctactgcgggttcatgaatcctgtgccaacatacgcgatcacttccttgaacc

SEQ ID NO: 78375 - DNA, 1134 bp, Glycine max
  Clone ID: PAT_MRT3847_4178C.1
ttcacgcgtttacggctgcgagaagacgacagaaggggaaaagcgatcaacgaatagagaaagaaagaaagcgaaatcaaattgttagagaaacgcgagttaatccagaaatcaaagaaagcgttacttgacgttcgtttgaacattaacaacattaacacaaatggcaacacgaactggtcgcttgtttcaaaatcaaaacctgaatgtccacgttaatggaggaggaactgtttctgagaaggctgatttaacaggacagaggaaagttagggctgggggaagaaaaccacttggagatctatccaatgcagggaacctcatcaaccattttgatggaaagaaaggccttgatggttcattgtacacgggcaaaccctctgttagtcaggcacaggcaccgaaattgcacaagtcaaagaatcttgaaagtgacaaaagaattccagcttctgagaaatcactcactcgtagcaggaaagcactttctgacatttcaaactcagggaagccacaggttcctgagataaaaaataagaagaccctgaaaccattagaggaatctcttcctcccagtgcaatttctgaagaacaaatcttgcacgatcataagaaatgtatcaaatcacagtttgaaactgcagatgtgcatcagttttttaagactgttggacttgaggatgatgatcacatggcaatttcctttgagctgtctgcaattagtaaacagaagtctgagagtgcatatttggagttggaggaggtacctgagtggttgcctgaagtgcactctctatctgttctgcatggtggttccccagcagtacactgcaagactccaggcttgtcaagttacagaacaatgtggaatgactctactgtcaatttcaagttgatagagacaccaaaattgtccaaaaaatgatttttcccgcaacaatgtaaagaacttgatatggtgagtagtagattttgtgccacagataatgatcgttttttcggtagacatgttttgttcatcttagacatattttgtgccactgatggtgttggctcctatgtttctattgctgatttcgtcatgacaattaaaaggtactttcgctaaaaaaaaaaaataaacaatatacataa

SEQ ID NO: 78376 - DNA, 549 bp, Glycine max
  Clone ID: PAT_MRT3847_41790C.1
gttccgtgctcacaagtccacctccccgaaggccttcccaagaaaaccaactataatgtcttccttgttgcaatccgtgtttcgttcacccaagaaatctaagcacgcggacacattgcaaggactcaagagtccctccaatgtgcatgaaactccgttctttccttcgccacttaccccggcttgtgtgatggctcacggggcagagaagatggaggcttcgaggcaggaggtagaagatgcatgcaggagttttgagaactatttggtggagatgattgtggaagaagggaagaccagggacttgatggatgtggaggaacttctatattgttggaagaaccttaggtgtcctgtgttcattgatttagttagtagattttatggagagctttgtaaggacttgttttctccggatagtgaggaaggtgacagttccaagtgaaggcctaaggagaaagtgtgagggaataaatagaataatagatattaattttttctaactataattttcaattgggtgttcccataaaattggatgtgtgcaat

SEQ ID NO: 78377 - DNA, 421 bp, Glycine max
  unsure (1)..(421): unsure at all n locations
  Clone ID: PAT_MRT3847_41791C.1
gttaagctttttttaaaataggaaccccacctaagactgataaaatgtaaatcctggagaaacaaacaaaacaccctgctgcctacgggctcttatgattgatatgaacatgcggctagaaaaacttgcacgcgaacacaacaaaactgcctggcataagcggttgggaangnccatatggaatgtttgtaacatatattctccccgcatgggtggagcgaggggccccaaatttttactcaccccagtgcaggccagagggtggcccccccatgaaacctgcgtaggtactctgaggcacacccccaccaggaccatggccaccacctgcataacgagggcaacccccagcggcgggtcagaaaaaaatatccacatgcaggggggaggagcataacctgcacaagataggaggggcata

SEQ ID NO: 78378 - DNA, 418 bp, Glycine max
  Clone ID: PAT_MRT3847_41792C.1
gattgaatggaccattaacttcaggttcttgtaagtattattacagttatatatttataagacaactgtgatctgaattgaaccccttggataaactatttcccccattttttgcaattagtgctagatctagtatcatttgtcttgtttttcacttgcaatgtcttagttcttctgacaccaagtaacaaaagcattattctaattgcttttcaagagagatattgatttgtttagagccttaaacttgcttattgttatttaagttctgtaatggttttgtatgttaatcttgcaagtttttagtttgagcgagtgacgaagttcctgacctatatgctgaaattcttgtttgtggtccattattaagattcaccttagcaatatcatcctgattgtttactattcacttatgtag

SEQ ID NO: 78379 - DNA, 285 bp, Glycine max
  Clone ID: PAT_MRT3847_41793C.1
cctgtattgggctctcatttttaactgtacttgtcttctatcttccttcaaatgaaggtgaaaagatttgtctctgcacttcagtacttgtgtctttgactgtcttccttctggttattgaagagatcataccatcatcttcaaaagtcatacctctaattggagagtatctggtatttaccatgatttttgtgacactgtcaattatggtaaccgtcttcgctatcaacattcatcatcgttcttcctcaacacataatgccatggcgcctttggtccgcaaga

SEQ ID NO: 78380 - DNA, 690 bp, Glycine max
  Clone ID: PAT_MRT3847_41794C.1
cgtgtttctttccacccattgagtgctagccagatacaaatcgttgcgtgggaagaacaagaataaaaaagttgagacacaaaaaccgtaaaaagggtacttgagaaacaagatttgttaggagatggaacagctaaagtataaggttgtccaaggtgatgataacaacaacaaaggaccagttgttcgttcttttttttcttcttcttcttctgaggctggaatttcaagtggttcatcattggattctgattcatttgaagaagttacatcccctgcttcctcttcttcttcatcagcagctgatcaacctgcaactgaaccgttgagtgatatgtcttctttgtttcaacaacttcccatcaagagggggctttccaagtattacgaggggaaggcacagtctttcacttcattagcaaaagtgagcagcttggaggatcttgtcaagcctgagaatccatacaacaagaagttgaagacttgtagtagctatggaggggtaatgggtgagactccgctagcggggtcctgtccttctcctagttctatgcagggttctcaaaggggttcatgttcttttcttattgcaaataggagcagtgacaacatcatgggtagaagacccccaataccacctcatagatctaccactaccagctccattcctaatcaaactgctttgtttgt

SEQ ID NO: 78381 - DNA, 426 bp, Glycine max
  Clone ID: PAT_MRT3847_41795C.1
gagactctaatgcttgcttacactactagtaaatctgtgacatataataagatacacctcttaactatgagggatacacctgctaaattcataccaccattctcggcgacccacttaccagtgcttaaagaactggaatcacggacgatgataacaccatgtatcatggcatggcgtagcatgctgcgaaatgggagcccctgatacccgatgacgtatgataaagctgcttagctgggacccttagacacatagcgcatgcttgatgggattccatgtatgaagacttaggctcgatccaatagcttggacacattgatctttccaacaacttcctgaatggctctctaaccaacactatcttgaactcttcttaactataagctcttaccctatgaaacaatgctatctccggtgaactacctc

SEQ ID NO: 78382 - DNA, 267 bp, Glycine max
  Clone ID: PAT_MRT3847_41796C.1
ttttctccttatcactatgataaatgacacacaataactttgggtggatatctcatatcacaaaacagattcacttcccaagtcatttgatcaaaaaccagatgaagaaaataagaaaaaaaaaccatcagttgctcataaacccatctaagacaaaaaacccgtacaagagtccaaagatgaagtttctgctccaacaccagctacctcaccgtccgagattgtgctcaaagtgttcatgcattgcgagggttgccctcccaaggt

SEQ ID NO: 78383 - DNA, 506 bp, Glycine max
  Clone ID: PAT_MRT3847_41797C.1
cttgtattatggttttcaaaataataagaattagaatatcacataactgatattagatgtggtgtttctaaagtccattgtaacttccccaagacattaagcattcttggactttagaagatgaatagaatgtgaaagctttcctaagctggaattgcttcttaaaatgttctaaaagtaactcagctcacttggcgtgtaattatgatctctacttcctgaccttagcgttttttggtttgcttgcttgtttgcacgagacacatcaccaaacaccaaccacgagtccacgactacaccaacatagaaaagctaatctgccaaggctcttaaccatggacggagcttgataaagcaaacctaaacatatgctaaagcttaatttgacagggacttgtaaccatagttttgctataaaacaaaaccaggaattaactgggtttgcctaaggccaactagtatgattggcaataaatgtaaaaactcgctttctgtgatttaactac

SEQ ID NO: 78384 - DNA, 390 bp, Glycine max
  Clone ID: PAT_MRT3847_41798C.1
accttgttagtgatccgttagtgatcaacgactcttgcactacgaatgtatcctatataccaattgggacctctactacaattaccaagacctactcggagacagtagctagagaccgtgtacgactttaccaataccgaatttagatagctcaaactttgaaggaattcgcgacgaataaatggaacctcgagatgggaacaagcaccgtctcggacacaaaattggtagcggatctttccgagagatcaatctaggaactaatatccagactaatgaagaggtagcggatgagcaagaaagtgtcaaaaccaaccatactgaatggctgaatgaatccaagctggataaaatactgcagggaggaaaacgggatgtccaaaatgtcaa

SEQ ID NO: 78385 - DNA, 794 bp, Glycine max
  unsure (1)..(794): unsure at all n locations
  Clone ID: PAT_MRT3847_41799C.1
ttggatcactgaacaaagcttctgtaattggaagaatcatcatcctgtacattttcaaagccttttcaaagccctatttctagtacaaagcaattctctcatgatatttttcttcaaccaccaccaactaaaagctaagagacgcaatcaaaatgacacagcaggccatacatcaattgttagtttgcaaaagaaacaaaagactccacaagataggacaaaggcaccctcccaaaaaaattgttgcagaacttattcacacccatcaaagcatttgtctgagctgctggttttcctgacgaagagacttaacttctttcatcaactcagcttggttttcaagaatagagttcattacagctgacatttccgtctcttgcatatgaaactgtctcaaaatttcaatatgaaggtttctcatatcttcgtgtatggatttctgaaaggaatccagagtttcttccagggtccgttgaaaaagctgaagtgtaaatgaagatccttgtgcatctggctgagatgctttcggctgtgagattattccacttgtcagtggtaatgagccagattctattggagcagatatatcagacttcaacagcaagctatttagaagttcttctctggtttctgctcctgatttcttaatcttaggtgaaccaactgaaagggacactccatcgcttaaggtagatgtagtgcttattcttnntgcataagtannnnatcttcgattannngatgacattcttgnnnaatcannnannnnttggggaatcaattgctnnnnnnng

SEQ ID NO: 78386 - DNA, 298 bp, Glycine max
  Clone ID: PAT_MRT3847_4179C.1
tctgaaaggggttctagtgtgtgattgtctgttgctgtaactgtatgttcttctcgcggtgttctgtgtttgagttagctttttctctcacctgaaaatgtcttgctgctgtggtatctgtggttgctgaagctcctgctagttcttctactgctgctgaggctgcaagatgtacccagactagagctacactgagtctaccaccaccgagaccttggtcatgggagtggcacctgttaaggctcaatttgagggtgctgaaatgggtgtgcccgctgataacgatggctgcaaatgt

SEQ ID NO: 78387 - DNA, 323 bp, Glycine max
  Clone ID: PAT_MRT3847_417C.1
cccatccaaaaaccgccctcccaaatttgggaggtggaaattgggcataaggtttttattaaaacacaatctaggggctccatgggctaaaaatttcccagtaaacccatttttttccatccgggacatttaggtgggtttttataaccttgaaggtttaaccaaatttttttgggaaggaaaccggaccggatggcccggttaataggccttaaaacccttttccttttcttaagttgggggaatagtttgggggcaacaatttgtgaaatccaggccccatatttaaatttttggccggggcccttgagccgaattcgggg

SEQ ID NO: 78388 - DNA, 449 bp, Glycine max
  Clone ID: PAT_MRT3847_41800C.1
atgaattaacacgcaagtatgagcgggtcagtgggggaacatgttctttcttttattattgtgaaagagatggtggccccgcaaattgaaaggaaggtgactgaacagttgcagcaggggtgattgatgatgatgatgatgatgatgggtcttgcgcgatctaatctgaatatgaagcagcgattgttgagactttgttactattgggtctctctgattccgcaactattgcgtctcctccaaatgctttgcttcaaattcaaccactttacttggaatcgggaaggcaacaacatttcttttccttaaaccttttttttttccttttcggttgcccaattggcctcaaggacaaggttttgtttttggaattgtaaacccttgaggagatagaattgtgcaacgtcactgggtttgagtttgtttggaacagcaacatttggaaagcc

SEQ ID NO: 78389 - DNA, 660 bp, Glycine max
  Clone ID: PAT_MRT3847_41801C.1
tttttctcttttgcttttcttcgtatgcttgtaaggaacccatgagttgctcaatagtcatggtctttaaatccttgttttcttcaatgttggtaacaatgaattcaaaacttggatttaaagtttgaagtattttttccatgaccttctcctcatcaacatcttcatcatttcttttaagttgattgactactcaactcctatgttgctagtttgaagcttatcccatgattcttccgcgattcgaagcgttggatatcttatcaaatgtatcttcatccaccgattgataaatgagaaagagagctttcttgtctctctttcttgactccttcaacgtctcctttacaccttggcttaacgaggcgacatcttgctcctcgaagtcattctctacggtatcccacacatcttgagctcctagtagcgccttcatcttgatactccaattatcatagttgttctttgtgagcatcggcatttggaaaggaaaacctccattcgccatcttttgaggatcttgaagctctgataccactttgttggaaataaggctttttatgtttaggaaaagtgtttaggaatattggagactttgaatagaaacttgataggaaggagaattctttatggaggagagaactttgctcgagccgaatt

SEQ ID NO: 78390 - DNA, 270 bp, Glycine max
  unsure (1)..(270): unsure at all n locations
  Clone ID: PAT_MRT3847_41802C.1
cccgncctcgcccggcgaatgggctgaccctgtttctaaacccggcggcgacgatgcatggcccgaacgaggtgtttcggcgtggcgttcaacggcggcttcaatcagcccatcatgtgcggcggggagcgacgcagatgacgctgcaggagcggggcaaagccgatccgcccatctacagcatcaggatacgcgtagcgcagcagccgtaagcttgatcttctccttcagcaaggggccgagtgggacgggccgtacccgctcaagttc

SEQ ID NO: 78391 - DNA, 513 bp, Glycine max
  Clone ID: PAT_MRT3847_41803C.1
accttgattctatgagcggctatggattatgcttttaaagaaacattaatacgtgcacacctgggcacagtgggatatatagggaaaagcaataccgtcacgtacgagcgaaccatgcttgttttacttttttaagattagaactcaatggactccgggttgaccttgcagtatttgtaaaacgggtcacagtccttttccttttgcttgtccctggcggggctcgacggcgcgctcagctgctccacctaggaccacgccgccacgcactaatcgcttggcggatcgtcggcgcatgcctactgggaaatctttatgctctcctccaccttttacgatatgcactcaggcgcaaagcgaacggttcgaatcctcatcacgcgacccatttttttactacccggacacactgcttggctggggggaattgacaactttacagtatgaaacgttttgcggggaggctgatgcgtttaacaaaaccctggggcatgaaaggctcacaccagtcca

SEQ ID NO: 78392 - DNA, 1264 bp, Glycine max
  unsure (1)..(1264): unsure at all n locations
  Clone ID: PAT_MRT3847_41804C.1
atttttgcctcttggaactttgtcgaaaaaaaaagaagaaaaaagaagaaagtgattggattagggaagaatcgcagacagtgttgggcttcttcatggaacttgctagttgccattgacctctctttcttttcctttcctttttttctccatctctcgcaactcttcacctcaccgcgtcattcgcagcaaccaccgaacactgaatcgtgattcgcagtgtatgacgagcgcttcggagctattccactccagaaggcatcgattgggacgaaatgctctcgatctagggctcgacaccgaactccacgccgccgattctctccgccaactccgccttcgccactactacctccgccgccaccacccggagcgtgcatctgatagaattgatgggaggtatcggcggtctttcgtaagtgagagcgtggattctgaagaaaacgtgagaagtagtcttagagggagtagcagcgagagactacccgtaggtgtggttcttgcacgggcaagactccttcagaggttgagaggggaacctctatccacaaacaggcaatatgatagagattcatttggtgaggatccagaaagtgaatcatcaaacgaagatcctagcggggcatctctagttactgagttgacttctcaaatggcaaggtcccagttcttgcaagaactaagcacaaagccacctggccttactcaagaggccttggactgtttgcatcaggaagtttttagcagcaatgccagtgagatagggttggattccagggtactgcaggactgcagtatatgtttggagtctttcacagacggagatgagctgatacgtttgccatgtggacataagtttcactctgtttgcttggatccttggattcgctgctgtggagactgtccatactgtcgaagatgtatagttgtaaatactcactcatcattaaacgaggacgagtaattgatttcttgattgactttgttttgttctgtggttgtatgacaggataagaatgctgtaatggagctggttttttgtaacgatgctgaatacttgtctcttaccttgatatcgtattttttttttatcttttcctggtgacaatgggaaagatgtgggtagctaaatttggtattgtaagacgtgttataaaataataacagtcacgtgaatagtaaatagtatttttaatatttgtattcttatcgggaaaatacctattcatttttatcaagattcatgtattacattttagttnnn

SEQ ID NO: 78393 - DNA, 1787 bp, Glycine max
  Clone ID: PAT_MRT3847_41805C.1
ccggtctacggctgcgagaagacgacagaagggggtgtgtttgtggcctctctctctctctcagccgtcgcagtctctgccaaacactcgctcatccaaaattatgatcatttctgtgccgtaaattcgccggtaacacgagatctcaacttctcgcgccgttttcttttccccctttaaaaaaagtacaagttcaggttaagttagggttccatggcttcggagacgaaggtcgtgaatctggctgaggaagccaagctcgccagagaaggtgtaacgactccctcatatgcttttaccaccatctgcaagtccctcgtcgctggtggagtcgccggaggagtatcacgaacagcagttgctccactggaacgcttgaagattttgctacaggttcagaatccacacagcattaaatacaatggaacaattcaaggtctaaaatatatatggagaactgaaggttttcgtgggctgttcaaaggaaatggtactaactgtgcgcgaattgtcccaaattctgctgtgaagttcttcagttatgagcaagcttccaaaggcatactacatctgtaccggaagcaaactggaaatgaggatgctcagctgactcctcttttacgtcttggggctggagcatgtgcgggaataattgccatgtctgcaacttatccaatggacatggttcgaggcagaataactgtacagacagagaagtccccttaccagtacagaggaatgtttcatgctctgtcaactgtactcagggaagaaggtccacgtgctttatataagggctggcttccttcagtcattggagttattccttatgtgggtctcaactttgcagtgtatgagtctttgaaagattggttaattaaatctaatccattaggtctagttcaagattctgagttgagtgtgacaactcgcctggcttgtggtgctgcagctggaactattggacaaactgttgcttaccctcttgatgtcattcgtcgaagaatgcagatggtgggttggaaccatgctgcttctgttgtagctggtgatggaagagggaaggtaccacttgaatacacaggcatggttgatgcttttaggaaaactgttcggtatgagggatttggcgcattatacaagggtctggtgccaaattctgtaaaggtggtcccatccatagcaattgcatttgtaacatatgaggtggtgaaggacattttaggagtggagatcagaatatcagattgaagattcgcatgcatgtgatatttgattgcctgttattttcttgtaggcaaggggatgcagagatgataaattagggttactttcttgtttttcaactcttcaatgagttaggcagcacttgagttagcgtgtataaattaattcccttgcatcccatttgttttgccttgggaacatgatttagcttttagctttttattcatcttctatggcaataaatgttgtggaaaaacaatgcaaggatatatctgcatgcatttctgcagagtgaacagtgaagaaagcatttttattggttgaatatccattgactgattactgagtaccactccctatcctcgtctagaaatcgtatttgtattgtgtgcaagttactctattcagccactctatagcccagcaaatagcgataagtctgaaggtctcgtgttatatttaccttattatatttctcagcacattcctgcaagtggaggtctagtgtcatctatgatattaataatactaattaataaaggataagttttttttttctt

SEQ ID NO: 78394 - DNA, 1310 bp, Glycine max
  Clone ID: PAT_MRT3847_41806C.1
accccccccgccgtctctttcctttttttctcacggccgctcgaggcggacgggccggggtttccgaggtttaatcgaccattctgttttcagtaatttattttgcctcttcgaactttctcggaaaaaaagtgattggattagggaagaatcgcagacagtgttccgcttcttcatcgaacttgccggttgtcattgacctctctttctttccctttcctttttctccatctctcgcaactcttcacctcaccgcgtcattcgcacgctgagacagcaacctccgaacactgaatcgtgattcgcagtgtatgacgagcgcttcggagctatttcactccagaaggcatcgattgggacgaagtgctctcgatctagggctcgacaccgaactcaacgccgccgattctctccgccgccactaccacctccgccgcctccgtcaccacccggagcgtgcatctgatagaattgatgggaggtatcggcggtctttcgcaagcgagagcgttgattctgaagaaaatgtgagaagtagtcttagaggaagtgacagtgagagactacccgtgggtgtggttcttgcacgggcaaggctccttcagaggttgagaggggaacctctatccacaaacaggcaatatgatagagattcatttggtgaggatcgagaaagtgaattgtcaaacgaagatccaaccagggcatctctagtttctgacttgacttctcaaatggcaaggtcccagttcttgcaagagctaaacacaaagccacctgggcttactcaagaggccttggactgtttgcatcaagaagtttttagcagcagtggcaatgagataggattggagtccagggtactggcagattgcagtatatgcttggagtcattcacagatggagatgagctgatacgtttgccatgtggacataagtttcactctgtttgcttggatccttggattcgctgctgtggagactgtccatactgtcgaagaagtatagttgtaattaactaaatactcccttaccacagaacgaggatgagtaggttggttttctagattgactttgttttgttctgtggttgtatgtcaggataagaatgctgtagtggagctggtttttttgtaaggatgcttaatacttgtctcttatcttgatattatgtatttatttttatttttttcccttttcctggtgacaatgggaaagatgtgggtagcttaatatggtattgtaagacgtgttataaaataataccagccccgtgaatagtaaatagtaattttaatatttgttttctt

SEQ ID NO: 78395 - DNA, 855 bp, Glycine max
  Clone ID: PAT_MRT3847_41807C.1
tacggctgcgagaagcccacgcgtccgggtgagtctgcagtgggtgtagtgtagtagttggcattactgtgagctcccgcaggcagcagcagcactcatagagcttgcgagcgagtggtcacttggccacagttatcgccgtttccccgccgagatctctcaatctccgacgactcagatacctctattaatttttgttcctccggttaggttaggctataatacgtagtttttccttatttatggcttcggagaatgtgaagaccggggattcggccgtgacgacgatcgtcaatctcgccgaggaggccaagctcgccagggaaggcgtcgtcaaggctcccagctacgccctcgccagcatctgcaagtcgctcgtcgccggtggcgtcgccggaggagtgtcagtcacgtactgcagttgctcctctggaacgattgaaaattttgctgcaggtccagaatcctcataacattaaatacaacggaacagtacaaggcctaaaatatatatggagaactgaaggattccgtggacttttcaaagggaatggtactaattgtgctagaattgtccctaattctgctgtgaagttcttcagttatgagcaagcttctaaaggtatactgcatctgtataagcagcaaactggaaatgaggatgctcagctgactcctcttttacgccttggagctggagcttgtgctggaataattgctatgtctgcaacttatccaatggatatggttcgaggcaggattactgtgcagactgaggcatccccatatcagtacagaggaatgtttcatgctttgtctactgtgctcaaggaagaaggtgctcgtgctttatat

SEQ ID NO: 78396 - DNA, 127 bp, Glycine max
  Clone ID: PAT_MRT3847_41808C.1
ctcacatgcaactgcaacgtttgctaccactgaatctgatgggaacaacttgggacctgctaatcaaatgatggtccgctcgatggatgcttaccaagcattatcatttatcagtgactccaaaggg

SEQ ID NO: 78397 - DNA, 826 bp, Glycine max
  Clone ID: PAT_MRT3847_41809C.1
cggccgctcaggcggcgggcgggactgcgtcaccgtgctgaggtttgttgttgtgtttgtggcctctctcagccgtctcagtctctgcctaacactcgctcatcctaaaatatgatcatttcttcgccgtaaattcgccggcaacccgagacctcaacttctcactgccgttttctcctccctcaaaaaaacaaggttagggttttcatggcttcggagacgaaggtcgtgaatctggctgaggaagccaagctcgccagagaaggtgtcacggctccctcctatgcttttaccaccatctgcaagtccctcgtcgctggtggagtcgccggaggagtatcacgaactgcagttgctccactggaacggttgaagattttgctacaggttcagaatccccacagcattaaatacaatggaacaattcaaggtctaaaatatatatggagaactgaaggttttcgtgggctgttcaaagggaatggtactaattgtgctcgaattgtcccaaattctgctgtgaagttcttcagttatgagcaagcttccaaaggtatactacatctgtatcagaagcaaactggaaacgaggatgctcagctgactcctcttttccgtcttggggctggagcatgtgcgggaataattgccatgtctgcaacttatccaatggacatggttcgaggcagaataactgtacagacagagaagtccccttaccagtacagaggaatgtttcatgctctgtcaactgtactcagggaagaaggtccacgtgctttatataaagggtggcttccttcagtcattggaagtattccttatg

SEQ ID NO: 78398 - DNA, 948 bp, Glycine max
  unsure (1)..(948): unsure at all n locations
  Clone ID: PAT_MRT3847_4180C.1
attcccggngtcgaccccacgcgtccgcaacaaatagagaaagaaagaaagaaagaaagaaagcgagatcaaattgttggagaaacgcgaattaatccagaaatcaaagaaagcgttacttgacgttcgtttgaacatcgaaaacattaacacaaatggcaacacgaactggtcgcttgtttcaaaaccaaaacctcaatgtccacgttaatggaggaggagctgtttctgggaaggctgatttaaccggacagaggaaagttggggctgggggaagaaaaccacttggagatcagtccaatgcagggaacctcatcaaccaatttgatggaaagaaagcccttgacggttcattgaacacaggcaaaccctcagcctctgttagtcaggcaccgaaattgcacaagtcaaagaatcttgaaagtgacaaaagaattccagcttctgagaaattactcactcgtggcaggaaagtactttctgacatttcaaactctgggaagccacaggttcctgagataaaaaataagaagaccctgaaaccaatagaggagtctcttccccccagtgcaattgccgaagaacaaatcttgcacgatcataagaaatgcatccaatcacagtttgaaactgcagatgtgcatcagtttttcaagactgttggacttgacgatggtacatttatatattctatgtggtgcatttttttggcctttaactactttatactttattattgtttttgctaactgttggactttgagaatggtaaattttagcttttaacttgggctacttgtgattattgtttttgctaactgttggactatgagaatggtaatgctccttttggcttttaacttgggctactttatacattattggttttgctaacttgtggactttgataatggaatgttcattttggcttgtactggtttttactta

SEQ ID NO: 78399 - DNA, 161 bp, Glycine max
  Clone ID: PAT_MRT3847_41810C.1
ataaggggcaaagggctatccttccttcaatttaaaacctaatacaaattcttaaatcttgcccttctacaagtttaccaacatacaaaaccaggaagggtgcgctctatattctctgcatatgaattacacatacaaactaccggtattgcttaaaccta

SEQ ID NO: 78400 - DNA, 1733 bp, Glycine max
  unsure (1)..(1733): unsure at all n locations
  Clone ID: PAT_MRT3847_41811C.1
gtttgtggcctctctctctctctcagccgtcgcagtctctgccaaacactcgctcatccaaaattatgatcatttctgtgccgtaaattcgccggtaacacgagatctcaacttctcgcgccgttttcttttccccctttaaaaaaagtacaagttcaggttaagttagggttccatggcttcggagacgaaggtcgtgaatctggctgaggaagccaagctcgccagagaaggtgtaacgactccctcatatgcttttaccaccatctgcaagtccctcgtcgctggtggagtcgccggaggagtatcacgaacagcagttgctccactggaacgcttgaagattttgctacaggttaatccccatatagttgtttacctttaaatgtggatttagctatcatttattcttgttataaagaaaaaaagtgcatctgacaagctaccttttttgttggttcttttgtggttgggtgtatcgatatcatctgtgcgatgtgatgtgcctctgccatttacaggttcagaatccacacagcattaaatacaatggaacaattcaaggtctaaaatatatatggagaactgaaggttttcgtgggtctgttcaaaggaaatggtactaactgtgcgcgaattgtcccaaattctgctgtgaagttcttcagttatgagcaagcttccaaaggcatactacatctgtaccggaagcaaactggaaatgaggatgctcagctgactcctcttttacgtcttggggctggagcatgtgcgggaataattgccatgtctgcaacttatccaatggacatggttcgaggcagaataactgtacagacagagaagtccccttaccagtacagaggaatgtttcatgccctgtcaactgtactcagggaagaaggtccacgtgctttatataagggctggcttccttcagtcattggagttattccttatgtgggtctcaactttgcagtgtatgagtctttgaaagattggttaattaaatctaatccattaggntctagttcaagattctgagtttgagtgtgacaactcgcctggctttgtggtgctgcagctggaactattggacaactgttgcttaccctcttgatgtcattcgtcgaagaatgcaaatggtgggttggaaccatgctgcttttgttgtaactggtgatggaaaaaggaaggttccccttgaatacacaggcatggtttatgcttttaggaaaactgttcggtatgagggatttggcgcattatacaagggtttggtgccaaattttgtaaaggtggtcccatccatagcaattgcatttgtaacatatgaggtggtgaaggacattttaggagtggagatcagaatatcagatttaagatttgcatgcatgtgatatttgattgcctgttatttttttgtaggcaaggggatgcaaaaattataaattagggttacttttttgtttttcaactcttcaatgagttaggcagcccttgagttagcgtgtataaattaattcccctgcatcccatttgttttgccttgggaaaaaaaattagcttttagctttttattcatcttttatggcaataaatgttgtggaaaaacaatgcaaggaaatatctgcatgcatttttgcagagtgaacagtgaagaaagcctttttattggtttaaaaaaaaaaaaaaaaaaaaaaaaaaaaaaaaaaaaaaaaaaaaaaaaagaa

SEQ ID NO: 78401 - DNA, 243 bp, Glycine max
  Clone ID: PAT_MRT3847_41812C.1
aaaacacattaaatatttttttataaggggggtttttaaaaactgtaataccgcacttgttggaaattgcaaccaccaaagctccaaaaaacggtccaaccttttaaaattccttcaaaaaacaagtcacctcatattcttttggtgttaacaaatatttttattttttcatgtaaaaaataaaccttaaattgtccaaaagttaaggtttacttacttggtcgtcccaagctttgtcgtttt

SEQ ID NO: 78402 - DNA, 2758 bp, Glycine max
  unsure (1)..(2758): unsure at all n locations
  Clone ID: PAT_MRT3847_41813C.1
tacggctgcgagaagacgacangagggggtgtgtttgtggcctctctctctctctcagccgtcgcagtctctgccaaacactcgctcatccaaaattatgatcatttctgtgccgtaaattcgccggtaacacgagatctcaacttctcgcgccgttttcttttccccctttaaaaaaagtacaagttcaggttaagttagggttccatggcttcggagacgaaggtttctgtaggcggtggtgttgtttgctgtttgttttgtgtcaccctctatcctcatgttccgcagccaccactcagagccagcgagtgatgatcgcttcgccgcagtaatcgccggaaacgaattcgccgtttccctgccgagatctctcaatctccgacgactcagatacctctattaattttcctccggttaggttgttagggtataaatagtacgtagtttttccttatttatggcttcggagaatgtgaagaccggggattccgccgtcaccaccatcgtcaatctcgccgaggaggccaagctcgccagagaaggcgtcgtcaaagctcccagctacgccctcgccagcatctgcaagtcgctcgtcgccggtggcgtcgccggaggagtgtcacgtactgcagttgctcctctggaacgattgaaaattttgctgcaggtccagaatcctcataacattaaatacaatggaacagtacaaggcctaaaatatatatggaggactgaaggatttcgtggacttttcaaagggaatggtactaattgtgctagaattgtccctaattctgcgtgttaagttcttcagtaatgagcaagctgcttaaaggtatactgcatctgtttcagcaagcaaactggaaatgaggatgctcagctgactcctcttttacgtcttggatctggatcatgcgctggaatatttgctaggactgcgacttatccaatttatatgatggctggctgcattaagttgtggaatttgttctttgggatgtaagtccacttggtatttttcatggctttgtcagtttggttaatggaatcaaatcctttaggttcaagttcaagactgtcttcttgcatctgacagagtttttgcttatgtaggtcccacttttgctatctattagtccttaaatgattgtttcaatacatctaacccattgggtctagttgaaaattctgagttgagtgtgacaacacgcctggcttgtggtgctgctgctggaactgttggacaaactgttgcttaccctcttgacgttatccgtcgaagaatgcagatggtcggttggaaccatgctgcttctgttctaactggcgatggaagaggcaaagttccactggaatacactggaatggtcgatgcattcagaaaaactgttcagcatgagggatttggtgcattatacaagggtctggtgcccaactctgtaaaggtggtcccatcaatagcaattgcattcgtaacatatgaggtggtgaaggacattttaggagttgagatcagaatatcggactaaagtttgataacctcagatatctgttcacctggtgtggtttttcttttttttcttttttgtaggcaaggggatgcagagatggtaacttacagatattttcttgtttttcatctctccaaggatgagtttagaaactcttagagatagtgtccataaatttattcccttgttctatttgttttccttgttctatttgtccataataagtgttgtggaaaaacaatgcaaggacatatcttcctagctttctgcactagttgagaaatcatttttcttagtggaatttgcatttaactgaaataaattttttagtggaattattagttttgaatgatttcattacagcgtatgctgctgtgaaaaaaaaaaaaaaaaaaaaaaaaaactgaaatttgctcgcctctacccccttcctatccatggattattatatggttgtgaatgattaacgtttgctgctgtgacaatgttttttactcttcttttgggagtcaattagaaatagcagggttggacgaacactctatttctgttttgctagcccattgaaatgtagcgaacaccttttctgtccatttatgctcaactgaattttgtttcccaaactattcagcattccaagtcaaagctagaaccatcaagttgaaactatttagccatatattataatactttatttagggttacaaacactataattagtaactaggtaatagggacaagtagtcaatttctctctttcatttctagtctaatacttgtgcattgtttggttactttggtattttaattgcgtgatgaataacaactgaaatgcacgatggcagatgacaccgtgggcacaggagttaactttttggtgctggcgttgtccccatcctcttcactctgatgaaccacagcttctgatgctattgggatagcttgatgtagaccaacttttcaaaacaaattttgtaggaacatcctttttcctctttatgttgatttgtaatcctccgtggtagaaagatattacatttttcttccgtggctgatcataatggatgagtacgcaacgcttaattagatgtcaaaaactgagtgctacaacaatctttaagagaatttacttccccctgttgcgtttacaaaaaaaataaaagtagcagcaggatttcatgtgccaaattttaatcccctttaaacttaaagaaattatcataaatacatttttcttcaat

SEQ ID NO: 78403 - DNA, 768 bp, Glycine max
  unsure (1)..(768): unsure at all n locations
  Clone ID: PAT_MRT3847_41814C.1
cgaattcgagctctgtacccggggatcctctagagtcgacctgcagatggagacaagttggtatacttagtcctgaagaggttgctggtacttctttgccttcctgtgcttcagacgtttaccagttgggagttcttctttttgaggttcacaacagaaatatacaaaccatgtttatgttgctagattttagttggatcttttttatctgatttttcttccttttcatgttattccaatggaattataaagttttcacagatcctttgttcttattttctatttcaatttatgctaacttgagtattgtacttgtgatcagctattttgtccactcatctcaagagaagaaaagagaagaaccatgtccagcctaagacatagagttcttcctccacagttacttttaaagtggcctaaagaagcttcattttgcttgtggttattacatcctgagcctaatagtcgtccaacaatagggtaaattctcttcatcacatgccctttacatatgaaatatccaaattattttcacatgttccaattaccttccacttgtatgcattgntttctttttcctttctgttatgcatcatgcttaactgttgattggaaggttgacattcggctaattggctaataattttgaataattaagatcttcaagatggtttttcataaggaccaacactgaatttaggtcttgagattatttatagtttaggttttgtgatctgcatttcttcttgatggattcaatatggagtt

SEQ ID NO: 78404 - DNA, 236 bp, Glycine max
  Clone ID: PAT_MRT3847_41815C.1
attccaggcaaaattttcgttcgcaaacgtacttttggctgtaaccaaacatgccaccaaaatgagtttactctccaaactgtgtttggattactccaaacggaaaaccaaacataccctaaaaccttttgcaactaagcgtgtttttatacctttcaatagagtgatctgtcttttgactatgtaaacccacttgctaccaattgggatcacagccgcacgtttttctatgatca

SEQ ID NO: 78405 - DNA, 314 bp, Glycine max
  Clone ID: PAT_MRT3847_41816C.1
ctactcggcggccgccctttttttttttttttgataggaacacaatatgctaggatcatgcaggtggggactatgaacacatagacttcgaatgtataacattaacagataagtgcagttgcaccatgactgatataggacacgtccagtacggaagtatgagtagcttcaagacgagaatcgtttgtgaaggactcgggtaaagcagttgcaacgggcctaacggacctatcgagcggtggaacgtcggatttaagcgtggatacgcgtacaacctagagtgtgtaggcatacacaagctgaccgatggtcat

SEQ ID NO: 78406 - DNA, 825 bp, Glycine max
  unsure (1)..(825): unsure at all n locations
  Clone ID: PAT_MRT3847_41817C.1
ttttttttatctgattttgaactaattctttacaagaccagttttaaagattgatcaaactggcctagcaactgaattttggttgaaccgacctatttggtccggtcctaacaacaatgttgtaaagactgaaatcaagtgtatctctatacctagctagtacttactttggaagtcaatgacaaagaggagccaagaaaaggaaggttagctgatggctctcacataagcccacttaaataatggggtagtgttaagggaaatattcaattgtcaccagtaatcaccacaagagcaaaccccactcctgaaatgatgaaatcgatttgcatctctcaaaacaacctctcgctcaaaaacctttgatatatatttgattgcattatggcaatctccacacactctgaggtttttaataacccttaatgtagtggatnggtggagttttcataagcccataagctattgctagcttctcactatgataatacaaagaacactctttatcttcttcttctacatcaacaagtgcgaagtctgtgtcacggagatatccttcttctctgatcctcttcatgatatactccaccttattatatataacatcagtttcttcatgtgacctatcaccagctacaaacaaatgcaccttgttcttcaaatctacccagctaaaccctggatccttcttcacatttgcttttctcatcatatttctagcactcgccacattttcccattggttagcagccgcataaacattggataaaagaacataagcagctgaatcagatggctcnnngnccaaaagctntnctgctacac

SEQ ID NO: 78407 - DNA, 386 bp, Glycine max
  Clone ID: PAT_MRT3847_41818C.1
cctttactaacccatctctttctgcttcactatcctccctaaggagggtattcttatgaaccgtcagaagcccaaaatctctgtgaggttcattataatgaatcgggccaagcttatttctcaagctgatatcaacccatactccatgtattggactggtctggccaatacgtcactgacttagggcatctattttctgtgatgccattttcctagtttcaatggtttgattaccaagcaagttctgagcatgactgcttatatgataaacagtctttgttgtgtcgatgaaaaattgacgcttgtaatgacacacctgctgttagcttgttgttcaaggacggcaatttataataaagatttttggagagttatatgtgattcct

SEQ ID NO: 78408 - DNA, 453 bp, Glycine max
  Clone ID: PAT_MRT3847_41819C.1
ggcgagcgagctcgaggctcctgatcaataccatactcttccattataatttgtccagctttgagaacatcctttgaacttctgagaggagaactatgtagcaagagagcgggggcgattccccatctatcttatgccatattatgagaagagatagtattaggaaaaccaacgatgcacagctcactagtatcaatacagccaacttactggcatagacccacagtccaaaggtagttgacaacgggtatcacgttgaaagctgttctgtgcctccaaactgcatgcaacattaggacagggtctgataagaggcacaggaagcgacccatttaccgtttagtgtgcattagacttaagttacatccgcaagataaagggaacatcacattcataaaaggagcatacttaaacgttgctgcctatttgaataagctgaacgccatattgtga

SEQ ID NO: 78409 - DNA, 445 bp, Glycine max
  Clone ID: PAT_MRT3847_4181C.1
accaaactgggaagggccggccgggccccaccgagaggcctttcgcctgtgttgtttattgacatcttgcttccctgtctagggccttagcaaatctgacgccagaaacggttcaaaaagtacgtgattagctctcactgtttgttgctaactcttcctttggaggaggaaggaacgcgcccatcattgatgaggcacgatccactgtccgtaactccccaagatagggggcttttattgggtgtgtatcatgcccctacagtggcggaatctgctatacagtactgggatcggctagcgaggctggactgggttaccatcctgctgcttccagaacatgtgatggatgttcttactcctttaactctgtactgtcttatcatgggttccgtgcaaacagacccctcagaggagcatgatgacttggctcatgcactccaacagg

SEQ ID NO: 78410 - DNA, 455 bp, Glycine max
  Clone ID: PAT_MRT3847_41820C.1
tttttggtttttttttttttttttttttttcccaaccgtccaaggatttaagacgaaaggaacacgtacagccctggaatgtgaattaggaagaaaacacacggaaggaaacccatgcgcagaaaaagatcccatagaaattcagtagtccacaatctgtcttgtgaaatgggcattgccccccctctactttccacaagacgggaacctgctcttgggtgggactgacaaaaacaacctaaaaaacacggcctgcctttccgccacctatgagaggcccggcccataagatccagaggttggtccagggccatctcacaacaggaggcccaaatgtcacagcggggttcatggccgttccagaaaaggccccacctaacaaaatcgttagcgccgacaatgaacccaatggctacgggagcaataattcccaaattacccttcttggggtcaat

SEQ ID NO: 78411 - DNA, 328 bp, Glycine max
  unsure (1)..(328): unsure at all n locations
  Clone ID: PAT_MRT3847_41821C.1
aagagcttttgacgtcagcatgcacnnngcgtacgtaanngctcggatacttcggcttcgagttaatttagacagtaatcttgtgtatatctactgtgaaccttgttagcagacatgatcttacaagcagttgcatcattgacaaaatcttaaaaatctaatataaacacacgactgtaacatttaaactctcaggaaagatacattcggaacacactcgactcttacacacaaatcatgtagaatcttctccaattaactaaagaacctaactggaagagagatatctcgcaacccaaaaattaaaaacggaccggtacctgcaagc

SEQ ID NO: 78412 - DNA, 444 bp, Glycine max
  Clone ID: PAT_MRT3847_41822C.1
atcactgtatgacgtcctccttctttgggggggggggggggacgacgaagaaataaaagatagatttggcgtagcgtattaaggtacgggtgcaaggagaatggatgcaaatatgaagagtacgaagagcaaaatgataatatacgaaaaggctaacacgcaaaaattgatcataaagcaggtgccgcgttacagttagcaaaaggaagcatatgagggattatttagtacgtgtgcccgtccctacgttaaacaccgtgaaccgtatctaattgacaaacggacgtagcgagcgtacggacgctatcagttcaggcttcaggcgtaagacgtcacaagggcgggtaaacgtcggcctctaaaggcgtaattcgtggaagcaattttgtaacgcgtttgacgggatttaccgttagagttagggcatttagcgaagggcttata

SEQ ID NO: 78413 - DNA, 416 bp, Glycine max
  Clone ID: PAT_MRT3847_41823C.1
ggggcaaaccaagaaaaaaatttccatttcagcttttatgctattttagcaactgatccttgtttgtatcaatgatatgcatgacaaaaaaaatgggcaatactagccttaacagcgtgaatagggacttgttttgggtttgttactaagatgcaacatttcgttgactatatatcataagaatctgataccgatcaacatgtccattcttaccgggatgtctgttttcatgccaatacaagtcactgcattgtgcccatatccagtcaactccattgatgtctcctcaggagctagcctcatgttgaatttcttcttcgcgatacttccattgttgagcgaatacagaaaattcttgacagcctcagcgttgaagcgagcggtgtactgaacgacaacgacatagtatttggaat

SEQ ID NO: 78414 - DNA, 513 bp, Glycine max
  Clone ID: PAT_MRT3847_41824C.1
cggctgcgagaagacgacagaagggtaccctcttctgagtgtctaacccttaaaactgattcatgcatactttctttagaccttaattagaagttaccctctcccgagtgtctaacccctaaaagaatataaagatgagaatgcaagagaaacatagaaaagataatagaatagaaaaacctggaaaagactcatgtgacattgataaatatagaaagtacaccatacatcgttggttttttaggcctgctagatcctaactaggggtttagccacactcatggtcattgagggctttacaatgagaggggcgaaagaaagaaaggaataaagatgataaaagaaaggagaatagttctcaggctttaggtagtagtgagagtgttctaagacttggtatgtcgtttcctcttgaccaggctatctatttatagctgctgaagtgggctttgggccttcgtaggctcacttagcgcgcccttcctcgctcagtgccaaaagatcgcacgctta

SEQ ID NO: 78415 - DNA, 508 bp, Glycine max
  unsure (1)..(508): unsure at all n locations
  Clone ID: PAT_MRT3847_41825C.1
aacacagaagaacncgggagacgccaagaaagaccnacacaagncaccggggacagagcacccaacagccccaagagaggaaccnaaagaccaggaagacggggagcacaacgcaaagcacaccgccgaggcaggaacaaacgcacaaacnggaggagaagaccccccggaaaccaaccccaagagggtttttttttttatagacacaaaagcatgcaatgatcttctccttaaggccaaccaaattggttctgtgaccgacagtattgaagctgtcaggatgtccaaaaaaagtggatggggtgttaaggcaagtcacataagtggagagactgaagacacctccattgccgacatttctgttggcttggacacgggcctaatctaagactggcagctcctggagggtcagacggcctggcctaaatacaacatcctattgacaattgacggcgagtccgggcgtgtaaacaccgtatagcaggaagcaaacttccagagccctgta

SEQ ID NO: 78416 - DNA, 1839 bp, Glycine max
  Clone ID: PAT_MRT3847_41826C.1
gaagttacttgcttttagggctcctgatgacactcgtcaagaggcatatgctaagttactggctttgaaaaaacaattgcatgagaagagcaaaaatttctgggaatacaaagatgctgcaactaaagcacaggaactagcagcaggagggaaaaaagaggagctgcaatgcttctgtgttgatgaggttgagagaatcatggagctatggaacaaaaatgatgagttcagaagggactatgtccgatgcaacactaggagtacgctgaggcgactgcaaaccctggatggccgatcacttggtcctgatgaagagcctcttgtaatgcctaatgcaataactgaaagggcttccaaaaatattcccatggtctcgaacacaactatggaacaagaaaagaaatctccaagagaatctgttaatgtaaaggatgaacctgattcgaaggttgtggcacaaagaactgaaacaagtcagacaactaaagctaaaaagcctaccaagcctgctcccttagagaagcatgtggctcgttggggtgatgagtctgatgaagatgaagataaagataaaaatgaagaagaacctgtgagaacaaaggaggaagaggagctgatactgaaggctgagaaggcaaggaaggaggaagaggaggcaaagttgaaggaaaagcggaggctagaggagattgaaaaagctaaggaggcactgcagagaaaaaagcgtaatgcagagaaggcccaacaaagggctgccttaaaggcacaaaaagaagctgaactgaaagagaaggaaagggagaagagagcaaagaagaaggaaagaagaaagacatcttctgctgtcactgctgagaatacagaacaagaatctgctcataccacagaaactctaacaagtgtggaagaaagtgacctgactgagaaaccagctgaggtaacaaaaaagccacagaaaccatctcaattcacaaggcagaccaaggtaaaatctgtacctgcagctcttcgcaaccgggctaagagaagaattcaaccatggatgtgggttctaattgcagttgtggttgttgttgccttgttttatgtgggcaatagcagctctttgagatcttcgcttgaaggctttggttactgaggacactcggaagcaatcacaaggcgtttgtcggggaagagttaccgttacatatttatattttacacaaatacatatagacgcaattctttcttgcccttgcaattttttcctgctagcttttggtcatagccattattttcttcatattgagatttgttagtttgggatgtgatgtgactgctgaatgcttctgccccaattatgagaataataaattattgtgattgtgccttctttatagagatcaatccgctgttaacagatttgtctttgcttgtcctgttaggggtcttgttggcaagataagaagcatggaacacatgatccagcatgaaactttgcctctaaataaagaaaagcaattgatacgcgagatcaaacaattgaagcagaaccgtgaggagttgtcttctaatatgaaaaagcaggatcaatcacaacaatctgtagacaacaaggatgacaatattgaagagcactttaagcatttacagcttttgaagaaggaaatggaagtgcttagaaataatgttctgaagtcagatacagaaactaaagccgcaaagaagaaatataatgatgataatgatgatgaatgatactgcatttttattatcttaatttttgtcattttaattttaattcgtttttatttgtaatttataactaatatttacagtcttaatttcgtatggaaa

SEQ ID NO: 78417 - DNA, 422 bp, Glycine max
  Clone ID: PAT_MRT3847_41827C.1
ccacgcgtccgagctacgttgcttggtgatccttcgctgtctgctcttactattgttgggaagcatatttgacgatgtgttggattgttcacccaccattagggaacgtgagctgggtttagaccgtcgtgagacatgttagttttaccctactgctgacagtgtcattttagtaattgaacctactacgagaggaaccgttgattaacacaatatgccatcgctcttggttgataagccagctggctcgaagctaccgtgcgttggattatgactgaacgcctctaatttagaatacgcactataagctacgcgtgcgtccgacgtccgttttgccgatctgcagtagggtgcctcagtccactaaaggcacgtgccgctggtgaccctctggaggcacgatagccctacgagactccttg

SEQ ID NO: 78418 - DNA, 442 bp, Glycine max
  Clone ID: PAT_MRT3847_41828C.1
acaaaaaaaaaaaatggtccaaaaaaaactgttcaacaaaattaggggggataaggggattacctttcattcccaaccaaaaaaatttcttcttttactctcacaaaattttctccttggggttatttttaattttgagacattttaagtacatttgtttcacatccctcaaaaaatttccaaaccacgacgggggttttcctatgcctagtctctcttgcaatttgaataattaaaaaccgaactgtccccatttataacctaagttttaaatacatccgaccaaatttttttccatgagctcaacaacgttcttgcctgaaccgaaaaaggacctccttccatgattttttcagcgggaggcccccttttttggacgaatttgacatattctgaaagtcgattgagaaggctcgtaaatgcaattacctccttcctttgc

SEQ ID NO: 78419 - DNA, 1146 bp, Glycine max
  Clone ID: PAT_MRT3847_41829C.1
cccacgcgtccgcccacgcgtccgatagaacccaatctgaaatatctagctctacctcggaaaccaagcatttgtgtgtattccttttcagggagttaagtggaagatggggttgtcaacagcaaggacaagcataggatcagtttgtgtttgtgccatctcaaagcctctccgccgtcactgccatttcctcccaacctctgtttctcctgtcttctcatgtcttcagaaaaagtgcaaattgaattttcaaaaaccagttcaagatgctgcagactcaaaaatatcatgtagcttagtgaatgtggaagatgggatagatgatgaagcatgtgaattagtcagtggagtggagctttcacttgaggagggtgatgaaaatatccgtgcttatctgttcaaggcagtaaaaaataacaatggaactggcctattgcttctttcagatgttttcgggtttgaggattctttcaccagagattttgcatatcgagtagcttgcaatggttacaacattctagttccagacttatttcgtggaaatccatggacaaaggaccagcaagatccagatgtgtttgaaaaatggattgctagacaaaacccagagaggatcgcagaagacattaccagatggacaaaatggctggttgatgaattcatggctgtaggaatttccaagaaacttggcattattggattctgctttggaggtggccaagtgttgaaggtgctggccaaagaccaaggtgcttgttttggcaccggagtctccttttatggtacaaggatagatccccttgctgcttctgatataaaagctcctgtcttgtttattttaggggacaatgacccactttgccaggtaagtgaaattgagaatgttgagaaaaaaattgctagcggctccaaagtagtcttattccctggtagaggtcacggatttgcccaccgacctggatctcctgaagaagatgtggatgctgaacaagcctatgtgattatgagagactggctatatgatcgtttggtcgtataaaattatatgtattgtatatatccaacacttgcgtcttaacatgtcaatagtgacctgtcaacattttgaatacattctcttttcagtcaaggaaattcccttgtact

SEQ ID NO: 78420 - DNA, 422 bp, Glycine max
  Clone ID: PAT_MRT3847_4182C.1
gggaagacagactgagaagtacataaagtaccaacctgaagatattgagacctacattgatgagttgtttgaagggaaacctcaccagtccattgctagaaggagaacataattaaccttcaatcaatgatcaatcaactcaatcccccatgcatcaccacccagtacatatcgtttttaccttcttcttttttatattacttatattttttctactttgaagcaaaaataaaattcgaaaacagctgcaaaaaagaagaaagaggcattgtgcaatgtaatgcacgtaggcctgcataatgaattgcattgctttcgtacgtgatcgtgtgttgttatcttattagaagatgagtggaggttgatcttgtgaatttgtttttgcttttgtttgtatggaggagatattaaatcaagttatt

SEQ ID NO: 78421 - DNA, 252 bp, Glycine max
  Clone ID: PAT_MRT3847_41830C.1
ggaagagtatgagaatatggacgatgtcggcacacttcaaacttgtggacatatctaccatgtgagctgcattattccatggctaacgatgaagagcttctgtcctatctgaaaagtatctgctttacctgaaagtacgaaggcatcatgcacttctggaatataaattactcccattatgtgtatagatttggacatccccaaaaatgacgacacgagcctgtatttggaaacgtaatcacaagcatgcta

SEQ ID NO: 78422 - DNA, 800 bp, Glycine max
  Clone ID: PAT_MRT3847_41831C.1
ccacgcgtccgaacttgatccgctcctggaacgcgatggcgcaggcgtagtcgccggcgccgatggctttggccacgcggctgttggctccgtcggcaccgatcacgacgtccacggcgagggagcggcgcgaggagccgttggcggtgtagtggacggtgtagggcgcgtccggcgaggcggggaggtcgagggcggtgacgaggccggagatcgcggtggcgccggcggcgtgcgcgcgggagcggaggaaggagtcgaggacctcacggcggagcatggcgatgaactcgtggggttttagtgttttgccgaagtcgacggcgatgttggaaggggagaagatgcgcatgtgcgtgacgtggcggtcgatgaggtggttagggatgtcgaactcttcgagcatgcagagagggatggcgccgccgcatggtttcgcgacggacggcgggttgcgctcgaagaggaaggtctcgactccgccagaagctagggcctccgccgcggaggatccggcggggccgccgccgatcactgccgctcggagcttgcggccggagatggatttggaggctttgatggtgaacgactttaagtagggtttaggttttgaggttggaatggaaaatgtaggtaaacaaaaactagtttgaattttcgcagccatggagaatgatgaatgaagagtgagttaggattttgcatcaatatctgtgatttagggttttctactttgctccctccatgtgtataatattttacattttctttagtaaagttgtactgtgggtatctttttc

SEQ ID NO: 78423 - DNA, 140 bp, Glycine max
  Clone ID: PAT_MRT3847_41832C.1
ataatgcctatgctccaaacttcaaactaagtaataatgataggtccaaatagatctgtgaaagagcttttagacaataattctaatatcctatctccaccattcatatcaacatttgcacaaaaaaaaaaaaatggcat

SEQ ID NO: 78424 - DNA, 392 bp, Glycine max
  Clone ID: PAT_MRT3847_41833C.1
cccgggaacgacccacgcgtctctttcacactagaactagttattctgtgaacctcaccttcaggcatggaatttgaaagtggtacacagaagcaaaagggcacatttgcatgcttgaagatggttgccttaatagctctatgtctcattctaatttctccagcagaatcatttgatccgttggatccaaccgggaacgtgacaataagatgggatatcatgtcctggacatcagatggttatttggccactgtgacattgtttaactttcaactgtaccgcaatatcatgaatcctgggtggacactaggatggacatgggcaaagaaggaaataatctgggccgcgatgggagctgaagccacagaacaaggaggactgggcgaaggtgg

SEQ ID NO: 78425 - DNA, 512 bp, Glycine max
  Clone ID: PAT_MRT3847_41834C.1
attccgattccaaggaagcgtttcccgctcatcacatgtatgacgatcctgccttcatttgggggggggggggagggagggggcgggcaacccaacaaaccacccagcatatcgtcgagaaacagggataaagtacggtaatgcgaggggcagtttcccctaggatccaaaacgttaaaaaacaaaggaaaaaacaaaggaaaaataaagaaagtagcaaccgaaaggccaacgtaaagttgaccaaaaatgatgggaaccctagcaaacgaaagaacgtggaacataataaaccaaaaccaaaaagtgagataatgggggtacggggcaagggggtccatggttagcggaagtttcgtgggcacacgtgtgctcgtagtaggggttaggttgccgtgcaaaacatacatcgtggcaagagataaacaacgaccgttatgtgcgcacagattatggccctgcgtagcgtagttttaaccatggtggcgcttagcgtaggtaggaaagaacag

SEQ ID NO: 78426 - DNA, 532 bp, Glycine max
  Clone ID: PAT_MRT3847_41835C.1
atgatgatctggaagaaaaagaaaaggaagtatttttacatattgcttgcttcttcggtcagaatgcttctgagcattatgtgaagggaatcctaggatttcgtggatttaatcctgaaattgatctcaaagttcttgttgataaatcactcataaccattagttgtgggatgatttctatgcctaacttgctgagagatttaggcaatggtattagagaaaaatcacataaagagccaagaaagtggagtagatttagggattgggaagttgatgctctatcaaaattgaaaaaccttaacttgtctattgtcgaggtggaggaggaccttaagttgcttgtgcatggcaagtttgacaaggtggagaagggccttgaggaccttgagttgtttatgcatgaccagattgacgaggtggaggagaagtttgaattatgcgctagtaacatcaaagattcatggaacagcttcttggacaacttttaaatttttatgtttttcctattttcattttctttaaatgaatgtac

SEQ ID NO: 78427 - DNA, 717 bp, Glycine max
  Clone ID: PAT_MRT3847_41836C.1
ctcggcttcaaagaaacacaaaaacggtgcgtttcgatcaggttggttttctccttcctcgctcgcacttcttcgttcagcatcagcatgatctgattgtgtttcgtctcaccccaccgttccgttttcagggaaatgggtctttggactttacttgaggggtttcttcttcttgcaaatgcgctagcaatattaaatgaggaccgctttcttgcacctagaggatggggcttccaagatttctcaggtggaaggactaagtcgttcaaaggccagcttataggcctcatttatgcaactcagtacctcagagttcctctcatacttctcaattccatctgcatttttctgaagttggtgtctggctgatgcttgacaagatgtttacttcttaagtattgcatgttcaggagtttttgtcagatgatttcacgaaggtctttaagatagtaggtttgccaaattccactggagacatatcaattgaaatatttgtcctgttttttgtgactttatttattgccacaaaatagtgttcttctttacaatagtaacataggaagggcatcatgattttcaattcagagttgtattcaatttattgagtatcaattatcatttctcatttttttttgttctacttgattctagctttgcttgaccgaattgatgctgatagagtaactcccgatatgatcaatttcttaactagtaccg

SEQ ID NO: 78428 - DNA, 213 bp, Glycine max
  Clone ID: PAT_MRT3847_41837C.1
cccacgcgtccgtcaagcattgcatccatctttatatgtatttagtttagtgctttagataaaggttcttccaaatcaagaggggttttaagatcatagtgtgtgttttgcaacaatggctaatttctttgctgctatgatcttagcactctttgccatttccatacttcatacaatggtaatgtctgctaatgaacaagtaggccacttgta

SEQ ID NO: 78429 - DNA, 397 bp, Glycine max
  Clone ID: PAT_MRT3847_41838C.1
cctgagcaatctggaaacattactgggcgagggatccttaaaaaggaaatggttgcttggcccattttaaaaaccaccggaaacttgattgcattggctgcaagtaaataaagcgggatagccaaataagttattaaagtgtttacagaaaaatggggggaatctcattcatttatacaaaaattaaagctcggtttccctgattttcctgttgagaactttaatattaagggacaacgggccaagattagctgtgggaagaggcaacaggattgccgtttgctactgtccccaaaactggattgccctttggaacggcctggtctttttttgcatggcgaacaaactcctcaggggttatgtgagaaccatgggttgcacagacaaatctgacttg

SEQ ID NO: 78430 - DNA, 464 bp, Glycine max
  Clone ID: PAT_MRT3847_41839C.1
ttcattttcttcttgatctcacttattattattattattaccacctcgtaactcttccttgattagctccgaaattcaagagaagaaaaatattttcaacaaaaatggcttttcatctgttgccaatgtcagatttgggtgtgcttcgttagcgaaacaaaaagtacgtacagtgttgttttgtttgtcttaatttgttccatggagatggagagagttttgtgggttggcattgctataggacttgttttcagcaactgggtcgtaggatatgaacaatatcacttcaatgaaacagagttgtctttattagaggctcatgaagcttccttgtcctacgccgggaccgagagaaataatcttctgctggtaggactcacccttattcaaaatgctgctgctaaaagagcagtctgcttggatggaacattgcctggttatcattggcatcggggatatggatc

SEQ ID NO: 78431 - DNA, 190 bp, Glycine max
  unsure (1)..(190): unsure at all n locations
  Clone ID: PAT_MRT3847_4183C.1
aagggtaaaggaattttaatggttttgcaaaacacatttcaaagttcatctcatgcaaaaatccggcttaattcggccggaaactaaatgtcaactaaattccaaaaantggtccgggcaattggcctggaaaaaaagtggtttcagatagactgttcaaataaacttcttaataaaatatttttaaaag

SEQ ID NO: 78432 - DNA, 321 bp, Glycine max
  unsure (1)..(321): unsure at all n locations
  Clone ID: PAT_MRT3847_41840C.1
gaatactctncataatcgtcatgcacacctcttaactctcaaaatacgactcgagcttcaccaccaaactcctacctttaactgccacacatctatctctctccaccctccaactgcaatggccgtccataccttattcgtgtactttttatctccctgtacaaaaccactactgccatctctcttctctcccactacccatattaactatatatctcactctccataacattcttcttacaacctctatcacacctattcgctctcccacaacccacatttttgcatcagcccctggcggaggaaccggaagaggacatg

SEQ ID NO: 78433 - DNA, 278 bp, Glycine max
  Clone ID: PAT_MRT3847_41841C.1
aaaatcacttgaaatttccagaggaggtcagattgacacccgaagccaaggatctaatatgcaggttgctttccggtgtgccacataggcttggtactagaggagcagaagaaattaaagctcatccttggttcacagatgtcatgtgggacaagctctatgaaatggaggcagcatttaaaccacaagtcaatggagagcttgacactcagaattttatgaaatttgatgaggttgaacaaccaaaatcaactagatctggatctggacccttcaga

SEQ ID NO: 78434 - DNA, 242 bp, Glycine max
  Clone ID: PAT_MRT3847_41842C.1
aatctgtatattatatggaaagtttaataaaaaatgaatgactaatctcctaggactgcctacctttactatatataggtacaacaggctctagtctgttagacacaaaaactagaacaagataattaagaaggtagagagtagagaatgcggagcgggttaagattgttgggtgtggtgtggtgtgtgatgatggtaacaagaaggagaacaagagtgttagtgagtggtgagagtgcgaa

SEQ ID NO: 78435 - DNA, 547 bp, Glycine max
  unsure (1)..(547): unsure at all n locations
  Clone ID: PAT_MRT3847_41843C.1
attcccgggtgcgacaccatcgcgtctcgtcccacgtcgttcccgttcgtattaggaaccacaataaaatggtcatatatttccttcgggtgggaagctgtgggaagccaagtgccnnntggaggttnnntccaagttagtgaattnntggttgtattttgggccttaagnntggagtgtaccatactgatcctttgttcnnccgaagaagggttggcattttctcttttgatnncaaacacgcatttcnnaccaaaggggtcactttnntctttgattctgcagaatttttaaatggagcatcgtgccaattgaagtnntttggtcggaaagtgcttctcagtggacttttcctttcgagaatcaatttcagaattggccacannaagtttgggaattgtcatataatggaaaatggtaatggtgaatagtgaacccggttcccctgaatttatgttcggtccttgtttgcgagggggtagccttcaaacgccttggggtgtcagctacatttgaatctctatntattcagcaccgtgtttgacac

SEQ ID NO: 78436 - DNA, 202 bp, Glycine max
  unsure (1)..(202): unsure at all n locations
  Clone ID: PAT_MRT3847_41844C.1
atggagcaanccggcnatangngantggcaaacttggctnggannggannnnngacgctgaataatcnnagatctgcaaggangtgnnatattggagaaanatttgctgaanaggnggttgannnggngggaaacagtnattggnganagntacngctnacnnggggctgnggagtggagagcnanntgagatnanaggann

SEQ ID NO: 78437 - DNA, 310 bp, Glycine max
  Clone ID: PAT_MRT3847_41845C.1
gtttgtttttggtgttggtatcttaactagagcacaggagtatcactagccacacttgggggagaataaggagggaagtgctgtcgcatgtgatattatgtcacatgctgtcgggctggtcaaaattagtgtacctcttttcaggaaactaggtagtttagaagggattatctcacagagaagctctaagcaaatgtctagggatctgatgatacttattaccgtctcggggaggttatggtcattacatactagcctttgatggaattacatagagcagtacgagtgcattagaggcaaattaagaaag

SEQ ID NO: 78438 - DNA, 990 bp, Glycine max
  unsure (1)..(990): unsure at all n locations
  Clone ID: PAT_MRT3847_41846C.1
ggctcgaggcttacaacgcctaccgcagattgtcgtatttggtttcccatgcgctggttgcgttgcccgcattagcatttctctcgctggctttcgcggcagccacgttttgggccgtgggcctggacggtggaatatcgggctttttgttttattttctgataatattcgcttcgttttgggccgggaactcgttcgtgacgtttctttcgggggtggtgcctcacgtgatgctgggttacaccatcgtggttgcgattctggcatacttcttgctcttcagtggcttcttcattaacagggataggattcccagttactggatatggntccactacttgtcgttggtgaagtacccatacgaagcggttctgcagaacgagttcgatgaccccgtcaagtgcttcgtgaggggtgtccagatattcgataacactccgcttggctcggtgccgagcctctgaaggtgaagcttttggagaccatgagcagcacgctgggaacgaagatcaccacctccacttgtttgaccacaggtgccgatatattgcagcaaaacggggtcaccgatttgaccaagtggaactgcttctggatcacggtggcttggggattcttctttaggttcctcttctatttgtcattgttactgggcagcaagaacaaaaggaggtgaccatcatcatcatcatcatcatcatcatgttgttgttagattgccttgttgctatagctaccgggattgtatttgtgctattttttttttttttaatctatttgttctgttcacccccaatgcatgcagttggcattctgctaaaaaaacattgtaatcttttttactacttccttaaatatttgcttgctacaagcattcaaacactcgtcaatcctcaactgcttaaagtaaagttcttatttaatattgttaccaaaaaaaaaagttataaaaaaaaaaaaaaaaagggatttaatcattgccccttcaag

SEQ ID NO: 78439 - DNA, 272 bp, Glycine max
  Clone ID: PAT_MRT3847_41847C.1
gcgctcacactgattgtcgcctttagatccagacctagccatgtataggcttcaagccacttacatagacgaggattatgaagagaacgatccttaatctaaagcccagcaagaccgaaggcgaacaggagcccctaccggcaccaccttcacaccctacgacaccccaaccgaacccccgaacgacacccgaacggagcccgagcccttcgaagatctctccgaggacgaggaccccttctaccgctgcaagaaatcccccaaatacggcc

SEQ ID NO: 78440 - DNA, 343 bp, Glycine max
  Clone ID: PAT_MRT3847_41848C.1
aaaaaaggggggggtaacccaacattttagagatacaaattttttgaaaaagagccctgggggaattaacaaataacaaagggtccccccccccccccttgggatgttcaaaatttttttccatacaaacatagatagattttttttataggtttttccaacccaggggcgggaaaaaccccgggcccaaaatttaaattttttcctgccccccaggtgggcccttcccctttttttttttttttccaccatttttttgccgaaaaacaaaaaaaaagccccctttgtcctttttttgttgggaatcagggggttccttgaaagggaaaccttccccaaatgg

SEQ ID NO: 78441 - DNA, 620 bp, Glycine max
  Clone ID: PAT_MRT3847_41849C.1
tacagacctaagaagttgtacctacccttaagccgaattatcaccaccatcatcatgtcactgtccaatggagctgattcaactgccacttccaagcagcaaaaacctcagctcccgaacccctttgatctcactgactctgagatccttgagaaagtttatctgacccacctccatgatgaagacaagtgcgatgtagaagtccttttggacattgtgtccagtattgtacttaagacaaggttagctgaaggcaaagcttctcagaccattttccaaccagaatttcgtacaatgaagctgatttcttgtcagatgataaccacacctcatggtgaacgctacgtgcaccaaacaacaatgtgcattcttcagcacctgagaagctactcgtgggaggcaaaagcactagtaactctagcagctttcgctttggagtatgggaaccttttgcacctgagtgatgtagaaacaccagagaaccaactcacaaactcgttgaaacaactgaaccaagttcaagctagaaagaaccctggcactactttggtggagttggtgatggaagtgcttcatggcattcaagagttgtcaagactgtctggtcttgattatgacat

SEQ ID NO: 78442 - DNA, 332 bp, Glycine max
  unsure (1)..(332): unsure at all n locations
  Clone ID: PAT_MRT3847_4184C.1
cccattgtactcggacgcgngggcggacgcgagggcagaactggccaaagagacgcgcgtgccgagaacaccaaacaccgtgaacgcgctctccgctccatactcaagaccctgcgcgccgtagcggaaaccggagcaaccatcgaccgctgtaaccaaacccaatccattccccaactccaagtggtaaacgggattgatccatcactcgctcaaagaaagtggggatgatgatcacaatgagaagaagaacaagggaggggaaccgagtcataaactacttggggatgaaccgacgaagtggacgagaccatccactgatgcagaagaag

SEQ ID NO: 78443 - DNA, 359 bp, Glycine max
  Clone ID: PAT_MRT3847_41850C.1
agagcacggagacagcgaagcttttgctccctctcttcctttttgttcaagctggaactcatggcccattcatgagatctgtgtcccgctgaggaggctcttaaggcattcctacaacacttggctgatccagtgctgccagctcaaccttctatacaagataatttcccttcaccatctcaacaccagctagttgccaaacagggatatatcctcactcttgtctcttattctctgacaaagattaacctgcgtgatttatttgtatacccgcttacagggtgtcttttaaatgttattattacatgcttgcatggttgtagaggatgttgtgttattatagtctgacacatgttcta

SEQ ID NO: 78444 - DNA, 499 bp, Glycine max
  unsure (1)..(499): unsure at all n locations
  Clone ID: PAT_MRT3847_41851C.1
gatataattaattaattcaatttgtattttctcgcttcttatcaagtgctattagtagaaagaaatgaatcgtattggttcagcactttcaaagtcggttttcatccctcgtttgttctgtcaccgtttcttcgccagtggacccaccgatgcgcgacaaaatgtgctcgttgtcattgtcgatttcaacggcgaacagcaattgcttgtcaacggaaagtacagcgaattgctcggccgttcccccgactttccatttccgggcaacgtgaaaccgttggctgaaatgcaacagcaacaacagcagaaatttccattccctttggacgccttgccaaccaaacaactcggcaatggcttgggtgctgtcatgccactccacaaaatcgtcgagccttcatttgttgtttcggacgatcgtaccgccataccacgagcgttaaggcatcaccgaatgtggcaaatgggtgaagatgatggacggatgacngctaacaca

SEQ ID NO: 78445 - DNA, 661 bp, Glycine max
  Clone ID: PAT_MRT3847_41852C.1
ttattggtcgcagcagctatgcattttctcaaacaattggtgttcaccgttttcccatgctttccactgaacttgcttgccctacatatcaatgacgaggaatgcctccgccgctctcttccgtcatcgcgctgccattctcaagtccgcacatttacatcacgaatgtttcactgaaattatcttacgcaaatgcgtgccgttggattaccgttgctcgtctttcttatggcaccgcaattcatattcaactggtttcaccagcgtgcatggcgaaacgccctctgctgagtatgcgaggatgaggagggaatcactggaaagtaaattcgggcatgctcttggaacttatagctctaagagtttcaatgctatctaccgatttggcccctttttggctttgtacagggcaacaattatttcatttcatgtgttaaggctaatgatatggcaattattcgttcaagacatgggaaaacgagcagttaagtttcgtgaaactctaatacgcttgggtcctttctacattaagcttgggcaggcattgagcacccggcctgacatattaccaacagtatattgccaagaacttgccaagttacaggatcaaatacctgcgtgttcaactgatgttgcaatcaaatctattgagaacccattg

SEQ ID NO: 78446 - DNA, 557 bp, Glycine max
  unsure (1)..(557): unsure at all n locations
  Clone ID: PAT_MRT3847_41853C.1
cccactcgnccgcggctgcgagaagacgacgcgtggggacaaccggaaattatcatcctagcaaaagtttaataagagttatgacaaagaaagagatgaaagttattagagttgtgattatgatcctgattatgtttgacttctcacaagctaattacaatccttcatctatgcaaattgggtcaaattatggatctgatggacgattcgcttgtcaaatcaaatgtcagaaaaaatgtcaaaaatatctattacttccaccaggtgttattttttatataatatgttatcattcatgttttcggaaatgtgataaaatgcccatcgatgttgctcaagattgtgtcactagttgtgtcttgaccaagccaattgacgtcaacattgatgttcgtggtcttacagatgacatggtggattcttgtatacaagagtgttacaagtaatatttattacaaaaatattgtccaagaacatggttgttaagagaaatagtatacatgcataattgtaataagcaaatcttaaatatgaataatatctattttatcntttgg

SEQ ID NO: 78447 - DNA, 339 bp, Glycine max
  Clone ID: PAT_MRT3847_41854C.1
catactataaatttctaaattttcttccgtggctccattactccagactttgatatcaaggaacaaatcatttcccgtaaatacaaaagtgttattcggacgctacactcctgacttaactgtcaccccattaactcacacctaagaagggcagtgcggtcctttatgtgaagactcgccttggagaggttaggcatgcttcaaccccaataaatgcttaacttatagcccttctcagttccacgataagtccatgctagccaacccatatgctttcgtgctgacaaggcacccgttcattttcctcttcccaagtgacctggacccgcgcgatgttaa

SEQ ID NO: 78448 - DNA, 278 bp, Glycine max
  Clone ID: PAT_MRT3847_41855C.1
aagacttgaatactagttccagtgatatatgtagggggaaagagagagatgcctaatttttttggggggctttaggaatgtgcttcaaaagggttgacgcacatgatatgatatatccattttatgtttgctgtgttatatatcctacaatgtctccactacacagttcacctttctttgtcattaaaaaatactttgctatgctaactaggtcattaattatcatggaagatgttggctccaattaaaaaaaaaaaaaaaaaaaaaaaaaaaaaaaa

SEQ ID NO: 78449 - DNA, 307 bp, Glycine max
  Clone ID: PAT_MRT3847_41856C.1
gggaaagtcttacccaaccgtgagcgctgattaccagaaggccgttgagaaggcgaataataagctcataggcttcatcgctgaaaagagatgcgctcctctaatgctccgcttggcatggcactctgctggaactttcgaacgtatctcgataaccggtggtccctttgtaaccatagagtaccgcctcgatctcgctcacggcgcttacaacggtcttgacatcgaatctacgcctaagtaaccactcaatacgtaccttcctaatttgagtcacaccaaacctatacttatatacagactaggc

SEQ ID NO: 78450 - DNA, 496 bp, Glycine max
  Clone ID: PAT_MRT3847_41857C.1
tctcgagccgaatcggctcgagtacggctgcgagaagacgacagaagggctacgaaagacacttaattcccactcattagaagtcacttcctctccagttgcaatgtttccttctaacatttacagtaccactaccaccactactcaaaagctttgtgtcacataacacagtcctttagtgtccaggacaaatatccaaaacaaaagaactacgcaacaaacaattaaaatctgcaaaacacagcttagcaaagagaaactatgcatttttaagggagcaaaaacatagggtacgaagaatacaccgaagaagaagaagaaggactaatgtttacagtaatgaatacatgcaacagccaacagaatgcaagctgagttagaagtcatacattcatagggattgccctacaatattgtggaagcaacaaattcatcaccagtatatttttcagagttcaacaaccagagctgtcaagaattccttactttgcatctc

SEQ ID NO: 78451 - DNA, 348 bp, Glycine max
  Clone ID: PAT_MRT3847_41858C.1
gccaggtttacaaggtgtccatcgtagcagcttgtgggctttcatggcccagtgaccgtctcgttatccaagtcctggacgattcaactgacactgtcattaaggaaatggtggagcaagaatgtttgagatgggcaagtaaaggcatcaacataacgtaccaaataagggagaacagaacgggttacaaagctggtgcgttgaaagaaggcctcaagcgaagctatgtggagcattgcgagtacgtggcaatattcgacgcggatttcaagccagagccagactttctcaggcgagcgattccattcttggtggggaaccctgagattgccctggttcaaagctcgt

SEQ ID NO: 78452 - DNA, 285 bp, Glycine max
  Clone ID: PAT_MRT3847_41859C.1
cacacgcgtacgcaaatcttctccccactttcaatgcctacactcttaccctttctttcagcgtaggcttacactaactctcacacgtgccttcttcaacccccacacgcttcagtcgctatgtgtacgccgctgacaccaccgttcatgccgcccctaccactcaccatcctgagaagctaggagctgatgatgagccgtcggtacaaccgagacttgcgatgaagctcatatggatggagatgaacattggaaatgcgcttgaccagatggtaccgggcacat

SEQ ID NO: 78453 - DNA, 239 bp, Glycine max
  Clone ID: PAT_MRT3847_4185C.1
ggctgtgagaagacgacacaaagggatctcctactggctgatgaagaacagagagtgcagatgagaccctgaatggcaggccctagaaaatctactggggtagcatgttcagagacacctgatactaatcagaaacactttatactatctgcgataaagctattccgccttgtcatgatatagaagatgatatatctgatctttcttatgcaaatgaagtttctcaggaacatgatgat

SEQ ID NO: 78454 - DNA, 319 bp, Glycine max
  Clone ID: PAT_MRT3847_41860C.1
accaggcaaaatttcccatggcttggggttcaaatcgggagaccaagactaagtaagagaggactccaagttcaatggattattaagggactcctaatatgttgctaattggatatgttttagcaatgttttgaccgttatatcagtaacggtttaacgagtctgtgttctttttttcttttgttcccacgactgtggctgaattccccagttgctgaggttcttttgactcgggctacgtgaagcctagtaaaaccttttttttttttttacattcaaaaaaaaaaaaaaaaaaaaaaaaaaaaaaaaaaaaaaaaaa

SEQ ID NO: 78455 - DNA, 537 bp, Glycine max
  Clone ID: PAT_MRT3847_41861C.1
tggccaagttgcggcttcagaaaccccgcccagaaaatttccggggcgacacgctctctcttcgcggggcgcgctctttttttttttttcacacacatattttggaatgagccgttaaatatagattttgggatggctaaaggggctttagctttataccaaccaactacatctctttatactatgaacatgcatatatattctccactgtatagcatataaccaaaggtcgactaatattatttgacagacaaaacggggttggacactgaccctctattaaagtagatatttcaagtgacaaaggtggccaagatagttgaagttacaaccatgagccaaggaaggataaaagcaaacaacataatttgcttataaccaaacctttaaaaactggagagctaacaactttggtattagctggaactaaaagctgtatgaacatatgaggccaaccttcgcccgagaacactatgcaaatcccctctatgaatctagatatggtggagctgatgagtgctatcattgctgcaacga

SEQ ID NO: 78456 - DNA, 1970 bp, Glycine max
  unsure (1)..(1970): unsure at all n locations
  Clone ID: PAT_MRT3847_41862C.1
ggcccgctcgaggcncggccggagcacagcaagcttatatttacaattacgaaacttggttttgcggaaaagcaaagtaacacaacatagcatccgatacacattcttcctttctctctcttcgtctctcttcagtgaattcgttttcctcttcaagctccggccatggcgtctggatcctcgggtcgcggcaactctgcctcgaaaggcttcgatttcgcttccgatgacatcctctgctcctacgacgactacgccaaccgcgattccagttccaacggcaatcacaccgatccggattttcacaaatcaaggagggcaagaacatcaatgtttcccactactgcctataatccacctgaagattctttgagccaagatgtgattgcgactgtagagaagagtatgaaaaaatatgctgacaacctgatgcggtttcttgagggaattagttcaaggctatcacaattggaattatattgctacaatcttgacaaatctattggagaaatgaaatctgatataaatcgtgaccatgtggagcaagattcaaggctgaaatctcttgaaaaacatgttcaagaagttcacaggtctgtacaaattttgagagacaagcaagagctagctgagactcagaaagaattagccaagcttcaacttgctcagaaagaatcatcttcctccagccattcacagtcaaatgaggagagatcttcaccttccatggatccaaaaaaaactgataatgtatctgacacacagaaccaacgagctagctcttgccttgccacatcaagtggcacctccgcaaccggctgtggcatcctcctatcaagtgccagccccaaatgtgagccaagccactcaacgacctcattattacttgatgcccacccctttgcccaatccacaagctgtgaaccagcttcctcagaatcagtattggccttctgatccgctgtatcgaattccacaatcaacatcatcatctcaggcaacccaatccccacccgtgcaacaatttttgcagtatcagcagctacagcaccaacaacagcaatgggctccacagttaccaccacagcaggtgcaagtgccacctccacaaccaccctcagcacagtctcaagtgagacccccctcaacaaatgtttacactccatatgctaccagccaagctacaaatcctcttcccacagaaacactaccaaacagtgtgccgatgcaaatgccttattcaggaattccaccccaaggatctagcagtggtggtggcggcagtgatgctatgccatatggatatagcggagctggtagaacagttccacagcaacctctgctccagcacatgaggggctctttttcagcacagccaggtgatgtgtatggaaatagtggaacgcacaccatgcgtcctccggttagttcctacaatgtgtatgatggtgagaatgccagagcacattatccacctgaaccttctcattatgctcaagctggatatcctccaactagtgcatcccttcacaaccctgcatcacataatcttatggtcccgagtcctagccagtcacaatttattcgtagccatccctacaatgatttgatcgagaaatttgtgagcatgggatttagaggcaatcatgtagcaagcattatccagaggatggaggaaactcagcaacctatagattttaactctgtacatgaccggttgaatgtgcataatccccagaggggatggtcagggtaaagaacttgtactgcatataccgtttgaacaatggtgtgcaccaaattctgtttgaacagtgttatcctgcatgtcctgtataaacaatgttgtctccgttcaaaccctcaaatcattgcgtgttttagtatgcatgtaataacaaaccttgatgtaatgtgcactgtattatcgtatatagcatatattatatacaagatttagtgtcgattcc

SEQ ID NO: 78457 - DNA, 876 bp, Glycine max
  Clone ID: PAT_MRT3847_41863C.1
ataacaggttggctcgtacgaaacttggttttgcggaaaaacaaagtaacaccacaacacagcatccgatattacacacatattcttcttcttcttcttcttctctctctctctctctctaaatatttttctctctcttcagcgaattcgtttttctcttcaagcttcggctatggcgtctggatcctcgggtcgcggaaactctgcctccaaaggcttcgatttcgcttccgatgacatcctctgctcctacgacgactacgccaaccgcgattccacttccaacggcaatcacaccgatccggattttcacaaatcaaggatggcaagaacatcaatgtttcctactactgcttataatccacctgaagattctttaagtcaagatgtgattgcgactgtagagaagagtatgaaaaaatatgctgacaacctaatgcggtttctagagggaattagttcaaggctatcacaattggaattatactgttacaatcttgacaaatctattggagaaatgaaatctgatataaatcgtgaccatgtggagcaagattcaaggctgaaatctcttgaaaaacatgttcaagaagttcacaggtctgtacaaattttaagagacaagcaagagctagctgagacacagaaagaattagccaagcttcaacttgctcagaaagaatcatcttcctccagccattcacagtccaatgaggagaggtcgtcacccaccacagatcctaaaaaaactgacaacgcatctgatgcaaacaaccagcagttggctcttgccctgcctcatcaaatagctcctcagccgcagcctgccgcaccctcagctcaggctgctgctcaaaatgtgactcaagcccctca

SEQ ID NO: 78458 - DNA, 513 bp, Glycine max
  Clone ID: PAT_MRT3847_41864C.1
cccagccttctcattatgctcaagcggataatcctccaactagtgcttccatcaggagcatgcaccacataatcttatggtcgggagtcctagccagtcacaatttattcgtagccatctctacaatgatttgatcgagaaatttgtgagcatgggatttagaggcgatcatgtagcaaacattatccagaggatggaggaaactcagctgcctatagattttaactctgtacatgaccggttggatgtgcataatccccagaggggatggtcagggtaaagaacttgtactgcatataccgtttgaacaatggtgtgcaccaaattctgtttgaacaatgttatccagcatgtcctgtatgaacaatgttgtccaggaccaggatgctccgttcaaactctcaaatcattgcgtgttttagtatgcatgtaatagtaaaccttgatgtaatgtgcacggtataccgtatatagtgaatggaattgggtactacacttgaaatcatttattca

SEQ ID NO: 78459 - DNA, 336 bp, Glycine max
  Clone ID: PAT_MRT3847_41865C.1
ctctgtttccttataattctgaagaggccttaggtgacgtcgaccgatctacctcactgtacttctctgagagtgaaacggtgagggctctagaagtgggcagcagagacatgtagcggatcgacgatcgtctcatgagataatacctcaggctggacaccgtcacatagaagcagagtgccaacccagtagtgctgcctgagacacgacccaattgtagggagactcaggctgcgatgccaggctcccactcccaacaggctgcagtaaatgccgacctactggcgcgaacagtccgtgcaccagcactgggtgcgacacctgagctatccaacc

SEQ ID NO: 78460 - DNA, 317 bp, Glycine max
  unsure (1)..(317): unsure at all n locations
  Clone ID: PAT_MRT3847_41866C.1
agtgttaacaagagaaacagtgtttagtgtaagtgatttttatttactgtatgaactattcaatacgggcagcggttnattaatagacgggaggagggaattactaataattaatttcaattggccttattcaagacaaccaataaagatagcttatttacagatagggtgttttacttttttgacacaaatcatactggaatacttgatttcaaagagtttgcacttgctctctcttcctttcatcccaactcatcaattgattattatattgatttttcattccaattctattatcttaaacaacaaatatttat

SEQ ID NO: 78461 - DNA, 275 bp, Glycine max
  Clone ID: PAT_MRT3847_41867C.1
ggaagacggggataagcgctgtaagcttctgctggggataggaattctggtgctcctgatcatcgtgattctgggggtgcccttgattatcttcaccatcaaggccaacagcgaggcctgccgggacggccttcgggcagtgatggagtgtcgcaatgtcacccatctcctgcaacaagagctgaccgaggcccagaagggcttccaggatgtggaggcccaggccgccacctgcaaccacactgtgatggccctaatggcttccctggatgcag

SEQ ID NO: 78462 - DNA, 348 bp, Glycine max
  Clone ID: PAT_MRT3847_41868C.1
agctttttccaaacaaaaaaaattacgtcttattcctgtcctatgtgaacaacatattgacgatctggataaagataacagctcacacctaggttcaagagtgagcacgcttagttttgaatcttctaagacagatttcaagacataatctttttctgacaaggggtatgtccctgctacaactaccaaataatacatagtaattgggatagaggagctatgccggaggggcctcctcaaccactccatgcttgcatacttaaagagatccttcttgcgctatagcccatgaatgcgccaacagatccagctggggagacaaatgtgtcagcagcaccatttggaggt

SEQ ID NO: 78463 - DNA, 327 bp, Glycine max
  Clone ID: PAT_MRT3847_41869C.1
cggggcatgggtacaaaaaccccgctgtttttatcccactttcgtccaaatgagaatcttctatttccttaacatacatatattccttaaggtaccaactttccgaggaatagcccgtccgccaaatgttcaaaccgcttattgggagaaaaaattttacgtgggaaaacagctcttttcaaaaatccatatcccaaataaatggactctgtcccccaagggaacaccgtcccaccagggggttccctctccccaaattttttctttccctgccccactttttacgagaagggatcttgccggtttttttgggataggcaaaaattc

SEQ ID NO: 78464 - DNA, 341 bp, Glycine max
  Clone ID: PAT_MRT3847_4186C.1
ttttcagagattgaacgagaatgtctgggactctgatactgagagtctagactggtgagtgagtgctgctgcatcttctgaatcaaaaaattcagcagtctgtggtactgattctgctgacaccaaaagggggaatcctcgatgtccaggtataaggagcccaactttcacactttatacttgtgctatgctgcatcgtcacgtgcattctcttcgatgactctgatctctggactgacgattcttattcctcccatcaacaccacaacgcgtattgtgactgaggtgctgcacatggatttgagtcaagtaggagatccgttctacgtctgaaaacagac

SEQ ID NO: 78465 - DNA, 2251 bp, Glycine max
  Clone ID: PAT_MRT3847_41870C.1
cccacgcgtcctgttgttttgttttgttttgttttgttaaacacttagactccacaacctctctctcctgttccacttcctctttcggccattgccacattccaacacaacaacaacgttaaagcagaaacacacgcacatattcgtgttcgaagtgaaacccaaagagaacacagagcagagagcaggagcgaagcatgacttcgaagcagacatacagcgtgtgcttctgctggcgacggcggttcaagctggcgctggcggaggcgccgtcggagatcaagaccctcttcgaggagtactccgagaatgagttcatgacaccttcgcatctcaaaaggtttctcgtggaagtgcaaaggcaagagaaggccaccgaagaagacgcgcaagccatcatcgacagcttcaggcatttccctcgcagaggcgctggcctcaatctcgaaactttcttcaagtacctcttcagtgacgataacccccctcttcttccttctcatggggtgcatcatgatatgactttacccttgtcacattatttcatatatacaggccataattcctatttaactgggaatcagctgagcagcgactgcagtgacgtccccatcataaatgcactgaagagaggtgtgcgggtgattgaattggacatatggcctaatgcatcaaaggataacatagatgttcttcatggaaggacattgactactcctgtagagctcataagatgtttgaggtctattaaggatcatgcctttgtggcatcagaatatccagttgtaataaccctagaagaccaccttacgccagatctccaggctaaagtggctgagatggttactgaaacatttggagacttactatttactcctaactcagaaagtgtgaaggaattcccttctcctgaatcacttaaaaagagaattattatatcaaccaaaccacctaaggagtaccttgaggcaaaagaaaaggaaaaaggggatgattcacagcacgaaaaggagaaaggggatgattcacagcatggaaaggcattaggcgaagatgaagcttgggggaaggaagtcccaagcttgaaaggtggtactatagaggattacaaggactacaatgtggatgaagatcttaatgatgaggaagaatttgatgaatcagacaagtcacatcataatgaagctccagaatatagacgtctaattgcaattcatgctgggaagcctaaaggtggattagcagaatgcctcaaagtggatcctgataaagtgagacgtctaagtttaagtgagcaacagcttgaaaaggctgccataaatcatggacaacaaattgtcaggtttactcagcggaatatactaagggtgtatccaaaaggtactcgcattgactcatcaaattataacccattaattgggtggatgcatggagctcagatggttgcatttaacatgcaggggtatgggagatctctttggttgatgcatggaatgttcagagccaatggagggtgtggttatgttaaaaaaccaaattttctattggagactggtccagatgacgaggtcttcaatcctaaagctaagttacctgtgaagactactttgaaggtgactgtatatatgggggaaggatggtactatgatttcaagcatacacactttgatcaatattcacctccagacttctacacaagagtggggattgctggagtccctaatgatactataatgaagagaactaaggcaatagaggataactggttacctacatggaatgaggtattcgagttccctctcactgttccggagttggcgttgcttcgcatagaagttcatgagtatgacatgtctgagaaagatgactttggtggacaagcatgcctacctatctgggagcttagaagtggcattcgagcaattccactgcatagccaaaagggggataaatacaacactgtaaagcttctcatgcgctttgaatttattaataattgattctgtgcagtgcatgtgcatccttctgctctacattatcattattattattatgtacagtcattaagatgtgttagtagtaagagtttgtttgtagtagctggatgatatcgtaaaatgatgtaagaaataaaatgtgttgtgtattttgttttcttgaggagacttgtttgtcttgtaaggcttgtcaatataaacacaaggaaattattcgtgttttgtatgagatactttttaagtcatctgtactc

SEQ ID NO: 78466 - DNA, 1377 bp, Glycine max
  Clone ID: PAT_MRT3847_41871C.1
gtgtgcttctgctggcggcggcggttcaagctggcgctggcggaggcgccgtcggaaatcaagaccctattcaatgagtactccgagaatgagctcatgacaccttcgcatcttaagagattcctggtcgatgtgcagaggcaagagaaggccactgaagaagacgcgcaagccatcatcgatagcttcaggcatttccatcgcagaggcgctggcctcaatctcgaaactttcttcaagtacctcttcagtgacgataatcctcctcttcttccttctcatggggtgcaccatgatatgactttacccttgtcacattatttcatatatactggccataattcctatttaactgggaatcagctgagcagcgactgcagtgacgtccccatcataaatgcactgaagaaaggtgtgcgggtgattgaattagacatatggcctaatgcatcaaaggatagtatagatgttcttcatggaaggtttactcagcggaatatactgagggtgtatccaaaaggtactcgcattgactcatcaaattataacccattaattgggtggatgcatggagctcagatggttgcatttaatatgcaggggtatgggagatctctttggttgatgcatggaatgttcagagccaatggagggtgcggttatgttaaaaaaccaaattttctattggagactggtccagatgacgaggtcttcaatcctaaagctaagttacctgtgaagactactttgaaggtgactgtatatatgggggaaggatggtactatgatttcaagcatacacactttgatcaatattcacctccagacttctacacaagagtggggattgctggagtccctaatgatactataatgaagagaactaaggcaatagaggataattggttacctacatggaatgaggcatttgagttccctctcactgttccggagttggccttgcttcgcgtagaagttcacgagtatgacatgtctgagaaagatgactttggtggacaaacatgcctacctatctgggagcttagaagtggcattcgagcaattccactgcatagccaaaagggagataaatacaacactgtaaagcttctcatgcgctttgagtttattaataattgattctgtgcaatgtgcatccttctgctccccattattattattattattatgtacagtcattaagatgtgttagtagcaagagtttgtatgtagtagctggatgatatcgtgaattatgtgccccgttaaatgatgtaagaaacaaaatgtgttgtgtattttgttttcttgaggagacttgttggtcttgtaaggcttgtcaatatatactacttatatatatatatatatataaac

SEQ ID NO: 78467 - DNA, 346 bp, Glycine max
  Clone ID: PAT_MRT3847_41872C.1
ctcgagccgaatcggctcgaggcccccactcctggtgagagcatagcagtgctgcaacagctagagggacccctttcgccagctgagctagcagggattctacaaagaacattggaagaacaaggggtggcttttggaagtgatagggctaagcaggaagaaaagatccgagcagaccgtaggcttagagaagagcaagatgctgcatatcttgcagctttgcaaattgacaaggaaaaagacaaaccgaatagtttacctccaagagagagacttcagaagccgggtgaagctcacaacaacagaaattatgggaaattgttgaacaattctatcaatgtcacta

SEQ ID NO: 78468 - DNA, 591 bp, Glycine max
  Clone ID: PAT_MRT3847_41873C.1
gcctcaaggtactccttaggtggtttggttgatataataattctctttttaagtgattcaggagaagggaattccttcacactttctgagttaggagtaaatagtatgtctccaaatgtttcagtaaccatctaaaaatttggataggattgtcaactattaagaatgtaagcattatgaatcccaataaaactccaagtaactaacctcagccactttagcctggagatctggcgtaaggtggtcttctagggttattacaactggatattctgatgccacaaaggcatgatccttaatagacctcaaacatcttatgagctctacaggagtagtcaatgtcctgtaagcttaccttccatgaagaacatctatgttatcctttgatgcattaggccatatgtccaattcaatcacccgcacacctctcttcagtgcatttatgatcgggacgtcactgcagtcgctgctcagctgattcccagttaaataggaattatggcctgtatatatgaaataatgtgacaagggtaaagtcatattatgatgcaccccatgagaaagaaaaaaaggggggttatcgtccactga

SEQ ID NO: 78469 - DNA, 154 bp, Glycine max
  Clone ID: PAT_MRT3847_41874C.1
tttacaaaacacgaataatttccttgtgtttatattgacaagccttacaagacaaacaagtcttctcaagaaaacaaaatacacaacacattttatttcttacatcattttacgatatcattcagctactacaaacaaactcttactactaaca

SEQ ID NO: 78470 - DNA, 2535 bp, Glycine max
  Clone ID: PAT_MRT3847_41875C.1
tacgctgcgagaagacgacagaagggggcacacaacacacatattcgtgtgtgtttgaagtggaagaaagagaacgcataacacagaacacagtgcagacagcaagtgatgacgtcgaaacagacatacagcgtgtgcttctgctggcggcggcggttcaagctggcgctggcggaggcgccgtcggaaatcaagaccctattcaatgagtactccgagaatgagctcatgacaccttcgcatcttaagagattcctggtcgatgtgcagaggcaagagaaggccactgaagaagacgcgcaagccatcatcgatagcttcaggcatttccatcgcagaggcgctggcctcaatctcgaaactttcttcaagtacctcttcagtgacgataatcctcctcttcttccttctcatggggtgcaccatgatatgactttacccttgtcacattatttcatatatacttagcataattactattttaactaggaataacctttacagagactgaaggtatacctatttagcaaaaatgcactgttgtaagattgtgcccttgcctgtctgcttcacgtcagtcacagaattattgcttccttagaatgtattcctgtttcttggctgacagagaagagactcgaatcgctcatgcgtaatcaaactttaggaggtggagtttgaagggtgagaacccaatcacaaaaaataatacaagcagctgtaagagccatggaggagattcttgccaacaatgctccgatggttcaccaaagagatagagagatagtttttccaactaagttcgatgcggtaaccttatgctctggtagtgtttgattggagagtcgaaatatggtgccatcgaagctaattaaggcgttcgttgtggagaaggagacatatacatggcgacattgccgatgtttttgtggaggagctgccactgtcccttggaaaggcggctgccgcagagggaaagtggaggataggaataataattataatggtgatagtggagaaaaagacaagaacaggtacgtagaggaatgttttgatgatgaggaagtatttgcagaatcatacgagtcacatcataatgaagctgccagaatatagacacctaattgccattcatgctgggaagcctaaaggtggattagtggaatgcctcaaagtggatcctgaaaaagtgagacgtctaagtttaagtgagcaacagcttgaaaaggctgctataaattatggacaacaaattgtcaggtttactcagcggaatatactgagggtgtatccaaaaggtactcgcattgactcatcaaattataacccattaattgggtggatgcatggagctcagatggttgcatttaatatgcaggggtatgggagatctctttggttgatgcatggaatgttcagagccaatggagggtgcggttatgttaaaaaaccaaattttctattggagactggtccagatgacgaggtcttcaatcctaaagctaagttacctgtgaagactactttgaaggtgactgtatatatgggggaaggatggtactatgatttcaagcatacacactttgatcaatattcacctccagacttctacacaagagtggggattgctggagtccctaatgatactataatgaagagaactaaggcaatagaggataattggttacctacatggaatgaggcatttgagttccctctcactgttccggagttggccttgcttcgcgtagaagttcacgagtatgacatgtctgagaaagatgactttggtggacaaacatgcctacctatctgggagcttagaagtggcattcgagcaattccactgcatagccaaaagggagataaatacaacactgtaaagcttctcatgcgctttgagtttattaataattgattctgtgcaatgtgcatccttctgctccccattattattattattattatgtacagtcattaagatgtgttagtagcaagagtttgtatgtagtagctggatgatatcgtgaattatgtgccccgttaaatgatgtaagaaacaaaatgtggttgtgtattttgttttcttgaggagacttgttggatcttagtaaggcttgtcaatatatactacttatatatatatatatatataaacataaggaaattgttcgtgttttgtatgagaatactttttaagtcatctgtactcaaatgttggttttaacaaaaactacacttccgatgtcgttagtaaaccgagtctaggagcttccattcagacatcgcatgacgaacccaaaccggcatcgtacaaacgaagcagaatcgggcgcgtccaacattgcctcatccgcagcgtctccaacccctgctccctccgtgtgactcccgcgcaacaccactctgagtcgccgccaacgctggcccgcatcaacggcggccgcagcccccactcctgccccttactccactcccaacccagcactcatcaccatgatatgaatcctgcacgggccccccctgatctggtgc

SEQ ID NO: 78471 - DNA, 1092 bp, Glycine max
  Clone ID: PAT_MRT3847_41876C.1
atggtgtatcaattactaacacattagtcactcgcccttttgtgatttcacatttgcttttctattttttcgattacaaaaaagaagaaagaaaatcggtgcttttcatttattattatgtgaagaaaaaaaataaaatctcatatcatgttgtcaaccaagtcttgaatatgcggtgtgtttgttcgttcgttcaccattttttccttttaaaaaagaacaaatctcctttctctctctcttgccccctttactacacaattcaagcgtcttcttcataggtagattttcgtagcaaaataccaataaataaaggcaccaaacaaagatcaaacgcatggacgaaacattcaccatttttctcttttccgttctgttctgttctgctttgcccctcttttctcccaatgactactcaccattctctctctttccaactcctctgagcctcgctcgttaggttctctgtctcttctcggagacccacaaaacaatttcttatttatttccttctcaaacaaagaacctctatttccccttggctgctcagatctagtattcctcaagtcacaacctttttttgttccgttagcggtgtgagacatgagtaaagaagaattcttgaagatacagaaatgtgttcttaaagtgaacatacactgtgacgggtgcaagcacaaagtgaagaaaatcttgcagaaaattgatggggtgtttaccacagagatagatgctgaacaagggaaggtgacggtttcagggaatgtggatcccaacgttctgatcaagaagcttgcaaaatctgggaaacatgcagaactctggggtgcacctaaacccaacaacaacaacaataatcataatcataataaccagaaccaccttgccgaccagcttaagaacatgcaaattaacaaccatcccaaaagtggtggtggtggtggaaaccacaacaacaaaggtcagaatcagaaccaacccaaaggtggtggtggtggtggaaatagccaagccaagggtggtggtggtggtggtcaacaacatggaccaatctctcaacacaactttagctgcagctccacagcagcaacg

SEQ ID NO: 78472 - DNA, 1178 bp, Glycine max
  Clone ID: PAT_MRT3847_41877C.1
cattcaccatttttctctgttctgttctgctttgcccctcctttctcccaatgactactcaccattctctctctttccaactctgagcctcgctcgttagctaggctccctgtctcttctcggagacccacaaaaccatttcttatttatttccttctcaaacaaagaacttctatttccccttgctgctcactgctcactgctcagatctattattactcaagtcacaacctttttgttccgttggcggtgtgagagatgagtaaagaagaattcttgaagatacagaaatgtgttcttaaagtgaacatacactgtgacgggtgcaagcacaaagtgaagaaaatcttgcagaaaattgatggggtgtttaccacagagatagatgctgaacaagggaaggtgacggtttcagggaatgtggaccccaacgttctcatcaagaagcttacaaaatcagggaaacatgcaaaactctggggtgcacctaaacccaacaacaacaataatcataatcataataaccagaaccaccttgccgaccagtttaagaacatgcatattaaccaccacaaagatgctggaggaaatcacaacaacaaaggccagcatcagattcagaaccaacccaaaggtggtggtggaaataaccaacccaaaggaggtagtggtggtggtggtggtcaacaacaaggaccaactcctcagcaacaacttcagctgcagctccaacagcagcaacggctacagcaacagctggaacaacttcatcggatgaaaggacttcaagatctgaacctccctcaattcaaggacctgaaactaacccctcacaatcccaatctcaaccccaacgccaaagccgttaagtttgatatccctgaggaagatgacgacttcaccgacgacgaattggatgattttgacgatgacttcgacgactttgacgacgacttcgatgatgatgaaatggacgaccttcctcctagtaaaatgaaactaccgcccatgatgatgaatgctcctcccaagggtgccagtaatggcggtgatgggaagaaaggaggaggacccgttcctgttcctgttcaggtgcatggaatccccggcaatggaggaggaaagaaaggtggtggtggtggtggaaacaatcagaaccaaggtggaggtaacaaaaa

SEQ ID NO: 78473 - DNA, 258 bp, Glycine max
  Clone ID: PAT_MRT3847_41878C.1
aaccaaacttgccaaagtcttttatttccgtaatttggaaatatctatgtagttggtttcttaatttaattaaaggtggaatgaaaactctccctcacacgtcacaactttgtatgatagctcaaggtttgtatcttctggctcataaatttcaaggttgtctgcttcagcatgataagggaacaaggaaacacactgtacatggcttagcgttctacgctggtattcatccggaagaagtttggatagaacaagttc

SEQ ID NO: 78474 - DNA, 131 bp, Glycine max
  Clone ID: PAT_MRT3847_41879C.1
ccgctcgtcttcaatcctttcgttattctcttattcatccttctcttctgaataatccatatctcgtttcttggctaatctccaacactcttttacccaccccatctctatatatattatccatatctaca

SEQ ID NO: 78475 - DNA, 281 bp, Glycine max
  Clone ID: PAT_MRT3847_4187C.1
gggtgggacacatgggtgatagttccatgatactggctgagtttgcaatagcaggtggaaccctaactattgagggagtttgcagatacctcaggattcgtgacaatgcctttaaagatccaggagagctgttcagctactaggaactgctagcaagtatagcgcgaatggctccgagctcagacactctacagctgagagtagacacttgtggtatgtggagtacagataagccaggggcaggccacggcacgctccatgaaagctaggagggagtgaaa

SEQ ID NO: 78476 - DNA, 314 bp, Glycine max
  Clone ID: PAT_MRT3847_41880C.1
ttcaaagaaaacattatctttagcaaactgactgacacttagtaaatttttcgaaatggaaggaacatgtaatagcttattaagtttgaaagtaatatgagagtcattaggagacaaaaatgatgaagaaccagtgttggaaatgctcaaaccttcaccatttcctataaagatttggtcaggtccatcaaaatgtgacagctgtttgatatgctgtgattcaccagttacatggaaactagctccagaatttggaatccatgttgagttagcttgaccattaccctgaggtgttgaattggtaagcatcacac

SEQ ID NO: 78477 - DNA, 280 bp, Glycine max
  Clone ID: PAT_MRT3847_41881C.1
acaattggcccataaaaccaaagggggaagcccacacccaccgcccttgcataatgaaatagggcacaacttttaagacgggctcgcaagaaccattccccaagctcctaataggccttgctacctcccaatcaaaagcagcatatggtaagcaaaattgacactaaaaagggccctcgagtgcctattgcctattggtgaagccaaggcggaacctaaaggctctattttataacaaacttattaaaagaacagtcatatctgcggttcaaacaacttt

SEQ ID NO: 78478 - DNA, 145 bp, Glycine max
  Clone ID: PAT_MRT3847_41882C.1
cacaaatcgttcttttagtggggctaggaactagtgtagatttatggaacgctataaacagccaaaagcctaagttatgtgactcgctgtcttatgatggagtgcgctttgttcagagtactacatgggtctcttgagcacccat

SEQ ID NO: 78479 - DNA, 469 bp, Glycine max
  Clone ID: PAT_MRT3847_41883C.1
gggtcttttcacattacaggatgaaaccacctaccctgtggatcctgctaccctacacaaagctctagttacagatgccgacaacgtcatcccaaaggctgtcgaagccttcatgagtgatgaaaaccttgaggggaacggtggtcctggaaccatcaagaagatcactttcgttgatgatggacaaagcaagtttgagcagcacaaaatagaatcagttgacgacgcaaacttgtgatacagatctagcggtactggtggagtagggatgacagacacagagtagaagatcgcatctcaatgcaaataggatgctggcaccaaccgacggtgtgctgggaatctaactgtcatatgccagaccgatggagatgctcatcctagacaagacgacgtgaacatatgcaaagtcaagactgatgctgttcacaaggacgttgatgcctaccttgtgcgcgtgcgtaattac

SEQ ID NO: 78480 - DNA, 230 bp, Glycine max
  Clone ID: PAT_MRT3847_41884C.1
ctgctgttcaggctgcgatcttgagcggcgaatgagacgagaaggttcatgatttattgctgctggctgttacaccactcattctcggtcttgaaatgtctggtggtgtcatgtctgtgctgattccgcggaacacaactattcccccgaagaaggagcagtttttctcaacctattctgataaccagccctgggtgttgatccatgtgtttgaaggagcacgggctaga

SEQ ID NO: 78481 - DNA, 945 bp, Glycine max
  Clone ID: PAT_MRT3847_41885C.1
gtttgccagccagtggcctctttctggtcctacaacaataactttgacccctgctgctagttcttccttgggccccttaatcaatgctggtgaagtttttgcgctgctgcccctgcggcgaggatcgttgaccctacatgttattgctttggaaaaggtaaaacagagcctccgaaatcctccacttgattggaatggtgatccttgtatgcctcggcagtactcatggactggcatctcatgttctgaaggaccacgtatccgtgtagtgactttaaacttgacaagtatggatctttctggatctttatcaccttttgttgccaatatgacagctctgactaacatctggcttgggaataacagtttatcagggcagattcctgacctcagttcactaaagattttagagacattgcacttggaagacaatcaattcagtggagagattccctcatccttaggggacatcagcagcttgcaaaaagtgtttttacaaaataacaatttgactggtcaaattccagcaattctcgttggaaaaccaggactgaatatcataacttctggaaataatttcttatctcctccagcaccttgagggattcctttagtgccttccatagtaaagatgaagactgtccttttttcaagaaattttaattctttttgcgcctaaatgagttctgattctctgggggaagttcttcattgtcaattcgtcaactaaagatcaaacttcatttcagccttctcttgctgcacgacatacggatttcttgttttgacttggagtgtactttcagattggttgaccatattcatgtatgattctcatcatcagttccatgaaaattggaatgttatttgaattgtattatacatatcctggtataggcattatttattattttttattgaaaaaaaaaaaaaaaagatattatt

SEQ ID NO: 78482 - DNA, 901 bp, Glycine max
  unsure (1)..(901): unsure at all n locations
  Clone ID: PAT_MRT3847_41886C.1
acggctgcgagaacgacagaaggggttgattaaattttgtagagtccattagttacgaaagctgaagcttcttaagcacttcccttggttctcggtgtggcctttatttccaacatagctactttcatggctgtgactacctcttccagttccaccagcggcttcttcagtctccggtcaccaaattcggtcgattccagcagggtctcctccacccacggctcttcctccgcttgcggaaagttcgatggggtggccatgtggttcatcaacggcgtcacaaccgctttcttcgcctccttgaaccgttgctcttgcattcgcatcgccaccgaagaagacggcgacgatgccaacgacttgccgttgatgctcaacgacggaaacctccgccaggatggcgtcgtcgttgcgtgcaccaccagcaggagaaggacgggtaaagggaagaagagtgaagctgttctcgtcgacgacgactgaaaaaaagtggtaacaaatacgtactacgtaccctttgatgaggccttgaacaaattaaatcatatcaatgtctctcttaattttcttgctaagtgatcatatattataatgttatatgggtttgttaaaattgtgcttcacagcttacttatgttaattttggagagcgaaatgaattgttgtatgggggtgcttcacagcttaattatgttttggagagcgaaaatgatgaaattgagaaatttgatatacagaatcaagaatgattcatgtgtaatgaaataaaactaagcttgattttccccactttcaattttcttttgggcaatttttttatggaccaatgatatttattcaattttttcagcaggggacccaaaaaaaaaanaaaaaaaaaaagcggccgcccgccagcggg

SEQ ID NO: 78483 - DNA, 320 bp, Glycine max
  Clone ID: PAT_MRT3847_41887C.1
ccttgtttctatcttgacctctcgggggatttttaacaatctgccgttgttcacccctccgcttgtgaaatggtccactcacttggtggtggcgagatcattgttgaacatggtgcagctccatctagtcttggatgcagggacttgtaaagtcgctgaatacgatgggtgtgactgagcttgcgaagagcatgatggtggtattgcgaagaaatgaaaggaggatggtgtttaggaatcgtcacattgtgaagattattagattcaggaatgacaggggatatcacgatccgtttttttgttttagggcactcctttat

SEQ ID NO: 78484 - DNA, 176 bp, Glycine max
  Clone ID: PAT_MRT3847_41888C.1
ccgggtcgacccagccctcgtttagattgggaaattttttcctgcagcagccaaagaaccacctatctggaagacgcgtccaagctacgcctatagcgtaaccatagtggaagctactggccagcagagaccacattccgactacgaaaacactggcataacccagctgaaacccc

SEQ ID NO: 78485 - DNA, 405 bp, Glycine max
  Clone ID: PAT_MRT3847_41889C.1
tgttacgcgtccgtacgggtgcgagaagacgcagatgggggggtacacgggctctacaaccctaacgcgtgcagagcagagagagactcatccatggggcgaagacccgcgagggggtatagggaaattaagaacaaaccataccccaaggcacgggtttggcggggtggtcctgatcccaagatcaggatttacgatgttggtatgaagaagaagggggttggatgaggttcctttctggggccatctgggtaggtgggagaaggaaaacggttctagtggggccctggaagctggtcgtattgcttggaacaagtacatgggcaaatttgcttgaaagggtgctttccacttgagaggcatgggggacccattgcatgtgcttaggatcaacaagatgctttc

SEQ ID NO: 78486 - DNA, 266 bp, Glycine max
  Clone ID: PAT_MRT3847_4188C.1
actgggttcttattctccttcggacgctctcaagaggacaaagctggagcgatacatcggctgcatcatgtgactcaacagcaccaaactcctgaacgcctactccaaactactattccgtgccactatcttatgtgcactgattctcgtatatacgttgacctttaactaccctccccttgtcccatacttgacctgcgaccgtcacctgcactcccactcccacttgctctactactgctcctgcttctcctcctgtgagaagc

SEQ ID NO: 78487 - DNA, 461 bp, Glycine max
  unsure (1)..(461): unsure at all n locations
  Clone ID: PAT_MRT3847_41890C.1
gtgtggaaacattctgctatggattgtgctgcaatcacaacacaccaatatgtatctgctgagcagattgtgaatggcatgcatcaggcaaaggcagaaggagctgatatagtggagcttacgcttgactgcatcaccaatttccactctcaccatgacctcaaaatcattctccaaaataagccactacccgtgcttattgttaaccgaccaaaatgggaaggtggtttgtacgagggcgatgagaacaagcgggtggaagcattacagcttgctgtggaattgagtgctgatttcatagacgttgagctgaaggcagcttcttgtcttacaaccttggtggaacatatgagaaatcataatagtcatggcaaaatcattgtttcctgctatgtggatggcaccacccctccgcatgaagtactacttcaacttgttgaactaatgcangctactggagc

SEQ ID NO: 78488 - DNA, 426 bp, Glycine max
  Clone ID: PAT_MRT3847_41891C.1
acgctttctctctctctctctctcctacaccgcttgattgagagacttggagagggggaggcactctgaggaataaaccatctctatacctctttatctactgagcgctgacatgtatagagacagttggctgagagtggtattgtaggaacagtgcacctgaatcctacaatgaccagccagagcctttctctctaccagcacctgttccacaatggacacgaggggctggttttgccagaggaagaataagccttggaagactagaagttttaaaatacagcaagacagacagagtgctaaactgcccaagttctgatgagaaatgacagggcgtctgctgttacaaacctttagagagggcagatggttttttctgcctagctgactactgccagtccaatgaccagacattgagagggcatg

SEQ ID NO: 78489 - DNA, 592 bp, Glycine max
  Clone ID: PAT_MRT3847_41892C.1
acgagcacatgcaatgcagttattattctatcttatacagacattttcattctctctcccaatctcacaacaagtcacagacaattcggctcgagcacagacaaatatcccctttgattctctctttccctcttcaaactctgcgtgtctctgcgtgtacaagacacacacacacagtgagagaacatcacaacacaaagtcacataccactttcgttgttttctttcacgtcaaaaaaagagagaagaaaaatagaaaaaaagttgtgttctctgttattactctgcatgaaaacagagtcccctgtttcttgttcttattgcgatgaagtatattaggagcaacagcttgaagaggctcttctcgtttggaagacgcggttttggggaggaaaacgatgtagggttggtggtttctccttgtgaagagcaccctccaagaccctcttggaaatgcttctcttatgaagagttatttgatgccaccaatgactgtagctcagagaatgtgattgagagatgagggtatgcagacgtttataagggaacattgaatggtggtgatgaagtagcagtgaagacgctcacaaga

SEQ ID NO: 78490 - DNA, 448 bp, Glycine max
  Clone ID: PAT_MRT3847_41893C.1
gtctgctgttagatctgtacccgcctagccattgatttggaaaagtccaacttcaaggatgagtaagcttcagagtgatgctctaagagaagctatctcaggaatcatggctgattccaaggaaaagaacaggaaatttgtggagaccattgaactccaaattgggttgaaaaattatgatccccagaaggacaagcgtttcagtggctctgttaagttgcctcatattcctcgccccaagatgaagatttgtatgcttggagatgcccagcacgttgaggaggctgagaagataggattggactacatggatgttgaggccttgaagaagcttaacaaaaacaaaaagttggctagtatttcttgttattgacatttatgtttcaagtgctttgcaacatatcggataattttagtggtgctaagtttaagtactcgtgttttaact

SEQ ID NO: 78491 - DNA, 489 bp, Glycine max
  Clone ID: PAT_MRT3847_41894C.1
tggttgtgtttttcactagagaatagtttatgctttagtcgatgtgtatttattggtaaactcgtgttgtgtcaacatcatcgacttatgtttatgttttgggaatattttgctgcatgatcgtctagttcgatgttcactagtctcatcatttaggtaccgtagtagtgatgcaaatttaggaggtggagacttgagtacccgagtgacaaattttaaggtggattgtgttttgcataagataaggaaaccaaacggtcctgcttcagtgctttgtgtattggaactctgcgagggtgaccacagtaacgagtaatatttctcgcaatttactcttgttttatttttctccatagctaactactagatttttgtaggagtttttgaaaagtttaatagtttgttttctagaaataataatttacatacatttgttcaatgtagaactctggctgttatggtttatacatttacttcggctttaattca

SEQ ID NO: 78492 - DNA, 963 bp, Glycine max
  Clone ID: PAT_MRT3847_41895C.1
atcgagccgctcgagccgctcgagccaattcggctcgagtttcagctgtctgctgttagatctgtacccgcctagccattgatttggaaaagtccaacttcaaggatgagtaagcttcagagtgatgctctaagagaagctatctcaggaatcatggctgattccaaggaaaagaacaggaaatttgtggagaccattgaactccaaattgggttgaaaaattatgatccccagaaggacaagcgtttcagtggctctgttaagttgcctcatattcctcgccccaagatgaagatttgtatgcttggagatgcccagcacgttgaggaggctgagaagataggattggactacatggatgttgaggccttgaagaagcttaacaaaaacaaaaagttggtgaaaaaactagccaaaaaatatcatgcctttttagcctctgaagcagtcatcaagcagattcctcgtctcttgggacctggtctcaacaaggcagggaagttccctacacttgtgactcaccaagaatctctcgagtcaaaggttaatgagaccaaggccatggtcaagttccagcttaagaaggttctctgcatgggagtagctgtggggaatgttagcatggaggaaaagcaaatcttccaaaatgtacaactgagtgttaacttccttgtctctttgctgaaaaagaattggcagaacgttcgctgcctatatctgaagagtaccatggggaaatcgtaccgtgtcttttgagtagtggttcttaaaattcagtgaatttctgattgcacttaatatattgtcatgataggttggacagaatttttcatcgttctacagttttgttggatgagtattttttggctagtatttcttgttattgacatttatgtttcaagtgctttgcaacatcggataattttagtggtgctaagtttaagtactcgtgttttaacttgc

SEQ ID NO: 78493 - DNA, 1420 bp, Glycine max
  unsure (1)..(1420): unsure at all n locations
  Clone ID: PAT_MRT3847_41896C.1
actcctgctttaagacgacagaagggtacggctgggggagacttcagaaggatacgggggccacaaaaccacagaaggggagctagggtttcagtggtgttagatctgtacccgcctagccattgatttggaaaagtccaagcttcaaagatgagtaagcttcagagtgatgctcttagagaagctatctcaggaatcatgactgattccaaggaaaagaacaggaaatttgtggagaccattgaactccaaattgggctgaaaaactatgatccccagaaggacaagcgttttagtggctctgttaagttgcctcacattcctcgccccaagatgaagatttgtatgcttggagatgcccaacacgttgaagaggctgagaagataggattggactacatggatgttgaggccttgaagaagcttaacaaaaacaagaaattggtgaaaaaactagccaaaaaatatcatgcctttttggcctctgaagcagtcatcaagcagattcctcgtctcttgggacctggtctcaacaaggcagggaagttccctacgcttgtgactcaccaagaatctctcgagtcaaaggttaatgagaccaaggccatggtgaagttccagcttaagaaggtgctttgcatgggagtagccgtggggaatgttagcatggaggaaaagcaaatcttccaaaatgtacaactgagtgttaacttccttgtctctttgttgaaaaagaattggcagaacgttcgctgcctgtatctgaagagtaccatggggaaatcgtaccgtgtcttttgaggagttgttcttaaattcagtgaatttctgatcgcacctaatatattgtctttcgataggtttgacagaatttttcatcgttctacagttttgttggatgagtattttttgggtagtatttgtttgttatttggcaaaaaaaaaaaaaaaaaaaaaaaaaaaaaaaaaaaaaaaaaaaaaaaattttaaaaaaaaaaaaaaaaaaaaaaaaancccccttccgggggtccccccctggaaggggttcaaaaccttccccaaacgggaaaaaccctccaaaaaaaaactgggactccccctaaaacctcaaaggggggggaaccccccccccctgggcttttaggggaggcgggaaaaaaaaaaaaggggggtccaccaacccccccaaaaaagggtttcttgggcgcgccaaaatggtttccccccctttatccgtggggggaacccaaaggcactgggggggaattctccccccccccgaaaaattttccccggacactcccccgaaaggacccccggtggggggggcccgaaactccccttttttggcccattcggcacacaaaaaaaacacccccccctgaggggggaaacccccccccggggtgtccccccgggg

SEQ ID NO: 78494 - DNA, 298 bp, Glycine max
  Clone ID: PAT_MRT3847_41897C.1
tttttgaaacaataccgagcaactatattggtgtctaaaaaactaacaaaacagcatacaacctacgcgaggtgtgttttggacaggataatcgagaaagccggacatcctactatctgtattgtctaaaacagtatagtatctcaaaatcctaccatctcataaaagtgccgtatattaaaagtcaataacacagactattgagatattatccacccatcatttgttacacgcacgtaaaaaaacttaacaaatgtttgtacatacaaatgacaccgggccagcatattacagatcc

SEQ ID NO: 78495 - DNA, 434 bp, Glycine max
  Clone ID: PAT_MRT3847_41898C.1
gttcacgagagatgataactatatgaataagatcaaacccaatttctaccctgatgggtatacaattgggcccagtgtctcatccaaaccgctgatacttgactcctcgataatacccgcgtccacttcaggtgaagataagttgagtttgataaaactggctagcttgatggaagtttctgcgaagaaagtacacgcgagctcatattacagaacaagttgatggaccaagttgattggcttcctgattcaatagggaagttatctagtttgatcaaattggatttatctgagaatcgaattacggtgctgccttcaacgattggaggcctttcttccttgacaagtttgaatttgcattcgaataagatcgcggagcttccggagtgtgttggagatctcttaagtcttgtgtatctaaacgtagggggaaa

SEQ ID NO: 78496 - DNA, 230 bp, Glycine max
  Clone ID: PAT_MRT3847_41899C.1
ggagacgaacgccctagtatgctcagtaagatggcttcctttgtatccttcccactgccgcttcttgcagtccttatccgcatgcgggaatggcttgctacttactatcaggcgattaagaagccaccagtgtacatgcctccggtgtacaatccagcactgtacaatccatcggtttaccagccaaaatcaccggtttatacagcgaagccgcttgtttacgcgccacc

SEQ ID NO: 78497 - DNA, 359 bp, Glycine max
  Clone ID: PAT_MRT3847_4189C.1
ctctggcggtggtatgcacacgtcgctcatgaccattgactccggacgtatatgctgtccgcagtggcgactcgcaaatcactctgaagacaggctggtggaacagtagcttcttacaggggatgagcatttcctctgctgcctgaccctcaaggaattgacatgggatgatgttaagccgctgacgggaagaccatactggcatgagcatctttcgcctacatagctgcaaccccttcatctcttgatgccggagatgatcttgcagtcgatgcttccttctaatgaggtgcctactatgctcatcatgggggctagagctcggacctggtgcattatggaccaagcagacaccttgc

SEQ ID NO: 78498 - DNA, 1915 bp, Glycine max
  unsure (1)..(1915): unsure at all n locations
  Clone ID: PAT_MRT3847_418C.1
cccacgcgtccgcccacgcgtccgatttagtgctgcgtactaagtttttggtttcatcagatccacaccggaattctattcagactctatacatagttacatcgatcctcgcggggagagccaaataacgagatacacaggttttaattctttgagagcggaaatggatacattttcacatgtaccaccaggctttcggtttcatccaaccgatgaagagctcgttggttactaccttaggaaaaaggtagcgtctaaaaggattgatctagatgtgatcaaagatgtcgatctctataaaattgaaccatgggatctccaagaactatgcaaaataggaaccgatgaacaaagtgactggtacttcttcagtcataaagataagaaatatccaactggaactcgcaccaatagagctacaaaagcaggattctggaaagccacgggaagagacaaggcaatatactctaagcattgcctcattggcatgagaaagactctcgtgttttacaaaggacgagccccaaatggacagaagtctgattggatcatgcatgagtacagactagaaactaatgaaaatggaacttctcaggaagaaggctgggttgtgtgtagagtgttcaagaagaggatgacaacaacgcagaaagtgggagagtatgatcaatcaccctgttggtacgatgagcaagtttccttcatgcaagatcttgaatccccaaggcgcaatatttctcagacttatgcatcataccaccatcaccaacaacagcaccaccaccatccctgcaagcctgagctcatggaattgcaatacaacaacattccccacgatgcattcctccaacttccgcaactcgaaagccccaaagttactcaatcatcatgctcagttgtcccttatggctatgaaagcaacaacaacaacaatggaagcaccttgcaattctcatcactcactcaggaagaacagctacaatattgcaataatcaacaaagtcaccattctctctatggtagcaatgatcatgcagttgaccaggtcacagattggcgtgtgcttgacaagtttgttgcttctcagctcagtcacaacaaccaagatgtttccaaggaaaccagttattccaatgcacctatcttccatgtggctgaacaaatttctgtggctgcaaatggatccaaaaaggagcaagtttctcaggagtatgcttcaacgtctacctccagttaccagattgacctgtggaagtgaatttttatatatatatatatatatatagtaactataaataagatacgatgcataataccaattataggaagtacgtacaagtgaatgttggaaaaaaaagaccatagtgttgttgctacgtgttgttgtacataagaagcctaaaatgttttatatatcattagttgttgaacctcttgaggctggagtatatggactgaaaatgtatccattagttgcaattcttcagttgcaaaagacacgcctatatacagcaaacagattggtgcttcaaggtcaactcgatctacagcaagaagtgatctatatgatgggaagagttctatgaattaatgttacaggtgatttgttcactacagcttaatgttgcatttattataaaagttacatatgttttcagtttgtatttgaaatagccaattacttggatatatgattggatctaccagaagtttaagaatggagggatgagatttgagaatctaaactaagcatgcttctgatatatcgttcctccactgtgccagtttagaattgactgtaatatggccttttctgcaagcgttcaatttctgtatagcncataagatgtgaaatttcaaacaccaagttaaagagattataaatcactgaaattgactgaaaatcattaacttt

SEQ ID NO: 78499 - DNA, 487 bp, Glycine max
  Clone ID: PAT_MRT3847_41900C.1
ggctcgagtgttagcctgttttcagcagcatcttcttctgatgggagcagtactaatggtggaggacgacacggtcctaatattaacaaacctgagaatgttcaactggttgatctgcgcatagcatataattgtgaaataatgctctctaaaatcaaaattcctttgccagatatgcttcaggacaattttttctggatcattccaccccctattgaatctcttttttttaccgctacttggagtgggaactttgacccatttggtgaattgattactttatattgaatcctcaagcaaaaatggaatgataacaagttccgtggccgattggatttactccttttttaattgaatagcaaatccaagcattagtattgcaatataggcacaaatgtcactcattgatgcttctaattttcttcgaattgcaactctggcattggattctgcagttctcgatattgatcaagctgcgaatctcatc

SEQ ID NO: 78500 - DNA, 764 bp, Glycine max
  Clone ID: PAT_MRT3847_41901C.1
gtaatgtttaagatgatagacacgcacaacagtggtcaaattacttaaaaaaactcaaggctggattgaaaatgcttggtgcaaatctcagtgaaccattttattttgatttcttgttgcaggcagatgttgataacagtggcacaattgactatggagaattcatagctgcaacattgcatttaaacaaagttgacagagaagatcatttagttgcagctttttcattttttgatagaagtggaagtggctacatcactcaagatgagcttcaagaagcttgcgaagaatttggcattgagaatgtctgcttggaggaaatgatccaagaagctgatcggaataatgatggccgaatagactacaacgaattcgtggctatgatgcagagaggcaatgcagatttaagtaaaaacggtttaaagggtggcactgattttagtattgcgtttagggaggtactatcagtgtgttgagaaaaagtggaaatattttttatgctttttcctcgcggtggggtgaaattaattgcccttgaaaagcttagtcaggggctattattctgtaaaattgttgataggtttgttatagaggaaaattcatttcaaacatttgggtttcaacttgttgacatctaaatttcagccataccagcatttatttaaaagtgttgaatgcatcattattttaggagaattcatatcagcaagtttaacatgaactgatgagacttgataatggagtttggtagagggagcttttcc

SEQ ID NO: 78501 - DNA, 205 bp, Glycine max
  Clone ID: PAT_MRT3847_41902C.1
ggctcgagatgagaataggtttaccccaagggttgactttttatatggcacatcctagagccagtgcctcattgaattcttttttcaaatgatatagtgatagttgatgaatcaagagaaggactaaattccaaagttaattgtggagagaagcttaccaatggtttttttattaagttcgattaatacctcttttactcctttt

SEQ ID NO: 78502 - DNA, 435 bp, Glycine max
  Clone ID: PAT_MRT3847_41903C.1
ggctcgaggaacaaagcaaatagaaacatttttatatcatttaatttgtgcattttggatttatgaatatgttgtctcttgtagttctgctgaaccgttatcaaatattctaatactgtatacattgagcatattcaatttttttaggaatggatctattttgtgttttccccaatatattgttgcttaataaaaatagtaactgcctgtgtttttttgaaatcctaaattttgtctggtgagtttacctaaatttttatgatgtacaattcctggttgcaaaaattgaatattagctctttgtgcaggcagattgagattgacagcaagtttttggaattacaacagataatggattacagcctcctcctaagtgttcattatcgagctccccagcagctgcatccatacaaccaaaatagaactgcagatgga

SEQ ID NO: 78503 - DNA, 423 bp, Glycine max
  Clone ID: PAT_MRT3847_41904C.1
ataactggttacggaacagattggcgctacttttgctgttgacgttgaggaaattgcggctgggcatcacgttacgcctgtggacatgacaacagctaccagctaacttcagcttgaggctgacgaagtgcaaaatccgtcgactaaacctaattggtcatcgcattagcgctctcaattggtgcctaaaattgagaacaatttcattattgcattgaaaaatgccataaacaagcacgagagggacgaatcgatagccagggacaagactaattcggctcgtggtattatcaatttgatcaccgaagttgctaatgatcagctgatccgttacgttctcacccttttcaacgaccttttgcaggacgacaaatcccgggttgtgactgtccatgattatgcgagacggcaaaaacgaactat

SEQ ID NO: 78504 - DNA, 368 bp, Glycine max
  Clone ID: PAT_MRT3847_41905C.1
ttgctatccatccaaaggaaagtgaaccccaaggagacaaaaaccagaaacgtagagtcactccaccacaccacagcaccaaatccctttccttttttcccttcctgattcagcagaaaaagcagaagaaaaatccaagcttgaacctcaacccttgattcttcttttccttaatcagactctctctgaatctgatattaccacacacacacacgcaaacacacttaaaggttttctttcccccaaaattaccatgatttgatcccctctcatctctcaccagtcaccaccacagacacataaacccaaatggggtttcccagaaagtcactattccttcttctggtactgattttcttcacaaaacc

SEQ ID NO: 78505 - DNA, 1277 bp, Glycine max
  Clone ID: PAT_MRT3847_41906C.1
gtgatattttcccttctactttttcgttttctactattcaatgatcctttctcaccaacacaatgttcatcatatttaattaatccgtgttctaaagggaatattcagatagttcaactgcatattttattagtcacttcctgcgtcttcttcagtcattctctaaatttccggcatgggatctttttggtgccccttttacactctttcacactttgttgtcaattatcatatttccctataagctttcttctgttctatcaccctcacactgatcctacttcttcttttgagaaaggctcatctcaattacaattagtatcactatattcttctagctataattccttgtctaaaccaagagaaatgcatcacaaaatggtttcacattcaataatgctagttcagtagtttcattgtgagattcagcatttcagctgtttgatttgttcttctctacactacttttgttgaggttgttgttacttgtgaacagtgcttcaaaccttcacattgcctaaactaagagcaatgcatcacaaaatggtttccatttcattaatgcttgttttttttttttttttattcgtaggaatcaaatatagtataagtggatttacaacactcacacgctgccaatgagctggatccccttggtattaatgctagtttcactgtgagattcagctgtttgatttgttcttctcaactacttttgttgaggttgttacttgtgaaaagagtgcttcaaaccttcacaatgccaaatacatatttcccactaaggtgggagagcactggggaccaatggtggtatgcatcaccaatagattgtgctgctgcaaatggccactatgacttggttcgtgagctgctaagaattgacaacaaccaccttttcaagctcacttcccttcgccgaattcgccgcctcgaagtcgtgtgggacggtgaagaagaacaacagttcagtgatgttgcaaagtgccgctctcaggtggcacagaagctgcttcttgagtgtgagtccaagagagggagcagcagcagcagcaagaactctctcatccgtgcagggtatggagggtggctaatgtacactgctgcatcagctggggacttgagttttgtgcagctacttcttgagaggaatccttttgtggtgtttggagaaggagaatataatgtcactgacatcttttatgctgcttaaggggcaggaattgtgaggtttttaggctggtttttgattttgcagtttctccaaggtttatcac

SEQ ID NO: 78506 - DNA, 344 bp, Glycine max
  Clone ID: PAT_MRT3847_41907C.1
cagcgtgaccgctcttagttggagttgagtgctaactgcttcgctggggtcagtttgggtctcattaaaggcgatagaggatgagacacaggcttactccttgaaatgctctaacgcatacgaacttaattcgcaaaccaaaagggacgcatttcctatcgcgcagagctccatcaaacgactggcacagctctacacccttgaggactaccggatggaccatgttcatcaaaagccaaacacaatctttctactcaagcatgctgccgccatttgcatgaggttggaccttagctggagagccatacttaccttgtggaacaacgacaactgagactactaca

SEQ ID NO: 78507 - DNA, 707 bp, Glycine max
  Clone ID: PAT_MRT3847_41908C.1
cggctcgagttggaattcaaatttcgcattcaatctttgtaactgacagataaaggcgacaatatctcatctttcctctcacaccatcaacaaaaccaaataatgatgatgcagaagccaacactagcaacaacccttttcgccgttttgctccttatcccttcttcacttgctctcaaggaaggacaaacatgcgtagccgacaagaactgcgactcgggtttgcattgcgaaacttgcgtggccaatggaaacgtgcgaccacgttgcactcgggttcaaccaatcaaccccacttcaaagataaaagggttgccgtttaatcggtattcatggctgacgacgcataattcatttgcgattttgggtaagaaatcaatgacgggttctgttattctgtctccaaccaatcagcaggacacgatcacaagccagcttaataatggagtacgagggttgatgcttgacatgtatgatttccagaatgatatttggctgtgccattcatttggtggccagtgctacaactacacagcttttcaacctgccattaatgttctcaaagagattcaagtatttctagacgcaaacccatcagagattgctactatttttcattgaagattaatgtacaataccaaaaggcctaacaaaggggttcgatgctgctggactgaaaaatactggtttccaaagcctaaaatgcc

SEQ ID NO: 78508 - DNA, 254 bp, Glycine max
  unsure (1)..(254): unsure at all n locations
  Clone ID: PAT_MRT3847_41909C.1
gaacaaccaccanagcttccatctgatatgcngcacntnctatcncaagggaccaaccaaggacactataganagannnantggntctnntctttctgngagtaacgtaacatgcaatagatanttatgaatagagagannccaaaagagttgaagaaagattgttgttcaatttgaaaaatttgcccatcaagtaccctttttctgttttcattttnggttggttntgctncctatttcnaaccctgctcttg

SEQ ID NO: 78509 - DNA, 408 bp, Glycine max
  unsure (1)..(408): unsure at all n locations
  Clone ID: PAT_MRT3847_4190C.1
gagcacgaatcgcgctcgagcttagaagtataacaaataggaacataagattttctgaattagaaatgcttggaacaaaactcctaagttgcaccgtgcgcactaaaagatagaaactaagatgtagaatataataaatgaggggataagttctcaccgcttttgagcttaatttttggggattagaatctaggtctaacactcatatctctaaagagtagtaccagggacaatagggctcctaaaactcatattgctgagataagaatacaacaaatgttcatctatattagtctttcnttctctctatcaaacatattggaagggggtggtttttcttgaccttagaaagaagcgcgcatcttttttttttttctttctaatttgaacgttttatgtacctaaaaa

SEQ ID NO: 78510 - DNA, 331 bp, Glycine max
  Clone ID: PAT_MRT3847_41910C.1
ttcaagataggattgtgactatcgttcgatagtcaaggcatctaatgttttaaattcattttttgtgactacctttgactatcgatgattttaaaacagtgttccgaaaagtatttttcttccaagtataagaaaatgtttaaattctgaagtttgtttaaattacgcttaaatgagtctcccacgcctctcatcaagtggccaaatctaaagtaaaataccaaaaaaaaaaaaaaaaaaaaaaaaaaagacaaaagataaacaaaaataaaaaaattgaaaaaacaatgcgcttacccaactaattacgctttctggatattcccccttt

SEQ ID NO: 78511 - DNA, 363 bp, Glycine max
  Clone ID: PAT_MRT3847_41911C.1
gatactacacacagacacacagaggatcatatacacatacaacttcacaacatccacacagtccaacatggcttaattgatctctcttcaaactccttgcattctttctatcgttacaacaatgactttcgaagagaagacaatttagcataccgctttacacctcagttcccagctacacccttcaagagtgtgtcgtggggctatgcttcaaattgatcagcatcctccttcatcatccgtatgtgtacatacactacaatcgaagtcccaccatagccttcaagggtctctcatgaagcttccatgccttcagagcatgcataatcgtcgcattctcaggtgcgaccaatgcacttgtgg

SEQ ID NO: 78512 - DNA, 172 bp, Glycine max
  Clone ID: PAT_MRT3847_41912C.1
ggagtagtggttctcactactactccagtgttagctaatttctttccacccatttatgagcctcccccaattgagaaaccacccatatttgaacctccacccacctatgagcctcccccaactgaaaagccaccaccattatataagcctccattctaccctccaccactgt

SEQ ID NO: 78513 - DNA, 228 bp, Glycine max
  Clone ID: PAT_MRT3847_41913C.1
ccgagttatgttttgtcttcttatattgcacactacattttaccttaaatgggattaataaatgagaggtttttaagagggggggggggcactattggaatctcggtagagcaccctaacctgacgaaaccggtaaactatttccatagcttcaaggtctgccaatacggttgcgtagaaggctattacacaaatccattaccaattccctatgcagatgatgcgcct

SEQ ID NO: 78514 - DNA, 413 bp, Glycine max
  Clone ID: PAT_MRT3847_41914C.1
cccatacttaatggaatgatttgatttggccattaaattactgagtaagggcaacgatattctgagtggcgagtatgctaattttaatggtttgattaccaagcacgatatgagcatgatggcataaatgataaacagtctttgcggtggtgatgaactattgttgcatgaaaggacacacctgctatcggcttgttgctcaaggatggcaattcgtaagaacgatgtttggagagtagaatgtttaatcccttcagcattctctattacagatattggcaataccatttataatgagatggtggtgagatctagctattaaaaattaccgacccaggctaaagcttccagtctgtactaacaaacctacattaaattagtgtgtttgtgagagtatgcatatcctaacttaa

SEQ ID NO: 78515 - DNA, 324 bp, Glycine max
  unsure (1)..(324): unsure at all n locations
  Clone ID: PAT_MRT3847_41915C.1
caaaccttnnaanaancaaatcacaaacggggtccgcattttttcataaacactcccgttttttataatcaaaatttaactcatcaccaacccacaaataaacccatcacatttcacaaattaaaaaagcatcaccattcctttacacatcgaaattttcttcctcccccatcacattcaaagtcaccaatttatcaccccctctttttactaataccttaataaccaccccaactttctcccctaatactttaataacctcctttaatctttcaacaagtctcccatctaattcaataacaccttcacccgggaagaaacctt

SEQ ID NO: 78516 - DNA, 966 bp, Glycine max
  unsure (1)..(966): unsure at all n locations
  Clone ID: PAT_MRT3847_41916C.1
tttaaactcgaaagaaaaccagctttgttgttaatgtcttcgaattccaacaccacccaaaaacgacaacttccacttcaacacttgaagccaaatttttttttcaaactccaaacaccccctcctctctctctctctctctctctctctctctctcttatatgctttctttcttcaccaaacacaacacccttgtgatctgtctgtctctgcgttttcagtacgcatagatcctgctctattgttttctgaacccactcttccactttcaattccttagccaacacttgattatggggtccatcaaagatttcttcttcaatgcactctaacttaatcacctttctttcataatcataaccaagctatggattttaagattttagattttccactgcaaccaaattcactctcggaaaatggaatccggtgggcctgaatccgcaagccccatgacccacagggttcagtctctgtcctcagcagatacaagagggaaacataggatacatgctgaactcaaacgcttggagcaagaagcacgattcttagaggaagagttggaacaacttgaaaagacggagaaagcatctacaacgtgcaaagtaatgcccagcaatgtagaaacaaaacctgatccattactaccatcaacagttggtcccctaagtcctgcatgggatcgatggtttgaaggcccccaagattctaaaagctgctgtagatgctggattctctgatgatgatcaatgctaattgccaaccccaccccttcccccccttttaatccaatattggtctaaatgagttttgaaaaaatattgtcattggcaaattttcatgaatgctcccttgtgcggatgacaattatngcaaatacgtactctntttttttcttctcttaaaaatcatcattataatatcttggggttttgttcgttggtggggtggtgatnttttttttct

SEQ ID NO: 78517 - DNA, 414 bp, Glycine max
  Clone ID: PAT_MRT3847_41917C.1
tggaaaataatggaaatcctagttgcttcattgttgatgatgaggatacaagcaaatggattgaataattataactggctttaacttagtttttggtttgtgacttgacatctgtctgacctggcaagccagcattgcaatctgacacagaattttgaaggagcttatgtggtcttgaagaaagggacctagatgtttgtgtgcatgtgtataatgcaaatgtaaattcagtattaggttaggtctggagtgtgttgggaaatttcgtttatgatgggtgttttgtattgagattagggtttgagtgttgggtggctacaaacacatttgtaatcttaggtaattttctttgttttgcttggccattgcttcattgtaagtttaaccagattatattaaatgtctttttctctt

SEQ ID NO: 78518 - DNA, 167 bp, Glycine max
  unsure (1)..(167): unsure at all n locations
  Clone ID: PAT_MRT3847_41918C.1
caccattgccatggatcctacaagctccggccatcagcgnctcnatctcctctgatacaatctggtgtctgtggacacactctcttaacgtgggnnaggtcatcgtgagtananctggagantgaacttgcaggacgatccagacggtgcagagganannaaggtct

SEQ ID NO: 78519 - DNA, 253 bp, Glycine max
  Clone ID: PAT_MRT3847_41919C.1
ttccccaattataacccatccaattcacccaatctcacttcattcttaatttacaattctattattactcacattattataaaactctataatccaccatcaaaacttcacaatattaaaacatattaacctattacaattattcatacccctccaatcactattaatcacattatttctttattaaaaactccccctgacctcccaacattcaacactctattatctcatctacttaatttactaacctaaa

SEQ ID NO: 78520 - DNA, 278 bp, Glycine max
  Clone ID: PAT_MRT3847_4191C.1
ggcgtggctgctcgcctagtctggtggctgaggagcatatttaaccaatgctgaccctcaatcggatgggtcatatttcaagtgcagctgttgttctcaggttcagttggaatccctgaacatgagttcttctgctgctgcaacggttttgattgtgaatgtggacaatggggtgagtgaatcgcgcgccaattgaatgaactggaggagaatggagtctttggagaagagcatataccctgtggctgacaccttgatcaggattagcaatggtgaaa

SEQ ID NO: 78521 - DNA, 319 bp, Glycine max
  Clone ID: PAT_MRT3847_41920C.1
ggcataaaaaatgaccccataaacaaaggcctataggggaaaatgaatggaagcggtcactataagacaatgcgattattcccgtataggaaaagggggaaggtactgttaacggaaaacccacacactgttttggggaggaaaaatccggggactatggtaattggattgtaattgacacgcacaaagccctttgggctttaaggggaggggatgccaagctgtaaaaaaggaccccccaacttttctacaccttgggagggcccctctgaaaaggccctgcgatattggcaaaaaatgtacacccaacacctcatgt

SEQ ID NO: 78522 - DNA, 685 bp, Glycine max
  Clone ID: PAT_MRT3847_41921C.1
ttttcttttttttttaaagcaattatgacactaatctataatttcttactgagttgcgatttaaacatatcacactcgaatctagtttcccatagtacataacgcgacctataaaattataaaacatttaccaacattatgtgctgagattaataagacggtgcaaagaatcacctccctcctttccatgaaacatggataatcccgaaaaaaagttactgtagcttatatccgctcgcgctggtataaccttacttcttaaaaggcgctggattcaaaacccgcctgaagggaaataaaggtagcccccgaggcgtgcttcgcttcactctcaatccacctgaggcaagctgatcagaaccagtgctcacttgactaagccttgtatcgttcatgataacctcaggcaataaatgttgagcaccaggggagtcatcttccattttgatcacatcaagggcaagtgcatcagcttccagattgtccttcatcgaactatcataaacagaggcgacaaactccaagactggttgaccaggaagcgccaaatctcgatttggcacaggttcacaaatcctgccaatttgttcatttaaattaacataccaacttttctcattacgacatatatcatgaaaaccagaggacggtaggccctcagccacctgaatagagtcatggctgc

SEQ ID NO: 78523 - DNA, 444 bp, Glycine max
  Clone ID: PAT_MRT3847_41922C.1
tgctagatggcttgaaaatggcaatgaagccgatgaatcattggataaaaatacaaaatacacccaagagccttctgaagcttgcagagctagtgatcctgaagtgctttccatgcatgtatcttctgcaaccatatacaggaaaggctgaaatggggtgtctgaaactgccacctgggaaatgttgaatgaaaacggttgttgtgaaatcattttcaggcgaaccacccggaaaattgtgggccattctaggaacgtttctttgaacaaaaaatcctgggggtttaaaccccagggtgatctttataaaaaggccgaaaaaatttttccaaactctttttcccttaagacccccctaaaaaaagaaaggaaaggccccataaaaaaacttaaattctccttcggggggttgtttaaaaaaaccccccggaaaaaaattggggg

SEQ ID NO: 78524 - DNA, 379 bp, Glycine max
  Clone ID: PAT_MRT3847_41923C.1
ctttccttttttttcctaatggcggttaggggttggggtttttaattttaagcctttcatttctttaaccctttttttttttttgaactcttgaggagaacggttccgggttaagaacaaggggtaaattgaaggccttgggttggaaacctaccggggccttttgggggtgggaaaaaaaaatattctgagagaaggggaccaccaacccctttgatttttttggggaagaaacttaagaaccttttcaagttattgccgccgagcaaatcaaagggggggggtggtgctgtgggctgccacccgcccctcccaaaaaagcgccgggtctgcagaaaaagacgggtcaaatccctataaagagcgctttcttcggctc

SEQ ID NO: 78525 - DNA, 1809 bp, Glycine max
  Clone ID: PAT_MRT3847_41924C.1
taaaaaccctaagtaaaataaaactctagggttacatacattactaacctcgctcggtccgcgttctctctctctctctctctctgttgcaaaatccgttcccctatctttctgcgtttcgagttgttgctaaagagtgatggactcaccgcccagtaatcaccacgccgtcgacggagacgccaacgacctcgttagacccttttcccaccgcgacgacgacggcaagccccaacccctcaccggcgacggcgccagtcccggaaagatattcatagggggtttagcgagagaaacgacgattgcgcaattcatcaagcactttggtaaatacggtgagataacggattccgtcatcatgaaggaccggaagaccgggcagccgcgcggtttcggcttcataacttacgccgatccctctgtggttgatacagtgattgaggacactcacattatcaatggcaagcaggtggagattaagcggacgataccaaggggggctgccgactcgaactcaatggaccgccgaacaaagaagatgtttgtggggttgaatttcgaatactgtgagcacggatgagtttaaggtcgtcgaaattcattgtagagttatttaagatcatcatataatgcggcaccaaagttatagatgtgtatataattccttctaatttgactaaagatgaacttagcgttttctttatccgctatggataagtcaaagctctccatataatgcgggacctctctactaatcgttcacgtggttttggctttatcacatatgactcggaagaagctaatgatgacctcttctctgtggggaacaaaattgagtttgctggagctcaggtggaaatcaagaaagcagaaccaaagaagccaaatccagcagctccgtcatccaagcgctataatgactcccggtcttcatatggtggtggatatggagatgcttatgacggatttggtggtaattttggtatgggtggctataggtcaggtggtgcctatggtggtaggggaagtgcttatggtggctttggaagtgaatttggtggttatggaggatatgctggtgccatggggccatatagaggtgatccttcacttgggtatgctggtcgatatggtggaggctatggcagaggctatgatcttggtgggtatggtggacctagtgagggttatggggcatatggtggtggtgggggtggtggttcttctggtagcgcctacggaagcagcagctatgatgccagcttagggggcggatatggggccgctgctggaggctccttttatgggactagagggggatacggtggtgcaggaactggtcgatatcatccttatggaagatagaagtgcgtcatcgaagaccgtttgtagtttgttgtgtttggttattcagttcttcaggctacatatttcattttctaaaaaaaattgtcaatgatattgttaagtcccattagagttattagcagcaccctctcgccagctatagaagaccgaacaattttttagctcggcccactgttgaagtctgattatgggattgaagtatgagctgcaaattgtgcagatggttgtattcttagttttgttaatggctacatttgtcactactgctctttatgtttatttaattttgatacacttcagactttttagatagaaattggtttatgcgtctttttggcttcacttcctatgtttttgtagaacgtgtatttttacaccttgcctagttgataattcagaaataggtttcccagctttcagaaagccgctgcctagtgagct

SEQ ID NO: 78526 - DNA, 208 bp, Glycine max
  Clone ID: PAT_MRT3847_41925C.1
cgttctcaaccccacaagatggaagcgcacagggggagatttaaaacacgctgaggggttagcaaaccgagaccatgaataagaaaaacatgatggttaagaaagaccccaaggaacaaaatcccgctggcgacacggcggaatcaaccaagggtaaaaagaccggaaaaataaggaaccccacacaaaggggaggtggagaaccaaa

SEQ ID NO: 78527 - DNA, 770 bp, Glycine max
  Clone ID: PAT_MRT3847_41926C.1
tcctttcgtccgctgcttttcgagttgttggtgaagagtgatggactcaccgcccagcaatcaccacgcggtcgacggagacgccaacgacgtcgttagatccttttcccaccgcgacgacgatgaagacggcaagccccaacccctcaccggggacggcgccagtcctgggtcggtaactagctccgtacaaaccattcaactttatccttttctttttcttgtactttttcttgattgtatcctcgaaatttcttagatttggttctatctaattaccctggacccattgattgcagaaagatattcatagggggtttagcgagagaaacgacgattgcgcaattcatcaagcactttggtaaatacggtgagataacggattccgttatcatgaaggaccggaagaccggccagccgcgtggtttcggcttcataacttacgctgatccctctgtggttgatacagtgattgaggacactcacattatcaatggcaagcaggtggagattaagcggacgataccgaggggggctgctggctcgaactcaaaggacttccgaacgaagaagatttttgtgggtggaattccttctactgtgactgaagatgaatttagggacttctttacacgctatggagaagtcaaagatcaccaaataatgcgggaccactctactaatcgttcacgtggatttggctttatcacttatgactctgaagaagctgttgatgatctcttatctgtggggaacaaaattgagtttgc

SEQ ID NO: 78528 - DNA, 227 bp, Glycine max
  Clone ID: PAT_MRT3847_41927C.1
gcgaaacaactgagccgaaacatgacatttttactccgccgacacaaccacttcaacaagggggggggggaacacatatccataagctcgcaaagatagcgaaacccatggctagtccagccgggagggccccgcacaagtagaacgcaaaagttccggaggcgatggactacgagacagacgagcaagaaaggaataaaggggaggggcacaaacacaaaaaccgg

SEQ ID NO: 78529 - DNA, 150 bp, Glycine max
  Clone ID: PAT_MRT3847_41928C.1
gggtatactccaagtactgttggaagctatggacttccagcggatgatagattcaatcctgttgctggtggtccaagtggatttgctccatttggatcaagttatggaatgagcctgaatttttaacctgggttgaaagccggatttgga

SEQ ID NO: 78530 - DNA, 1413 bp, Glycine max
  unsure (1)..(1413): unsure at all n locations
  Clone ID: PAT_MRT3847_41929C.1
ggactcggtttgtttgatatgatggtgaaaaagtatggactcaaggccagactacaacattatacttgtctggttgacctactgggcaggtctggttgtttggaggaggcagaggcaatgatacggtccatgcctgtaaaagcagatgcaattatatggaaaactttattatctgcatgtaaaatccacaagaatgctgaaattgcaagaagggttgctgatgaagttcttaggattgatcctcaagactcagcttcatatgttctacttgccaacatctattcttcagctaacagatggcaaaatgtttctgaggtgaggagagccatgaaagacaagatggtgaagaaagaaccaggcataagttgggtagaagtaaagaatcaggttcatcagtttcatatgggtgatgaatgccacccaaaacacgtggagattaatcagtatctggaagaattaacttcagaaatgaagaagcggggctatgtacctgatactagctacgttttgcatgacatggacaatgaggaaaaagaacacaacttgaggcaccatagtgagaaattggcaattgcttttgctttaatgaacaccccagagggagtgccaataagggtgatgaaaaacttgcgggtttgcagtgactgtcatgttgccatcaagtacatatcagagataaaaaatttagaaattattgtgcgagattctagcaggtttcaccatttcgaaggaagataaaaataaaaatataactgagtgatatgcactagagataatctttttcctctggagaatttcttgcaaattgggtcaatctaagatgcaactttaattgcagcagcatgtgcgtgggaattatttgcattaagcccacggagcatatttagcctatcattatatttattcttgcctactcaattatttaagggcaattacttcctggcttcttgcacctccctacttgtttcctactcttattttggaatgtaaaattagattcttcaatagtcttttcagaatgtaaaaatagcctctctctctctctctctctctctctcttttaatacacaacttatttaagttactcatttttttgggagtggttttggttttgtaagcactctttactacagtaaaattggaaaaaaaaattatttcctcttaagtcatacaatgtgtacggcacatttaaacttagttatggatatatggncctttgtcatatggcacgggtaaaaaagtagtttgcgtccacgttagccattgctttgataaatttcacttttttttntatcagttatattgatactacgaagcattttacttntatttttctcttcataatttggccattaaattgaaagnaggtgggttgaaaggggnggaaagttaaatcggaaatatgttattcta

SEQ ID NO: 78531 - DNA, 1224 bp, Glycine max
  Clone ID: PAT_MRT3847_4192C.1
agcaaaattctttcgtcaacaataattaactgttccactgtccactttctccgttctgtgttaggcacgacgaacattctgatttaaatttcgtcacccagtacaaagtataatagaatgaattgaacaatgatgcattgtaatggtaaaatattctcacttgctcaaacgaaagaattttacatgtaataatagaaattagtgagaactattgttcacacaactcttcaaacatcgtcacattgttgggcaacatacactccaatatgagacatagctagccatataagaagcaaagatagccaactaatgagtcagcttgaaatataaaatgattaatattgcaaggaccagagctgtcattaaggagctaacaatccatttgttcctgctcatccttcttgacatagccgacaaaattttcttgctcttgctaatgttatcatccactccatggatcgtcttatgggcgtggagtagggattcacgttgttgatgcaaatctctgaggataaattcaccaagatcctctgtctccagcattgtttttctgctctcctttattctgtcagaggactgattaagtctttcagtagacatcagaagtcttcctttttgatcatttgatgccgccagtgtatcagcccttcctgactccaacaagtcatctcgagcagtgagattgacgctagctgacgtgactcttttaacttcacttttcaaattgctcaaatcagttttatattcccttaacttggcaagaagagctgccttcacgcttggctgcaaactcctagcctcaaggtccatttttcgaatcaatgtgtcagcatcatctaatccagcttttatcagaaagtttttgcttcttttgttctccatcaagagcagaagccgcagtgcattgccgcgaaagattcgccgattgctcacagtattgacgctcgtacccttcaaacacctcactcattgttcccaatttctctaccacgctaatttcacacacacacgcacatatttacgtccacaattcctataaatattagttacgaattttaaattttgcagataaactgaatctcagaaaacaacgagcaatttggcgaataaaatttgtggatggagatgaagtggcgagagggattgaagaaaaagcgtgccggagaatgatcggaggagtggtggcggagaaagcaacggagcttgcacaaatcggacgcgtgg

SEQ ID NO: 78532 - DNA, 640 bp, Glycine max
  Clone ID: PAT_MRT3847_41930C.1
cggacgcgtggggttccacttaaaccttcttcatgttggacggatgaactcatgtatagagttttgttaaataatattttcctgtaacggatgactagttcggtcataattgacgtataagtagaatagccttcagttgtttatggaaaatcaaactaaaatctcaaaaaaaaaaaacaaaaaaaaaaaaaaaaaaaaaaaaaaaaaacaaaaaaaaaaaaaaaaaaaaaaaaaaaaaaaaaaaaaaaaaaaaaaaaaaaaaaaaaaaaaaggggggcccatattggggggccctttttaaggatcccagtttttgacccgcaaatttcttttttagggctccttaaatggaatccctgggcccattttttaccccgtttttatagaaaaaaccttggggaaacccccttaattcccctagcaaaaccccctcttttcccaacctgttttaaaagggagggggcctgcaaaaaaggcccttccaaaaggttttccaaaataattggcaaatggaaccgcccttgggccccccctttaaccggcgcctttaagggggtacccccaggggtaacccctaaatttgccagttcctttacccccctcttttgcgctttttttttttcttttttccccccctttt

SEQ ID NO: 78533 - DNA, 226 bp, Glycine max
  unsure (1)..(226): unsure at all n locations
  Clone ID: PAT_MRT3847_41931C.1
gaagcacgcagcaaggaacnaggancancancaaagngcaaaacagncgagaccgaacaccacgagcagcaaccaaggagaccncccaaacgaccaccggagaagagacaacgngnnccnncngcnnanaaccggancaacaaggaggaaacacaaagaagaaaggcnagnaanccagagancagccacagggaagcagnnagcacagcagccaaaaaccgggcac

SEQ ID NO: 78534 - DNA, 369 bp, Glycine max
  Clone ID: PAT_MRT3847_41932C.1
attaaaaagtcccctgataaattcaaaagaaaattgaaaaaaaaaagaaaaaaaaaaactaaaaaaagggaggggggggggggaaaaaaaaaaagaaagaaaatataacgaaaaggggacacgcataaaacaaatgacaaaataggggttaagaacggaaaaggggcagaaaaaaaaaaaaaacctaaagacctgttgaaaagttgaaaaaaggaaaaaaaaaaaaaaaagtagatgacaagatgggaggaacatgaaaaggaaaagaaaagtaagggaagactaaggtggaactgggaagttaaattggaatacaatttgaaaaaaaggttaggtggatgttttgaagaatactggaaattatctgat

SEQ ID NO: 78535 - DNA, 1916 bp, Glycine max
  Clone ID: PAT_MRT3847_41933C.1
ttctccgattgcacaaagagataaaagcactgaccatagaaaaccaaacccagcaaacagcaccgtctctttccatttcaagcctccaccgtcgtccactgcttcatcttcagtttttctgcctaaaaatacataaattgcaccaaactaaaaaactgaactcataacattcatcttcagtttttctgcttcatttctaactaattattgtgcttatcattattattgagaaagaaaatggccaaatcaatcaaattctttgagttgaacacaggggccaagattccttctcttgggttagggacttggcaagctgaacctggtgttgtagctgaagctctcaccacagccattcaggttggatacaggcatattgactgtgctagtgcgtataagaatcaagcagagattggttctgctcttaagaagctttttgatgatggtgtggtgaagcgtgaggacttatggatcacttccaaactctggtttgttgtcttttagtaattgtgatctctttttgaatattgagaaagattgtatgtgtttggaccagtttggttgctgagtgaaggatcctttgatttgttggctatatttttaggtgttcagatcatgcaccagaagatgtgccaaaagcattggataaaacattacaggaattgcaacttgactatcttgacctctatctgatccactggccagtccgcatgaaaagtggaacatttggactcaataaagaatatcttgagcaaccagacattcccaatacatggagagcaatggaggcactctatgactcagacaaggctagagccataggagtgagcaatttctcttcaaagaagcttcaagatttgttagatatagcaagagtggttcctgctgttaaccaagtggaattgcacccaggatggcagcagccaaagttgcgcgcattttggaatctaaagaaattcatctatctgtaagtatggcatatatgatatatactttcacttaaaagacttgatattcctaaattatcaagaatttaatggtgatgcactcacaatgtaaagtaagcttgcattgtcaactaattaaaactgagtgttggtatgacttttaaagtagttatcacaaaagtcaacaaactcactatacatggtgttttgtgattgaatgataatgtaaaattactttaattgtcagtatataatccattttctcaactatcaattgcaaagaaaaattatcacttttggtgaaattgtcttgagctagttgaaaatgatttcggtgtgcactcaaagatggagtatatatgatgaatttcttttcagggatattctccactaggttcaccagcagctctcaaaagtgatattcttaagaatcctgttgtcacagagattgcagagagattggggaagacaccagcacaagttgcccttaggtggggcttgcaaacaggtcatagtgtgctgcctaagagcactaatgagtccagaatcaaggaaaactttgatatctttgactggtctattccagaagaattgttagcaaaattctctgaaattaagcaggatagactaattaagggtactgcttttgttgacgagacctgtggtgcctttaagaccattgaagagctttgggatggtgaactctgagcaatatgcttcatagagatgttgacaaattcactggtcctcaagcagattagttctgccttttacctgttagcatcttaaagccaccagatatagtgattcaagtatgtttgagattttgagaagtgttaccgttgataatcaggtaaccaagacttatttttcatttataactagcatgtgtacgcacttatcgttcgactgggtgcgtgtgcattcggtaatgtattaacagtatgcaatttaataaaagaaatattttat

SEQ ID NO: 78536 - DNA, 1376 bp, Glycine max
  Clone ID: PAT_MRT3847_41934C.1
ctgctgcacaccccggtccggtccgattccccgggtcgacccacgcgtccgtgcatttctatttctaactaattattgtgcttattattattgttgagaaagaaaagaatggcaaagttaataaaattctttgagttgaacacaggggccaagattccttctgttgggttaggcacttggcaagctgagcctggtgttgtagccaaagctgtcaccacagccattctggttggatacaggcatattgattgtgctcaagcgtataacaatcaagcagagattggttctgctcttaagaagctttttgatgatggtgtggtgaagcgtgaggacttatggatcacctccaaactctggtgttcagatcatgcttcagaagatgtgcccaaagcattggataaaacattgcaggatttgcaacttgattaccttgacctctatctgatccactggccagtgcgcatgaaaagcggatcagttggattcaagaaggaatatctcgatcaaccggacattcccagcacatggaaagcaatggaggcactctatgactcaggcaaggcaagagccataggagttagcaatttctcttcaaaaaagcttcaagatctcatgaatatagcaagagtgcctcctgctgttaaccaagtggaattgcacccaggatggcagcagccaaagctgcatgcattctgtgaatctaaaggagttcatctgtctggatattctccactgggctcaccaggagttctcaaaagtgacattcttaagaatcctgttgtgatagagattgcagagaaattggggaagacaccggcacaagttgcccttaggtggggactgcaaacaggtcatagtgtgctgcctaagagcactaatgagtccagaatcaagggaaactttgatgtgtttgactggtctattccagaagaagtgatggataagttctctgaaattaagcaggatagactaattaagggcactttttttgttgacgagacctatggtgcctttaagaccgttgaagagctttgggatggtgaactctgagcaatatgcttcatagagatgttgacaaatgcactgctcctcaagcagattgattccgccttttacctgttaagatcttaaagctaccagctgtagtgattcaagtatgtttgagattttgagaagagctattgttcataataacacaaagtaaccgagacttatttttcatttataattgttgtatctttaattcaatctaaagaaaccagtgcagtgaattttaaaggtctggtagccaaaataaattgatattcaatctccacccaacactctaaatttaattcatatatactcgtttattaaaaaataaaaaaggggcggcc

SEQ ID NO: 78537 - DNA, 574 bp, Glycine max
  Clone ID: PAT_MRT3847_41935C.1
cttgccatttagccagtaaaggaaaatcagtttcacttacagccaaaaacaatgctcatagtagagatacattgatttcaaatgatgatattccatgcatgaaacagaaagagaagaatgagataaagtcaaatcaactctcaaggagccacaaacctagtacacaaaaaactatgcagcagaggccttgctcaagccggaatagcaatgtgcttgggcagaacaatcaaaagcaaaatagcatgactgccaagggtaaatcaacttcaaaaatagattctaataagctaacaacacgagcttcatcttcagaaacttctggaataaggaagacaacgaacaagggtactataactgcaaatattcaacctaaaaggtcaagcactagggcaactgacaaccaaaagcagttttcaagatccaaaacagtgagtatttcccagaagaaaaagattagcaaagatgttcatgagggaagaggtcctgataatgcagtaaataattttggaagtaagtccattaaatgcaattttacgacggatggaagttttgatcaggatgcatttaacatgat

SEQ ID NO: 78538 - DNA, 482 bp, Glycine max
  Clone ID: PAT_MRT3847_41936C.1
gaaggaagaatgttttaaggaaatggcataatgatcaagccctcaaataatgatacaattacactgtcattgtgaacaaatctaacatcatcttcaaattagtattcacattctttcgatataaaacaggacaaaatgatgcttatatcatatgaataaaaagaaaatccatttaattagaatgcaatttcctatgctctagaaccacctccatgatccctctcaacatgctccacaagggacacaggatcaagaaatcccctactacacttaggacatgcatcaatcttcttaacccctaatcggtttccatttctttcatgaaccttttgcacatgatccaccaaagcagtcacagaggaaaactttgatccacactgagggcattgctccacttggtgatcatttctatttccactgccactgctctgccccaccccgtctcttgtagtagctgcctgccaaacttggttaatttcatc

SEQ ID NO: 78539 - DNA, 264 bp, Glycine max
  unsure (1)..(264): unsure at all n locations
  Clone ID: PAT_MRT3847_41937C.1
cgcccctccttctgtgggccaccacagttccatttgaactgccaaaacggtatcgttcccgagttgatcatctcatcagtgagttaccgagtcattcatgtaaactcggaggctcacactctcaacttagcaagactagacctttggaacgagacatgcaccaatgtgtacgttaactcaacttttgatggccccacattcagctacggttcggggaaccagaacctcactttgttttacgatgcgaanctcttcacggatcac

SEQ ID NO: 78540 - DNA, 493 bp, Glycine max
  Clone ID: PAT_MRT3847_41938C.1
caggacattgattaactgttagtgatgttgaaggacatgacacgattcacacattagggagagtctacttccaaagtccacaatgactcttttttgtcgtcgacaatcatgacagatacactgtcgttgaggccctagatcagatccacaatatgttaattgatgatgaccttacatatgctttatatctcgtatttgatcactattggcatcttgacactgcagtggaatgctgctgcaattactgaccaactgtgactgcactcgtcttagacagcgccactgtgacctttagagcacctgagcttcctccttggagagtgcactatgaggagtctgtagtggatatataacaacatacccagacaggctggatgcttcttggacgcattgtggatgcagtgatgaatatgatctgcatgatatcacatgagtctcgttgcagacacattggctgtattgtcctgttgtctggataaagacatctcgacag

SEQ ID NO: 78541 - DNA, 663 bp, Glycine max
  Clone ID: PAT_MRT3847_41939C.1
gtcgttcggcacggggggcatgatacctttacttctgtgtggaggacttaaaacgtacagcgctattcttctttgtcccattttcttcagcttagcacatttaaatcatttcttggagatttatgccaagcaaaactacagaatagtgaaggctgctatggttataggtcttcagcttggctacactgttgtctttgggtcatatgcgtcttttcttttcattcgaactggacaccttatagctcccttagttgcgcacatatattgtaattttatgggactgcctgtattgtattcgcagagaagtgatttggaagcttagtttcagctggacttctgattagaggcacaaggattgtaagtgtaacattcataatatgatttctgggcttcttgtggcttcttttcccaatgacgggcccagaattgtatttttatagattagataactgcagttgttggcaaagctactgcacatggagagaaacgataagaatgacccagatgtaaacgttactatttttttttttttggggaggggtttggtggtgaaggaagagtgaactaagaatgaattctataagaacacagtgacactcaaaattgctagaagttaaaactttccccaaagggctcataaatatcagcttcataaatcatgac

SEQ ID NO: 78542 - DNA, 329 bp, Glycine max
  Clone ID: PAT_MRT3847_4193C.1
catgcttttgtttgagcaactttacattgtataacgacggaacacaaaataattgattccgttgaacaaggtggaaggcaacagtcccagagaatattcattgaagcatagaggagggactagtaacacttttgatatcctacccaaggggtctttccctttggaccaatgggcccctactgaccataaagctccgtaagaaacaattcatacaaattcaccaaacaaaatttaacaaacacaggaagcaggtctatgaacttatctatttaaacgggagtcatacacaactgaaagaccccactctttcatgtgctgcaaccaaaatg

SEQ ID NO: 78543 - DNA, 356 bp, Glycine max
  unsure (1)..(356): unsure at all n locations
  Clone ID: PAT_MRT3847_41940C.1
acgagctgaaattcaggcaatgctagctaagctgagaggggagatgaaaaaagctgggtatgttcctgatgccaatctatcgctctttgatttagaagaagaagaaaaggcttcaaaagtgtggtaccacagcaagaagattgccctagcttttggcctcataactctccctcgtaaagtgcccatacgtatcacaaaaaatcttangatctgtatagattgtcatagtgccattaagttcatctcaaaaattgttggaagagaaattattgtgaaagataataatcgttttcatcactttaaagatagctgatactcttataaagattattaataatatttccatactttcatta

SEQ ID NO: 78544 - DNA, 154 bp, Glycine max
  Clone ID: PAT_MRT3847_41941C.1
gctcacaagaaatcatcaagtgaccatgacccattttggacagagtgttttcttcttgcccattttcaaaagcagctatgaaccaaaaacttatcctaaatgacactccttataccatcaaattcctaactcagtcacttttaaagtcttgtca

SEQ ID NO: 78545 - DNA, 173 bp, Glycine max
  Clone ID: PAT_MRT3847_41942C.1
gggggacaagacgagcaattgccgtatttggtcagctgtgcacgttggcatcatgagagcaatcttcgaatatccattgtcatggatagatggactgcttagtatctcccatcacctttacagtcgaccgagttcccgctaaacgcagcagtttcaatagtggcatttccgag

SEQ ID NO: 78546 - DNA, 239 bp, Glycine max
  Clone ID: PAT_MRT3847_41943C.1
cactaccacaacaccacagagtgcgatagaatgtaatattttgaacgcttattctccgggtcttcgcacatagcagcggtaccatctttatctacatctcttacttacccgcctcactcactttttcctattcggacattacaacctaaaactctctcctgtcctttaccttcattaccaacactctcccccttccacttcaaacctcttcattttgctatctctgaactactctcact

SEQ ID NO: 78547 - DNA, 270 bp, Glycine max
  Clone ID: PAT_MRT3847_41944C.1
cgcaattcttgatccttacatcctataacttactaagaaatgttcgcggtattccctccctgtggggggcataccggaagtacgaaaatctttggctggcaccacaactgttacagggatcaaacggctccgtacatgcacttaatcccactcacccttctgagcgggtggcatgcgtatacgagaggcctatgccagatcatgacaccacacattggcggacctgattaccacgtccatgactagccatttaggggaaagcccgggcct

SEQ ID NO: 78548 - DNA, 662 bp, Glycine max
  Clone ID: PAT_MRT3847_41945C.1
tccagttccaggattgaagtagaagagttgtttccacattcacatggttacggctacactgatttgaactacttttgatgaatgcctaattgtctataattcttattccatgagatcaactaggctatttgagggaactgaaacagtttagtgtataacacaaggtaggcaatacagtgagtgagcaattgccagccacaatgatgatcgagacattctgttatcctcactttcaaacaagctgcagagtttgtggtcttgcactatggatatttgcggctcacagccttattggtagaataatggctatgtggatcaaagaaaatatacagcatttattctcaattctcatgaatgagaggatttgaagattctaaccaaggtgtttgacttattctttaacacaattgagataaaccaagggaatatttgtaccccgtgttaattatcttattcgtttatcttgagttcttaaccaccctattattttcttatagcagccaactttgatgagaatcattgcagctaatgagtgaaatttatgttgttgttttcaattttgtttttatgaataagttgcaacaaaaaggaaaaaaggaaccacgctacttaaactgctttgttggcttttaccagtaagtcattatttgtacctgatgcct

SEQ ID NO: 78549 - DNA, 502 bp, Glycine max
  unsure (1)..(502): unsure at all n locations
  Clone ID: PAT_MRT3847_41946C.1
attaaaaaaatttnaaaaannaanttagngggggggnnaaaacctaataattaaaattaanatngnnnnnnnnnnnnnnntnnnnnnnnnnnnnnnnnnnnnnnagnnnagggataanaaaaaaataacgaaaaagaaatgttaatattaaaatacaaggttttacacccatgggaagctacacccacagggaaatgtttggccatacctgaggccaaaacgggcagatataagcaacgggaaaaataaacgcttttgagctacaattttactattctaactgccatgctatgatttcattatcggccacgggggaaagatatactagtattggaaacctactttaagcatattcttaccatggaattaatataaaaaaattttaatgggaaagttttctaatgataaaacaaggaatgtggtagtgcaaatgatattactcggcaaccaaaatataaaaacatagggcagctgcacacgtacaatatttgatggattcccc

SEQ ID NO: 78550 - DNA, 285 bp, Glycine max
  unsure (1)..(285): unsure at all n locations
  Clone ID: PAT_MRT3847_41947C.1
gttaaccattcacgatatcaacgatcaataaattagttgcccagacaaacagcacaaggggcactgaaacactcatatctaactttgaattaatatannaacttaatctannaaagaaactattaaagaatgaccgtnnaaaacccaaagcacgaanncatcatcaatttattatcatgcatgtattttccttcttattgctcttggataacaatgttgcctcctgacccacaacaagctgacgttttgtgcannntacccagccggtgtaagatctagttggtt

SEQ ID NO: 78551 - DNA, 2063 bp, Glycine max
  unsure (1)..(2063): unsure at all n locations
  Clone ID: PAT_MRT3847_41948C.1
gctctggctctctccattaggaagcaccacattcaatactcacggaagaatcacacaacagctcgagccgactcggctcgaggtaaattgcgctgtatgtagtgagggtcctttggttcagtttcatcaaccataaattttctctttgcgttccatcttctttaggccattcttccataaaaacacaaaaaagacccacagagaggaacatggcatgtccagcaatggcaaatgggaacggctcattgaagaacttgaagctaaatgacaccaagggaaagaccatcacttgcaaagctgccgtggtatatggtcctggagagccctttgtggtggaaaacattcttgttcatcctcctcagaaaatggaggttcgaatcaagatcctctacacttccatttgtcacaccgatcttagcgcgtggcgaggcgtgaacgaggctcaacgtgcttatcctcggatttttggccatgaagcatctgggattgtggagagtgtaggggaaggagtgagtgaagttgaggaaggggacataggtggtgccaatattcaatggggagtgtggagagtgttcgatgtgcaagtgtgagaagaccaactagtgtgagatgtttggggtgaatgccatgaagaaggtgatggaaggagatggcacaagaagattctccacagttaatgggaaacccattttccatttcttgaacacttcgactttctcggagtacacgggtggtggattcggcctgtgtggtagaagtttgtgagcacagaccacagtctcagcatcaagaacctcaccttgctcagttgtggtgtctccacaggggttggagctgcttggaatacagctaatgtgcattcgggttcaactgtagctgttttcggcttaggagctgttgggctcgctgttgctgaaggggcacgagctagaggtgcatccaaaataataggcgtagacatcaatcctgacaaattcatcaaagctatgggagtgacagacttcataaaccctgatgatgaagagaagccagtatacgagagaattagagaaataactgatggaggtgtacactacagttttgaatgtactggaaacgtggacgttcttagggatgccttcttgtctgcccatgagggttggggattgactgtagtattgggaattcatgcatcaccaactttgcttcccatccacccaatggagctcttcgacggtcgcaacattgtaggatgtgtatttggaggtttcaaagggagaagtcacttgcctcattttgccaaagaatgtggacaaggagtggtgaagctggataatttcatcactcacgagctacctttagaggagatagacaaagcctttgatcttttgatcactgggaagtcactgagatgccttctgcacttctaagaaaagatgccctttagattggatgtgataattatgatatgaattgttcaataggagcatatctaaataataatgtgcaatactcttggaaaggtgtcaggggtgcttttgaacagtgtactggatccaagaaagaaaattagaggaagtgtactcagctttgttcaccttccatcaattgataatagtgtgctgtagctgtacctctactgctactttttctttatttcattgcagcccataaaaaacactgctttgtaattagtagagataaaataagaattaatgttattttaaggttaaatgtgttggaattcaattgatcattgtacaatttattctacacttgaatgtgagatcttcagagaggaaatgatgccaggggaaagaccgttacttgcaaagctgccgtggcatatggtcctggagagccctttgtggtggaacgtgttctatgttcatcctcctcagaagatggaggttcgaatcaagatcctctttactccaatctgccacaccgatcctcaggcctcncaaggcgagaatgaggctgaacgatcatatgctcggtttttctgtcatgaagcttcctgtattgtgtagagtgtgggcgaaggagtaaatgacatgaaagagggggtcttgttggtgcca

SEQ ID NO: 78552 - DNA, 452 bp, Glycine max
  Clone ID: PAT_MRT3847_41949C.1
cgaccgacgcgttcgtaaactactacaaaacgacagatttgggagttttaagggaaaaaaaaaagagtggtgagggggaggtcttccttatcgctcgacatatccataagagcacccactccctcatcttctctcattcttactaccccaaaaccatcttcactctcttttaaccttaccctcactttctccagcgctcactcttcgttccttcatttctccttcctatcttatgcataccatctgtcttccccttcctccactttaggcttgtcacttgaattgaatttctcatataatactgggaccatattacgtataggttctgtcctatttgttagatcaagcaaggctcctctttgtctgactaacagaagcataccaagaaaatcattgtcacgcactcatgttttcctcaaaataattatcacaccacgtctaagatctaattt

SEQ ID NO: 78553 - DNA, 558 bp, Glycine max
  Clone ID: PAT_MRT3847_4194C.1
cacgcgtccgtggcctgtgagactacgctgagtgtgtacgcctacggttcccagtgaccgcatgtaaatcttcaatatttgcatgcttcaccaactcccctcagacaatacccattaccccgaatgatatgattttcttctccaaatgcaaatgcaattccaattctctaaaaggacccaactttcccagtttctccacccactgagcccaacccagatgaccaaagactcgtaatttctcacggggttgtgtttttcactctctttgaatcaatatctgaaatgggttttttctttcttttttttttctttctgattcatagcatagactcctctctctgattgttctgcgtgagtttcatttgttgttctgtttttttttttccttttttcttttttgttctatcacttgtttgttgttggtgtgttgaaagcgttgagatggggaaagagatattggagaacgtgaaggatgatggggggctcgaggagcttgagatgttgctgaatgagatccctcaggcaacatcacacaatctttaccatgggaaatccatg

SEQ ID NO: 78554 - DNA, 172 bp, Glycine max
  Clone ID: PAT_MRT3847_41950C.1
gctattcgggcgatgccttaatggcacaagaggaagtgccggttgtgaaagcatgagatgctagaactgacttggacagtaaaaatgggaaggctgaagctactgaaggggatgcggacactgtagaaatgataattggtggctatgtaagaccggactgaaacacaaatgg

SEQ ID NO: 78555 - DNA, 356 bp, Glycine max
  Clone ID: PAT_MRT3847_41951C.1
aagctcgggaggcggctcgaggtacaatgaaagactcagcacaaaagaggaagttttctgattttaatggtcaactgatacctgcggatacatgtctattgtctctgaggaaattgagctttatacaaatgggggatgtcataccagaatctaacgactgaattctttctaactaatacttcaagaggatcaaagatctgaatgcataaagtgaggcaaaaaatgcgatggctcatcatgggctagcgaagacagctgcaactaagggttccaagctctggtcaacttaatctatagcgagtggatgttaccatgccttgaagcttacataagggaataagtttaacatggatgaa

SEQ ID NO: 78556 - DNA, 420 bp, Glycine max
  Clone ID: PAT_MRT3847_41952C.1
acaactgtgagggcgccgcaaaacatgaagggcaagtgcattctctgggcggatcgtaaagtcgttgaagaggaagatgcaaagctagtgaaccttagtcgcaaatctgacggagaagaaggaatcagacccatgtatttgcataagcgtaatcctaaccctcttcttgcactgcctccaaacatctcaagtgcgacatgagccccaaattcaacttcactgccaaacccatttcctttgtctcccccgttctcgttgttcctttttcacttctccctttttggttcagcacaaccatcgcgagatctagcttttgtttttaagatcttgaatatggagttaaaacttggctattttgtcaattatgggtgctttttggatctaaattttaagaataaaaaaaaaaacgaagcgctgcca

SEQ ID NO: 78557 - DNA, 188 bp, Glycine max
  Clone ID: PAT_MRT3847_41953C.1
tcggtaagagaatgtgatgaaaaaggattggtgtattgaacatgtaggcgagtgtctgatcaggaactgtatgaacatatgtgcgggattggacagtagaggccggtggagaccaaaacatcatttgcagcagtggtgcctgtgaagttaatggagaagatggttggtatgaaaaggcgtacaccgta

SEQ ID NO: 78558 - DNA, 742 bp, Glycine max
  unsure (1)..(742): unsure at all n locations
  Clone ID: PAT_MRT3847_41954C.1
ctttttttttttttttatccacccataatttctaatattgatcatacataaaaatttggccttctgttcacgtacggtattaacagggatgaataccataaccaatcacatacaagacgacccgacaattggggaacttataaatgaatcaggctgtaatgaattggggaaaactttttcttgaatgcaagtcctatacttccatgaagtatggacattaattaaatatttttgctaggtccaagagtaaagaatcatatttcctcctcatgagactgccctaggttaggtgccatcaaaatgaaggaagtatccttcacgagtttcgcgattggttatttgggcaattctgctagaagatagcaaagcttttttctattcatagctccggctgttacttcctgcaccctttttggaatgttttttttaccttccagatttgtcattccagaagccaatagagggatgcattccgtaatgtaattttacattctggattgaccattccagaagccataaagaaggtgttggaagcaacttgggaggtggaggaaataatagcccaaatctcacaggacttgtttgaccaaggattggcccactatgttagngccttgtaatagatgccatctganagggataactagacaaaaaacagagtagcgattaaaaaatatatattacgggggatgtacaagaagattaaaaaaaataatagcatatacaaaggggataactagac

SEQ ID NO: 78559 - DNA, 254 bp, Glycine max
  Clone ID: PAT_MRT3847_41955C.1
ctttatacgttttggaattttcttggattttcgtttgatggggttggaggatactgaatttggtgaaataggtcgtggctttttctttggtggtttgaggttgagctaggtggtgattactatgtgtttgtgaatatgcatgacagagaaagagagaaaataattgatagattcagagagagaaggatgaaggagactgtgatagtgtcaattctggtttaggagtgtgtgtgaggttaaaacataattagaaa

SEQ ID NO: 78560 - DNA, 531 bp, Glycine max
  Clone ID: PAT_MRT3847_41956C.1
ccacgcgtccgcttttgacggccatgaaaccccctcagctgccggccggggagcgctcctgggctcacgaggtcaagcaggccctccgtgagaaactccggcgctcctacggcgccgcctccgccacaccggcggccggtgaaccgagccgtggcgccgactgccgcggctcggccgccgaggaccccataaggagagtcatgttcttggctccctggggccacacataaaacacagacccagatctgggcttgcaagagcatggccggatctgcagagaactgctcaagctcaaccatacttaaaaggaactggagcttgtcttgtaaactatggagcatgctgcttgcaccacgaacatgaacgcatggctggttaactaggtagatatgggtgtggatgggagagagagagaaaaaacaaggtatgtagtccacgtctctgatcttggatggagaggcatgagatcttgggatgctcatgcatgggtcatgggtgtggctgagatctggaacttttgtaggcatcaac

SEQ ID NO: 78561 - DNA, 1321 bp, Glycine max
  Clone ID: PAT_MRT3847_41957C.1
aaaaccatattctcatcatatagagttaattacttaacttggagggttttagagagaaatggcttcgtcttgttctagctttatgatcactttggcccttttggtccttgtgttggggactagtagtgccaatgccaatccaacacttcacacaaacttctactacagttcttgcccaaaactctttgacactgtgaaacgcacagtggaatcggccatatcaaaggagacccgcatgggtgcttctctcctacgtttgttcttccacgattgctttgttaatgggtgtgatgggtcgattctacttgatgacacatcaagcttcaccggagagaaaaacgcgggacctaacaggaactctgcccgtggttttgaagtgatcgatcaaattaagtcagctgtggaaaaagtgtgtccgggtgtggtctcttgcgctgacatccttgccatcgctgcaagagactccgttgagatccttggaggcccaacttgggatgtgaaacttggaagaagagactccaggacggcaagccaatctgctgccaacaatgacatcccaagacccacttcaaacctcaaccaacttatttccagatttaatgctctcggactttccaccaaagacttggtcgcactatctgggggtcacacaattggacaagcaaggtgcacaacctttagagcccgaatctacaacgagaccaacatagatagctcttttgctcgcatgagacaatctaggtgtccccgaacctcagggtcaggggacaacaacctagcacccattgacttcgccactcccaggttctttgacaaccactacttctcgagcccctcattcagaagaagggtctcatccattccgcacaagctcttcaatggtggttccactgactccatagtgcgtacctacagcaccaacccggcctcctttttcgccgatttctccgccgccatgatccggatgggagacattagtcccctcaccggctcccgcggagaaataagagagaactgccggagggtcaactaattgaattgttaagacacctacacataattggatatcaatgcatgtgtgtataataagttgttaaacgagagttttgatttcatttctatgttgtcactttgtgtgctaccagttaagtgtacctacattgttctattacgttaatttaatttgcttctaagtggtgatgttgaagttgaaggactttgatgtacaagttcccttgtgactttccttttacaattataattaatatttattattccaaaaaaaaaaaaaaaaaaaaaaggaaaaaaaaaaaaaaaggaa

SEQ ID NO: 78562 - DNA, 1523 bp, Glycine max
  Clone ID: PAT_MRT3847_41958C.1
gtttatttacctgaagaaatacactcgaacgagtataaaacggctgcgagaagacgacagaaggggattgtggttgatgttccttcattcatcttcatttctcttgcaagtaactcgttcagattttggtttttgcttccctatccgctctctcttcttcacttcagtatggcggtggtaccttacaccaccggttctgcacctcttctttctcctccttctacttctagtgttgccacaaagctctactccggattgaaacttcaagctgcgagtcctttcggagctgcaaaacctaacgtaaccgctgagttttatggaaaagttcacaacactcttcactgtcggtatgctaaccacaatacatcaatggcacgtattcgaatgatgccaatagggactcctaaagtcccctataggacacctggtgaaggaacttggcaatgggttgatgtatggaacgccctttatcgagaacgtgttatcttcattggacaagagatagatgaagaatttagtaaccaaatattggctactatgctttatcttgacagtatagaaaactccaagaagctttatatgtacatcaatggccctggtggtgatcttacaccaagcatggctatctatgacaccatgcagagcttgcaaagtcctgtagccacccactgtgttggctatgcttatagtcttgcagcatttctccttgcagctggagaaaagggtaatcgttctgcaatgcctctatcaagagttgcccttacatcaccagctggagccgcccgtggacaggctgatgacattcagaatgaagcaaatgaacttcttagaatcagagattaccttttcaatgagttggcacagaaaacgggtcaacctgttgagaagattactaaagacttgagtaggatgaaacgcttcaacgcacaggaagcccttgaatatggactcattgatcgaattgtcaggccaccccgcattaaggctgatgcaccacgcaaggaagcaggcacaggtcttggttaagaatatttggaatccgcattatgtgtttgaagagcagagaataacatgttttgtatcattgaataatgcatgaatattatattagtcatgacattaaaaatgagaaatgttacaacacatttttattttctgatacacttaaagtttttttttaattctcgaatttatcaatttttggagtttgtataataatatttggatagttagaacctgttggctagatattgattgtttgtttagaagtgaatgaatttcaattcttattcagagcagtaaagtaagtaaagtaaggttaataaagacgaaatagttgctcaacaccctctttccagtcctagtcccatcccatcttacgtgatcatctaccgagcaccggagaggcagaatttccatattaaaaggatcatttatttagttgtattgaagaatcattttattaagaagttcttacatgtttgaactttgaagagcaaataataaaatgttttgtaccattg

SEQ ID NO: 78563 - DNA, 709 bp, Glycine max
  Clone ID: PAT_MRT3847_41959C.1
catcaacaaaaaaagcacctgataattgatagtattatatattatggcttatcaagtgttggtgatttgtgtggtctccagcatagtgtttgcatacatagtatggagaaaagaaaggaagaaaaagcttccaccgagtccaaagggccttcccatcattgggcacctccaccttgtgtccccaataccccaccaagatttttacaagctctcactccgccatggacccatcatgcaacttttcctcggctcagtcccttgtgtggtggcttccaccgcggaagccgccaaagagttcctcaaaacccacgaaatcaacttctccaaccgccccggccaaaacgtcgccgttaaaggccttgcctacgattcccaggacttccttttcgcatttgcacccttcggaccctactggaagttcatgaagaaactctgcatgtccgagcttctcagcggccgaatgatggaccagttccttcccgtgaggcagcaagagaccaagagattcatcagccgcgtgttccgaaaaggcgttgccggcgagcccgtggatttcggagacgagctaatgacactctccaacaacgttgtgtctagaatgacgctgagtcagaaaacttctgacaacgacaaccaggctgaagagatgaagaagctggtgtcggatatcgcggagctcatggggaagttcaacgtttcggacttcatt

SEQ ID NO: 78564 - DNA, 274 bp, Glycine max
  Clone ID: PAT_MRT3847_4195C.1
cagagatccgcttcctcacttcgtcatcatatactctgtccctctgtgcaccaaagagatcaatggattgaccagtgaaggtatcaacgagtttgactacgtcctgttcatgagttgaatcgaggcaaaagattgcagtgtggacaccaatgctgtcatccattgtggggtacagtaatcttagtcgtacgcacatacggatggagaggcttcgagtgaggataaatctatcaggtatcggaatggcacgcgtggatgtagttgtagtgtacat

SEQ ID NO: 78565 - DNA, 945 bp, Glycine max
  unsure (1)..(945): unsure at all n locations
  Clone ID: PAT_MRT3847_41960C.1
ccacgcgtccggaaaaagtggcatggatatcatgtaagtaaatgtaggaatgaacaagtaattaatttgatttgatgtagagataacaagtgaagtaaagaaagcaagaagaagaagaagacaacaagggttatactaaaataaaaatacggtcttttatcgtattgtatggatccatccactcatcacttaataattgctcttctctctccattctctaaccaccaccaccaccggcttgtgtccgtctttcgtcgtttctgaaccatattacaaatcataaatcacaattcacaacacaaaacaaaccttcttctcggctctatgggaattgaacttaattagaatgccggcttggtggaatagaaagtggagcaagagcaaggaggagcaggagcagccggaggaggaggatgaggaggaagagccacgtgccgcttttcagctgaatttcatgagcggtgagcgggacaagaacaagggtaggagttgtagtaagaagaagaccaagagcttcgacgacaaggtcaaaggggttccgttaccacttccctcgcatagtctcagcgatccaattcaatcatttggatctgtttcggtgtccggtggttccagcatcagctcctccacctcctatgacgatcatccaatttcgcctcccaacaccaacagaggacgagaggaggtgaggttcaatgtgaggtcaaaaagtccgggtcctgggtcaagaggacctaccagtcctacctcaccgcttcatcaaaggttgcatgctttgagccttgactctcccacggngagtgagtgtcatccattacctcttccacctggctctccactagtccttcttctgtgctttccaacgctagagcaaatggacatttggaaaatgctaccagncatgtgtccaaatggagaaaaggaaagcttctaggacggggaaca

SEQ ID NO: 78566 - DNA, 263 bp, Glycine max
  Clone ID: PAT_MRT3847_41961C.1
ttcacgcgtccgtccacgcgaccgatggtacgttcttcttcttcctttgtttctttccaaaataaagagcttttacccttcacacccccacccctttgggagtctctcctcaatttcgcatgtggcggcttctcagggctaaccaccatgatgggtttacttggagctaccggagctgtgcgctgagctatgtccatggcgcctgcaactttgggtttggctggggacatattacaccctgatagttttggtcccaggagggc

SEQ ID NO: 78567 - DNA, 3328 bp, Glycine max
  Clone ID: PAT_MRT3847_41962C.1
tatttgtttcgagagagcgatcaatgcagaaggggatcatcaacaaaaaaaagctcttgatagtactcaagcaagctaaggcattattatggcttatcaagtgttgctaatttgtttggtctccaccatagtgtttgcatacatactatggagaaaacaaagcaagaaaaaccttccaccaagtccaaaggcccttcccataattggccacctccaccttgtgtccccaattccccaccaagatttttacaagctctcaacccgccacggacccatcatgcaacttttccttggctcagtcccttgtgtggtggcttccaccgcagaagccgccaaagagttccttaaaacccacgaaatcaacttctccaaccgccccggccaaaacgtcgccgttaagggcttagcctacgattcccaagacttccttttcgcgtttgcacccttcggaccctactggaagttcatgaagaaactctgcatgtccgagcttctcagcggccgaatgatggaccagttccttcccgtgaggctagcaagagaccaagagattcatcagccgcgtgttccgaaaaggagtcgccggcgaggccgtggatttcggagacgagctcatgacactctccaacaacatcgtatccagaatgacgctgagtcagaagacttctgagaacgacaaccaggctgaggagatgaagaagctcgtgtcgaatatcgcggagctcatggggaagttcaacgtttcggacttcatttggtacctgaagcctttcgatttgcaggggttcaacagaaaaatcaaggagactcgggacaggtttgacgttgtggtggacggaatcataaagcagcgtcaagaggaaagaaggaaaaacaaagaaacgggcacagcacgtcagtttaaggatatgcttgatgttttattggacataggcgaagatgacagttctgaaatcaaattaaccaaagaaaacattaaggccttcatcatggatatatttgttgccgggactgacacgtcagctgcaaccatggaatgggctatggcagagttaatcaacaatccatatgtgttggagaaggcaaggcaagagatagatgcggtggttggaaaaagtagaatggtagaagaatcagatattgccaaccttccttacttgcaagccattgttagagaaacacttaggcttcacccaggtggtccattggttgttagagaatcatcaaaaagtgcggtggtttgtgggtatgatattccagcaaagactcgattatttgtcaatgtttgggctattggtagggatcccaatcactgggagaaaccttttgagtttaggccagagaggtttatcagagatgggcaaaatcaattggatgttaggggacaacattatcattttattccattcgggagtggaagaagaacgtgccctggtgcttctctagcgtggcaggttgtgcctgtgaatctggctataattattcaatgtttccaatggaagcttgttggtggcaatggcaaggtggacatggaagaaaagtctggcatcactcttccgagggctaaccccataatttgtgtccctgttccaaggattaacccattccctactatttgattgtgactccgaatgttattcaataaccagtgagagaaaaaaataataataaaccatatgatctgataagagaaaaataataaagccagtttctttcttaggctaaaaagcaacttttatttctcattgtaaaatttattgataaatatgtttcttacaaaataaaaatacaaaatttagttctcaaaaaagtaaccctttctaaataaaaaaaaaaaaaatgagaagcatccatttgatcaccaattttaatttctgaattatcttctttcacaaatgacacttgaccctccacagagtggctaacaatcgttgaggaatctgatgacattttattgatttccagcacagggttttctggcaaaagaccagatccttccatgtcattttcagatacagacctcacaactaatttactgtcagaagataccccaatctttttttcctctttcacttgggacgatgaagactcgacagcatctgggacagttattaattgatgaacattcagagacatcgaaaggccttcagaaccatcaatatcagatgtagaactgatcccttcttccttcctaacggaaggagatgaaactaaatccaagctcttcaacatattatctttagattcagtctgaaaatcaccaaccggagatatatatttatcacctagttcaagttcagaatccttcaattcatgtgatggagatgaactgatagataggggccttgaggatgagacttctatgttttcttccttcgccatcagatgggagggcaaattcacatttgcttgaaaaatttcatgttttacttgcaaagtctgactaatggaagaatccatttgaacatcagtttctactttatcaacttttgcttcctcctgaactgcagagttgttagccacacccttctccattgactcctccaaaggttctgaactcctaactgggcatgttacagctgatcccctattttgttcttctatcaaggttgacgggggcagaactgcagcttcggatttacttccctctaaaagactgccaacaccagaaatatctactaactcattccctacagcttccaaaccagaagaaggttgtggcaacactgacctgcctgatgtgtccatttccatatggcaagcctcggaagaatcagtctttggattgttaataggattggataatactatattttcttgggaaacagggtcaatatttataggttcaacaacacaagactgaagctgttcacatttggaaaccctatcatcccttttttcttcacagagagattttgggcaactctcaatcaatggagtaccatgcaaatcagcaggttctagtgcatctggatgcttctgaacttcaacagctttaggactcacaggaactttcatttcagaagcagattctaaacactgtttcgtggagggttctaatgccatttgagaattatgttcaaatgcaatcccatcctcgggctccagcaactgagaagcaggaattttatacccaacaatcccctcatcagatgagagttcagtagaaggttttaaagtagactcagtttcatttttaacttcagtatattctgaaatactagaaactatcatcgccatcggaggaagatctgttgcagaacatgatgggatcacttgtggttgatcacccaaattttcagtctgaaccaataacccagagccgtca

SEQ ID NO: 78568 - DNA, 307 bp, Glycine max
  Clone ID: PAT_MRT3847_41963C.1
ggatggacagtgtgcaggtggtgggtgggagtgtggtaggagagttgtcggcggttggaccggtaattgtgtacgtggctttgtgtcacaactgtggttatgaaaggttacccgtggaggtagatgaagaacatgttctaatttttggtgtctgatgcctataacaattttaattattacccttataatgaaccttcatagggatttccttttttcaattaagcaatgatttgttcagttgctcgaggattgcctggtcgggaatacttaactacacgtttaacatgttgattccaccattactctt

SEQ ID NO: 78569 - DNA, 249 bp, Glycine max
  unsure (1)..(249): unsure at all n locations
  Clone ID: PAT_MRT3847_41964C.1
tgaaacttgtgatgtgaaatgaatnnctataagantatataggnattgaaatagcgtgtgnctggaaatagaaatctgagaatgattgcaagaagtggatattggttgaagcatgtattggacaagccaatattgatgggtgtatggttgaagtgttaaggttgtgtctgaagtatttttnttacttttgagtgttatcctgtttcacggtggtcaatctttgtnatatcatgcttgctttggttgcat

SEQ ID NO: 78570 - DNA, 149 bp, Glycine max
  Clone ID: PAT_MRT3847_41965C.1
ccattgtcaatctcagattgtgcaaccacagaaagaaaaaaaaaatcaacatgatacgaaaagaagataactaattggtaggattttaattaagaagggacagagaacttacgagtggacaccaaatgaaggagaggccttctaaactg

SEQ ID NO: 78571 - DNA, 518 bp, Glycine max
  Clone ID: PAT_MRT3847_41966C.1
ggcccctaccccccccactaatggaaaaatcggccaacaaaaaaaacatatggggggggtcaccagggccacactttggttttttttgggggatatgggaaggggaaaaagggggagggggggattacaggaaaaagcagaggctaaaaatcgggccttagttttaaggcccggataaaaaaaaaaagggggggggacctttttcccattttttaaaaaaaaaatggggggttttggaacatcaggccatggttttggaaagaaccccacgagggcaaaagctatatcccctggaacaaaaattgggtttttttcactggggcccttgacaacggggggtcctggaaaaaactttttcccgagttttttggaagcatcactgggcttgacaccgaaaaggtccagccccttcacaggggggaaacactttcggtgggtacgaacaaccttttaaaaaacaacctctggggtaacctttttcttaaacttcccaccaggaaaacgcttcaccttttttt

SEQ ID NO: 78572 - DNA, 229 bp, Glycine max
  Clone ID: PAT_MRT3847_41967C.1
gaaggtggaccccatggcgaacgcgttaacgactttgcgggttacccgaacagtgggtgaaaccggcgatccggcacgtgagttcaccctgattcaacccaaaccggtggtgctggtgggtgaacatgatgagttcgtaggcggacaaatggcctgataatgggccttcggggccatgggttatctgtggaggagttcatgacgagagatgaactggtggacctcctgc

SEQ ID NO: 78573 - DNA, 496 bp, Glycine max
  Clone ID: PAT_MRT3847_41968C.1
cttgcgtgtgtatgtgcaaagatgaggactttaaaggctcaaagttctatctagtgtaacaagatgcacattcatgaaggtaaatttaagtgttttgaataactagtttgagtgattcaaacaaatttgttaatgtaaagataattaatacttaatccagtttgcagttgaactaagtacactcatccggtgtgacatttctgatttaaatatgtgagaaattgctaaagcttcctaacagtgagtagagttatatattccattagtcataatttctaatctctctttctgtatcattttttgttccatagtttatcaacgtccttcttgatgatcttcgggcacttcattcatatgtatttggtgaaaggactatagtcagttcactcatctcacagactttggatcagttgaagagatgctcttcattgaccaaaaaatatcaccatcagcttcaaagttttatcaaagatctgatggagagaaatgaattgac

SEQ ID NO: 78574 - DNA, 438 bp, Glycine max
  unsure (1)..(438): unsure at all n locations
  Clone ID: PAT_MRT3847_41969C.1
tgttactttaaaagtttctatcatgtcaaaaaacgttgacgcaggcgatttttattacgatggacaggacatggctcgtacgccctattaccacaacgcacgtagcaaccggtcaagttacaataaagcaatagttgatattagacctgatgctgctccgttggaagtgagcccggacttttttgggttcctgttcggatctaaacccgccaccatctcgtcaccgtctgatagaagactccccgatttcccagaaatcagaaacacatcacttgaagaaccatcgttggttagtggttccattagtgattntgaatccggtattaaatgtctttcaaaccggatcgacgaatatgaagccaaactggacgaaattgaagatgaggtcgtcaagtcacacaatgaagatggcgctgccgatttactcgtcaatgaaat

SEQ ID NO: 78575 - DNA, 155 bp, Glycine max
  Clone ID: PAT_MRT3847_4196C.1
gtaagaaaaaaaagcttgtattccatttttacgagaaaaaaaacaagggttgacacgcctgaatctcgggggggagagccggtccagtggaaacccaaatcaactgggtctgaaacccgggccggcgcttgggttcacacggcggatcctcggac

SEQ ID NO: 78576 - DNA, 209 bp, Glycine max
  Clone ID: PAT_MRT3847_41970C.1
ctcttatattggattttatgtattgattgtatgcctttatggtgaggaagagtatgtattaacaagaatatcaggatgctcccttagaggcatttttgtagacccggttcccaccgtgatgggtttggcccacatggacgacattttaagatgtatagttgatgttggctgaggcctttctaatgtgctcataaaccaccatatttaca

SEQ ID NO: 78577 - DNA, 147 bp, Glycine max
  Clone ID: PAT_MRT3847_41971C.1
aactaacatattctatcgctatttcaaatgctcgaaacccactaccaccccaaaaactgggacgactaccagcgggccttctacgccggaatctccggaaaaggttacgacttgaacgacgcaatgattacgctcgccgacactaac

SEQ ID NO: 78578 - DNA, 498 bp, Glycine max
  Clone ID: PAT_MRT3847_41972C.1
ccaccaaaaaaaaaagtccaaaaccccctttagggaaaaaaggggcccattttttcccagccaccccaaaaaaccttcaattcacccccaaaccttttttttctgaagaaaaaaaaaaaaggaaaaaaaaaaattttttcccaaaaataaaaggaaaaaaaaacccccccttccccagggatagcccacccctaaccccccccctaatttttttgaaagaaaattggggggaattaacaggccaaaacaccccccaggtgaacaccttttaagccggtttccgttgggcctttctttccccccacccgggtttaaaaaaacaaaaaaagcccccccccaccaatggcaagggctgtcccaaacccagtggggggccaaatcttgtccccaaaacctttattggaaaacccaaccccaaacccccgtttaagaccccccccaccggcaggaggaaaaggacccaccccccccagggggtgggaaccccccgggtggaaa

SEQ ID NO: 78579 - DNA, 527 bp, Glycine max
  Clone ID: PAT_MRT3847_41973C.1
aaaaaaaaaggaaatgggtttttttataaaatggccaattccaatacaatggtttttatggggaattaacggctcaaacaaaaaaattcatccttatcgccttctacttaaagaggaaatagaggggataatccacccccaaggttaaaaggaaccacatgtaaagaggagccccccttgggtccctccacccttttccacaccataagaaaaccactttcatttccagggaaaaaaaggcccccaggacctacctcaattaaggctacttttttctgggcaaaaaaacgccccctttttgaaaaggagggcaattcatacatggaaacggaattgtctctgcacaagaaaaaaaatatgggttttccctttgcataaggcttcccaaaaggggaaccacccccattttcttcggggggggaatatatcacttccaaaaatcctgtttaaaggcaagcccaaaccttattggggcggccaaataaacttgacaacaaaatattgaccccaacaaataagggagggga

SEQ ID NO: 78580 - DNA, 217 bp, Glycine max
  Clone ID: PAT_MRT3847_41974C.1
gtacccacaactcttagcacccgattacattgactttgcacactacctctgctccctatttaaaacgtgaatacactgaatccgggatgtgattttaatcttctttatctgcattcattaggatctctctatccaaccctgtcctttactaactcctaacaaaacacccctcaaccaaaaaaagccctgacgaagctcaatctaatactcacttagg

SEQ ID NO: 78581 - DNA, 287 bp, Glycine max
  Clone ID: PAT_MRT3847_41975C.1
aaaaaaaaaggcccaaattggcaaaaaccaaataacggcccccggacctttaatctctggtttaattggccccccctaacaaaacaaaaaaacccaaagggggcccccccccttgaaaaaaccaataattttttcaagacaccccggaactcccaaggtttgaaccaaaagccctggggtaaaaacaaaaaaccctgccctggttgaaagcggggccccaaacccctctaacaaccgaaggggcaagaatccacccaaaaactttccaacctccattgagaaggcat

SEQ ID NO: 78582 - DNA, 472 bp, Glycine max
  Clone ID: PAT_MRT3847_41976C.1
gggccgcccttttttttttttttttaccggaaaaccaaattcccggatggtggtaattcaattttcccccaaaccaaaaaaaaggttggaaaaattcttcttcacccattccaaagaagggcagaaccaggatggaggccttattccttaaccgtggattatcattttcttcgcactaataactcgtattgttcgaggttactaattattttggctacttcatagacagaataaaggccaatcccaccctccatccatacaacatagacaagctgtgcctttgaggggtattagaaatcagacctggtcgcgcaattggagcaggctttatccccatcttccagctacttgtttccgaggacactggtcgagatgggccttcacttgcaaatgttgccatgccctgtcgttgcttgtgcttagggttcccagagcaaatcacatagattcgtccccggcgcttaactatctg

SEQ ID NO: 78583 - DNA, 493 bp, Glycine max
  Clone ID: PAT_MRT3847_41977C.1
gattcaaaatacaaataaacgctcgagctctcctttcgctcctgcttgagaaaatcaggtatgaaagttcacttctccgttcaactccttctttctctgtttctactgtctgcatttcacgttccacatatggttgttggaactgtggagcttagagctctgatggagttgaagtcctctctggatccagagggaaagatccttggctcgtggatcagtgatggtgatccatgcagtggcttcttcgaaggggttgcgtgcaacgagcatcgcaaagtggctaacatctctttgcagggaaagggtctttcgggttggttatctccagcactggctgaactcaaatgcttgtcagggttatacttgcactacaacaacctttctggtgagatacccccacgcatttcaaatctcactgaactggttgatctctatctcgacgttaatagtttatctggagctattcctcctgagatcagcaacatggctagtc

SEQ ID NO: 78584 - DNA, 393 bp, Glycine max
  Clone ID: PAT_MRT3847_41978C.1
gggtggtttacttgagtgctcggtggatacatgatccggcgtaagtcagaaggaaaatatggagcttctccaagggttgaccatcatgcgggacgataccttaagaatctgacgtcctgaacaagaggctctcatcgtcacgggagaagaagaccgaatatttcccatgtacaccgccctcttactattagagataatcagttacaaggctcgactgcactagcttaacgaggcatgccatgtgcactaaatggaaacgccagtacaattccacaacacatgcctaaatcctttacaggagcattttcgagtattacatcaattacgggcacaacttgtacacatgcgatacgagtatggcttcatacaagcgaataccataaccatacttcg

SEQ ID NO: 78585 - DNA, 348 bp, Glycine max
  Clone ID: PAT_MRT3847_41979C.1
ttttttttttttttttttttttttattattattatcctttattcagggggtttttttaaattactttggtccttttcaaccatttaccgccgggattcattattaaaatgtgccgccctttttcttaagacccccctgttccgtaccatttaaaaaaaaaaaatgggaggccccgtgtgctcaacccccccatacgaaggtcaaaaaaacttaacccgctaaagggccgaacacccccactttatttaaagggggggggttaacaacaaaaacccttggggtcccaaaccccaatcaaaggcatatccctgagtttttgccgccccctaaaaagcttaacttcatctc

SEQ ID NO: 78586 - DNA, 443 bp, Glycine max
  unsure (1)..(443): unsure at all n locations
  Clone ID: PAT_MRT3847_4197C.1
ccgcggacgcgtggtttaagatattcggggtttccatttggggaaatcaaaatagggggaaacattctagagagagcgtgtagaaaatatggttgccgatgatatgacgctgtgcatgatcgacggctatgggggatgctattctctttgtgtgttggacgctgactccaaaagggatttgctggagcactgatattttatttgctgaacactctcctatttgatataggacttcgtgtcaaaataaaccctctctggctctttcttaggtctctggttaatttcaagttcaagctggtgaaatcttggattagtactcccactctcctatctggtataggatttcgagggtagaccttgctatttctttcctttctttcactctcttcttctcactgatccgcattgccgntcaaagcggtcttatttgaaaaacactttgg

SEQ ID NO: 78587 - DNA, 184 bp, Glycine max
  Clone ID: PAT_MRT3847_41980C.1
agcgtaccgtcgcggacatctcatgattccctcaacgacatgtcaagacatgttcaaccatcaacaaacttagagattatcatgtcatgattatagcgcagctaccaccgaagctagggtcatataaatcgctgacgataggtatattatcgttataggaatctacgacataacatgactaatg

SEQ ID NO: 78588 - DNA, 213 bp, Glycine max
  Clone ID: PAT_MRT3847_41981C.1
gactgcaacaacaattaatcaagatgagtgtgagggaacaacatggtgctgctaacggtgtgtttgttgcttcttttccttgtggaggttacacatgcacccatgaacctgagcttctctacaagtgatcagtcttcaagatatgccgacgatcagtgttcaaagaccatcccatgatctcttatgtgtaccccactcaaagcctcctcaatg

SEQ ID NO: 78589 - DNA, 818 bp, Glycine max
  Clone ID: PAT_MRT3847_41982C.1
cccgggttttaaacatgccagtacctttcactactggttattccacattcgaagaaataaactcacccactaagcactacacaaatcacacagagttgcaagagaaagagagcgagattccgatggcgactctggattccgacgtgcctatggttcccgccggcgagccctcaagcagcgccggtccttcttccaagaagcccaagcgcttcgagatcaagaagtggaacgccgtcgctctctgggcttgggacatcgttgtcgataactgtgctatctgccggaactacatcatggatctctgcatcgagtgccaagccaaccaggctagcgccactagcgaggaatgcactgtggcatggggagtctgtaaccatgcttttcactttcatagcattagtcgatggctcaagactcgtcaagtttgtcctctagataacagtgagtgggagtttcagaaatatggccactagaattatgatgtggttgagctcctcggacatttggaccatctatcctagattttgaatatttactgttctatctgttattttcctttgcttttgtactgaatttattatgttcaagaaatcagcttgtctgatggaatttgatatacgccgtggtaacatgtaaagttttactttaatgttttatgtatttcatatgcttcctttcagctgtttgtatttgtggtgtttgagttgtgtgagttggttaatttttctccctttccatgtattgctctgtagttgatgataattgataatggttcttatttacttcaattttaaatcgcattcaaggatggttcttat

SEQ ID NO: 78590 - DNA, 579 bp, Glycine max
  Clone ID: PAT_MRT3847_41983C.1
gtttcgcgtccgcccacgcgtgcggacccacacacctccatttccccaactcgctccgagttgactcactcctttccctttcgagatcaaccgccaccgctacgcctccgcgctccgccgccactgcaacccccgcctcccttctccgtcaatgcaaaattcggcgtcgattctcgccggaaccttctcccgctcttccttcccctccgggctttgacttttgctttcttgcgattgcgatgagtccctttcgccctttgttgctcttcgccgccgtattcttcctcctccgccccctcgccgccaccgacggcgacgccgatccgctttacataggttgtgtggagcagtgtaagaaaactggatgtgtaggggatagatgctttcaacattgtaaattttcatcagatggaaaaccaattgatggtccatggtatatgcatgaacccctctatctgaggtggaaacaatgggactgttgcactgactgtaggtattactgtatgctagctagagaggaagaaagaacaaaacttggtgacaagcctgtcaagtatcatggaaaatggccattccatc

SEQ ID NO: 78591 - DNA, 235 bp, Glycine max
  Clone ID: PAT_MRT3847_41984C.1
cacgactgcaggccaatcaccttcggttgagatatgagagctaaggtcgttcatcgtacaataactattgaagtagttttgcacgatcaagcagggattccagtacatgtcatgtacatcgcctatcatggtcacgctaagctacagcagcgtgtgccagctcagattgcaacaagacactcaaagatatacacccagacttgacacagcatctacaatgatgacatcactctca

SEQ ID NO: 78592 - DNA, 189 bp, Glycine max
  unsure (1)..(189): unsure at all n locations
  Clone ID: PAT_MRT3847_41985C.1
ggggcgaccacgcgtccggccacgcgaccgcccacccttccgttcttataccgaccagagaaanngaggcgcgcgtctntccctcgccgggggggtcctcttattcccttttgcctttaacaaaacacctctctcctcctagatttaactactacccccttcttttttttccacctttaatctcaatca

SEQ ID NO: 78593 - DNA, 443 bp, Glycine max
  Clone ID: PAT_MRT3847_41986C.1
ccggtccggaattccgggtcgacccacgcgtccggtttctgataaggcagggatacaacattgctgtgatcattggagaccatggagcgatctcctcggaggccacagaggcgaagagcaggacctttaagcttgctaatcccctgtactatcattcagttattccttcacctgtcaacaatctagcttgctcctatctatctatatggaataggatgcgttcaaataggggcactagcttcactttatgctgtttcagctgtgtgtcaacacgtcatgtgagagacttgactatgatgatgtctctttggtggctttgatgagttgtgcgcccttggtgcgtgaggactagaacaagacggggggggggcgtgtgagaggtgcgggcttgcggggcggggcggggggggggggtggggggtggggtgggggggggggggggg

SEQ ID NO: 78594 - DNA, 397 bp, Glycine max
  Clone ID: PAT_MRT3847_41987C.1
aggatgacgtcgcacgcccgcgtacgtcaggcaatgaatgtctcgagggagacgaattctgcctacaatgaaggatgagagtttatcgtcaacgcaaccagaagattgggtgattgttcccaaaatgacaacgataaacaatacaagcgcatacgggctcaagagtggcatgaaagggtctcgtcgtaagggcaccatgacgaagtccatacacacagggcactgttaggagagaaatggcacacactgagaacaccattgaatttcgattctagcaagcagagctcatgacagttcactatcgaccatatcagtggaggaatcttagtggacaaaactggcgatcgtatcacacttatgcgcaattctgcaattagccacttgttgaaagttgctg

SEQ ID NO: 78595 - DNA, 314 bp, Glycine max
  Clone ID: PAT_MRT3847_41988C.1
agttcaaacactctcatcacattatgcttcaccttacaatcggggactcaatcggtctaaactagataaaatgaccttaaattacaacatctacctcgacgtgtctgaggtgctaacgctgatactattattcttactgaccgtcacagagctcgtggaggatcagccattacaatcttaagtcaacagctgaccactcttgaaggggcgaatcaacgtcaatttaaattgtaacggtacctgtacccctatccaacggtacattaaagtggacttcatagactcgataagcagcgcgtcaagctcgcattttc

SEQ ID NO: 78596 - DNA, 440 bp, Glycine max
  Clone ID: PAT_MRT3847_41989C.1
tgaacatatcacgtgagaatctatatgttgttgctaaggtctagtgtgatataaaaaggttgcagaaattgtcaaatctcaacattactccccactttaatttatgaatgcaataaattgaaagactttcgtccttttcggacaaagtttgaacactagttagtgttcttcaagttgtactctataaatcttagttaatcattttcttttcttttgagaaaattgaaaaagaaaaccctccttagtggtgattgaactctgatgttttcatctttgtattgaacatctaaaattgtgtacctttgttgaaaaatggagtgactcctatcagggttgtatgggaagattataacttgaattcgacatggtttcaaaattgcattgcctgtggcatcactctttcccttttgttatttcatggtgaaagattttaatattgc

SEQ ID NO: 78597 - DNA, 371 bp, Glycine max
  Clone ID: PAT_MRT3847_4198C.1
atgggcggccgtgctaagggatacctcttatataggggggcctgaattcaattaactgtcctttgttttacaccaatttgactggaagaaccctgttgttacccatcttaattggttagaccccgatgccctttcgtcagttggcgtggtaccaatgaggcttccaccgattgccttttctaacaataggcccgcctgaatggccattggcacccgccctgtaccctgactttaaacggggccgccccgtgggttacccccataggcaccggtacacgttgccatttaccctaacgccaactcgtttagcttgcttcccttcttttcccggcacgtttgccttttttccctgcctttctctaaattggggg

SEQ ID NO: 78598 - DNA, 396 bp, Glycine max
  Clone ID: PAT_MRT3847_41990C.1
ctcaagcactaatcttctcccttctaactcacaaacctttttgttttttctatatactaaacaaaaactttactttatttaaacggtgagggctgccctatataactacctaataacattctcttctgtgtcttaatcctaactcatacatcatattatcatagttattctcatgccatcttatccttttttaattcccatacatcttcaattccactactattaccctcacaccctaatctccttctcctcactcattctcttcaatcttccttcatgctattcctcataaccttcatcatatcctccgtcaaccttctttccttacatcaattttttatctaatacatttatttttcctcttacattaatttgttaattctttctcctaatttc

SEQ ID NO: 78599 - DNA, 353 bp, Glycine max
  unsure (1)..(353): unsure at all n locations
  Clone ID: PAT_MRT3847_41991C.1
tctagctatctcgatcgaactgtccaaggtcctgtcacggggggggggggggggggggctatcacagaattatgggggattagagagagagacacacacacaagatgaactatatgcagtataccagcaggtgtgtgggaacgacccgaactacgagtggagtacgatatagacgaccggcaaaggtgactgtgactaagtgactgcacaaccgacgatggctataatatatagtatagcagaagggaggggagatataagtgtaggtgtaccccgtgtaccacgtagccatgaaggaagtaataagcggccgtgcagacgtancggttatacagaaagcgccgatttagaaa

SEQ ID NO: 78600 - DNA, 337 bp, Glycine max
  Clone ID: PAT_MRT3847_41992C.1
cgaccttacaaacagatcactgatgactacatactgctacccactaaatgctaatgctctgaaagcaaatccaaacaaaacataagctctagcttctgctcatcatcataaacacaccattcagactcttccctccattgtttattaacaaagcatgccattaataccataactgtgtcgcttctttttgcctgtgatactcacattttggaagttgagcctgccagaaccaagcttactgggaaaaccaggttccacatatcacaaatcaccgttatgggatttgtgtattgtgattgctgatacaacagcagctttttcagacacagctacttct

SEQ ID NO: 78601 - DNA, 228 bp, Glycine max
  unsure (1)..(228): unsure at all n locations
  Clone ID: PAT_MRT3847_41993C.1
gtcgcangcacgcgtacgtaagctcggaattcggctcgaggtgggctggaacggttccaccttcgcttgagcccgggcctcacttacctgcaccgctgttcttcgagtcttgctgcacgccccgttctgtgtttatccacccgtaatgatggccaccttccggtcgggagaaataaatggtttgagaccaaaaaaaaaaaaaaaaaaaaaaaaaaaaaaaaaaaaaat

SEQ ID NO: 78602 - DNA, 460 bp, Glycine max
  Clone ID: PAT_MRT3847_41994C.1
ctttcttgtatgtatatgccaaaaatgagtactacaacttcgtcacacctcaaacagtcacttccttagcttggtacaagagttctctaaagttatgactagtgcagtctatgtgcaagcaacccaccaaacaatagtgcattatctaataaacctgcaaaccactcaactagcataactcttcctaatgctatatagattttaactgacaaaaaaaatgaataaatgatcaacaaatctaagtgaataaatgatcccctcatcacatgaacaaataaaatgagatcttaaaataataacaagaagttccaaatgactcttggtaaaaatagaaccttcctctttcaggctttagcattaaagctttcctaaaatcctcctcaaaaagtctacttctagctgaaatttggtagtgatcaagtgtacttctaaaaacttttagaagaagcggacgcgtggg

SEQ ID NO: 78603 - DNA, 403 bp, Glycine max
  Clone ID: PAT_MRT3847_41995C.1
tatttttaagtataagactgggatttccaagaaaggcttaaaaataatgtatataaatgcagaacagacacattctaaaatgagttagtgttgtagttaagttcaacctaaatctaaactttaaaatggaatcagaacctataacagttgtttgcagacattccggcttgcaaattttaaactttatgttgaaacttggaaatgctcactcctcctccatctgccaatgatgggaccaaaataacaaagtgaaattttttaagattagactttaaaatctaagtaaaagcttgcagatatatgattaacattgatggttggaaaggaaaggttcaaatctttactactgatatttttactaaaactagcagaataatatttattggttaaaaagaaataaaaa

SEQ ID NO: 78604 - DNA, 280 bp, Glycine max
  Clone ID: PAT_MRT3847_41996C.1
gaaagaaactcgacggcgccggcggtaattcagcgagccacacgtttttttttttgaaggatcgtcccataccgtggtgggaggagtgtaacaaaccggaagtggtcaaacaaagaatcaaaaaggctttcaaaaagggaaggtttatttttgaagcgatatgccacgagctgaatattgctatagactaggacgacacgaagcttagaactgtcattcttgagaaacaaaaggtggctgtttttctgtggcggttggccaccgaccactttctgagcgt

SEQ ID NO: 78605 - DNA, 463 bp, Glycine max
  Clone ID: PAT_MRT3847_41997C.1
ttttatatgcaaaggcgagactaacactggatgggggtttgaaccacacatgttggacccaaagatgatgtactatcctaattacacgtatgaaacttcgctttgagaagacaaggcacccaacacatgatttgagagctacacacactctgtgacgtgttgataagagtggagctttgcaattaatttattgaaagcagacgccattggatgcgaattctttccagcccctaaggacagtagctggttcgacacgggtaatcccacacggtcgaaggcttccatacgaagatcacatggattggttatgcgcaacttcttcacatctgtgaaacctctggtcatgagcgtctttagcttattgctcactttgtcctaattctacatgaaaccttggatgctctgaacccacttaaagaatctaactgttacctcttttgaatagcaacaatgtctgggagga

SEQ ID NO: 78606 - DNA, 548 bp, Glycine max
  Clone ID: PAT_MRT3847_41998C.1
cataagtgtacctactatttcaaaattgctgttgcccttgctgttgctgctatccctgaaggccttcctgctgttatcacaacttgtttagcactcggtacacggaaaatggctcaaaagaatgcaattgtgagaaagcttccaagtgtggaaactttgggatgtaccactgtgatatgttcagacaaaactggcactttgacaacaaatcagatggctgtgacagagttctttactttgggagggaaaaccactgcttctagactcattggtgttgaaggcacaacttatgatcctaaggatgggggcattgctgattggggttgctataacatggatgtcaattcgcaagtcatggctgaaatatgcgctgtttgtaatgatgccgggatttacttcgacggtcgcctttgtagagccacaggtttgcctactgaagctgctctcaaagctttggttgaaaaaatgggagttccagatgcaaagtcaaggtacataattcgcgataatacagaacttgctgcaaacaacatgatgaatggcaacac

SEQ ID NO: 78607 - DNA, 291 bp, Glycine max
  Clone ID: PAT_MRT3847_41999C.1
gctactcaatcaggttgtgaatgtcggtgagaatgacacagatcatgatacacatgatgatggacgtggttatggaggatgcttttgggcctgatgcatatacatattcatagaacttgtatataaaagtgctgatatagatactgccatatatttaactagctcatttgagacataatttgatgcaaacatgattacatgtgtgaagccatatacgaactcacttaccaaatttcttgaaagacaattggaaagcttaaatgtgaactatgttggacatgatgtgtatga

SEQ ID NO: 78608 - DNA, 857 bp, Glycine max
  Clone ID: PAT_MRT3847_4199C.1
ctcatgtatcccccagggtaatggaaacttatggctactgtgcacctgagtatgcctcaacaggtcaattgactacaaaatcagatatatatagctttggagtagtgtttctagagatgatcacaggaagaagagcaattgatcagtcaagaccatctgaagagcaaaacttggtcacttgggcacaaccactattcaaagacagaaggaaattttcatcaatggttgatccattgctgaaagggaactacccaacaaagggtctacaccaagcactagcagttgcagcaatgtgtattcaggaggaagctgatacccgacctttgattagtgacgtagttacagctcttgatgttttagcaaagaggcatatacaagtgggaagacaacaacgttcaaaagagacttttttcgagcatggggaatgtagttaacaaaacgaacctgaaaacagtagaggattacacaaaaggacaatgaatgaaaaagcagctgctaatgaagtttgagaatcattctataaaatttcatcatgatgccacttggtatcattatgaaaatcaaaagaattacatacttttgtatgttcaagatttattgattagtagtattagatattgataatagaatgacaagattgttaccagattcataattgcctactctttgagattctctaatcaatactgttacatggggcaatacacttgtaatgtctgaaaattcacccatttcaggatacagtgtaatgaagggttgaatgaagatggcgtagggctctatgatgctctgataattatatagattgtatttagataatttaatattaaaaaataaatttcagtaaatttttaatt

SEQ ID NO: 78609 - DNA, 574 bp, Glycine max
  Clone ID: PAT_MRT3847_419C.1
aaacaaaaaaaaaagtataaaaggtttgggggaacccccaaaaaatgggaagaaaacttcaagtattaaagctaaaaataaaaacttttaaaggctaaaacggaactggtttaactttgggaatcaaaacaaaaaaattatggggaagggccttaaaccaaaactatgggtctaactatcgacttatggaacaaaacaaaaaccgggcatccaaatctcattggtaaaactgggggggatccccaggttttttccacttgaaaactttaggagggctaaacaggggtacggaagttagctccaaaaaacactggttccgaaccaagctcctcctaaattttaaaaagctggttatatttaaaaaaaccctttgacctggatggagctccagttttaatttgacccggggccaaaccaaaaaaaagggcagcaaggaagggatcctcagtctctccattttggggactcgccaagacaccccatccagtttttttggacatcctgacaggttaaatactttaaggcaaaaaaccaattgggttgaccttaaggaaaaaagcattgcatgcttttg

SEQ ID NO: 78610 - DNA, 450 bp, Glycine max
  Clone ID: PAT_MRT3847_41C.1
attcaaaatccaaacaaacacgatgtatgtgtcactttccccccgcccaagagggagcaggagctacagttctagttataggtattagctaatgcaagcaaaaatagggacccaagctccacttacgagaaaacgtttagcttgaattaggcttttgcaacaaccccttgaaaagataaagatatttttttaagaaccgtaagactcttatgaaattgccagaaaaaaacaagatttttcttttgaaaaaggcttagctggcgatggtgctggaaagccaacccaagccctaatagtgaccctgtccttatggagaagatgggctaaggctctgccaataccctttgacggagccctttgaaaaagaagctcgagcttgtttggtataccagtcgttgtaataggaagaaaaagatcttggtctttgacaaacacaaccgcaactgtaag

SEQ ID NO: 78611 - DNA, 688 bp, Glycine max
  Clone ID: PAT_MRT3847_42000C.1
caaagtctacaaatcaaaatagaacccgactttaggagaaaagatcctctcgtgattcattatacaatttcttatgtacatgctgtagagaaagcaaatgtctattagaacctctggttcgttctgaaagtaaaaagagtctataaaattaaaggcctgaattgatgaccttatatgtacatgaattatggatttctgatatatacagacccagttcgtgactaacatacattcaccattctggccattttgaggtatagactttgtcaagctggtgcaagtgtagcacaattatcattagtgactacatgatataattcctaactacaattaacttggctaaacaagtaccaagtacagagccacctcaaaagcaaaaattgaagacattcatagtaaagtaccctttcatctataagttaggccagccattcggtgaatgctcttcggcatggctcttttgctttgcaacaaggcgtgcgtgaattaaatttccagacgcaattgcttcttggatgtctgtctgtgccttttggcagagatcatcaagtgcaagtgttgcaaaaggctcctctatgagaactccaacttcttcaatgcaaaacaaagaggcagcactaataaaggtagcaggaaccacaatccaatggcaatcatcccccagtatgcggacgctgggtcgacgggg

SEQ ID NO: 78612 - DNA, 301 bp, Glycine max
  unsure (1)..(301): unsure at all n locations
  Clone ID: PAT_MRT3847_42001C.1
aggggcaccaagtgtgtaaaggtgtttatgaagnagggagaggaaacatcgcgataacggggagtcagtggcagaccctgcgaatacaaccacgcagcaaggaatctcctgcagacagaattgatacctgagctgcagccaggaaggccacccgtcatacagcccagagagagagacagctcagacttggcgccactgctaccagcaccaacaccaccagagacccctcccatgcactaaacactagggcagggagacacaaataaacacgcaccaccactcgccattttcagtcaaatcc

SEQ ID NO: 78613 - DNA, 389 bp, Glycine max
  Clone ID: PAT_MRT3847_42002C.1
gatattttctctctcttcattacacaacaacaaagtggttgttaatagcctctgttttcttcttgccaccaaaatctcacaccttccattgcatcatcattcataacatggctcatcccacctcatcaggttttgtcacctttcttctctctctatctttccctgcccacatttttttgttttttatgttcttgtattgcaactattatgattattattgtttctattatgcatttattcatatgagctaggaataagcgtcatcatgataaggaagggtaacgtggtgcaccacgcccacatgctgaaatttcaaaacagaccactgaaacaacacaaaattcccccccaaatgtcgacttatgctccggaccttttcgccacgctgt

SEQ ID NO: 78614 - DNA, 496 bp, Glycine max
  unsure (1)..(496): unsure at all n locations
  Clone ID: PAT_MRT3847_42003C.1
ggtccggnaattcccggcctcgacccacgcgtccgcgaattcgtgggcaccccaaagtggagccgtgaacacaacgttctacctcaactcagctccaccccaccatgtcgtcttcctccgccgccaccaccaccaccaccctcccggtgttggcgtttctcctcctcacgaccaccgcgatcaccgccgcgccgattatcggtctagactcattcttgagccaccaatcccgaatggaccctcacgcctccaacgactccttcctctctctcccttcctccgtcaaaaaacccctctcccactcctccgacttctccctctctgtctctctcccaatctccctctccctccacctcctcggcgactttcccttcgacaccccctccctcctctccgcctttctctccgccgccagccccacccacttccacgtcatcagcccccttgagttccacccttttttccacaggctntcccttttccacacccttcacct

SEQ ID NO: 78615 - DNA, 239 bp, Glycine max
  Clone ID: PAT_MRT3847_42004C.1
tcttttttttctattttttttattttttattatttttgttattttttggttttaatattatatctataggaaaagggtaagtgggcacatattgatgcagacactgaattgtggataaagtttcatagttcatatggaatcaaacaaacaacaaacagatagaaagaaaacaagaacgttatacatatccagctccgagcaagacatattaactagataacaacagacgtatattctga

SEQ ID NO: 78616 - DNA, 357 bp, Glycine max
  Clone ID: PAT_MRT3847_42005C.1
acccacgcgttcgcgcacgcgtgttcaaactcagactcatgctttacagataagaagaagtcgtagggctaagttccatttagaacggataattaatcaaaaacacatcaccatttctgctctgcttggaaggcacatagacaaatccataatgtctgattctgagcgaatccaataaccctgattagcattccttcacactacccttgaagcaaacgccggaaccaagaaaagctatactattactcattactgcaactctaacaataactaaaacgatcatattaaaatcgatcacaaactttcttaaatcatcacgccccctgtctctccaacaacactgtcaatccactcaac

SEQ ID NO: 78617 - DNA, 438 bp, Glycine max
  Clone ID: PAT_MRT3847_42006C.1
aattcatatcgttccttcgatgcgacccatagcgggcagaatggtcaaagacccagtgcgcgctcccgacactggagctgcagggcaaaacgggcatgctctcgtccctaagacagctaggggagtgatgatgggtcctgaccagcccgtgatcctccacatgctagacattcctccggcagcagagtcattgaatggggcaaaaacggaattggtggatgctgcataccctcttcttaaaggtggagccgccacaacagacgcggcagaagcatgcactggggtcaacactgccgagacggatggaggattcccaagaaaagaaggcacggagaggaaggatgtgaagactaagaacggccccatttacaagacccaggcctctgccccagaaaagcatgccgctgccaaccgcaaggcccttgttgctgctaaccc

SEQ ID NO: 78618 - DNA, 478 bp, Glycine max
  unsure (1)..(478): unsure at all n locations
  Clone ID: PAT_MRT3847_42007C.1
acgagttgaagccaaagcctcacctctatctttccttgatgcgtgcctttgcttttctaggagattattatctcgttaaaaaaattgcataagcatttggcctgattcagcaggaaccatattattagttgctcaagaagaagctgatcaccttctcatggaagcagcactgaatgctggtcaggttaatgttgccgttaaaactcttactgagattgtttcaaaatggaagggcatatcctggacaagtcgtgggggcatggttgcttatcgtattgaggccttgttgggattctcaaagtcattattcagtcctcacttacttcctcaggtttcaccttctgaaccggttgagaattatatgatacaatttgaagcaacacggccactacaaggttccataaagctgaggaaagtggttatgcgttttttttatgaagcagttgttcctattgtagatgagtgnggcagttgtaca

SEQ ID NO: 78619 - DNA, 1732 bp, Glycine max
  Clone ID: PAT_MRT3847_42008C.1
ctttaacttattctgcctcgccggaagttgtataacgcctctgtcaccggaaaacttaaaattcgacgcctcgtcggaaaaccggctgctatagcgcgcgaccaccgaattttcttcgcaagtcagatccagaaacagctatgtctggcaattcgaattgcagtgtttacataggcaatctggatgagagggtgacagacagtgtctttgttgatatattaattcaagcaggacgagtggtagacttgcacattcctaaagataaggaatcagagaaaccaaaaggttttgcctttgcagaatatgaaactgaagagattgcagactatgctgtccggcttttttcaggcctcataacactgtacaacagaacacttaagtttgcgtgaaaagaagaagaattgaacgggactaatgtgttgtttcattctgtccatgcgccatttgtgaaccttgagatgcttccaagtatccaaccatacattgggacatcatataacaggggcttcatcttgattgctgatccatatatctgggagagacaaaactacctctaatggttctacagcaattacccccacattaaattcttctcaaagaccaaggccatatccagtgtctataaacaattcagaaaattttcagcaccctgctaggctatcaactcctgaccgattttcagatcatccagtaaattattcccaagtggcaacaattatgaatacagcaggagagcttttggggcaacattggatagcattagccgttctaggtcacgccgctttgattaaagtagcccaatctcttacccatcttactaatatattccgaagatcagtgacatactaaactttcattaaatattagtcataagcgctaatagatagtaaatgggaaatattcaatatttagtggaatgtatatgcttcaagcaatgtcattgttgtagatatacctatgcacttagctctccaggtgggttggtgcttacaaacttaatgtgtagtttcctttgtgaagaaacctgtaggttgaactcaaatcaagtacagatttcttttctctttcctttctttcctgctttggttttagtgtgatgtggttttctcatgcaacttatcatgttgcaaaactatccaacatttcactatacagcatgacaaatttaatcaaattcctatgtggtattgattcctaacggatatgagcaagctgttgctctgtttttcctttatgacaatgaacttgtctccgttgcttttttgttcgtgtaaaactgcacagtatattgaatgacacaacacggaaaccaaacatcttgccgtgatggaatacaatactttcattttggcatgtgctcacttggaatatagtattattgatacgtttttttttttttctcttactagaaaattgtttgattcttgctgggcaattttgatttttttaagttcttggtgttcacttcgtgatgccatactgaagaggtccactgcaccatgactgaggcctttgttgacttacctgattttattgtcaaacaagggaagggccactattcctttgatgcatttctcattggagcagtttggttgcaaaattatgcattatctggttcgtttcttttgcagagtaattatcaatggcagaagaaacaatttagcattcagaaatttcccccaagaaagcgtggaaagatgttttggcttgagaaaatattttattttaagta

SEQ ID NO: 78620 - DNA, 163 bp, Glycine max
  Clone ID: PAT_MRT3847_42009C.1
aggaaaggaaaccccttattttattgaagcatctcccgcataggtactagaaacgactcattacacaagggcacatagacaccatacccgtggttctacaattaacaaaaggcgcttaaacccaggggtctttgattgattcttaaccactgctaccagcact

SEQ ID NO: 78621 - DNA, 389 bp, Glycine max
  Clone ID: PAT_MRT3847_4200C.1
tcttagcgttctataatacctgcgctttggtatcgacctcggagacatctgcgcggcgaacaagcacacccattcggagccgctcatcgatcgacccgattcgatggactagacacgcaaccctgttgtctcccgcttcttgacgtctcatctacggcgcatataccccacaccaaccccagtcacgtctgtccgaaccttgcgcgcacctaagacgactcaataggttcgtttggtcgcccgtcatgtccggcacgcaagcggagaagggcaatcacacgctcggccagacggcgacgtaccagtccgtcatcatcgcccttgtcgcaggcgcgatactggtcatcgcgctcttctcgatcatctggcgccggcgccggcgcatgcag

SEQ ID NO: 78622 - DNA, 171 bp, Glycine max
  Clone ID: PAT_MRT3847_42010C.1
tggcttagattctactaattccaaaacttcatattctgcaacatggtcgagtctgttttcttcagtccaatgactctaggtaaatagattctgaatctgtacgatatgatgactctccgattgaacactgtgataaagtatccatcctccggtagttagctgcacctgttg

SEQ ID NO: 78623 - DNA, 520 bp, Glycine max
  Clone ID: PAT_MRT3847_42011C.1
ggctcgagggaaaatagaggtttctctttcaagtttcacctcctcaccaccgccaagcttcgtctccgagaatgtcaccatcgcacacttttttgtttccaagcacagcaccgatgatattagcaaccaaaccctaatcgtgtccacgctttctttcttctttcctggcacactttctccctctccactttcagcacacactttttcgttttctgttctagttatttggttctgaagcttttgtttcaatggaaaaggacaagcctgtttctgtcaaagatgctgttttcaaattgcaaatgtcgctccttgaaggcattcaaaatgaagaccagctgtttgctgctgggtctctgatgtcaaggagtgactacgaagacattgtaaccgaacgatccattcaaacgtgtgtggttatccgctctgcagcaatgctttgccatccgatcgcccacggaagggtagataccggatttcactgaaggagcacaaggtctatgacttacacgagacttacatg

SEQ ID NO: 78624 - DNA, 496 bp, Glycine max
  Clone ID: PAT_MRT3847_42012C.1
tacggctgcgagaagacgacagaggggccatggatgactaattaattatttaatataaaaaatttgttcaaaccatttaaactgtatttaactattaatgtactagtttaaaaataaaaatattaaatgtgtaaatggtgcatttattactttactaaaattagtatattaaatgaatatatcaattactatttggcaactaatttcccgcatgaccctaattagcacatataccttaaatttgtttttcttattacattttaaaattatcaaaatagataataatttggtaaatatacatgttatcattatctttttgacattttaattttcccacccaattgaaggttagttttatcaatttacttgagaatttctaaagcccattaatgcctaatgcaaatggttttttcctgcaacaatttatgagatttttattctataattattatttgggtaaataacaattttcgttcctgaatgtgtagaacactaa

SEQ ID NO: 78625 - DNA, 211 bp, Glycine max
  Clone ID: PAT_MRT3847_42013C.1
atttctctcagtctcatcttcctcactgccgggcctcagtttcttctcttgtgtttcggttcggaccatgaccttctgtcgggagcaacgtgtagtcttttagaaccatgtgagtaagctcgaaagtcaggttgttatcacgactcgcgaaaataggttaggtgtttgcaatttcaccgtctgtggtgttcacaggatttgacttgggtgc

SEQ ID NO: 78626 - DNA, 775 bp, Glycine max
  Clone ID: PAT_MRT3847_42014C.1
tccgactcgagaagacgacagaaggggcattgaacttgtagtttccatcaacacattaattttccttgttccgtggtggcacacaccataatctcatggaaaaggaaaacatgctcaaaacgcctccaaaagttccaattcaagatcgaacacccgaacctgaatgcaaaacaccaactccagttcaacaacaagaccccaatgatcataactcctcaaatgaattgcgcaagcctgttaccccagatcgtcttagagtccccaaggcattcaaatacccagaaagatatacaagcccaacagatttgatgatgtcaccagtaaccaaaggccttcttgctagaactagaaggggtggtggtgcggtgttaccacctgggggtaaaaatcgaccaaagattctagacatgcccttgaaggatgtcggtcctatccagaacaagcttccaatgcttattgatgagaagatcaactcagcttgaaggattcaaaggacttttgttcaacatgataattcatttgacagtggttcaaagggagtttaaagatgatgatgtaataacaataacatcacacagagagagagaaagagagagtttatctccttgttcccatgttaaacaactctgttctgagattataagcttatgaagtttgtgatgctcaattttcctcgcaaaatagcctttctagcaataatgtatccgtgttaattaaaaaatggcttaaatacatttttctttcttattaaaaaaaaaaaaaaaaaaaaaaaaaa

SEQ ID NO: 78627 - DNA, 718 bp, Glycine max
  Clone ID: PAT_MRT3847_42015C.1
ccacgcgtccggacagatcctctgactgatgcagatgactagtgtgactgtaataaggaaaattgctcttataagtaaatttaaggaagcgatagtacacttttgttacttgaaaccctaaataagaagactcattggattgttgttaaattggtaggaactaatcgttggagttatttgatgtatttggtcaggaacatttgtttagttaatttgatatcgtagggtgagttattggtcaaagactagtgcacagatacatatttgataaaattggaatcttaatttgtaatatcttgtacatttctgtttgttgtaaacttgtaatattctttgttttaaaagattattttattgacacaatgattttgcatctgtgaatgaaaataagtcttcttccttttgcagggaagactgtttatccaactgatcatattgctaaatcggaaactgggttggaggagtgcttattttgcagttattgtgttcatgttgtttttatttagttgaactttctgcaaactacaactgtattttgacttagccttggctatttttccttggctcattagtcttatgttgtttgttaccatttaaatgtaaacaagaaaggaaaggctatgaacaaagtacatcacaatcagattatgaaataagtttattcgtatccaaaactatttataatttttttagaacttaaatatgttttttttcaaag

SEQ ID NO: 78628 - DNA, 331 bp, Glycine max
  unsure (1)..(331): unsure at all n locations
  Clone ID: PAT_MRT3847_42016C.1
caattcacgcacncgtacnnaatctcgnaatncggctcgagcnnctcgancttnttgngtnactnancnccacanccacncncctannnagntgcacnngntgncaggannnnngngnnntccgcnnntgntnntnnnncncgtgtctgttnnnttnttngnacnnttnttngtnnnttanntgtggntntgtttnatcnttnntgtnttgttttggnnntttgtnnangtttnttgngtttnncnngtggtggtngnntcntggngnntntttnctantngtgncgtntnantnntcnngcngttggnngntggtnttggtgtgttnttn

SEQ ID NO: 78629 - DNA, 282 bp, Glycine max
  Clone ID: PAT_MRT3847_42017C.1
gggggcgggggaacaagcccccaattcttttttgaaaagaaaaaatgagggggttgagaagatacctaattcattctttctaatttgggcctcgggtgcggggcttgctcccctatccagtaaaattttcacccggggctacccccaattggctacaatagtctgggtcgttattaacgcgagcctttactgtgtaaggggtggccccttcacattcaagttgacccgctttggctttgatggtcgccccaaacccttggtttatgaccgggcgcccctttt

SEQ ID NO: 78630 - DNA, 523 bp, Glycine max
  Clone ID: PAT_MRT3847_42018C.1
gcgtttctaccatgggcatcataacaccattactgatggcgttgacaaaactagggcaacgacgcaatgtagaaagtgagcacattgtgatcttctcaagagaaactctaagcagatgtctaatgtatcgtgggtggctcctgaagacaaggcgagtctatggacacaactacattatgttgcgtgtaataatctggaaatgcaagaagcttatcttgtcaatcacgtgaatgtgttacgagaatggtatatgcacaggccacaggaagctcgccaattgagaacgaaagctctctctcgtattgaatggctgcaaaaagctgatgtgcctaccagagcacagatagaagagtgccattccacgcataggatgatgaatgctcctgagacaaatgataatatcgatctactgatgaacatagactcgagaggagcacaacgagcaaggacagcgtacgccaacaaaagagctcgtgacgataagcttggggcagcaaacacgacagagatctaagatggaaat

SEQ ID NO: 78631 - DNA, 355 bp, Glycine max
  Clone ID: PAT_MRT3847_42019C.1
tattttactttaataagaataataataatttataaaatttacaaatcaaatgagtgcagattatgagtgtattattacaaagggtgccggagcgggggagccctagaaaagttttaagaaataatgattctaaaattttattttcttatttatgattaaggaagcatgatatttttaattactattaaaatattaaatgtgtttatttttattgataatattaggaagatttacaacgaatttttaggatttctcttttaagaaaatagtagatttaaatagcaatcccatggaagggaagttattgcctgcaggtgttctgccctttcacctccataaacccagaagacactgt

SEQ ID NO: 78632 - DNA, 192 bp, Glycine max
  unsure (1)..(192): unsure at all n locations
  Clone ID: PAT_MRT3847_4201C.1
gggcccgcgtggagagttctgatcatgagagggttgaagatgatgatgtgcttcggccgcagtggaagtggtagaggcaacacagcctctgagaagatcggtttcgatggattcttcttctgctaattcaatggtgttatttggtgatgtggtggtatttanatacccatcattgtggtgaaaaagtgaatt

SEQ ID NO: 78633 - DNA, 410 bp, Glycine max
  Clone ID: PAT_MRT3847_42020C.1
aagcagaaaccccgggggaaccggaccggaaccaccgggacgacccacacgaccgggtattcacagacggacgcgagggggcaaaaagggggcacaacaacaagaacaaggggcggaagcagccccgaccaaggatccaccgcacccaacctcggagggcaaggccgagaagacccgcccacaaggccccgaaaaacggagggacaccaagaggaagaccgccaccaagcaggcacaacgcggaagccaacgggacggccaagacaccgacaagagcatggacccagacaccggcgagcccccaggccgccacaccggaccagaaaccaagagaacacggacgggacactgacggggaagcgggcaaccaaaaaaccagcgaaagaaacacggagcacgaagggaaggca

SEQ ID NO: 78634 - DNA, 573 bp, Glycine max
  Clone ID: PAT_MRT3847_42021C.1
ggagcgctatcaaacagattttgggagccaacacacttttattgaaggagttgaaaagcctgcaaatgaaggtatagcacaagtagtttcctcagcaaccctaatcagcaataaggaaaaaacggctttgccaacatatagacgacaacaaaattcctcacaagcacaaagcataactattgaacttgtacaactagatcctcctccacaacccttacctcaacaaacatcatcatcctcacaaaccaacattaataatattcctgaaccaccacagccctcaccaagcaatggtcctcatcagctccaacatgtgacttcacaaaacatcacaagtgaacaaggacaagataaatggaacaggtttgagaggttctgcaaacgtaatccatcaagaagcagtttgtgcagtttctcaatctccaattgtccttcataattaatccatcaagaagattgtctttctgtatagctaagaaaagcaagtcaaacataatctcagagaaaacatgcatattatcaagaagaatgaagaaatggcaggaaaattttcccgatttttttaaatcaaag

SEQ ID NO: 78635 - DNA, 201 bp, Glycine max
  Clone ID: PAT_MRT3847_42022C.1
ctacgttatattaaattgtctcggcggactttatacaaagttcacggggggaaaatccaggacgtcaccaaagtaaacgccctggagatccccctctttttggcggggggggtaattaccatgtaggcagctagcgtccttcctaacaggcgcgcacccatcttgattgccaacaggagccctccctgaatggctaattca

SEQ ID NO: 78636 - DNA, 244 bp, Glycine max
  Clone ID: PAT_MRT3847_42023C.1
tgcacgcgaacgtggtcgaggcatacgcatgggggtcgtcttcaatccctatatcatgcttcttgcactgttttgtgctttcctagtctcctctgatcccctgctgagtactgatttggaggaccgcgtattcaaggtaatctgcagctacggaccaacacgagaaccaggcacccctgaaccatcatttcataggcagcgattgtggatgattaggttgcagaacaaatagataaccagccct

SEQ ID NO: 78637 - DNA, 260 bp, Glycine max
  Clone ID: PAT_MRT3847_42024C.1
ctcgagacgttttcttttcaatctttctggagatgtctcaattgatctgagatcttcagcacaccggtcgagtgcgtgtagtttcgcgatatgggttgtgggtttagagtgctacacttaggtataccttttctctcgttcgtacctgatgttcagactgctgattggcatgtgccatgtagtgagcaggtcatatatactgtgatctctctggtgatttgccttgtctgcagtcagcttcctctgtacggactacactc

SEQ ID NO: 78638 - DNA, 294 bp, Glycine max
  Clone ID: PAT_MRT3847_42025C.1
gtatctttcaatttccatccacgggtatagccttttctatttgggcgttctaatgttcaacggcatgcacaccaatggccaataaaacggcgtagtccaggaggcccttttaccatcctactttgacaggatgtaacggagccttagcaattctcaaggagagaaccggttcgagccattacgcgataaccaatttcatctaaggcaggcccaaggagttgcctccaacctacaaaaagcttgttctcgttcatctcaagaagtctgttgttgctggcaagctcgttaaggtca

SEQ ID NO: 78639 - DNA, 1088 bp, Glycine max
  Clone ID: PAT_MRT3847_42026C.1
gcccgtgagcctcagcacagggtatccggcagatgaacttggtgacttcactgctgagctcaagctatctattttccagcttgggatcagtcctcagataatcaatcgcgtccattattatgcaggtactctgtcatgttgtcccttctctagtaaagctacggaaagaaggtctggatgggcatgagaaaattaagagttatatatggtggatgtcatttggctttgcaattttggaagctttaatagttgcttgctactcacttccatattcaatttatgctgccacttatagggtcaagcatgtaatggtgacatctgttttattggtttgtggtgcaatgactattacatggatatgtgataccatatcagaatctggatttggtcaaggttcatctctaataatatgcgtgggaatacttacgggatatatggagacattatacaaaatgcttactcagctttcacgttggttccattattgaactcagaagatcatatcaagcatataatgtgatgccaagcttgagcaatgctttgagacgatatggtgtataactttgggaaaagctatgctgtcactcccctgagccaatttaatttgaacctctgggataactttggtcaacgttgtatgtgattttcaggaagtttggtttttcggggacattacagatttacagtgtctaagaatattgaggttagctagtggtgtgttgctagtgaggaggtggtaaacgctgcctgccgatacatgacagtagctgattaagaagcctcatcttctggtttctatctcgaagatatttgttttatggatttaggaaaatatttatttaggttatagttgtagctgcagcagaaatttgtacaggaaattctcgtgttatagacgtgctctgtaatataaaaacgaggtgtttgtatacaggaggtacaatgccttgatagcgagtcgttatccccaaaaaatggcctaatggtaggcactgatacactaacaatgtaacaagaagagattcaccctcagcattttagattacatttctatactacttttttgcttctggcaaaaaaaaacaaaa

SEQ ID NO: 78640 - DNA, 412 bp, Glycine max
  Clone ID: PAT_MRT3847_42027C.1
acacattcgggactttggttgatttgcattttgactagcctctaaattcatttatctacaaaaaaccccaggggacaagccgagagcaccaaggggggcctgcccttgaccagcctcaagggacacaatcagcatgggccacataaggggcctgccatgccacaggtgagccaatatcaatcttccgagctaaatcggtatccggaatgccaactccatcctcgatagtgccggccaagctgaaagggacaaacaaggcgcctggtgggaagacttgcgcaccagcggcattggcaaaggcctcagatgttcttgaccatggagtgggccattccactgactgtgacccccgggcggggaaatgcacccctttgtagcttgcaacccactccatgacaatgaactggtttcc

SEQ ID NO: 78641 - DNA, 199 bp, Glycine max
  unsure (1)..(199): unsure at all n locations
  Clone ID: PAT_MRT3847_42028C.1
cctttgttccacttcttcttccttcttggcgngctcagtggttttaaggcggcagntttctttctaggatttaaagggacagatgggtaaaggacaaaagggtttcaacatcagttattgtggtcattggggcccatgttcgaactnctgggggaaaaatncccactaaacncaactgggttcaaccctggatttaaca

SEQ ID NO: 78642 - DNA, 261 bp, Glycine max
  Clone ID: PAT_MRT3847_42029C.1
gtcacgcgcacaggcgggtgatgtttttgacctttgacaacggttgctatgaggacaatgacatggattaaaagtgattcccaatttgcttatggcagaacggaagcgccaatatgactcagcgtatttgagaacaatggctagttcctactactttgatgtaagacacaattatctatatgtctatactccctattgatacggacactagccagcaaactaaagattacattatcagtttagggaagcatgaaatcacag

SEQ ID NO: 78643 - DNA, 242 bp, Glycine max
  Clone ID: PAT_MRT3847_4202C.1
taatatattaatcgtttgatgttctgtgagaattgaagaagaggttaatatgtggcggttcaagagcatggatgagagaactctgccaaagagtaccatgaccttcctccagaagatttgttcgatccataggagttgacacagtggatcttctatagagtcctcatcgctgagttcatagaaaaccttctcttcctttatgttactgtgctacagattattggttagaaaaggctgactga

SEQ ID NO: 78644 - DNA, 541 bp, Glycine max
  unsure (1)..(541): unsure at all n locations
  Clone ID: PAT_MRT3847_42030C.1
tagaaaaattgttggtcaaagcatgtttcgagggatgagcgtggaggctcccatgagctggtgtctgtgtttcaaaccaaaaccaaacattactaataaggtgcgagcgccgcaacaccctcgtagccgccaaggatatactacctctattactgcttcccagactaacgcgatggcgcttacttttgaggttcttggcagattcaaccgtgctcgcgctgcgaggttgacactccctcattttgtgtgccaaactccgttgtttatgcctgtgggcacacaagtttgctcccgagtctttaaagttttactctgctcccttgaagtatttttgttataccaaaatattcctttcatcagtttaccgcactgatttggttagtttggtgacacatggcaagctgtgaaagatcccacgtctgatgggcatttgccacattagtncaaaataatattgntagtgcaaaaacatgagggaaggatcattaggtaccaaagtgaaaatttaaacttagggacaaattgagacaaagttatatga

SEQ ID NO: 78645 - DNA, 266 bp, Glycine max
  Clone ID: PAT_MRT3847_42031C.1
cccacgcgttcggaccagcctgaagccgacattggtaaccagcccgctaatgattcaccaccaggcacactgagattgacattgttgcaaaacatggccatgtccatggtcggcatcagcgttggagcattgggaagtagttccagaagattgcctctggatttatcacttgccttctccccgggttccacacccatatggctggaactatattttgcatcttacaaagcttcgcgcatctgacatctaggtctatatcgggacca

SEQ ID NO: 78646 - DNA, 242 bp, Glycine max
  Clone ID: PAT_MRT3847_42032C.1
aggggggagcaacccttctgatgctgtttttagtacacacactggtccgcatacaaacgcgtctgtgttcatgcaatcatgcatacattttcaaatggggggtgagtgaggcaacataagaagacgtctgcgggcgaaaaacaccgagcttgggaccgcaaaagctatggataatatacacactgaggtccacacaaaaaatctcttacatgatggccaagaattgaatggacttatgcatg

SEQ ID NO: 78647 - DNA, 295 bp, Glycine max
  Clone ID: PAT_MRT3847_42033C.1
ggctcgagaaaacgacaacaccactttcgaacctcgccgtattcgatttgaaaattccgtggcgttcggacatggccctgcgaaacagctgcagaaaaatctgcttcaaggtccttaccggcgaggacgaatcggatccaacggaacgcaatcgtaagaagctcacgcgccgagcttactacacgaagaacaagcttatggatcgggccgattccgattccgtggatccgcgttcggcgccgttggaaaatgcaggagcctgtcacggattctagctccacgctagcatgtactg

SEQ ID NO: 78648 - DNA, 622 bp, Glycine max
  Clone ID: PAT_MRT3847_42034C.1
ggcacaaaaagttgttctctacatctaacttctggttagttggtacgaagcgagggcgctatcacatcctaaatcgttcaagtcccagaaataccagctccataacccagtttcttcttggtgtctagggaaaaaggtaaaattttgaggctcaataaggaacattcgacatgttcaggtcatctcagcagaggaattcgagatgcaaagacttcaaggtgaaacatgctcttcaaatatgtgttcttcttggcgtttgtatctggatggcttatccggctcgagattctcgtgagaaaaaaagatcctatggtgaagggacaaatgctgacagtgaggttgtgaagttagggaggaaagaccccgatcctaatgtggagcaatcttcttctatcttacatgcaagggacaaggaggaaaaggatgaagaagaaaacaaccatgaaaagcaaaagaagacagatgacgttaatcgtgtggaaaatgagatccagacacaaaagaatgagcagaataacaatgaagagaaatctgagcagagaaaggatccagttgatcaagacactgaagagaatgagcataaggcaaacaaggagagtgatagtgtgataaaggagaatga

SEQ ID NO: 78649 - DNA, 198 bp, Glycine max
  Clone ID: PAT_MRT3847_42035C.1
ttttcggttttttgccgatcccagcaactgagctaatgagcaacaagaacattctgtgcccacttcataagacgctctaggtttgataaagaaagctgtatatatggcagaagggctgcagatatgtgaagctgaaaccgtaacagagggtgacccgggccagttgagggagaggaaaattgatgctctccattgtgc

SEQ ID NO: 78650 - DNA, 342 bp, Glycine max
  Clone ID: PAT_MRT3847_42036C.1
tgagagtgttggtggctggtggaggaattggtggccttgtgttggctctggctgcaaagcatagagggtatgaagtgaaggtgtttgagaaggatttgagtgctgttagaggagaaggtaggcaccgtggcccaattcaactattgagtggtgctcttgctgtgttggaaaccatcgatcagagtgttgcaaggcagataatggaggctggttgtgttactgccaataggactaatggccttgctgatggtctatctggggactggttcagtgtgtttgatcttttcactcctgcttcaaggaaaaggcttccttttaccctattcatatgtagaatggctc

SEQ ID NO: 78651 - DNA, 359 bp, Glycine max
  Clone ID: PAT_MRT3847_42037C.1
actggttggttttttttcggaggccggctaaattttttttaatttacaatattccgtttttatacccttattccttaattttcaatttttcatggaaaaaaactatacggccctttttggtaatccgggggttacttttgaacttacaaaagctgccccgggcacctttgaaaccacgtgttgctcggggattaacatattttagggagggggcttaaaaaacatgggtatgcaagtttacatttgtgggctgggctgggcaacaaaaactttggcatccttggtgacacctttaattgcctggggggggccatacaaattttaaatttcattttcttgacaggcaatgcttgacaaaa

SEQ ID NO: 78652 - DNA, 748 bp, Glycine max
  Clone ID: PAT_MRT3847_42038C.1
gattttgaataacatatggtttatagatatagtttatcacttatttatacaaccttgaatttgctcaatgcatcaaaataccatgaacacttccgtccaagacaaccaacctagaacaaaaattcagtccaacagacagctatgtgctttctcctaatgctcttgccaggatggctcaaaattccttagggtttgagggccaaacctaatccaacctttgcactcttctcaatggccttagtgtcaacctccccagaaatggtgaagaacgatctgggacgccactcgtgctggatgagagcatttgccttgcccaagttgttgacacgagccttcacagtcgtcaatggatccaatgcatgctgggtgccaagtgtgagggtgttctcattggttgagaattggtgagttacctcagcaccaacagctgtgttggtcaagcgattgactgtatggtagtatgaagcattcagggaatcacctttgttattcacagacaatgaggctcgtcatacatgcaaaaatgtaagttcatactatcaattagtgtaaacacaacagaccttagaaagagattttatacggtaaattcaaataggaaaatatttcaacaaagtcttgtctaactagggtgagggtcactacatgtaacagaaataaaaacaagagagggaaattgcatcatgatggagcctcattagggtttgttaatcagctctgaagctttacaaactatagtaattttccc

SEQ ID NO: 78653 - DNA, 797 bp, Glycine max
  Clone ID: PAT_MRT3847_42039C.1
cccacgcgtccgttatggaggtgggcctggaggtggtgtagggcctggtggtggcggacccgtaggtggtggttatggaggcgggcctgggtccggtgcagggtctggcggtggcagttatggaggtgggcctggaggtgatgcaggtcctggtggtggtggacccggaggtagtgcagggcctggcagtggtggttatggaggtgggcctggaggtgatataggtcctggtggtggtgaaccaggaagtggtgcagggcctggcagtggtggttatggaggtgggcctggaggtgatgcaggtcccggtggtggtggaccaggaggtggtgcaggacctggtggtggtgaaccaggaagcggtgcagggcctggcagtggcggttatggaggtggtcctggaggcggtgtaggtcctggtggtggtggaccaggaggtggtgcaggtcctggtggtggcggacccggaagtggtgcagggcctagtggtggtggacccggaggtggcagttatggaggcgagcctggtggtggtggacccggaggtgacggttatggaggcgggcctggaggtggtgcgggtcctgatggtggcggacctaaagatggtggttttggaggtgggccttatggtgggtacggtccaagatctcatgggtttggagtgaagccatattccaaagacttgaattagagatattttatcaatatataataattatgtttattatgtgatagtgtcacagtgtttgttcttctttcatatttgtgttgctattaaactggttattcttatt

SEQ ID NO: 78654 - DNA, 994 bp, Glycine max
  Clone ID: PAT_MRT3847_4203C.1
attcccgggtcgacccacgaacccgcttcgtttttcagcatttctactctccaaacactcgaattcgcattctcttcactctttccccaatccatggccaagggagagaagaaaccggcggagaagaagcccgcggagaaggctccggcggagaaaacaaaagccgagaagaagatcccaaaggaacccgcctcgggcgagaagaagaagaagaagagaaacaagaagagcgtggagacgtacaagatctacatattcaaggtgctgaagcaagtgcaccctgacatcgggatctccagcaaagccatggggatcatgaacagcttcatcaacgacatcttcgagaagctcgctcaggaatcttccaggctcgcgcgctacaacaagaagcctaccatcacctctcgcgagatccagaccgccgttcgtcttgttctccccggcgagctcgccaagcacgctgtctccgaaggcaccaaggctgtcacaaagttcactagctcatgagtgggtttctgagaattttagggtttacgagatgtatattttgggagaattttaattttatatttatcctcttttattaccgtttttcttctttcaacaggtctatgttgatcctcttattcttttctcctcttaaccatgcgccggattctcaacgtcttaaatggtttaaatgagtgtgcaatttgaaattttgttgagttgtggcagttaacgttctgctgcatcatggtgatgactacaattcaattcatcgaaaaatgttgttgtcatagcttattgagtagagtggatggtgttttgtagattttgtggtaacctatattggaacctgattttgttttgttcttttaaatggattgtatctatgtatacatgcttatgttcttgtgcaattgtattatagaattgcaggggttgcattgtattattgcaggttggttatgtgatagagctggtagcacgatggagtgctgtatgttgtatg

SEQ ID NO: 78655 - DNA, 1096 bp, Glycine max
  Clone ID: PAT_MRT3847_42040C.1
gttcttcttctttgtcttccatttccaattctctgtgtagaagccatgtctaagggtcctggtctctactctgacattggcaagaaagccagagatctcctgttcaaggactaccacagtgaccagaagtttaccatcactacctactcacccactggagttgctataacatcctcggggaccaagaaaggtgacctttttgtggcggatgttaacacccagttgaagaacaagaacatcaccactgatatcaaagtggacaccggttccaatcttttcacaactatcactgtcaatgagcctgctcctggtctcaagactatttttagctttagagttcctgatcaaaggtctggaaaggtggaagtccagcacttgcatgactatgctggaatgctcagcagtgtgggtcttataggaaacccaattctgtacatctctcaggctggtgtttgatgattggtagtacgagcttacatgtttggtggtactatgaattcttgtgtgcaggaatgacaaaggggatgccttgaatgcttcatactaccatgcagtcaatcgcttgaccaacacggctgttggtgctgaggtaactcacagattctcaaccaatgagaacaccctcacacttggcacccagcatgcattggatccattgaccaccatgaaggctcgtgtcaacaactttggcaaggcaaacgctctcatccagcacgagtggcgccccaaatccttcttcaccatttctggggaggttgacactaaggccattgagaagagtgcaaaggttggattgggtttggccctcaaaccctaaagaattttgagctattctgacaagagcattgaggtagtaggcattaggaaagcacatagttgtctgttagactgaattgtttgttcaaggttgattgtcttggacggaagtgttcatggtattttgatgcattgagcaattcaaggttgtattgtataaataagtgatatagactatttctataaaccaaatgtactcgaaaatcacaagattttgaaagtctagttgattccccaaatgttattcgaaattcacaaattttttatatactcaaatatt

SEQ ID NO: 78656 - DNA, 375 bp, Glycine max
  Clone ID: PAT_MRT3847_42041C.1
atcatgaatcttttcatttaattaattaaaaactccggtgctcacacacccatctcacacacccggggaggcacgcgcgccaacacccaaacctctcccccaaaaacaaagaccccggaccaaccccccacccaaccccggaaaacgaaccagccagaccccccccccgacccccccccccccccccccacgccccgcccccgcccaagccacccccgccccgcccaccgccagcggcaccccccaccacacctctccaactcctcacaccagctactcccctaaaccagccacagcaagccgttgccgccccttcccagccgggaactcccccgggaaggcccacctcaacagcccctcccacgcaccgcaaac

SEQ ID NO: 78657 - DNA, 575 bp, Glycine max
  unsure (1)..(575): unsure at all n locations
  Clone ID: PAT_MRT3847_42042C.1
ccacgcgtccgatttactttaatgcttagtgtaaatgagtttcatcaatatatagttttaataaatctgtacagccattaacaatcttccatcacctgtcatgatatgctacattctattttttttttttttcattttaactactttgagtgtgttgagatttcagatgggagggtcccaaagtatgtttgagggaaaaatgagtttgagatcatgtttacttcccatgtttgagactaaagttttgcctagaaacttagtttctaaaaaataatagttgagatacttttgtaaactcattttacaaactttaatttaatctaatttaagtttataaactttaattcaaacatgtatttttactggtgtggaaagcgtggaccaacttctctagtttgcacacttaagtttgcttcattttttttaactgaattgtttccactagagacttttattcnnnnnaaaaaaannaaaaaaaaaaaaaaaaaaaaaaaaaaaaaaaaaaaaaaaaaaaaaaaaaaaaaaaaaaaaaaaaaaaaaaaaaaaaaaaaanaaaaaggggcgcccgttttaaa

SEQ ID NO: 78658 - DNA, 284 bp, Glycine max
  Clone ID: PAT_MRT3847_42043C.1
catattatatatattgttgtatcatttattattgttccctacactatttcactaaacaaattaaccgctattattggaaaaaagttaactcgcaagcaagatcaacttcaactttcgcaagcccaaaaagttcctgagcaaccttttacacttccaccaaaacaacaactaactccgacacctgttataaaaaatataaccagtccacatagttcgggtctaactaatccattgccgaccaaaccaacatgagtacggtgttctccactgtaacaaggccctcc

SEQ ID NO: 78659 - DNA, 138 bp, Glycine max
  Clone ID: PAT_MRT3847_42044C.1
tcgtgatcttatataccattaatttgcttctctacttcttctaaactccttatatctgtctagaagacatgcgcagcatgatctgtagtggaaaactattattgacccgtttgaatacccggtcgagccaattctact

SEQ ID NO: 78660 - DNA, 176 bp, Glycine max
  Clone ID: PAT_MRT3847_42045C.1
cccaagggaaattcttaaaccacgcatacatacaattgtaaagctttaaatttcatgtcaccaaaagtaccaaaacctgtaagggagtacaaaaaaaccacggtgttattaggtttcacaatacttccaacggtatactataaacaagcaccatagtcacaaaaaataaaaataaa

SEQ ID NO: 78661 - DNA, 386 bp, Glycine max
  Clone ID: PAT_MRT3847_42046C.1
ctgttcatggctagcgacactagaggtattgcgctgttgtcagattcgcctgatgagggaggaaatttcagctgcgtggattagctcaggacataaaccttgcccgtgcaactatcgggtacacgataactgcttcaattcctatgggggcatggaataggtcgaattcgctatccaagcctgggcatcatgttaagtgctataccgtgaacaacccttgaatgatcctttttgcctgcatgacagatcgacgcttatccagataccagcatggtcataagctctggtggctctccattgctgcagatttatgtgttgtgcacagtcttccattggcctaaggctctcaaaatctaacttgtcacctgggggacagccttgtctgt

SEQ ID NO: 78662 - DNA, 496 bp, Glycine max
  Clone ID: PAT_MRT3847_42047C.1
tccaatccttccgttttgttgtattttaatcccaaattaaaaaatctttatattggtgccctgacacaaacataaattgataaagtgccgtcgtcaccgccattcattgaagtggcaatcccgtacaattcggtgcgggaaggacatttggacatttgtgcggacaattccatttttgctgcaaaaattgcatttcttttggcctaaatcctaccggaatggattcagaacaaaaatggatttgacattgagatttacactaatgggatcaccaacaaaattttctgcctcacccacacggacagcaaagagaaaatggtcattcgtttgtatggagccaacactgagcaaatcattgaccgtgactcggagatggtcaactttatacggtttcaccaggccggacttggaccaacggtgcacgcgctgttcatcaacggatttgcgtgcagctttttgcccggcaatgttttggacatgaaaagtgtgcgcgagc

SEQ ID NO: 78663 - DNA, 307 bp, Glycine max
  Clone ID: PAT_MRT3847_42048C.1
ggcgcgcttttttgtggttttgtggttttttttttttgagtttttttttttttttttttttttttttggacggggactaaaaataaatttgggcaattctactactcaattatcataaggagcaagataatatccaccggagccgtagggagaaccccaataaaaaaacctcgaacgagaagcgaggggcgaaaaaaccaacgggtacgtttctactgaaaacccctgggaaacacccttaagggtttttggtacattcatcagccacgttacataaacaaatgggggtttttgggcctgagagggg

SEQ ID NO: 78664 - DNA, 262 bp, Glycine max
  Clone ID: PAT_MRT3847_42049C.1
cccacgcgtccgcccacgcgttcggatcgcgagcgccgccctttttttttttttttatttttgttaggattaatatttcatttgttttgtataatgcttttaaagctgaactttctttcatgtgggcaaagtttgacggaaaagccatttccctaagtggttttttccaaacgttcctaacttgccgttggaagagacaacttttaacttccccctgggggggtaatattgcctccatttaacaaaaaaggggggacactgt

SEQ ID NO: 78665 - DNA, 501 bp, Glycine max
  unsure (1)..(501): unsure at all n locations
  Clone ID: PAT_MRT3847_4204C.1
gaccgcgttcgagggcaccgacgagcacggcaacctcggcggcttcgtcggctccaagacggagacggcgttgctcgcgttcgccaaggcggcgcagtggtccgactaccgcgccgtccggtccgaggccgccgtcgcgcagatggtccccttcagctcggagcgcaaggcgatgggcgtcgtcgtcaagctgcgcgacggtcggcaccgcctcttcctcaagggcgcgtccgagatcctgaccaagctctcgacctcgcacgtcgtcgtccacaacccgcgctcgcagtcaatccccgacccgcgcgacgacgacgacagcgacaatgtgccgacggtcgagtttgacgaggagacgcgcggcaacatctcgaggactatcatcttctacccctcgcagtcgctccgcaccatcgccctctgctaccgcgactacgagtcgtggccgcccaagggcatgcgcgtcnacnaggacagtcaggtcgcgtacgaagacatggc

SEQ ID NO: 78666 - DNA, 103 bp, Glycine max
  Clone ID: PAT_MRT3847_42050C.1
tcctctatagcggacgccctggagtgattcactctctggcggcttagactgtgcaagacaggttcaggtaccatcatgcggaaatgtgtgtgtgtcttccaaa

SEQ ID NO: 78667 - DNA, 493 bp, Glycine max
  Clone ID: PAT_MRT3847_42051C.1
ggctgcgagaagacgacagaagggatatatattttatcttatctaaaatctttctaactaaattaacatagttaaatagttagactcaaaataacacttttatatttcaagagacaaaaatagaataatttttttaaagaaacaaaaataaaatttgaaaattttaacgaaaataatatatttttctctactttttctatttaagataaaatgtacacaactgatttgatatgtaatatacaaatcaagaatgcataaaattaggaatgaaaaatgatgtaaaaatgcacaataaagcctaaaaagatggatgcagttttttttcttttttcttttttgaagtaaagatggatgtagttaaaaacgtataaaatgaacttaatcatgaaatatctaaattttcttttatatttaaaaaaaataaagaaattaaaattgccatcactttcggtaagaaaaggatccttaaattggaacattcatcattaattaa

SEQ ID NO: 78668 - DNA, 105 bp, Glycine max
  Clone ID: PAT_MRT3847_42052C.1
ccgcgccgcagtttccgcggcgacccacgcgagcgtcacgcgtcggaatactatgctgtctctcctgctccaccactatcagccgtataagggattgacggcacg

SEQ ID NO: 78669 - DNA, 327 bp, Glycine max
  unsure (1)..(327): unsure at all n locations
  Clone ID: PAT_MRT3847_42053C.1
acannnnntgattgggacaattactcataccacaaggttctctgaacagggcatgggaaggacagaacagcctgcaaagtgtaaacagaggcaggccagaacagagaagagaatgcaaactgaagtgctgaccttggccagaaaatacaagggtgaacgattgatggagatgggcaactaggtttagtcaaaagtaaagggttctgaagaagagaatgtgaaatcataaaagtaaccctaaaagtgggttatggatcccaagagaaggtggaacaatcatatttttgccacttgttggtacaattgtgctgtctactgcaattcagc

SEQ ID NO: 78670 - DNA, 496 bp, Glycine max
  Clone ID: PAT_MRT3847_42054C.1
caatcacagtggcacatttttccttcatcatcagggacaccatccataatcttaatcttagagttcgattacaattggataatcattctgtaaaagaaatattttcctaatctacatctttgggttcatgcaaataaagtactaaaaaataatatatctggagagcgagaaggcctatagttattcatctcaatatccaacacataaaagcaatctgtgagagagaaaaagcccatgtataactactttccaaagttaacaaccaaaaaaaatcaccaagtgcttttaagtacagtgtaaatgctgtcactctatattagccaattgacagtaatgtttccaagccatgtgaacaatgggaactgagccaaagcaatgaagagcaagagatagtggtgtttgcttgaatcataactcctgacttccgcaaaaagaactctcttcatcgttttaaccaagaacactgccatacatatgcaggtccacagcatcagaa

SEQ ID NO: 78671 - DNA, 724 bp, Glycine max
  Clone ID: PAT_MRT3847_42055C.1
cttggtgagacaccgaatttttccaattctaattacagtcgtggaagggaaactgaaagcagagtgttgttcttctcgaaattaaacacggttcagatctagagaaagatccattttctcgatggagaaaatggagcagttcattgataacttgccgccgatggatctgatgcgatcggagaagatgaccttcgttcagctcatcatccccgtcgagtccgcgcaccgcgccatctcctatttaggtgaactcggccttctccaattccgcgacttaaatgctgataaaagcccctttcagagaacatttgtcaatcaggtaaagcgatgtgcagaaatgtcaagaaagcttcgattcttcaaggatcaaatcagtaaagctggcctaatgtcttcttctcgtactgtattgcaaccagatatagacttggaggatttagagatacaacttgctgaacatgaacatgagctgattgaaatgaactctaacagtgacaaacttcagcaatcatataatgaactccaggaattcaagattgtattacaaaaggcatgtggttttcttgtttccaaacatagccttgcggtttcagatgaaagagaactacaagagaatgtatattcaaatgatgcctatgttgagacaggatctttgcttgaacaggaaatgaggcctcagtcatcaaactcgtctggtttaagatttatcagtgggattatttgt

SEQ ID NO: 78672 - DNA, 375 bp, Glycine max
  unsure (1)..(375): unsure at all n locations
  Clone ID: PAT_MRT3847_42056C.1
atattgggctgttttttattattggaataacaaatgttaacgttttaaatcaaacacatatatcttaattattttaatgagtttaaaagtaattggatcgaaataggctgggttttgatctactactacgcgtccggtagaatataagattagcttaaaattaaagcgtgtgnngaaaaaaggaaaaggtgcgccctagggagtggacggtcgacagaaaatcagaggcgcgagtggcggngaaggcngngagggaagggaagcatctttaggtccggtgggggatacctcaggtcgatccagggacctgggcaaggtgcttgtccggcctgggggtgtgggaggggccagggtggaaccgggcgctgggggggt

SEQ ID NO: 78673 - DNA, 1304 bp, Glycine max
  unsure (1)..(1304): unsure at all n locations
  Clone ID: PAT_MRT3847_42057C.1
gaacatcataatcatgaccaactcgatcaacgtgaacatcatggacatagtcaacatgatcaacatcatcagaagtgtgcctcacaaacatgttcctcaacatgtccaccctgctcttcanattcaagttttggtggaattgttaaccattgtaacaccatgaaggctcatgatcaatgtaaaggaagtgatgaattccatgaacatgatcactgtcatcatggaagatgtgacaagaatcacgatgaagtccacaagcatgacaccgaagataatcatgcagttgcagaaaaaaggcatggtagttgtttgggacataagaaccatgggacaaagcactgccacaaccaaaatcttgacaaggttactcatgatagtgcttcacatagttctccttgccacctcaatctcccttgtaaaaaagaaagccaacaatttactcataatcattgccacctgatccatggttgtgaaaatctgaaagaccatgaatccaaagatgttttaagatccaaccatgacatccagcatgcaaaatcaggttgtcattccgattttgagaagcatgagacaggtgaaatatccattgacatcatcactgagtatgttgaattagcttcaagtttggaggagaaaggaaaaggttcctgcagggaagactgctcagacacatgcgggaatttggctgctgtgtgtggctgtgagagttcaaatgagagagaagacatcgcatgttgcagaaacgaggactcttcaaaagaatgcaaggaatctccaattatgcatgtttgtgatggtttaaataagagagaagttggtggatgttgcaagagctacatgaaggaatgctgtgccaaacttggtcactcatcaagacctagatttgtaggaggtttgtcagaaattattacagaataggtgcagttgactccagcgtaagcaacagatgtcagcatgctagcttgttcttgcaaatttatatttatttagaagatttttagtgacatgaatgaaagcccgtaaaatattactgctcatgtatatagtttgaggagcttgacatgaccaacatagatttttacgtaagtctggtatggccctttattttggggttttagttatagggaattgggctcctaaaggagaaggggaattcactttggcagttgtttggatatatgttaagggcttcttcctttttttatatttaatatatgttgcttatatactatactatgaacgtagtactcattaacattaatataagaagttgacaactatatgtcaatctcatcccgaaaaaa

SEQ ID NO: 78674 - DNA, 471 bp, Glycine max
  Clone ID: PAT_MRT3847_42058C.1
acggctgcagaagacgacagaagggtccctgggaagatacgagtagaagtaagattgattttgcaccgcacctgtcacttttcagccattgtctgatgttcatgtccgcatatattttggaaactgggttattttcatacgagaatttgatttcgaaacttcgcataaaaaatgggattaagaaacaagttgcagaccacgtgtcttgccttgaaaacaaagcactaaaaaggaacctttgctcattcgggaaatacttaacaatgagcaattgtttgttataaaaagacatgtattaagtaattcatctagtagtatttgttataagtacaaacttcaacattactcgtcacttaaaataaaacagacaagttatgagaaaagaaatgagagaagaatagaatatcaagtacaaacctctaacgccgcttctaaagtcacccattacttttattaaaaaaaaaactaaaa

SEQ ID NO: 78675 - DNA, 241 bp, Glycine max
  Clone ID: PAT_MRT3847_42059C.1
tcttattatataaaaaaaaaaaaaaaaaaaaaaaggggggatttaataaagaggttcctttgataacaaacaaaagcaagcaaaaaaataactattatatagagacacctaaaggggcggcccttttaggggtcccacatttccttcccctgggaagcccctggatttcccctacttaggggccccaaaactcatccccctggccgccgttttccaacttgcgaacggggaaaccccgggg

SEQ ID NO: 78676 - DNA, 1946 bp, Glycine max
  Clone ID: PAT_MRT3847_4205C.1
ccacgcgtccgcgtgcatgtcccaccacacagcagcaccctctgcaacctcctttattacacatctgggatcttctattctattgtctctcacgtccgcaaaaaaaaagctgttcaaacttcaaaatagaaccctcgatctccctttgttgtatgagagagagagagaacgttttgttttgctttacaaaactctctctcatggctctcctaacttccttgcctgaacagttctccagtacccccaaacgccacaaacgtaagccacaacaacaacaacagaaacaaaagcaaaagcaaaaacagaaacagaaaccagcctcttcatgggaccaaatcaagaacctcttaacctgcaaacagatggaagagtcgagagtgcacgacccttcgaaaataactgggtactcgaagctagggtcttcttgcagctccatatgcagcttcagagatgtggttcatgggaacacacgtgttgtgcataggtctgataactcctcaccagagagtagttctctgggtcaggaaactaatgggttactcactaggaaacctgtcactactactactactcgttccgcaaaatcaaacggcggagcaacctgcacgtcatcatcatcatcttccagaggcatgcaattcaggaagctttctgggtgttatgaatgtcacatgatcattgaccctagcaggttaccaattgcgaggagcactgtgtgtgcttgttctcactgtggtgaggtcttccctaaaatggaaagtttggagcttcatcaagctgttcgtcatgctgtttcggagctaggtccggaggattcgggtcggaacatagtggaaataatcttcaagtcgagttggttgaagaaggacaacccgatatgcaagatcgaacggatactaaaagtgcacaacacccaacgcaccatccaacggtttgaggagtgcagggacaccgtaaagaaccgtgcgctgggcagcaccaagaaaaaccccaggtgcgcagccgaacggcaacgaactcttgcggttccactgcaccaccttaacgtgcgcactgggtgcacgtggctcttcctccctctgcgcctccgtacccggctgcagcgtctgcaccatcatcaggcacggtttccaaggcgggtgcggcggcggtggagaccacgcgagggcgaagggcgtgaggaccaccgccagcagcggtcgggcccacgactctgtggtgtgcggtgacgccacgcgcagggccatgctggtgtgtcgcgtgatcgctggaagagtgaagcgcgtggtcgaagacgcgccgtccgaggaggaacacgtgtcggttgcgtcgtatgattccgttgctgggtacgctggaatctactcgaatctcgaggaacttgttgttttcaatccaaaggctatccttccttgtttcgtagtcatttacaaagtcccttcgtgttagcaagccgacaacgattctatttcacggtccttagtgcatcttgcgtatggagaaaattttgataaaagagatgaaacttatatatttttacgcaagaaaaaaaatgttactagtagtagtataatattagtatatttcaattttcacaactcaaccatataacaatgaataagttactagttgttagtgttaatctgtatatttcagttacaacttaatgactagtaatttattgatcgttaattatattatatggggtgtgaaatagtagtacaagtgaaatgtgaaagagtaacaaagaaatatatatcatcgtaattgagtgatggaagaagaatgttgtaatgtacttttctatgcttgggtgtgtctggttggtagttctacaatgcatgcacaaagcacacgcacgaggcatgacccatcaatgatcaatggtggaaggtggaagtgtgtttgatgtcaaccttgtgaatatttcacctacttttaattac

SEQ ID NO: 78677 - DNA, 241 bp, Glycine max
  Clone ID: PAT_MRT3847_42060C.1
attcgagccgaatcggctcgaggttaggtcttgtgtcttgctacatgctggtgagtggtagtgttcagcttctgctatcactttggttttcagtccctttctctaaatggaatgtggtcactttatgatatttttttgagatttgtattgaagatgttaaaagaactaatgtaaagaaaattgagttttgtttggggatgacattttaaaagtgggttataagaagaattgattttatttg

SEQ ID NO: 78678 - DNA, 559 bp, Glycine max
  Clone ID: PAT_MRT3847_42061C.1
gtcacaatgtaaatcaggtcggggtgtgggtgtggtaagggtatttggaggactagactagaggtagggtttgggtggcaagtcggtggaatgctcacaccccagagtacacaacggcaggccttgtttaggaagaatacagtgcaagcagtgcagccacgtgaaaccgcccaacaacaacgtcgtgacgacgaacgttgggggcgatcaactgttgtgtcaggatagtaggcaacatcggtcattatatccgccaagtaacaacggtacagtgctgctggatgttaatgctagttctaacttagttgcacaggtttgaccgtcgcgcaccatcgactttttggacgttgctagtgctgagagggggtgacgtgtggtgtggtgttgggggtggcagggtggttggctttggggcagtgtgtgattgatatactaacatgggcaggtgggagcacgtaacagcctgcctgttatgaggccgggtcaaactgagcaaaaaacatggctcagagtaggggggcaatagccgcgctggctgcatttgcaaacaagaccttgt

SEQ ID NO: 78679 - DNA, 1458 bp, Glycine max
  Clone ID: PAT_MRT3847_42062C.1
tcgcccacgcgtccgcccacgcgtccgtacggctgcgagaagacaacagaaggggggagcagagcagagaagagaaacaaaaggtggggtcagtggaaattatcatcatacaatttcacttaacccttcaagctcaagacagcacagcaatcacatcgcatgtcccttatatatatacttattcattgcctctgaaccttatcaaaacacttctcaatctctctctctccaatggccaaagacctcgaaacggagattcaaagtgggttgcctcacaaggactaccacgacccaccccccgccccattctacgaccccgccgagctccgaaagtggtccttcttccgagccctcatcgccgagttcgtcgccaccctcctcttcctctacgtcaccatcctcaccgtcatcggctacaaccaccagacagccaccgccgccgagccctgcagcggcgtcggcgtcctcggcatcgcttgggcctttggaggcatgatttttgtcctcgtctattgcaccgccggcatatcagggggacacataaacccggcggtgacgttcgggttgtttttggcgaggaaggtgtcgctgacaagagctgttgggtacatggtggctcaggtgttgggggccataagtggggtggggcttgtgaaggctttgcagaagagctactacaacaggtacaaaggtggcgtgaacatgctcgctgatggttacagcaaaggaaccggtttgggcgctgagattattggcacctttattcttgtctacaccgtcttctctgctaccgatcccaagagagtagcaagagactcccatgttcccgtgttggcaccacttccaattgggtttgcggtgttcatggttcacttggccaccatccctatcaccggcactggcatcaacccagctagaagccttgggcctgctgtcatattcaacaacgagaaggcttgggatgaccagtggatcttctgggttggacccttcatcggtgctgctcttgctgcattctaccaccagtccgtgttgagggcccaagcagcaaaggctctagggtctttcaggagctcctcaaacctgtaattctggccaagctatttgagctacgagagacatgcttcatttaattgtgttcttaattaatttgcttatacatggtggattggaataatctgtatatcctcgtcactatgtttatttaatttatgtttactatatttgtggtgacgtccatctcaacagacatgcccatgttaatttgtgtatgtatttttaagtgttacgtacatgtgcgttagtatcctgtggtcgtggttttcgcgttttcttgccaataccatgtcgttttattacttgatttctttgtcaattgttatcgtgcgatgttgagatatgataggatcacgtgtagtgaagagtttatgagagcaaaatggttgtgctatgtgtcta

SEQ ID NO: 78680 - DNA, 446 bp, Glycine max
  Clone ID: PAT_MRT3847_42063C.1
cagcctcatgtcatacatgtactgtaaaaatatcgtagccagtagcttgctgaagtggatgaattatgaaaagctcttgccttgagatgctgcactttgtcttctgattttttatgtaaattagatggggacaacttccccgagaacctcgagtttgctaagggatggggacactgaaatccagatgtgcaacagttgttgtagctctcataagaggcattgcatgccacttgtgttaccaagtccctttgctataacctactcttcgggaagtcttggcagcagcaagttatacatttacatttctgtttctgcttactgattggaattgttcagatgtatagatagaaatttatatttaaatagagaaaattacaagggttgatatgaaaaatggatgacttgtttatattgcactgaaagttaggtagggttctttttggggc

SEQ ID NO: 78681 - DNA, 676 bp, Glycine max
  Clone ID: PAT_MRT3847_42064C.1
cccgcgtccgtctctctccaatggccaaagacctcgaaacggagattcaaagtgggttgcctcacaaggactaccacgacccaccccccgccccattctacgaccccgccgagctccgaaagtggtccttcttccgagccctcatcgccgagttcgtcgccaccctcctcttcctctacgtcaccatcctcaccgtcatcggctacaaccaccagacagccaccgccgccgagccctgcagcggcgtcggcgtcctcggcatcgcttgggcctttggaggcatgatttttgtcctcgtctattgcaccgccggcatatcaggtatatcaacaaacttttcatacgtacaaattttctgattaatataaaactattttgcattaacagacttaccacatatttcttttcataaaaaaatattagtagttaataaaaattcaaatgcaccatggcttctatctcctttcaagttaattttacaattttcgacaaatttgtggtatataataatttgtgattagatgatactataaaataaaataaaagggctgagtattgagtataaactattttcagggggacacataaacccggcggtgacgttcgggttggttttggcgaggaaggtgtcgctgacaagagctgttgggtacatggtggctcaggtgttgggggc

SEQ ID NO: 78682 - DNA, 404 bp, Glycine max
  Clone ID: PAT_MRT3847_42065C.1
ggaatttgacaagtacttgaagggtgagcatttgaaaaacggagaggacccttttgcgcctccgctcacatacaccactctctttgtatctgagtgggggaagttgggattcaaccacgtggactacctgtggggcccacccgtccacgtggttcccattcaaggatccagcatcatacctgtggccattgtggggtccctgccccttcccaacagagggattcgtttgatgacgtggtgcgtggaggaggcacatcgccttccttttcttcatcacatgcatggtgtcgtgaatcatgtaagcggaagaataattaaatgaagattctactttgccttcttttatgaacctgaaattgctatttcctgttccttttaatccctgatcttaccatttgagatag

SEQ ID NO: 78683 - DNA, 250 bp, Glycine max
  Clone ID: PAT_MRT3847_42066C.1
aaaaattaatagtaaaggataatacgaaacatccacaatatgaactcacgtgggtttctacttccatgctagccatcaattaagtttcacaaattttaaaacaacattttgaataataatgacaaagataccaagcaccgcaaataaaaatactcagtataattattattttcccaaatttcctagtagtaagactaagaataataggtaaaacattcattcaaatgttattactagaaatattgaaggt

SEQ ID NO: 78684 - DNA, 417 bp, Glycine max
  Clone ID: PAT_MRT3847_42067C.1
aagctctttttcgctcggctctatttgaagaatttgctttctattgctcggtgatgtcccttcctgcgctgttcactttggggcttgcgagagaaagctttgccagagacgaagattttcggcatgctgtttggccaaacacgcccattccaaggtcattgcgagatcttataaagcctgacgctgccagagtagaaatcgatgaccaccctacgcaaatggaagaatcacagttcccgaaaacctcattctataaagaagaccttcattcaggcaaaacaatgaaagtacaattcatcaagcctgcctttttacaaccatggggtgttggtacatggctaaaggaaatcaaagacactactaaagaaggatatcgttctgaggagctttgcatcacgaaagacgccattgatggag

SEQ ID NO: 78685 - DNA, 341 bp, Glycine max
  Clone ID: PAT_MRT3847_42068C.1
tcttctttttactgaaaaatggataaaaaaggggggggttatttttatctggggggggctcaaaaatatcattgcttctcggaaccatttttgaagaagctcaccctaggctcctaatttaccttgagaaacgatttgctccattggctggcctctaatgtcccaaggatgacaaacttccttcgttacataatttttggcacccccaagactcgccttttcactcttctgcctatggacctgaattttggggaacactgccagtttttcacctatgtgaccatcattataaaaaaaacggacacgcattgttagcaaggttgtacacaacccacactcca

SEQ ID NO: 78686 - DNA, 797 bp, Glycine max
  Clone ID: PAT_MRT3847_42069C.1
ggctcgagctcgagccggaccataccaaatggttttcattgtttatctacgcgccttaccacgagtccgcccttcctcctgaaaagagaaagttccctgggagtgagaatttggagaatcccagtctttatcactacgcactgttctcagataatgtcttggctgcatctgttgttgtcaactcaactattatgaatgctaaggatccatcgaagaatgtttttcaccttgttactgataaactaaattttggagccatgagcatgtggtttcttttaaaccctcctggaaaagctacaatccatgttgaaaacgttgatgattataagtggttgaactcatcctactgccctgtcttgcggcagcttgaatctgctacattgaaagagttttatttcaaggcagggcatccaaactcactttcttccggggcttccaatctgaagtatagaaatccgaaatatctctcaatgctcaaccatctgagattctatcttccacaggtttatccaaaattggataaaatcttatttcttgatgatgacattgttgttcagaaggatttgactggattatgggctgtggatcttaatgggaaagtaaatggtgctgttgaaacttgtggtcccagctttcaccgatttgacaagtaccttaacttttcaaatccgcacattgcaagaaattttgatccacatgcttgtggttgggcatacgggatgaacatgtttgatctgaaggtgtggaaaaagaaggatttcaccggcatatatcacaagtggcagaatatgaatgaa

SEQ ID NO: 78687 - DNA, 537 bp, Glycine max
  Clone ID: PAT_MRT3847_4206C.1
gggggccattcacagacggtatagttatatcagcctccacagcatataaagaagctgccaatatatcaatctaaacaatagttacagccgcctataaaaaccctgaagaaaaatggcatgacttcaaaacgggtctttgatggcaggggccctaatttaggggccaacattggccttcctgaaactcccgggttcccaataaggggaaaaaaataaacccgagttttcccatccgttaaaaaactcaagggcccttcctttggatataaaaagcaccttgtttttcatactcggactgggaaaaccacatgtgctggaaggagccaaaagaagccagtgtcctcccccctatccaaacactgaaccttttttcaggggcttttccactgacaaatacttttactctaacagtttgaggggactcctctagcaagtttttctcaaggcgttccttcaatgggggcattggagctgccccaccaggaagcaggtgggccctaaatagttccctacgaatgtccacatgacacttattaa

SEQ ID NO: 78688 - DNA, 208 bp, Glycine max
  Clone ID: PAT_MRT3847_42070C.1
gaccacaagatggcgaggcaattgcaagagatcggagtagtgaagagtggtgaacacgtacttgtgactcgcacacgagttcaagtgctagcggccgtggtcaccttcgctgccggtgacagtggcaggtgtaaggcacgcttgcgctgttgttctgtggctcagtacctgcatccatctcaccgtcgctcggatcccgactaagttg

SEQ ID NO: 78689 - DNA, 491 bp, Glycine max
  Clone ID: PAT_MRT3847_42071C.1
tttttgttataaaataaattaggaatttctctccatcattatttcagttttgcaatgtgaaatcactacccccaaaaaatacaaaaagaaaaaaacaaaaaatacacgaggttgttgaagtcacattaacagtcaaaattgcatggcctgtgtcaattatacagaagcctaaatttgacataacaacccttcctcaatcccgttgttagcttgatagagagggagaaatggtaaaatgacactgaactttcagaattcatttgatggtatattcaatattgctgcttggtgcaaatgtcatggagcttatccgtaatcgtcacaccaaacattaaactaatcctgctgatttcatgtcttccatcaccctttctactttttcaagcaagcgtgctcttttatagccagatatcaacaaatcatatgttgatttattaaggacatagcatctctttaaacattccaagaatatgtctagcttatgctaagct

SEQ ID NO: 78690 - DNA, 424 bp, Glycine max
  unsure (1)..(424): unsure at all n locations
  Clone ID: PAT_MRT3847_42072C.1
gggggntgggttttttttttttttttggtttgttttttgggaaaacttcccaatctgtttttaacatcaaattcctagtttcaaactttcagcaattttgcttgattcataacccctttttttggggggcgaggaaaaacatgcctgccgcaactttttttttgaataggcccccagtttttttttggccaagtttttaaaattgttttccaaaaaaagccttcctgcgggttcacaatcaatttgtgttgcatttcaaaaccctagttcccttttttttgcaaagtttttgggtcaaattttttttccaacccagggtttgattccttggcttctgagatgaaatttgaactgcctttagaagcaacgggcccattattagtttgtcctacagctggggggtttttaaagagttcattatttt

SEQ ID NO: 78691 - DNA, 387 bp, Glycine max
  unsure (1)..(387): unsure at all n locations
  Clone ID: PAT_MRT3847_42073C.1
gggngnntctagccagccaaaattgtgaatgagggggattctgctatgatacaaaacccttacaaacgcatagcacatctcctggaagctgctcatgaattaaaactcaacactcgcgtaaccacttttgagctgaatagatacaaggattaaaccttaattaacactcctactaaattagattctctgcctgtctatttggctatgcctataattacatcgaatccaatctacaaaggatcggttgcctgcaattaatagctaattccatccagcgctcttctcagaccatccttcgtagttgcgtataacatcttagctctaatccttgatgctgttggagaccatgcaatgtataagatcttgctcttgcggcaattatcaacg

SEQ ID NO: 78692 - DNA, 547 bp, Glycine max
  unsure (1)..(547): unsure at all n locations
  Clone ID: PAT_MRT3847_42074C.1
gagaggggtgtggnttgcatgaaagnaaagtctttactacttggatggnagncttacgggtgactatggatttgaccctctgggactttaggaccctgaaggaacaggagggttcattgagccgaaatggctagcatatggggagataatcaatggtcgttatgcaatgttgggtgcagatggtgcaatattttttgaaattctaggcaagggtggtgtgatccgtcaggagaaagcacttcaatggttcagaaacggtgtggttccacctggaggaaactacaactactgggaagaatcctacacactgttcgtgtttgagatggaactgatgggatttgcagagcagagaagattgcaagagtgggacgaaacagggtctatgggcaaggaataatttntaggactagagaagggtcttgggagggtatggggaggcaaggttacgcgggaaggagctgtttgttaaacaacattggggtttggtaagggagaagaagtcgttggaaaggttttgaagcttcagggaagaagaagaaagggaaga

SEQ ID NO: 78693 - DNA, 358 bp, Glycine max
  Clone ID: PAT_MRT3847_42075C.1
tcgcccatgcgttcttccacgcgtccgaaccaatcatctttagttcttcagtaatttattgtgggattctattctaagattttgagaatgtctagctgtgggtgtggaagcagctgcaactgtggcagcaactgcggttgcaacaagtactcttttgacttgagttacgttgagaagacaaccacagagactctagttttgggtgttgggcctgtgaaggccctcccagaagttgctgcactgaggtgcgtagatcatttccggcaactgaattggatctcggtgggaccaaattcatggacatagctggcgcgccgggagcttggcttagggggaagaaggggccagctggggttac

SEQ ID NO: 78694 - DNA, 180 bp, Glycine max
  Clone ID: PAT_MRT3847_42076C.1
ggctcgaggttattgatgagcattagaaaaggacggcatggtgattatgatgagggcgtgggaggtaactaacatcctaaagcaagcgccatggggacctttgctaactcaccaacacgcacaaacaaagccttgctggcggccgacactgctaggggcctgaatgtcctattgctgtcc

SEQ ID NO: 78695 - DNA, 253 bp, Glycine max
  Clone ID: PAT_MRT3847_42077C.1
tttctcaaggaccggggataaaacgtgattatataacggtaaacaaaagatgttcacttcaactcccaactacatggaaagtgtatcacattctgaaaaagaacaaaaagaatcatggaccccattggttcttcaattttttttaaaaattggttatttctgatggggggagggaaattggatagagagtggtgaccacaacgggaggaggcctcattctgttattaaaaaaaaaaaaaaaactccatcctaa

SEQ ID NO: 78696 - DNA, 175 bp, Glycine max
  Clone ID: PAT_MRT3847_42078C.1
tttattaacatatatacttttattttttagtattagtgtgttacttaaaacatatatatatgtggatgggttaattaatttggagctggacttcattttatattcaatgtccttggcataatataacatgtcatacttaatcaagcgtggtgagtcaggaccgatcgagtaaagt

SEQ ID NO: 78697 - DNA, 408 bp, Glycine max
  Clone ID: PAT_MRT3847_42079C.1
ccttagtaaaattaagacagcaaaatatgcattaaaccaacaatggcacagtcatacactagaccaaataaaagaagttgcatttagaaatatcataaattgtctggcccaaatattgcggagttggtttagatccaagtttcatgaaacaaaaaagaaaacggcacaaactactgggtcaaaagggtggtcagcctccagcctgtttgaaacctgtacagctacttatatgcatgacatagtcacagctactttcacaagtaagaatcctcagctgttgagggctctttgacattggcattcatctcccgtgcaagtgcaaccggtaccttgcaaaccattttcaacaggctgttctgtctgaatgactgcaccaaatagttgaaatgaaacagacccaagttttct

SEQ ID NO: 78698 - DNA, 371 bp, Glycine max
  Clone ID: PAT_MRT3847_4207C.1
aagctaaaacgaacgagttattatggacattcaaataaatcccgtgttattttctgagattccatttttgtcatggacatcctcagactaatatactccaaccatgcaaaagcattatgcgcagactttggcttcagttctttctattttaacaaagaaaagggtccatgatatcgttatgcgactttgttcacctatagttgacactgattaaacctttgattgctcatgcttatcctgtttccgtggttgctctgcattccttcttcatttcgacaagcctttcttttattcatttcagcatacatctcttcgatcataggtttccacagacgaacacgagcatttataaaaccaattggatacctggc

SEQ ID NO: 78699 - DNA, 334 bp, Glycine max
  Clone ID: PAT_MRT3847_42080C.1
tttagggtcggtttttttttttcattttataatttccccaggcgacaaaacaacaatctaggggacctttttgagtggggttttgctaccattttcccaacaacattatctattcattattctaaacctttgctggccctattaatttattaattatctctaatccctagaaaaaaaaaaattcgctatgctggtttatttaacaatctaccatcttcgcacacgccattcatatgttagccaaaatgacttttcaatttttaatccagaaggcagcgtctttaattagaaatatttggaacccccctatttaaaaaatggggaatcgatgaac

SEQ ID NO: 78700 - DNA, 231 bp, Glycine max
  Clone ID: PAT_MRT3847_42081C.1
attgtaaatgacttattaacccccattaattaaatctgagaaccatgtatggggcaaaaaaccacctttaggacacatgtgaaaaggcaaaaaggggtggaaaaaaagccctaaaggggaaccatttgggggcacagtcaggggaaaaaaattgcccaaaagaaaaccccgggggaaaacggccaagaaaccaccgggggaacccgcccaagacgtttaaaaaaggcccaa

SEQ ID NO: 78701 - DNA, 279 bp, Glycine max
  Clone ID: PAT_MRT3847_42082C.1
cccacgcgtccgctttttcccattcattctctttcaactctctcttcaattccatcatggcgaaccaacccgagtcctctgatgctaagggaacgaagagagactttagcacggcgatcctggaacgcaagaaggcgccaaaccggcttgtcgtcgacgaggctgtgaatgatgacaattacgtcgtggtgcttcatcccgacactatggagaaactccagctcttacgtggtgacactattctgcttaagggaaagaaaaggaaggatacaatttgta

SEQ ID NO: 78702 - DNA, 263 bp, Glycine max
  unsure (1)..(263): unsure at all n locations
  Clone ID: PAT_MRT3847_42083C.1
tgagtatcgtatncggncaggngcgaaacacacacgaccggcttggatatggaaacggaggagaaccgaaccacngaggagagcgcgggcgcggacgagggggcccccagggacgcggacgaagcggnggacgacgccgaccacgcccacaaggagcagcggcggagagagggcaaccaggagcgaccgcacacgggcagaggaccgccgccgccgggaaacaacggagacgacggcgacgggggagaacagaggacacagag

SEQ ID NO: 78703 - DNA, 327 bp, Glycine max
  Clone ID: PAT_MRT3847_42084C.1
tcgcttcgggaaaaaattttttataataaaaaaaaaaacctaaaaaagcgggaatttcaaacaaaggcgtgttatacttaataaaaaaattaaaagagaatgccactcaaaaaaatcaaaaacgtgtttaaacatataccataaaaaaagccccccccccctttttgaaccttttccccccggaattttttctcacccctgtccttgaagcaaccccttttttcctttttaaaagcctttttaacctttcgcacaatcttgaaaatatttttttcctgctaaaaatttttttcccttcccattcccccccaaattccaacccggaat

SEQ ID NO: 78704 - DNA, 428 bp, Glycine max
  Clone ID: PAT_MRT3847_42085C.1
cgaaagaaaagtttgcacgccggcacgctgataacatttgttttttgggctataaatacaatggctaaagaaggtttatatgcaaccttaaatggaaaaaaaaaaaaaaaaatagcagcacgtgcagctgaattctcaaagttatacttttcatacaacaatttcttactatactttttacaatatttttttttctatctctccatctcatcacctatctttcaaaccttttgtacaattcaaatggtgactgtttttatgccccaagtaaaagggggttgtgatgagcggtaactagtaagaaatttcactgcttactaatcaaaaggtcactccaaacttccactcctgaatggctgaacgtaaagtatggtttggagtcaacacagaatgctgaagtttaagctttgtaatgggtgacacattgg

SEQ ID NO: 78705 - DNA, 607 bp, Glycine max
  Clone ID: PAT_MRT3847_42086C.1
ccggaattacccggtcgacccacgcgtccgccaatatgtacaccagaaccgccttgacctccgcggtcctttgcggccttgctgctgctgcgcctaagggaagcccttctcagtacagctcagcagatggagcttacgccgagaaccagcagggaactctcccgggttacttgaatgccgatgcaacatacctgcccgacaccccagctgccatcactcccctcgcctccgagtttggcacagcttctgatgtcgccgcttcgttcacaacgaccgttgccactggcaccgcggcagccgctccccagcgctcctcaattgtgactggggccacatcccatggaccttacgatggcgaggcacccaccaccaccggtgctgtctctacgaacgcccttggcaccgcgatacccatcctgccgcctaatcctaccgcaacctactacaacactgacggcaaactcacggagccccaaccgatcccgtacacacctgctggcggtcttggtaccaacggctcagagccgcgttacatgggtcgagtcggatttcgactacaagtcgatcactcttggtctctaccagagtggatcgagcttgacacgtt

SEQ ID NO: 78706 - DNA, 443 bp, Glycine max
  Clone ID: PAT_MRT3847_42087C.1
ctgacccacgcgcgcaaccggtgtgcaaacgcaatgcgggctacagtgtagatgatatagactttccgatatgctgtagctatcactataaaattatgttcggacacttggcttgattaattggcctggaaggagcatggtgactctattgtgagagcaatggactatgatgagctcattgctaagctggggtaggttgactgtacactcggaacgcgggatgaactgccttacaagcacgagatactaactggatctgaatattgaaataactataatagtatctaaatgacactaggcctaatcattgcactgtattataagtatacactaatttttaatatataaacactattgaatataatctgaaattgcttgtaaaatataggtatttaatcagctatgaatatactaaatatgtacctaactatatgatgtgatat

SEQ ID NO: 78707 - DNA, 561 bp, Glycine max
  Clone ID: PAT_MRT3847_42088C.1
gcctgattctgattcttggaagatttgtaaaggggggacgaccctgaacatgtaaagaccaagttgagacactgggctcaggctgtagcttgttcgttaatgcagtctcattgaagggtggatattgtggaatatgatattgtcttgtacagaggaagatatatattctagatatgcgtgcacagagaatgatcaagaaaacaaaatatggaagcaaaaaactaaagaaagaagacaagtctcgttctattttttttttcgtttctggacagtttaaaaaaaaggagaaaaagaaaattgtgcagctttccttgggttttgttttggagctaaacaaacgcaatggggggaatacaaaagaaggaaggaagaagaagaaaagagacaagttacagctaccgcacggccatgcaagtctaagcggagaggatgagtatagcagtgagggatggagtgcgtccaattcgcagattaataattaatgtaaccttgctgccaagccataacgaatgaatatgttgaaaccgcagtcacccccattcaagcccataaattcgacaa

SEQ ID NO: 78708 - DNA, 2108 bp, Glycine max
  Clone ID: PAT_MRT3847_42089C.1
acatatgtggttactcataacccattagtataagttttttaggtgttacccctcggttgcacgtcacagataaatgtgatcatgatatggtttagaagacacttttttttactatttagagaataaattaacaactttatgttttacttccatatacgtagcaaacaaacaattttctcacttcaagcctcctcatggaactattaggaataatatccatcacatgaagcaactttgttgatctcaaattggcactgggcaatctgaattaatgctaagacccctcaatgtttgacttaattttagaggtcttggaaggccctttaagctaggtgatctttgctgattactgctgagcttgccaatcctaccattactaagcacttcaccattaatagaagtcacaataggtaacttattcttgcatggtgaatagctatcagagttgatgtcaaaattccctcctatccttgctcttggggagcttgttgatcttgcttttgcttgtgttgattttgttgcagccatgtatgtaggaattgcaggagagcttggaactgagtgatcttctgcccctgaagtttggttccttgaagaaagtgatggagaatctaatgcttcaatctggttttgtctctgaaaatttctaagctttagttgtctccttccacattcctccccaggtctagaataatgtgagctgaaaactgagtctaaatcttcaagttctttactcttagaaagttgtgtgtctacccactgctccatccagtacctccatcttccatttattttatttctttctgattcagctgaccttctgtggttaaatgagtattcttttactttttctctcttaagaactgcttctttcttgcttacgcaagaggcatctacctcttccttcaacaaaatgctgtcatcccacgttctctcactgtttgagtccatccttattatcttgtctcttgaaccttgcatctcttcatgttcaccacaatcccatcttccttcaaccatttggagtttccttgcaaagacctgtgactggatacttactattgactccaagcactttagagtattcaaagcttggcgtctcacagctcttccacgaatgatagcttgaagcttaactattcccttcaatgctctcgaagctttccttgctaggtaacctctaaatgctatttgaattttgatggctgaagattcttgaatcttcctctggcattggtgtgtggaatgaggaacatcatggctagttttaacaggttgaagttgttcttgtttttctttaagttgttgatgagcagcagattggagcttaacaacctcaacagcaacttgagcagcagtaatagcagcttcagcagcagcagctgaagcaatggccactgttaaagcatgcttgctgtgttcttcctcaacttcacttagtcttgtttcttttgaaaggtggtggtggagctgtaattgaaggcaatctcttggtcttaactctcccaaatatccaagcccttcttttctccttctcttgcgaggaatgtgtatcccataaaaaaagcttcttaaacatgctaaaccaacccttcttagctatttcacaatatcacattgaccaacttcagtttctgtgatctgagacaatgctcataagaatcttctcttatacagaagatatcttggtttttgattatctaattgtcccaggtcagcttgaacaagtagatgggtaaaacgtacaaattgatttgtaaatagacacttaactaatggacttgttgaaacctaaacattagcctagtccgaaaaagaaggaacaatttgcagagtttgtcatagaagtagcttcttatgggcactaatagtcgttaaaatgaccaaaacatgcacattaataaaaactttgctttcagagtaattttaacatcaatgcacataaatcaagatagttaaaaaaaatgatgaatgtgatgcagattgagtttgattcaacatcccagtattttgcatacccatcttatgaaatctcattaactctttaaaaagaacaagaatcaccgtttaagagaactaggagctgggaaaaaagcacggacgcgtgg

SEQ ID NO: 78709 - DNA, 382 bp, Glycine max
  Clone ID: PAT_MRT3847_4208C.1
ttcttctcttcccaatcccaatccagggtaactccgattgatactttgctcaatagaaagatagaaaacagaataaggtctcccccaacaccaagcaacaacaacagcaaccatcttccacgaaactcactctctttcttcttctcaaaatcactggtcattaccatttgaccatcatcatcatcacatctttgaaactctataaaccccatatgaatcacatgctttccacctcgtaacataatatattattcattcttctcccttgttttttctttcttcattccccattaccatggttttcctttccaccaccccctttctccacttcactgaaaaaaacgcttctactaaattcccaccttccaaattatttctcccg

SEQ ID NO: 78710 - DNA, 347 bp, Glycine max
  Clone ID: PAT_MRT3847_42090C.1
aatgctaatgcatcatattaatatgatagaagcagtttaacatatgggctgggggtgttttttgtctagggggtggggagaaaaaaaaaaaaatctcaattttaaaatgggtcatgcccccccccaaaaaaaaaaatcctaaaataaaaccatttgaaagggggagaaaaaataaaagaaatttgggggaaaaaatggcaaacaagggattttgggaacactgccctgctctatgggatcttactaaaacacaacaatactaaaaaacctcatccgtttgtaataacctttcttgggaggggactttgggcaaaaattccggggggcataaggggttttaaggggga

SEQ ID NO: 78711 - DNA, 630 bp, Glycine max
  unsure (1)..(630): unsure at all n locations
  Clone ID: PAT_MRT3847_42091C.1
ttcaaccaaaaagaatataagttttattcccatatacacaacaaacaaacaattttcaagggcgattaggaataatggtagtaacgcaagaagcatagtatctatcatttgaaggaactttgttgatctcaaattggcactgagcaatctgaattaatgctgagatccctcaatgtctgactcaattttacaggacttggaaggccctttaagctaggagatctttgctgattactactgagtttgcccatcctaccattactaaacacttcaccattaatagaagtcacaataggcaactttttcttgcatagtgaatagctatcagagttgatgtcaaaactccctcctatccttgctcttggggagcttgttgatcttgcttttgcttgtgttgattttgttgcagccatgtatgtaggaattgcaggagagcttggaactgagtgatcttctgcctctgaagtttggctcctgtggggaaaagagttccttgaagcaagtggtggagaatcgaatgcttcaacctgattttgtctatgaacatttctaagctttagttgactcctttcacattcctcccctggtctagaataatgtgagctgaanactgagtctaaatcttcaagt

SEQ ID NO: 78712 - DNA, 610 bp, Glycine max
  Clone ID: PAT_MRT3847_42092C.1
acctgtgcgactcagtacacttactgattagcatcgcagaggagtgcgaacaaacaccagttggctctattaattagagaggatccaagccctttttcatgtaaaattttccaaacttctttaccatcaagcttggcttctcatcttcaaggtcaaatgagttggagttatatctatatccataattcctaaatgagttggcctgaagagtaatatatttctttcctttgtcaacttcttcattatctattcaactaaaactcgggaccttgaagttttctaaagagaatttctatattcatggttgatagatccttcgattgaactataacaatgaccataggttgcagagacctgttaagacatcctcaacactttgattattaactattttttttttcaaattgtttacttagaccaactagatgagtgactatatgagtgaatctattttgcatatcatagatatgatgctctcaccatttttattctaaacatcatatatatgaaatcaaatggaacacacttgaaggggttgaatagaattattattgtaaacccctagaactttttttccaagaaaatatctttttttaagacagttatgaaa

SEQ ID NO: 78713 - DNA, 1393 bp, Glycine max
  unsure (1)..(1393): unsure at all n locations
  Clone ID: PAT_MRT3847_42093C.1
ggacggtcccaagcctggagaaaggatagagtatagtatgagaagaagtgggtcatcggaactgaagtgaagtgatgcgcggcaacatttgggaaacaaaatggttgacagtgagcataaccctaacactcaccgccgtttccatctctgcgtacgtattaaagagaaaatggaatcatctgaactccaaaattgaggagcttgaggcatctctcaagtctttctcagacaattgcgcctccgaaagacaaggccgaattagagctcaacaggccttgagaaaagaagtaacacagtcgcaacctaattctcaaaagcttaacctcacttcttatcccatgatgccaattggtgtcgtccactcgtgcttctccaccaggaacgggacgccgaggcaaccgttactcgtcccacttgctagggcctgtttggttttcaacacaacgcgcgttccaccggcgtctctggagggtttggaggaatattctcattgctggattctctatgtgtttcatttaaatacggatctcgataagctctggaagcacccgtctaaatcagggttcaaggccaaggtgagggttccgagactgaagggtggaagaaagggattgtttgccacacgatccccacatcgtccatgccccattgggctcacagttgcaaaggtagaggctgtactgggaaatatgattttgctctctggcgtggatctggttgatggaactcccgcctaccatgtgacagcatccaagaagctgcagtgccaaattggttgatggaggataacttgctttctgtagcggcttttcttctttcctctcacttctgttagcttttcggagcactttacttcagcactcgaaaatatctggataatggtggaaaagaagtcactttatgcatcaccaggcgagctccaaagcttgataaagcaggttctttcatgggatattcggtcattgagccagcgaaatcggccacatgatactctacttaagaaagaaaacgatgaactattaggtaatactgccgatgtagatgagcaccaagatgaaacaactttagcccatgaaagagagcagaatgctttaaattccaatgaaataatttatcacctgattttggagggacttgatgtctcttacagaattgatcatgatggttatgttattgtagaaaagatatcaacttctgatgtccaggacaataagcctaatttctgtaattacttgacatggaaagacaagctgcagtgatttctattattgtacccaatttgctttttaagccatactaatttaaatttcttgttttaaaaaattggttttgctcttttataactaattctatcgaagaagaaatgtaaaanannnnnnnnnnnnnnnnnnnn

SEQ ID NO: 78714 - DNA, 980 bp, Glycine max
  Clone ID: PAT_MRT3847_42094C.1
gcgaccaaagccaaaaccatgttaggcactcctcacaccctcatactccttctcttcctcttcctcatcaccaccttctcccactcccttgtcttcaacataaccaacttcgacgaccctgccgccgccaccgccatatcctacgagggcgacggaagaaccaccaacggctccatcgacctcaacaaagtcagctacctcttccgcgtcggaagggccatctactccaaacccctccacctgtgggaccggtcctccgaccttgccatcgacttcgtcacgcgtttcaccttctctattgagaagttgaacttaaccgaagtcgcctatggagacggcttcgcgttttacttggctccgttggggtaccggattccgccgaactccggcggcggaacctttgggcttttcaacgctaccaccaacagcaacctccccgagaatcatgttgtcgcggtggagttcgacactttcatcggctccaccgacccgccgacgaagcacgtcggcgtggacgacaactcccttacctcggctgcgttcggaaacttcgacatcgacgacaacctcggaaagaagtgctacaccttgatcacttacgccgcctccactcaaacactcttcgtttcttggtccttcaaagcaaaaccagcatccactaaccacaacgacaattcttcttctttttcttaccaaattgacctcaagaaaattctcccggagtgggtcaacattggtttctcagcctccacgggactttccaccgaaagaaacactatttattcatgggagttcagttcatctttgaatggttcccctgcggatttcgagaatgtgaaactaaagcaccaaagctcaaagcttgctttgattcttgccgttctttgtccactggttctgctctttgtcttggctagtctggttgctgttttcttgtgagtgttggtcgatgatctgttattttcattcgtaagaataat

SEQ ID NO: 78715 - DNA, 369 bp, Glycine max
  Clone ID: PAT_MRT3847_42095C.1
attggggcacccttctatccaaaaaaagaaccgaagggggcattgatatcccctccccaaatggggggcacgaataagataaaccatgctaaaattttaaaaacctacatggaatgcctctagggaactttggcaaacagtacaaaagtgtttaacttggcatggcgagaaccctgttatttccgttattggccaccaattaacgggtggattttttacatatttcttggcaccaactatacaaattaaggtgttgcttgaaaataagcgaaatttttgctgcttttattagggaaacctcgtgatgaaccggttccccggctttaaaggggctttttgaatgggctaagtccccaccgaatgttttaa

SEQ ID NO: 78716 - DNA, 547 bp, Glycine max
  Clone ID: PAT_MRT3847_42096C.1
ggctcgtgaaaaaaaaaaaaaaaaaaaaaaaaaaaaaaaaaaaaaaaaaaaaaaaaaaaaaaaaaaaaagaaaaaaaaaaaaagacggccgccaatcttatataatagaaaaaccaaaaaatatatttccggggggttcctgcctgctggccttctttccccccgggttttttttcgggtccgggccctgggggtgtcccttttttccttttgggggtgctttttttcccctggctcttcctggcttcttccttgcccgtggcttaattgtgtctcccctgcccttcctcccgtgtgccctgcctgactttttttgggtggatcccggtggttcctttccgggtggcttccctgcctttctggctgttttctttattccgctttcccgcgggggaagcttgtttccctgttgtcctccagggtgggcccttttcccgtcagggggccttttgttttttggccgcctgggggtgttttttttttcccgggtccccggtttcccttctttctcgtttgccccgtcggccctgaaggcttttttgttggt

SEQ ID NO: 78717 - DNA, 301 bp, Glycine max
  Clone ID: PAT_MRT3847_42097C.1
aatatttcaacactgcactcatttttattccgaagtttatacatcgggatattctttttctgctaccgtttaacaaaatggaaaataaaaaatggctaaattaatgggacttggagcctctttagtgtgcctaaaatgccaaacatttgtatactagatttgaaaacaaaacttttttctctctcatgtagaatttgggaaactatttccaatatccctaataacagcagctggggaatcattttttacccaacagaaattgtaaactaaacaaattctcaagagtgggaataacctttct

SEQ ID NO: 78718 - DNA, 350 bp, Glycine max
  Clone ID: PAT_MRT3847_42098C.1
cgaatagagggttttgacgctatcgttcattgaatttcggagcttatctattaatctaatatacatatatataacgacatagataatagtcatatagatataatcatatcgttatattgtccttgcatgtgctgctaagatgtctcgcacgtgctcacattgcggtaacagctgtcatatctcatggacatagcaccgtacagatcgtccgtcatgctagcgaagatactggcatatgtcggacaggagaatgaatgctgacatatgtattcgatggataggctggaagaattagtattgaacctattaacctattgcttgacaagttttttgtagaacagaaattggtg

SEQ ID NO: 78719 - DNA, 471 bp, Glycine max
  Clone ID: PAT_MRT3847_42099C.1
ttttgtgtctgatgtgatcttattattactaattttaaagtgagtttatgttttgtgagctacatttagtatatacatttggattaattacattttagtttcttaattttttttgaaatatgatttttacttagctttattttattaaggattttaatccctaaacttttatttgatcgattaatgtttttaaattttttaaaatttcaatttttagtctctaaacagaagtttaaactcattatttatatttatttaatgagattttaaaaattaaaaatttcaaaaatttaaggattaaaaactttaatataaaaaagttgaaagattttaaccagtcaaacttttgtttagagactaaatcaaattctaaaaacatttaaggactaaaaacttaattaatccaataaatttccatctattaaaagtgataagcgggaaaatgcttattcttacgttaaagtaaagttg

SEQ ID NO: 78720 - DNA, 157 bp, Glycine max
  Clone ID: PAT_MRT3847_4209C.1
tggacaagctgtgtggctcaaggccgggtcccttatcttcagcgagggtgggctggactacttgagcaaccctatccttgttctcacgcatagcatcctctttttctgtcctagcctcgtaatccctttggccgctctcgagggtcatcggctcact

SEQ ID NO: 78721 - DNA, 444 bp, Glycine max
  Clone ID: PAT_MRT3847_420C.1
gggccaaagggagggaaccaaatccaaaggggagggaaaaacaagaaaaggaaagggcccttggctttcggaacaaacaaaaaagggggggggggaccccaaacaaggattttaggccaaaaaacccaaccgaacccccggggacaaaattctgggggccaaaacccccttcaccacatctcctacaagggaaccaaagcaggaggaaccgccccctttaattaaacccggtggccccccaccccttacccccataggggaacaggcagagggggggggcccagggcaaacttcacccttcaggggcccaaaaacacaagccgctagaagggggggcaaaaaacccctggcaataccctgggaagaatgggggcccgaaaaaaaaaaggccttaggaattttttaggacgcgcggaaaattaaataggcaaaaaaccccttcaa

SEQ ID NO: 78722 - DNA, 303 bp, Glycine max
  Clone ID: PAT_MRT3847_42100C.1
gttaaaggtctatctgaggaagtctaaaacacgaccaaagccagaaaaaccccaaaagaaaaaagacaaaacaaacccccccaaagccccccccaaccccaagcgaccccaaaagaccccaaagagcccccagagattaaaccataacccgcaaaaatccacgcccaaaaccccacaggacaaccccccaaaaaaccctcaaaaacccaagaatacacttgccaaacccaaagagaaaagcccagcccaaaaaaatcccaccccccggattgcatttcaagcaagaaactcggcaagcccaaa

SEQ ID NO: 78723 - DNA, 509 bp, Glycine max
  Clone ID: PAT_MRT3847_42101C.1
ccacgcgtccgcggacgcgtggggtttccttttgtgtctattgaaggcgaaacaagtcctttttttgttgaaggcgaaacaggtcaaaacaagtcaggctagtccatattgaggaaataagtattttcttcattttagaccaacaacattttattaataattagtttttgagactgttttgcatgggttaaatcaaatatgtaaaatttattatcataattttttattaaatatataaatgatcctcataaaaaaaacccttaattaattgaaaatacgattgacatcaatcaacgtacttaacataataacaataattcaataacacataaaatagtattaaataaatataatactataattttatcagactaaaaattaaaataaaacctattgttaggttctaattaacattcaaagtaaacataaaaatttaaatcaaatatgtcataatatttgtgtttaaattttaataaaataacattgtccatattaacaagtttacactg

SEQ ID NO: 78724 - DNA, 431 bp, Glycine max
  unsure (1)..(431): unsure at all n locations
  Clone ID: PAT_MRT3847_42102C.1
gcatcattgaaacccttgatggaattgggtgtctgggtattgtatccactcacttgcatggaatatttactttgcccctaaacaaaaaaaacactgtgcacaaagcaatgggcacaacatccattgatggacaaataatgcctacatggaagttgacagatggagtttgtaaagaaagtcttgcttttgaaacggctaagagggaaggaattcctgagcatattgttagaagagctgaatatctttatcagttggtttatgctaaggaaatgctttttgcagaaaatttcccaaatgaagaaaagttttctacctgcatcaatgttaataatttgaatggaacacatcttcattcaaaaaggttcctatcangagctaatcaaatggaagttntacgcgaggaagttgagagagctgtcactgtgatttgc

SEQ ID NO: 78725 - DNA, 319 bp, Glycine max
  unsure (1)..(319): unsure at all n locations
  Clone ID: PAT_MRT3847_42103C.1
ctgggggtcgactctagaattaagctcaatcgttccacacctttagatattaccccccacagcngacatgacacgggggtagtgtgttgtgatgattgctctgttctcactgggatgaaaccccctaaaaaaaaccacaatatagttagaacgctgattctatgacctactgcatatattgggaacctcttcaccgttgcacgacgttcgaaggaccacacacagaagatgacaaagcaaaacagttaaaaggaaaacgaagaagggaggctcaagggagacccacgccagagtctttgagactatgaatcacggccac

SEQ ID NO: 78726 - DNA, 566 bp, Glycine max
  Clone ID: PAT_MRT3847_42104C.1
gttttcttttacaatgaagtaaagcaagcgtctgcatgttctttctttgaaactcgttaaagaatccaaaatatattccgtagacaagatggcgataagatttcttacatggttcctctttgtttcatgtattcaagccatttcaagttcagaacagacacttgcaaatgcaaacccctccaactccaagaccaacattgtgcatcccgtggacaagtatggaatcataactgaggacaagcacgatctatcttatggctcaagaacacggagaggacaaggagcatatgggggacaagatgttaatcaccgccccagccacaactctgccacgtcatttttaccatgcatctcaactctatctttagccctcgcttcaatcctactccttcccttctacttgctctaatgactaagattctgatgtataaccatccttacctattcactctatgataatatttttgtaatagtacatttttgcttaatccccttatcaggacttttgtatgaacttgcaatattaatgtatgtttaaaattatgccaatcaaatgtttccaccac

SEQ ID NO: 78727 - DNA, 291 bp, Glycine max
  Clone ID: PAT_MRT3847_42105C.1
atggcggccgccaacgctccgatcgccatgagagaaactctcaccttgccgaccattggcataaatccgcagttcatcacgttcacgcatgtgacaatggagtccgataagtatatttgcgttcgagaaacggctccgcagaatagtgtggttatcattgatatgaacatgccgaatcagcctttgaggaggcctattaccgcagattccgctcttatgaatccgaattccagaatccttgctttgaaaggttggctactattccgttgtattcttcttatgaacttgtga

SEQ ID NO: 78728 - DNA, 1414 bp, Glycine max
  Clone ID: PAT_MRT3847_42106C.1
aattcggctcgagcggctcgagctgctctagtggaatcccaagcatgttggcaattgggttgctgtttctctttctacaatacaaacgaaaatatggtacctcaggcggacaattggagtcaagagattcttattctgattcctcctcaaatcctcatggagaaagtagtagcgagtactttggagttccactcttcttgtacgagcagcttaaagaagcgacaaacaattttgatcacaccaaagaacttggagacggaggcttcggtactgtctactatgggaaactcccagatggacgtgaagttgccgtgaagcgcttatacgagcacaactggaagcgagtagaacagttcataaacgaagttaagatcctcacacgtttgcgtcacaaaaatcttgtgtcactctacggctgcacttcacggcacagccgtgaactcctacttgtgtatgaatacatttcaaacggcactgtagcgtgtcatctccatggtggattagcgaagcctggctccctaccatggtctacacgaatgaaaattgccgtagagactgctagtgcattggcttatctccacgcctctgacatcattcaccgtgacgtgaaaacaaacaatattctcctcgacaacaacttttgtgttaaggtagcagattttggactttcaagagacgtccccaacgatgtcacacatgtctccacagctccacaagggtccccaggttaccttgaccctgaatattacaattgctatcagcttactagtaagagtgatgtgtatagttttggggttgtgcttattgagctaatatcatccaagcctgctgttgatatgaacaggagcagggatgagattaacttgtcaaatctagccgtaaggaagattcaagaaagtgcagttagtgagttggttgatccttctcttggttttgattcagattgtagggttatggggatgatagtttcagtggcagggttggcttttcagtgtttgcaaagggaaaaggacttgagaccttctatgtatgaagtgttacatgaactgaggagaattgagagtgggaaggatgagggaaaggttcgagatgagggtgatgttgatggtgttgcagtttcacatagttgtgcacattcaccaccaccagcctcacctgagtgggaagaagttggattgttgaagaatataaagcctacttccccaaacactgtcactgataaatgggaaagtaaatgtactacgcctaatatcagtggttaatcatttagtctattattaattgttgataatccgtttttagtttttactatatcaactttcacctcattattagttgagtcacagtatattatcgtcgcattcgcttgtttaattgtgaagggtatgattaaattatacggcccattgtagtc

SEQ ID NO: 78729 - DNA, 341 bp, Glycine max
  unsure (1)..(341): unsure at all n locations
  Clone ID: PAT_MRT3847_42107C.1
tggaacctttgggcttgatttatgttgcttgcatgnngtcgtgagaagatgattagaaggggatttgttgcctctactctactcctttagcctctatgtctatgtgtcgtactcctatgctgctctcaatgagggaaaacgagctgaggaggcgtagtagtagtgaagggaaagaagaagggcgtcatacctattaccgatcgcgtaaagttagcagaagataagactacggataccgtcctctctgagaagccctcctaagagaggactaaggccggcggtaaagccggcgtctccggcgatctcgccattgccatatgcgagaagatcaagaccacctc

SEQ ID NO: 78730 - DNA, 281 bp, Glycine max
  Clone ID: PAT_MRT3847_42108C.1
gtgcacgtcagataattgtagctgcaaagttattatcatcttttctttcaccatcttaaggatagctactaagtaacatgctttattctgtctgcaacttctaatgtggtttaataatttcatttaaacaatttaactttcagaatgtgctttactttcaatatttggttcatatgtgcacgggactgaaatgcattaatggtggagacctttggtgcttcatgatcttctgtgaaaacttcatcaacattgataccagtattgattgggttgtgaaacat

SEQ ID NO: 78731 - DNA, 314 bp, Glycine max
  Clone ID: PAT_MRT3847_42109C.1
gggccccttaacctagaaaaagttttttttatccaaaacatgcaaaaagaattgggccccaaagcccaaaaatgggggggggggcctcaacaaaaaatcacaaggaaacttcccattttggccttgaacttttttgcccccctttacattgaaaacttgttttagaaaggcaaaaacaaatccctttttttttttttttttgggggggggcagcaatttggggacttgccatttttttcccctccatttttttttaaaaaaaaaggaattttttggtttaataacatgggcccaaccaggaaagggtttttttt

SEQ ID NO: 78732 - DNA, 254 bp, Glycine max
  Clone ID: PAT_MRT3847_4210C.1
cttcttcccctctcttctttctttctttctttcttttgctttctctcttttttctttctctcttctatgctcagctcaaccacacacacacacactctcactctctctctaactgtttgatgtgattctctctactattagctcccaaaaaaattaaaccatcaacctttacaaaagagaaagctccaagaggaaccatggtttatacttctatcccatcatatattgatccagccaactggcagcaacagcaa

SEQ ID NO: 78733 - DNA, 287 bp, Glycine max
  Clone ID: PAT_MRT3847_42110C.1
atagatagacaaacgcatagatctatcgacaaacggatggataaacttatggcccacctattaatccctaatgcaactatttgaacaagtataggagcttatcgggacctttgttacatcatctctaaccctattagcctctcctacaaaacatgtgtgcaggtataaagtcccgaaaatcaaatggactgatgattgtctgaacattgaatgaatactcactcgaacattcgtgctgcttgtctacacaactagccggtaatcaattacttataattcaagtcttg

SEQ ID NO: 78734 - DNA, 310 bp, Glycine max
  unsure (1)..(310): unsure at all n locations
  Clone ID: PAT_MRT3847_42111C.1
tacaacaancacaaattatttcaatatcttttaaaaacagcattttcttttcctcatttgctccctttacacacaagaagtaactttaatcctaaattaaaaccctctttttttctttcataaacattaacaccatcataattagactattcacaattcaaccacccaattcacaaaatcaccctatatctctttagtagcaaacatatctaactattacacccatattataaaccaacccaaagtttttcttcaaaaaataaataaacatcccaattttctccattataaaaccatcaccttcaacact

SEQ ID NO: 78735 - DNA, 308 bp, Glycine max
  unsure (1)..(308): unsure at all n locations
  Clone ID: PAT_MRT3847_42112C.1
tgttacaaaaattataaagggggggtcattatcgcgggactagctaatttatatataatccanatgagaacagtaaccttttcttattgattgttctgggttgaatcattgcgttataatttaaaaataatatagtacattgaactttcgtgcttgctttattgcttggaagagccaattctaaacagttaatgaagaccgatttgtgtaaattgtgacgcttctattttaaatgcgtaagttatagttgaaattaattctcggggaaaatatgatttcttttggtattaacattaaattgtggcttt

SEQ ID NO: 78736 - DNA, 294 bp, Glycine max
  unsure (1)..(294): unsure at all n locations
  Clone ID: PAT_MRT3847_42113C.1
tttganagatgggggtaaggcgttgtatttgaaattttcacaattaggattttttaaaaagaacgcacacttcacacatcattccgaacatttaaagaggggggggaattttccatatgggagagcattctctccaagaggggcaggcccaatttcccttttttttttaaacaggggtgccaacgaaaaaaaacccaaatttcatatcattccgagggttccccttttttaaaagatttgggggtttcccggggaacaaaaaaagccggtttaaaaaaatctccccccatttca

SEQ ID NO: 78737 - DNA, 291 bp, Glycine max
  unsure (1)..(291): unsure at all n locations
  Clone ID: PAT_MRT3847_42114C.1
ccggcccgacccacgcgnccgggaggaactttcccctccccacgctcggcgctgccaaganncagaggncccaagcagcactgcgtccttgttgagagtggaagaggaagaaacgtcttctgatcttcggaactcagccgaagagagcagcagagctgaagtgccagtgcctgcatgtgcgcatcanagtgcaggagttgccttgagcgagcggatgttgcagacctctagtgggagtgcgccggcccactgcgctgctgccgtgggcctgggagtgtgggtggtgcttct

SEQ ID NO: 78738 - DNA, 1590 bp, Glycine max
  Clone ID: PAT_MRT3847_42115C.1
gggagtttattgtgcaaagcattaggaagagagttagtgacatccagaatgatacagcccattggggagaagaatcgattctcaattctcacgacggaagaaagcacggcgcagcctcaaaaaaccaaatggaagcacaaagctctcagcatacacaagttattgagatcagtggtgattttcctgatggtggaaggaagatttttggggaagccctgatggtggaaggaagatttgtggggaagcaccatgtgggtttgcagatgctggatccatctctaaggattctgaagaaagatcaacttctatgcgaaagcttttcatggcagtggtcctttgtgttattttcatgactgttgaagtggttggtggcatcaaagctaacagtcttgctatattgactgatgcagctcatttgccttcagatgttgcatcctttgccatctccttattttcattatgggctgctggatgggaagctacacctcgccagtcatatggatttttccgaatagagattcttggtgctttggtttctattcaaatgatatggttgcttgctgggattctggtatatgaagccattgatagaatcattgctggtcctaaaaatgtggatggttttttaatgtttttagtctctgcatttggtcttgtggttaatatcatcatggcattgttattgggtcatgatcatggccacagacatgctggtcacagtcacggacacggacatgatggtcatggccacagtcatggatttacaatgtctacccattgtgatgcaaagcataccaaagatcagcaccatcacacacaccatcatgatgaaaaccatccaaaagatgctcaccatcatactgaggaagatcacttgcaccatcatgctcacaaagatgttactgaacctcttcttggtgaatcaaaaggtggaactaagaagaagaagcaatggaacataaatgtgcagggggcttatctccatgttcttggggactctatccaaagtattggggtaatgattgggggagcagtcatatggtataaccctcgttggcaaatagttgatttaatctgcactctaatcttttcaataattgttctggggacaaccatcaacatgctgcgaaacattttggaagtcctgatggagagcacacctcgtgagatagatgctactaagcttgaaagggggctgttggatatggaagatgtagtggccgttcatgaactgcatatatgggccattacagtgggaaaggttttgctagcttgtcatgttaaaatcagacgtgaagcagatgcagacgtggtgctggacaaggttatagactatatcaaaagggtttataacatcagccatgtcactatacagatagagcgctagaatttttcttcttttattgactatttcctgttagtaaagatttagagggaaaggatttagttggacttaaggaattgttctggaacttaaatttgtcgatgttcttatactcttctatctagaagtttaagagtgcagatatgagcattgaatatttacatgccaaatttttatatctgatattattgtcaaattaatacttc

SEQ ID NO: 78739 - DNA, 1214 bp, Glycine max
  Clone ID: PAT_MRT3847_42116C.1
cgcatttcgattctcaccacggaagaagcgcagcctcaaacaaaccaagttcctagaaggttctggtctgtgtcagaacatgatgtgagtgagtgcaggagattcagtcgcccaatcaattaaatgcttcatatggaagcacaaagctcccagcatacccaagttattgagatcagtggtgactttcctgatggtggaaggaagatttgtgcggaagcaccatgtgggtttgcagatgctggatccatctctaaggactctgaagaaagatcaacttctatgcgaaagcttttcatggcagtggtcctttgtgttattttcatgaccgttgaagtggttggtggcatcaaagctaacagtcttgctatattgactgatgcagcacatttgctttcagatgttgcagcctttgccatctccttattttcattatgggctgctggatgggaagctacacctcgccagtcatatggatttttccgaatagagattcttggtgctttggtttctatccaaatgatatggttgcttgctgggattctggtatatgaagccattgatagaatcattgccggtcctaaaagtgtggatggttttttaatgtttttagttgctgcatttggtcttgtggttaatatcatcatggctttgttattgggtcatgatcatggccacggacatgatggtcatggtcacggtcacggtcacggtcacggtcatggacatgatggtcatggccacagtcatggatttacagtgtctacccattgtgatgcaaagcatacaaaagatgagcaccatcacacacatgatgatcatgcacaccatcatgatgaaaacctttcaaaagatgctcaccatcatactgaggaagatcacttgcaccatcatgctcacaaagatgttactgaacctcttcttggtgaatcaaaaggtggaactaagaagaagaagcaatggaacataaatgtgcagggggcttatctccatgttcttggggactctatccaaagtattggggtaatgattgggggagcagtcatatggtataaccctcgttggcaaatagttgatttaatctgcactctaatcttttcaataattgttctggggacaaccatcaacatgctgcgaaacattttggaagtcctgatggagagcacacctcgtgagatagatgctactaaactttaaagggggctgttggatatgga

SEQ ID NO: 78740 - DNA, 290 bp, Glycine max
  Clone ID: PAT_MRT3847_42117C.1
tgtagcgcgtcggaacctcttccctcatagatatcttgtatgcctccaaaacaccgagcgctgttgatccgaaattggccctagcgagattaacgagaacaacttctggaaggagcaagaatttaattactccctttattcatacagaatccgcaattacccgacaacttcaacgtagatatcaaattagccaatactataactactaagcaagtactaaagtccccgattaaatttactcctttaaaagccccaatcaaattctaaagcaaccatctatctgatctccg

SEQ ID NO: 78741 - DNA, 471 bp, Glycine max
  Clone ID: PAT_MRT3847_42118C.1
tcgtttttttttaagttcaagctggagaaaacttggattagtactcccactctcctatctggtttaggattccgtgggtagacttttctatttttttcctttctttcactctcttcttacaactgatccggattgccgttcaaagtggtcttatatgaaaaacacttgggctgcggtgcaaatgcctgcattcgataattttctctggagacaacaggctcactgcgaaaacattttttacttgcagagatttggacatcctggttgtttattacacaatagcggctcaatttagaaaattactaccgcagtacattatgtggcttctgtatacctagatgatcgacattcttccatatatactcactgcggaaatgaaatataagcggaatctgagtcacaatcatatttccggcttatcttacgaccgtagattcaactctggactaaacacgataaaacacttgcttt

SEQ ID NO: 78742 - DNA, 407 bp, Glycine max
  Clone ID: PAT_MRT3847_42119C.1
ggcacacagcagggaacaacgtgtaacacgtgcacagctgagagagacgcacccatggggccaagacccgcaaggtgttataggcaaattaataacacaccataccacaagtcacggttttgccgcggagctcctgatcccaagatcaggattcaccatgttggtatgaagaataagggtgttgctgagtttgctttctgtgtacatctgcctcgttgggagaaggaaaacgtttctagtgaggccctggaagctgctcgtattgcttgcaacacgtacatggtcaaatttgatggacaggatcgctttcactcgacagtcagggtgcacccattccatgttcttaggatcaacaacatgctgtcgcgtgctggcactgatagcctccaaactgcaatgagaggtgc

SEQ ID NO: 78743 - DNA, 1879 bp, Glycine max
  Clone ID: PAT_MRT3847_4211C.1
cacgctagcaaagcttcgggtggggctcgagggagtggctggtttacagaatttggcggcccaattcaccagcgaccagttgaggatctatcctttgcagttgctcgtttcatacaaaagggtggctcatatgtgaattattacatgtaccatggaggaactaactttggacgatcagctggaggcccattcataactacaagctatgactatgatgctccaattgatgaatatggtttgatcaggcaaccaaaatatagtcatttgaaggagcttcataaagctatcaagcgatgtgaacatgctttggtgtctttggatcccacagttttgtcattaggaacactactgcaggctcatgtattctcttcaggaactggaacatgtgcagcttttctagcaaactataatgcacagtcagctgctacagtgacattcaataacaggcactatgatttacctccttggtccataagcatccttcctgattgcaaaattgatgtatttaatactgcaaaagtgagagttcaaccttcacaggtgaaaatgcttcctgtcaaaccaaagttgttctcctgggagagctatgatgaagatctatcttctctggccgaaagttcaaggattacagctcctggactcttagaacagctgaacgttactagagataccagtgactatctatggtacataaccagcgttgacataagttcatcagaatcctttcttcgaggcggacaaaaacccagcattaatgtgcagtctgcaggacatgctgttcatgtgtttgttaatgggcaattttcagggtcggctttcgggacaagggagcagagaagttgcacatataatggacctgttgacctacgcgctggagcaaataaaattgctcttctcagcgtgactgttggattacagaatgttggtcggcattatgaaacatgggaggcagggatcactggtccagttttgctccatggtcttgaccaaggacagaaagatttgacgtggaacaagtggtcatataaggttggcctaagaggagaggctatgaatttggtatctcccaatggagtctcgtctgttgactgggtccaagagtcacaagctactcaaagccggtcacaattaaaatggtacaaggcatattttgatgcacccgggggaaaggaaccactggctttggaccttgaaagcatgggtaagggtcaagtatggataaacgggcagagcatagggagatattggatggcttatgcaaagggtgactgtaattcttgcacttattctgggacctttcggcctgtaaagtgccaacttggctgtggacaacccactcaacgatggtatcacgttccaaggtcctggctgaagccaacaaagaacttgatagtagtgtttgaagaattaggtggaaatccttggaaaatatctttggtaaagagagtggcacatactccggcagttcatgggcagtgacccagttcagagaaccaaagaacctgaataagaatctatgtctactgtgaattttgtggctttcgttggaacgaaggtagcttcgaaacaataaagttatctacttcgcaatatgaagtgtttctgttagttctatggttcctactcctagcacctctttttcttatagaaatggaccaccgtgattggtacaaaagatgtacctagatgattttatattcttttcgacacgtcaaccaatctacttggagagtacttgtgaatgaagtgattgtaaggcccccaattcataggatcatggatccccctccccccttgtgcaatataaaaaaaaaatctttggatgataactgcaccaaatattttcatgtaatatataataatcatcgtactgcactcc

SEQ ID NO: 78744 - DNA, 325 bp, Glycine max
  Clone ID: PAT_MRT3847_42120C.1
acaaaaaacaaaaattaaataaacagggcacaacaaaatctgggcgcactcataaataacaggaactgcgctactttcatgctacatttagcctggcacgataccggaacttactatgcttagaccaataccgtttgacctaacaaaacgattcggatctaggatgagtattgttacgtaacctttaatggctgaaaaaaatctgttggttttttcctagaagctaaagcagattgttctaaaattgcataatcacatctatgccaactatcttgtgttttagcctctgatgtaactaaaaatccatcaattgattttgattatg

SEQ ID NO: 78745 - DNA, 722 bp, Glycine max
  Clone ID: PAT_MRT3847_42121C.1
ctctgttccataaaccatggccacatctctctctgcacgccaaatcaagcccacccagaacccaattccgttttcccaatcggagatcgaagccgcgaagcaactcatccaactcagcagcggagattctgaggaagatcaccacagcagcagcaacagctgcagctacagcgtggtgcaagggaaaccaccccaacagagcaaggttgattccggcggcgatgtttcgtccgtcgcagttaccactgcggtggagtccgaagatgaaagctttgcgagaaagaataagaggtatcgttgtattaaagatttgtatagcgctacaactcctgtggtgaaagcgaagaggaagaggaacaagtgtgtcggaactaggaagtgatgatgttaacatgttgattagtgttataataacttataatctaactgtccaaggttgcaagcaagttgtgaagttgtacgtagtaattttccactgcttttaagactgtttgcatgcttgttaatgagaaagctctggaattttcaagaagtagggctgaaatttcaaattttattctgttttttttttctctttctaagtaatagaatagttgttttagtgtgcatatcatatcgagtcttccgcttacactagttgtgacttgagtttgatgatacactatatgtaaatttcactataaatcgtaactgcagttagtgatcttccttgaccttaaaaa

SEQ ID NO: 78746 - DNA, 184 bp, Glycine max
  unsure (1)..(184): unsure at all n locations
  Clone ID: PAT_MRT3847_42122C.1
ccgaaaaaatatcaacaatcttnacaacatcctattcagaaattgaatgcataccaaaaattgcagtacagacaccaatacagtcatcccttattaatacccaatagaacttctccatacgcccatcactaataagaagcacatagagtttagaaaaatcattaccgatgacgatgataatcac

SEQ ID NO: 78747 - DNA, 818 bp, Glycine max
  Clone ID: PAT_MRT3847_42123C.1
cgaagagaaaaagagacaaggaccgtctagaattgatttcattgagtgtagcagcaaccaattccatttccagtttctgattcgtcaaacggacaaaggaagtgaaagggtttagggtgtaacataatatcaacatctttaatacaaaaaaagcctaaatcaagatgctaaaacaaatacaccaagtacgtttgtctatatatacaagaagcatgtttactcccttaattgggcacacaatggtcttcaactagataatgaaaaatataactaaaaccaacaaaaatgactatgaagtcttttttttatcaaactttctaatattctagaatttagcagatgatcacgcagccctaagactctcttcaaaacctctaacctagtaatttgaaccatacaatgttggtgtcatgtgataataaaggggataggcttcgtagagaggaatagcggggtccttctccttctcctcttttgctggtccaaatgaaattagttcagtgtgacaccactttcgtagctttgacactgcactcactggatcaatctcacccaataagactagtttcatgtccttaacgtcaacagaaatcgattcaacccctgaaaggccagatgctgtcttcatagcttttttcttgattctatcattatttaagtccacctttaatactactttcttcattgttgttaaagattgtttgtgagagctaagcaagaattttttggtgtgacaattttgaggagggtcaacaggtaacttgggttgttggaatattaattaggagatggttttcatcttggaaatgaagttgtga

SEQ ID NO: 78748 - DNA, 978 bp, Glycine max
  unsure (1)..(978): unsure at all n locations
  Clone ID: PAT_MRT3847_42124C.1
tatatacaagaaggcatgtttactcccttatttgggcacacaatgggtcttccactagataatgaaaaatataactaaaaccaacaaaaatgnctatgaagtcttttttttatcaaactttctaatattctagaatttagcagatgatcacgcagccttaagactctcttcaaaacctctaacctagtaatttgagccatacaatgttggtgtcatgtgataataaaggggataggcttcgtagagaggaatagcggggtccttctccttctcctcttttgctggtccaaatgaaattagttcagtgtgacaccactttcgtagctttgacactgcactcactggatcaatctcacccaataagactagtttcatgtccttaacgtcaacagaaatcgattcaacccctgcaaaataattagaaatgcaattttgttcagaaatcaaatgaatcattcacgctttgtgatatggattttgtttcttgaaactaattaaagcaagttgtatatagtagctagagtgaaaaaatttatttacctgaaaggccagatgctgtcttcatagcttttttcttgattctatcattatttaagtccacctttaatactactttctcaccatgtaagtccaactttaacactactttctgttacacaacaaatgaaagagctgttaagaccccacagttaattacttctacatctaaaacatgaggtaattaagttaagacccccacaattaattacttctagtggaatcaaaatagtgtaaagctctgaggaaattaaactatcaattagaaacattgattaattagaggatatcgatgaaggtgaggaaattataaagaaattaataggttgcatctagttctgaccttcattgttgttaaagcttgcttgtgagagctaagcaataattgtttggcgacaaatgacaattgcaaaggaaggcgaagaggtaactatgactttt

SEQ ID NO: 78749 - DNA, 195 bp, Glycine max
  Clone ID: PAT_MRT3847_42125C.1
catctgcttgggccgatcactcggatagtgcgacttgaggaaggctcgctcacatctacacgatgatcggactagcgagaccggttattagagttctggtcttaacatggccctaggttcacagactagcgatgtgaagaaagctctccaagatcttaatgctctgctctatcaggatatctgtcctctggatca

SEQ ID NO: 78750 - DNA, 582 bp, Glycine max
  unsure (1)..(582): unsure at all n locations
  Clone ID: PAT_MRT3847_42126C.1
gggataaataagttaatcatacgtggacaaatttcaactaattgttactaaaatcttagtaacaattattttacgttgcgtttttccgaactaatttccaaatacaccgtaatatacatggacaaatttgtgatgttgatatacatggacaaatacaaatttgggaaatgagagggacaaagacgttccaccaatcacgttgtgcagcaagttcaatctcagtgaaaaacttgatgtaatgatggcttttgttcacacttgataataaggacataagcacatgccctcacattagggtgacatatcacttcgaaactcttgacaagatatgccatactgtttgacccatttaagaaacttaagactgctcaccgacactgagtaggcattccaatccaagaaaactacatttgaaagaacttgtccaagtttatacatttattaaaactgattaaaagaattataactgcgcacccgctttttcttgaccttgccttttaggcctcgcttgcgttagagctgacatccctggctgctggaattttaactacaaataccttagggaatattggacnnnnnnnn

SEQ ID NO: 78751 - DNA, 408 bp, Glycine max
  unsure (1)..(408): unsure at all n locations
  Clone ID: PAT_MRT3847_42127C.1
ttttatanttttttttttttggtcccctcttttcttgggttttttttaattttttttggggttttttatttttttttaaaaaacaagtaaccaggctgggcacttggcccattaaattaaaaaatcaacctaggtgctttctcaaggagacaacaggggctcccgcaatcaatttcattggggaaaaaacatctgactggatgaagaaatttattggggaggacaaaccccactgggccatgaatctccaggaaagggctaacaacctgttttcatgattaattggcccactcatttttaaaagggcattatggtttaccggttacattgggaactgaaaaaaacagggggtcattatgctttaaaaagaacctaatatttgataacaaaacaagactggtacaaaaa

SEQ ID NO: 78752 - DNA, 359 bp, Glycine max
  Clone ID: PAT_MRT3847_42128C.1
gggggcggttttttttttttttttagatgaaaaaaggctgtaacagcactttttacggggcattccccatttactaatgttagagaacccaccttataatgggcaaaaaaaagccacggattaattgtgttttaaaacttagaaccacacttgattagtgggagtgtttggcttgcgccctcccagctgctttggttgacggagtactagcgcttaggcttctcaagggtaattacgcgactttttccaacggaacattaattaattaattaatgagttgggaggcttgggaatctccattggttcagtggccatgctaaactttctataaatatcccctttggaaaactttttaggcc

SEQ ID NO: 78753 - DNA, 263 bp, Glycine max
  Clone ID: PAT_MRT3847_42129C.1
ctcaatcctatttaaaaaatataaaccgaaatttcaatcgcagatatattttatatttctactcacaagaatatacactaccattattaacaagcatctcataaaatctaactctcaataattacttcccaacaactcatactccaactatcttataacaatccttcctaaatctagcttctatcttaacttataaacacaataccataattatatataatcaatacttcactccttactttaccgtcactaaaaccaaaacc

SEQ ID NO: 78754 - DNA, 247 bp, Glycine max
  unsure (1)..(247): unsure at all n locations
  Clone ID: PAT_MRT3847_4212C.1
cagcttaattncntcctttatgatcaagtcacttctcaatgcctctcncanactctccntccccttccatggcgccaagcctancccgncaagcaagaagcggcgcttctcaacgcgaatccacacntanccataaanctccaatcctcaannttcttcgctaacaaccacccaatcctcancnaagtcccacctaacataacaacnaccactccaccgcagccggcacgtgatctccctcggcaaa

SEQ ID NO: 78755 - DNA, 392 bp, Glycine max
  Clone ID: PAT_MRT3847_42130C.1
atcaaaatggttgctgctggtgctgaacatagtgtagcaatcactaaagatgggaatttgtatggatggggctggggccgatatggaaacttgggattgggtgacagaaacgatcgattgctgcctgagaaagtgactgttgatggtgacaagatggccatggttgcttgtggctggcggcacacaatatgtgtttcatcttctggtggattatacacaaatggatggggcaaatacggccagctaggacatggggattttgaggatcatcttgtgcctcgcaaggttcaagccttgagtgataagttcatttcgcaagtatcaagtgggtggaggcatagtatggcactcacgtctagtggacaacttttgggctggggatggaataagcc

SEQ ID NO: 78756 - DNA, 302 bp, Glycine max
  Clone ID: PAT_MRT3847_42131C.1
tttactatcactctctaaagggggccagacgtctcttaatctaagtaatgacacccattaatgctttaacaataattccactgtccttttctactattcatctaaaccacatccaattaatcagactttcctaaattaacgatgaaagaaaaccctgttgatcttgactcttactcgactttttgaaatgacttgataggtgtaatataagtctgagctttaaacatctaaagtgaaataccactacttttaactttattatacttattccatgaatcttaagctaggcacttccccttttt

SEQ ID NO: 78757 - DNA, 325 bp, Glycine max
  Clone ID: PAT_MRT3847_42132C.1
gatatcgcttgctcaattgtagagagagatcaacctaagacatgcatggcgcctggcatggggagagaagataacaccagtgaaccaccacccgataggctgatacaatacaatcatctttcctttgtctacaacaagaatggctgcgaaaactagtttgtgttcgacaacaacaaacctggtgactctgaatgcggcgtgggttcttccgtaccgcacgcagaacatccgagaggtgtacgaggttgcgcggaagctaaggcagggccaattaggcaccaccttggagtgcactcaccgtgcgagtggtgggcagttcgcgtgc

SEQ ID NO: 78758 - DNA, 567 bp, Glycine max
  Clone ID: PAT_MRT3847_42133C.1
ccgcgagggtaaaaagctggagcctgaaaaggatttctgagtttggttatttaagagcacatgctacggcgatggatttagccggggcctgtgtcggctcactgacttgggttgtttaggagcgcttgcgccgtgcaatgtttcaaccctcgcgggttgggttgctttccttagggtcctgtctctttttggtagcggcctacggacagagtctctttttcggttgtcccggtcaggctacggcggtctcgagaccgccatcggttctccctggaggctccatttcggtgcactcttgttttgtcttccatttcttgtcgccccaccagctgtgttgtgtgcccaaatctggatggaacagacatctcatttaaacaatgaacaaacgacaggacaaaaccgaaaaaagtacaactcaaatcaactctaagttacctctcccaaccgtgaagcacagttatcaaaacaacttttgcaacaatatgagatagctcaactatatattaaattctgtgctactcagtgacatttcttgcatatcagatgatgataaatacctgttatcta

SEQ ID NO: 78759 - DNA, 212 bp, Glycine max
  Clone ID: PAT_MRT3847_42134C.1
ctgacataaactaaaaattttttttgtttggggtcaattccatcccaagataaacatttaatgtaaaacaccgtaatttttttacaactaaacccaacagggggagttgagtttttgatgttttttggccgccctaatttcttttcacaatacctttttctttgggatcaacatttgaaaaacaactttttcccatgcaaaacaagaaatgg

SEQ ID NO: 78760 - DNA, 2007 bp, Glycine max
  Clone ID: PAT_MRT3847_42135C.1
aattcggctcgagacaaaattagtgaagaaaggttgaagttggctttggatgctgaatcaaaaataatccagttgaagactactatgcaaaggcttgatgagatattctcagatatggaaactgaaaatcaggttctgctgaaacagtcactgctaaactcatcttcaaaaactacgtcagagcacctttctacccacatatctgagaagttggaaaatggtcaccatgtgctggaagatcagaacaatgctgaagcacagagtgtcacacctgtgaagaagtttggtacagaatctgatggcaaattgaggagatccttcattgaacgtcaacatgagaatgttgatgcacttgtcaactgtgttatgaaaaatattggtttccatcatggaaagcctgttgctgcatttaccatttacaaatgtcttctccactggaaatcatttgaggctgaaagaacaagtgtatttgatcgtcttatccagatgattggttctgcaattgagaatcaagatgacaatgatcttatggcctattggctgtcaaatttgtctgcactattgtttttgctccagcaaagtctaaaatctggtggtgcagctgatgcaactcctgtaaagaaaccgccaaatccgacatccctctttggaagaatgactatgggtttccgttcatccccttcttctgccaaccttcctaccccatcattggatattgtacgcaaggtagaagctaaatatcctgctttgcttttcaagcaacagctcacagcctatgtggagaaaatatacggtatccttcgggacaacttgaagaaagaattggcatcaatgctttcgttatgtatacaggcaccaagaacatctaagggagtgctacgatctggcagatcctttggtaaagattctcccatgggtcattggcagagtattatagaatccctgaacactctcctctgtactctgaaagagaactttgtacctccagtccttatccaaaagatcttcactcaaacattctcatatatttaatgttcaactcttcaatagtcttcttctgcgtcgtgattgttgcacattcagcaatggggaatatgtgaaagctggtttagcagaattggagttgtggtgctgccaagcaaaggaggagtatgcaggttcatcttgggatgagcttaagcatataagacaagctgttggattcttggttattcatcagaagtataggatttcctatgatgaaatcattaatgatttatgcccaatcatgagtgtccagcagctatacagaatatgtacactttactgggatgctaactacaatactcgaagtgtatctccagatgtcctttcaagcatgagagtacttatggctgaggactctaataatgctcagagtgattctttcttgttggatgacagttccagcatccccttctcagtagatgacttctctacatcactgcaagagaaggatttctccgacatgaaaccagcggatgagctgcttgagaatcccgccttccgatttttaaatgagtaggcaagggaagcttagtgtatgtgtttatcatagtcatatagggaagcaacaaaatcagttgttggtccttgtcaatggttgtaaatccatttttatttttattctttttctttctacttattatttttgtttttggtttaccaccctacatcttgtttgtcatatccctgcatagtcatggcctgatgtaaaattattttttcattctttagttggcattcaattgtaaagtattcattttaaagaggggcagggatatttttaggattagtgagcttgcgttgtatgtccatttttgttgtcctggtcaatctggtaacaaaaccgttagaaagtgaagctgagctgcttataattttgattgggggttccaagctcactttccactcattttttttacaatgtaaagggtcaagaatgaacattgatatgtaatgaataggtttttcataaaatcgagtctg

SEQ ID NO: 78761 - DNA, 1204 bp, Glycine max
  Clone ID: PAT_MRT3847_42136C.1
aaaatgaccaaagaacaaacatagaaagtaacatagtcgttggagtaattgatagtggaatttggcctaattcttatagctttactgacgggggatttggtccaccaccacgacaattgagctgctataactttacttgcaataacaaaataattggagcaaaatattttcgcattgggggcgggtttgagaaagaggacatcataaatccaacggatacgtctggtcacgggtctcattgtgcatccactgctgctggaaacccagttaggtctgcaagtttgtatgggcttggcttagggacagccagaggaggggttccattagcacgtattgctgtatataaagtttgctggacgaagggttgtcacgatgctgatatccttgcagcatttgatgaagccattagagatggtgttgacattatttctatttcagtgggacctacaatcgtgttacacctccattattttgaggaagtatatgcaataggagctttccatgcaatgaaacaaggcatattaacgtccaaaactgcagacaatttgggtccaaaaccttacacaatgtcaaattatgcaccctggtacctttctgtagctgcctccactatagacagaaagttttttaccaatctccaactgggcaatggccagacctttcagggaatttcagtgaatacatttgatccacaatatagaggttatccattaatttatggtggagatgcgcccaacatagctggtggatataatagttcaatatccaggtattgccccgaaaattctttggatgtagctttggtgaagggaaaaattgttttgtgtgaagacagaccttttcctacatttgtgggatttgtttctggggcggctggtgttataatttcaagtacaatacctttagttgacgcaaaggtatttgcattgcccgcaattcacattagccaaaatgacgggagaacggtatattcatatttaaagtcaacaagaaatccaactgctaccatatttaagagttatgaaggcaaagattcatttgccccttacattgctccattctcatctagaggtccaaatgtaatcactccagacattcttaagcctgacatagctgctccaggagttgacattctagctgcttggtctccaatttcttctatttctggtgttaatggagatgtgagagtatcaaattacaatat

SEQ ID NO: 78762 - DNA, 211 bp, Glycine max
  Clone ID: PAT_MRT3847_42137C.1
tttacgcgtggggtgttctatatataccaagagagtagtgcatggttcacacaccatcaaaatctgcataacaaacacaaatactctcctcaacaaagcctattaataatcaaatattatcatcttccacacaaaatatctatctcaacaaactatgattacaaatactacgttataaaactaacattactacaataaatatcagtacaat

SEQ ID NO: 78763 - DNA, 353 bp, Glycine max
  Clone ID: PAT_MRT3847_42138C.1
ttcaaaaatgattttaaaaaaagggttagggttaaaaaaaatctccaaggaggggcaaattgttaaaacggggggtatggtttttttctttccgggggatggatgggtaaaaaacttccaaaagcgcacgagttttatgcagcttttacaatggtttttttacaaccttgaaaaacctttatcgtcttccaattgcccccagaattcatgattgaactttttgaaactttccataatatcagggttgttttccttagctgggaaaataattggcctaaaatggaaccccccttttttttgaccaaatcctgaaccaggaaccggggatttgccacggggttccaaaaacttgg

SEQ ID NO: 78764 - DNA, 238 bp, Glycine max
  Clone ID: PAT_MRT3847_42139C.1
ctttatatcctcattatttgaagttagctctagtaatttgatcgagtactatgaatcctagaggtttggagggagcaggaagaggaagaggaagaggaagagtcacaacccttctgattaagtgcacgttggcaggtaaatgggaaggggttatcgacatgtaccgtaatttcccaacgtgtcagatcacaaagatcaccgagtccctgggcactgcactgcacgtggccgtagacat

SEQ ID NO: 78765 - DNA, 466 bp, Glycine max
  Clone ID: PAT_MRT3847_4213C.1
gaaggtaaagaatgaaatcagcttgccatccccttgtcttgggcattacaattctactgagattaggacctttttgagaggtgtagatgagcagtgtggtctctatctctaaagagtgagattattcttttctccccacagacaccctaaggagctttacttgggaatcacattgttcactctagctcagctgactttgtctataattcagctaaacaaataaatggtatagatatggaccataaatggtgccatataaaagtctcagtgaatgctagcaaacataattagtacatcaggcctacagatcatatataggcctaacattttctggctaatataaattagatggggaaattatatttactaattattgtgatgttaatgccttttgtcagtgtttgctttcctaaaatactctctactctggctaagatttggcatatataaaaagatggtttatatt

SEQ ID NO: 78766 - DNA, 433 bp, Glycine max
  Clone ID: PAT_MRT3847_42140C.1
ccactcatccgcccacgcgtccgcccacacgtgggggttcttacaaaacaacacgggggtctaacaaacaaacatttcttgaacaaattctcacccaacactttatggcaaccttatctaaatgcctacaaatatgtaggcgaaactgacactctagactgcactttgcatggctataccagcgctgcaattacaagcacactttttcaccaaatgatcaaaggtgctgctaccattgtgacccacactttcatatatccggtcaccattaactacccattcgagaagggaccgctcagcacaccttttttgagtgaacactccctgctgcgctacccgtacggccaagaaccatgcattgcgtgcaaactgtgctaggcaatttgttctgcccacgcaattaccattgaaactgagacactgcctgacagta

SEQ ID NO: 78767 - DNA, 255 bp, Glycine max
  Clone ID: PAT_MRT3847_42141C.1
acgcggacgacagaacggtacggctgctggaagacgacagcagggtgcggctcgatagaataccactatatgggctcggttgtgagacgacgacagatgggctcacgtgtcactgattagagccttccatctaccaggaccttatgatggcatagcacttaaagttgatggctgagggtgcaaacgaagcacagttgtgtgtggagtacctaaggacgcaccacacacaagctggcgaagtgcgcgacaagatgc

SEQ ID NO: 78768 - DNA, 1379 bp, Glycine max
  Clone ID: PAT_MRT3847_42142C.1
cactgttcaaggttttatttggcatgacacttgggtggttggttccatcatccatatgcagatcttacatctcacataatattgcaatgcacactacagacacatataatatataaaatatcctgtacaacatttatgcacaagatatgcatcatggacgtacacactggagccaggttatacgacttaactgggaactcgtcggcctaggcatgtttggtgcagggcagcaatgcagcaggctcacaggggtaatcgaagcctgcagttggcagtgtgtctcagagacagtgggactgtcacactaaccaggtcaccactacacaagtaccacttggcagcagggcagagctgtggggagtgagatgtttccccacaccatctcaacaccactgtactaaccacagctcagacgagaagggtgtggtctgcctagaagccctgctgcagcctggacagtgaagtgcgaggacacggggaagactttagaactgcagctccttctggattccccagagggtgtctgcgctcttcttcaggcgggcctcttcctcaggagtcagtgtcaccttcacaacatccgagattccattttgtcccaggatacatgggacactgaggaagacatcctcattgattccatagagacccttaatcatggtgaaaatgggatgcaccgcctaagttcttcattatgctctcagccaagtctgccacagagaggccaatggcccaggatgtgtaacctttcagcttgatcacctcgtaggcactgtccaccacctgcttgtaacctccttccactgctccttgtctgcgtcagtgcccagttctgggttaagagacttcagggagacgccggcaacattcacaccactccacacaggcacactggagtcgccatgttctcccaggacccagccgtgacagctcagcgcgtgaacccccagcctctctcccatcaggtaacggaaccgcgctgaatccagattgcaaccacttccaattactcggtttttgggaaagccactgattttccaagccacgtaggtcaagatatccactggattggagacgatcagcagcttgcagtgtggactgtacttgacaatgttgggaatgatgaacttgaagatgttcacgtttcgctggaccaggttgagccggctctccccctcttgctgacgggcccccgcggtgataatgaccagcttggagttcgcagttacacagtagtctttgctggagacaatttttggggagcctgctcttccttaagaagattcacaatcagctggtccttgagggttgccatcttggactttgaatcttttgagaccgctagtgcacgatgggggggcgactggcgaggagaagca

SEQ ID NO: 78769 - DNA, 469 bp, Glycine max
  unsure (1)..(469): unsure at all n locations
  Clone ID: PAT_MRT3847_42143C.1
ngagggaatagtttcattatttttatggactgcgtttctagttgcgggaataaattttttgcttatatttggcacatgtatttctgtttctatatatagaaaattgagttgaagcataattttatattacttgatttcttaaaataaaaaggatagcatggtaatttggaagtatttcagtgtgattcgtatttgatatttatgctctacaaatgtaaaattgttaatattttgcaacaattgccctctggttgcagcttgcaatgtttgttgtgcattgtgttaatattagacaaaacttattgactttttctgcattccatgtttcagaaaaatactttcttgtgcatgtgtatctcttctcaaatatgatgtaacatcaaatgtcacagttaaaatatctttttctctttttacagcgaggttgctaaaggcctaatgaaatatcagccagatataataatcagtg

SEQ ID NO: 78770 - DNA, 2031 bp, Glycine max
  Clone ID: PAT_MRT3847_42144C.1
ggcacctcactcttcagcttcggagattccctcactgataccggcaacttgtacttcatttacccccgtcagagccccgattgcttgctccctccctacggacacatacccattttcatcgccccaacggacgatgctccgacggacgccttatcctcgatttcctcgctgagtctctggggcttctgtatctgaaaccgtatctgggtttcaagaacggcgcggtgacacggtggaatattgagcagggtgtgaattttgcggtggccagagccatggcgttggaccgcggtttctttgaagaaaaggggctcattgttgatgtgaccgcaaacttttctctctgagggttcagttagattgtttcaaggaattgctgccttctctttgcaattcttcttcaagtaaagttatcttttctttcctcttgtttcattaggaagctaattaattagaaatcactgtgtctcttaaagtaattattacaaaattcaatatttttattaaagtttaaatttcatacactgtctataaattttgtactctcaaccaaatagaaatcttagtaggcatgacttttaagatggttatggtcaaacacaacaaatttaccatatatgtcaactggtgataggataacatcaagaattttcttacactatgcaattattaaatttttgtaataattagtttagaagtcataattaaagtggtttttaattgattgatagtataaaaactgccactctatcaaaattaagcttatataaataattactttgaatatgatagtgtatccaatattcagtaggtcagtccagcttagtatttaaatatttaagattttcattcacttaatttccctttaggtatttattagagtgcatttccattttctggatgattgagggtgttgcatcctgttcttttttctttctcttaagcctctctgatttttttttttttggatcttttgtatccagttccttatctagcctaggcacatcttatgctaagtttagttttatcatataattcttttggcttcttcaaaaaaattagagtgattttctattataaaaactttaaatcctctaatcaagtgttgtctataactattcaatgcgtaaggaggaagaggaagcagttaaatgaatcttaaaatttgataagctagtattcattctcatgctttttttgcaaatgttgttatgtcagcatgtaggtaattcctactcctagctatttccaatggcatatgggattttccttgttggcagcaaaaaagttatttgcagctccttatttattgtgggagagattggatgcaatgattatggctatcctttgtctgaaacaactgcatttggagatctcgtgacttacataccccaagtaatatctgtaatcacttcagcaatcagggtaagaatgtgattcaattgtttagtagtaggctagtagccattatgatatcttttcaagttcaaattcaattgtaattaatgaaacagtagtgttttcttgacacccttctatatggagtgtaacgtggatgaaagagaaaggattgaggagagaaacgaggaagaaacaaaaagtgagagacatgataacaaaagagtgaaagagaaagttgtaatgaattatgttctgggtatttatcaaaagagtcatgatatttggaccttactattttggataccttatcaacaccctctcatttctttctatctctcttcctatcacatcatatcacttgtcatatctatattttttaatctttttttcttctctctctaggtttcaactggcatttggagtgttcaaatatatttttatgagcttttacttatttcttggaggaaaaaatgttcatgaaaaataatgatactacatcttaggatgactaatggttaactccaacaaaagtccaattggtaaagaatagactcatactcatttcaaaaaaagacatgagttcaaatggtgagtccctgagatctcacctaaactttttttcacacacac

SEQ ID NO: 78771 - DNA, 251 bp, Glycine max
  Clone ID: PAT_MRT3847_42145C.1
gatccatacacaggttcacatccataacccataccgccgcacaacattatgactttggaacaaaaatagagtttccgccaaggagacatatgccctaccacattaatggcaccaagaccctaaactcgttacgcatcaataacggtctgcaatcgtcgagacagacacgtccaatgatgggcgatacgactgcgttctcagtgtttccacacgaagtatgccaaacaggtggttgggaaccccagcaggca

SEQ ID NO: 78772 - DNA, 1394 bp, Glycine max
  Clone ID: PAT_MRT3847_42146C.1
gggtagcagtcaagcaactctcatcaagtcacggcagggaaacggtgaatttttgaatgagataggcatgatatcttgtttgcaacaccctaatcttgtgaaacttcatggattttgcattgaaggggatcaattgatattggtgtatgagtacatggaaaataatagcctggctcatgctttattcagctcaaaagatcaacttaaacttgattgggcaacaaggcttaggatctgtattggcatagcaaaaggtcttgcatttctacacgaagaatcaagactcaagatttttcatcgagacatcaaagctactaatgtgttactggatgggaatttaaaccctaaaatatctgactttgggctggctaggcttgatgaagagaaaacccatgtcaccacccgaatcgctgggacaataggatatatggcaccagaatatgcattatggggttacttgtcttacaaggctgatgtttacagttatggggttgtggtcttcgaagttgttagtgggaagaactacaagaattttatgccaagtgataattgtgtttgccttttagacaaggcatttcatctgcagcgtgcagaaaatttaatagagatggttgatgaaaggttgcgatcagaggtaaacccaactgaagctataactttgatgaaagtagctctcctgtgcacctctgtatcaccttcacataggcctacaatgtctgaggttgtaaacatgcttgaagggagaatcagcattccaaatgctatccaacaaccaactgattttagtgaagatttaaggtttaaagccatgagggacattcatcaacaaagggaaaatcacagtttgagtacaagctaaacaaacaagtcaacagaagtccttacacttagctctccctaaacatttggcaatgaccatattgcaacatgagatatccttagagcatagctgagaatatatttacatctagatccgtgtaaatttataattgctcttgaagggtactttttttttaaccttggtatttcattttgagaaattattgtatggtttggtgtaatcctagttaatcttcatatgacacaatctcatgtttccaatttatgaaaacaaaaattggcgtgtcatgtgaagatttcttgaactaaaatgatcacggaccatatactaatttctcatttaagagggacatatgaactccttttgtacatacgcacccttgaacttgggtgttatagcaaatatcatttttgaatattaggttaatgcgtgtcttattaatctttgggtgactgaaaacctgtttgttatatcaacttaagaacgtacggcacattgcgtttctcctttttgtcaaaaaaagtactttttttctcttttggtttaaaaaacc

SEQ ID NO: 78773 - DNA, 691 bp, Glycine max
  Clone ID: PAT_MRT3847_42147C.1
ccccctctaaagcgcccgccctcggtcgtttcctatctattttctgacttatgtttttaccctgcaactcctacccggaccagcagggggccttctttccttttttgagtggggggaaaacaaaaatttcccccctcaaaaaaaaaggggggtgaaaatgagatcccctcacaaacccgctttttttcgaaaacggggccccccaaaaaaaccccgggggggggccccccctatcggacccccaaaagttggggggggcgccccaaaaaaccaacgccccccgggccggtttcccggggccccccaacgaaccaaaaagggcccttaaaaaggccgggcccaaaacgccccccccggggggggccccccccccccccggggggggggggggccccccccgcaaaaaccccccccgcgcaaaaaaaaggggcgggggggcccaatgggaaaccccccccccccctttttaaaaagcccccccggggaccctcccccccttccccggggggggcgacaaaataaaaatttggggcaaaccaccccccgcgcccccgggggcccccttgggggcgtgccccccattgccctaaacccgggggtaaaaaaaaaagccaaacccgcttcacacccctgccccgaaacaagttgtggggagggcctctcaaaaaattggtgggcccggggggggccc

SEQ ID NO: 78774 - DNA, 282 bp, Glycine max
  Clone ID: PAT_MRT3847_42148C.1
caattttctctcttttccatttctcatttccaaaaatgccaccggcgaacgcaaagcggagggagctgcggcggcggcggcgcctatgagagtcactcgtgcggcggcagcgcgagccgccgaggtggctccgccggcgtcggaggagaagaggaaggcgaagaaggccaaagttgcttctaagcagcagaaaaagaaagaaaaagaaagcgaaactgtcgttgagagtgagaacaaagtcgaagaaggagacgcctctgagaacgttctagacgcttcgaa

SEQ ID NO: 78775 - DNA, 142 bp, Glycine max
  Clone ID: PAT_MRT3847_42149C.1
tttgtcaatcccatacccttagctgaagaatcattcaacaattgtggttcgtgatattctttcgtgtgagcctgggctggttgcactccgttctactggcgtcattttatgtccttgcttagccctgtgtttgctttggggc

SEQ ID NO: 78776 - DNA, 1318 bp, Glycine max
  Clone ID: PAT_MRT3847_4214C.1
cccatctgctaccaatttcaccattctcatcctccaaagttgaaccataatttcaaatccaaccaagagacaccatgtcatcaagtggaaccatttggagctatgaggaagaaaaagcatttgagaatgccatagctatgcattggattgaggaatcctcaaaagagcaatgggagaaaattgcttcagcagttcccagcaaaagcatggaagatgtgaagcaacattaccaggttctagtagaggatgtaagtgcaatagaggcaggtcacatatcattcccaaactatgctgcttctgaggaaatcacatcttcaaataaggactttcatggctcttccaaggccacaagctcagataaaagatcaaattgtaattatggacgtggtttttctgggttaggacatgactccaccactcatagtagtggtaaaggaggcttgtcaaggtcatcagaacaagaaagaagaaaaggaatcccatggactgaagaggaacacaggttatttttacttggtctagaaaagtttggaaaaggagattggagaagcatttcaaggaactttgtgatatctaggactcccactcaagtggcaagccatgcacaaaagtacttcataaggttgaattcaatgaatagagacaggaggaggtctagtatccatgatatcactagtgtgaacaatggagatgtggctaataaccaagcacctattacagggcagcatagtagcacaattccttcaaacacaatgggtgtaggacaatcccttaagcatagagttcagggtcacataccacctggtttaggcatgtatggaacaccagttggacatcctgtggctgctcctccagggcacatggcatctgcagttggcactcctgtcatgcttcctcctggaccccacccccatgctcatcctcatccaccttatgttcttcctcttgcttacccaatggcacctccaacaatgcatcaataacaactctttttttctctttcttatttgtagttaggtttttttcttctttcttattagtatggaattaaaatcctttctgtggaaattcataaatatgttgttttaaattaaattctactcttagtttaagcaaggaaattgttgaatggatccaatggtacttagtttatgtcagtatagagttagtttaaatgccaaccccttttttccaatgtagatgtaatcctaagaattgccttgtggtgtatatggagatagatatggatttaaataccaaggaaatgaatttctctttatcaacaagtttgtctattgtcatgtctctattacctttc

SEQ ID NO: 78777 - DNA, 443 bp, Glycine max
  Clone ID: PAT_MRT3847_42150C.1
ccacgcgttcgtggaattctatcttcaagagaacaacaatgctctcataaaataggcttgacacagagtgaagttaccgaccaacacgtatgatacacggacctccaagaactggtttatataccctcccatcacgttccagaacacagacgcggagcctggctagcctcttggggaaccaacccccaacaatggcctatgtccagaaaaaactctgtcagaatctgattacaaaacgaacattcctgaggaccataacctggttttgcctacctacgctgaatttaaaaacaggggggagaacatggagagggaacttttttctagctgggtcccacgctaacgggggtgaggggaaccaaaactttatgagaggcccgaggccaaaaatgcatattttattttattaaggcctgctgctggtcttataagaaccaaaactt

SEQ ID NO: 78778 - DNA, 808 bp, Glycine max
  unsure (1)..(808): unsure at all n locations
  Clone ID: PAT_MRT3847_42151C.1
aattcggctcgagcctagctgcaccacatccaccacaaattgaagggttgcaagtattgtagctgatcaaatactatacttctgatggcatttcctaattccaaaatgtaccatggttgctaataggaacctgattacttggaacacaaagagtggtttgttaaattctgggtcagcatggctgcccagacaattgctgagactgcccagaaaattctcacccctgaaacccttcgctatgctgccaaacaatctgcacgttgccttgttgtccctgtccgtctccgccgtgccattaagaaataccttcgagagcaggaggagccatatatgaagaggaaagtcttgagattgtctcaaacattcaatcaaatcaaggatgtcaatctccagctggcatccaccacagcaaagaagatagttgaagacccttttgaacaatcaaaacgttggaagattaccagctcttatggggacattggtctcatatatagagatgaagagacaaatgcatatgtggcttctcgaatgccagctgtttactctgcttgttacagagtacttaaagaggttcgcagaaggcttccgggtttctccccatctaaggtattagattttggtgcggggacaggttcagctttctggtcactgcaagatgatctttgaacatctttaataaaagttaatttaatagtaatatcactataatggcagcgtgcagttcggagccttatgcaaggtctcaagaatttgccacttattcatagctatgacagcattcaatcacnttctaaaagtatcactaaat

SEQ ID NO: 78779 - DNA, 1760 bp, Glycine max
  Clone ID: PAT_MRT3847_42152C.1
ttcgcccggattcatagtaattgacagcaacaacactttccacttgtctccgaattagttatcttgagaaacattattccctttgctatatctaatcgctcgaatgaaggtttcatgggtgtttgtgatcatgtgtatggaagtggtcggtgttccgataatggctcaagcactgacatgcatcgatgagacggttatcctcgctctgtctctatcttacttgatgcagcaacaaacaccttacagccacaacactttccacttgtctccgaattagttatcttgagaaacattattcccattgctatatattatggctagcatgaaggttacatgggtggttgtgatcatgtgcatggccgtggtgggtgcaccgatgatggcgcaagccatgacatgcaatgatgtgacggtgaacatggcacagtgcctatcctacctgatgcagggaggaacaccttcaacactttgctgcagcggagtcaagaacattcttggctctgctgtcaccaccgttgacaaacaaactgtgtgcaactgtctcaaggcggatgctgctaggtacaacatcaatgaccagtatgctcaggcactccctggtttctgcaaggtcaatgtcccttacaagatcagccgctccactaactgtgcaagcatcaggttctgaacaagccatggacagatttgctcatttctgcagcgggatactgaggcagcagtgaagcacttactatcagaataagagaaatcgagtgtgactgtagggcttcacttatgcgagccttttattgtattagtttctatttcttcagacacttcatagtctttgttgttgggtgtgagtgatcactagatgtatctaagttgattgttgcatgtaacaatcacgtatttgatataataactccatatgctattttgattattgcataccaaattgttcttaaattggatttttatctgcctaaattggcttgaagaagacacattcgaggatcccaatatagagacaaaatgttctcatcattttcatcttggttgcatttatgagtggatggaaagaagtgacagctgtcctgtttgtgggaaggtgatggtatttcaccaaacgactgattgaaaaggtttatgtcgtcaattatacccataccaaaggaaaggaaataggtagtattgatattgtgagtacttcagattaagcgcttatcatgtatagtaagtatataacatttttattacccatcaatgtaagttcaatctcatccaagttgttcctatatttgcccttttaagcccttgccgcttccctggtctgcctctgacttcaagcagcctattaatgatactatcaagaaccccacgttccattctcagtctcacgtttcaaaagtcaagataacacaaacaaacaacaaagtgaaaggaaaagaggtagtaggtagccaagataataaaggaagtctgatgttgtctatatatcggcaatgatcatgttgaaaacaaaatagagaataaagagagaagtagctttaagtcaaattcaaataagaagagaagacccttttgtttagagttgtgtgtctagtagaagaggttaagaaaggaaaggagtggagagcgttgaaaagaggaaagtgaagaagaacatattcgaacgcgtagagagaagaataaagtggggcgtgttgagttgaggtcccagcagcccctatgaaacataataaccacccatgggaagatgacgcggtttgaataaacaa

SEQ ID NO: 78780 - DNA, 553 bp, Glycine max
  Clone ID: PAT_MRT3847_42153C.1
ggcgttgcccaagcacacacagaacagaaatggtgacaataatgagagtcgcagcacaaacccagacacagttacagttgaagaaacacatgatagagggtttcggttccaaatacatggaattaaaatgggtaaggcgaagaacaagcaaaagctctcagctcgagaagacgaagaagctatcatcaaaaccacctttcccaatttacatttccaccgacccacgccatgtggacccgcaccgtctccgagacctcttcgctgattgcaaccactctacccaccgattccctacccgacccgaacccgtggatatccgcaagctccgcactgcactgtctcatagtgccgttcttgtctccgtcttctacaacccccaacatgtaaacgccgttttccatcagaattcatcgtcgtcttcaatcgcggatattttcatgccggtttctccttcacgcgatcaattggtcgggtttggccgcgccgtttccgattatggcctcaccgcttctatttacgatgtcatggtaatgaaaaaagaaagaaagaaaga

SEQ ID NO: 78781 - DNA, 928 bp, Glycine max
  Clone ID: PAT_MRT3847_42154C.1
ctcctcttttccaggaactataatcctgaaggtaggaaaaaacctgtgaacagagaggatgcattggaggaactgatagacgtgctggttatttgcacttttccttccaatcattgaagcaaagttaaaccagttccggacaattttgcagatagaatcaacaacaccagacaaattttcaccacggatagttgaaaggaaagatgactatattcgtgtggagtaccaaagctcaattttggggtttgtagatgatgttgagttctgggaagcctatattcgtgtggagtaccaaagctcaatcttggggtttgtggatgatgttgagttctggttcccacccggtaagggttctactgtggagtatcgatctgcatctcggttgggaaactttgattttgatgtgtacagaaaaagaataaaggcactgagacaagagttggagaagaaaggatggacatctcaagataccatatgattaataaactcaggctgaattaacatcagcatctaagcaaatattatttcatatactttgtgaccttgtatacttttgtattagatacaaatcgcacaggatcattgcaagcaaacttttcttagatttttggaattgtagagaaatcattgagaacagtacttcaaactctctcggggaaggaatgaaatgaagaccttgcgccatatcttcttcaagttcattaattggtccacttatttacaccttcaccgagttcaatctaataatgtatgaatcctgtttcaagaaaaataatttgtgttccgccccaaacgtgttcttcatgattcacttttgttgtaagtttgactttgcttcttcatgtattaaaacttatccttgcgatcaatttggatgatgctttaggcctttctgttatcaaaatgtacgtacctatgtcatgttttc

SEQ ID NO: 78782 - DNA, 366 bp, Glycine max
  Clone ID: PAT_MRT3847_42155C.1
gcggcttgcggtcaaattgttatatgcgcaccttaaacaaaggtgttagaccaccctgccacagcgtgttttggtactcactgcagttggaattctaccttagtatgtgaattcaatgcggtacctttcttgtgttggccttattatgctgaccaattaattgacaaagcttacatttgcaatatgaggaaagtgggtgtgggatttgattgagatgacacacggctgatatcaccctgtgagacaaagcacaaagttgaccatgtccttggagatgagaacatgaagcgaatgtctgaaaaactgaatgaaatggttctaaattacattgcggaaggtggacaatcctatgcgaattttaacaag

SEQ ID NO: 78783 - DNA, 463 bp, Glycine max
  unsure (1)..(463): unsure at all n locations
  Clone ID: PAT_MRT3847_42156C.1
aaaagaaatttttcttgcaaactcaatgttctctggatccaccactgagcaccatcgttagctgaagagaaaataaaacatggggactttcatgcatgcaactatgctagtggaaagccattaaccggggggggggttacaaagcctatatacttaaaaactttattcatacatacttctttgacgatgatgagtgcctccaacttatgtacaaccttcaaactttccatcattggcgtcggtgttgatattgatgggctttttgtatgaactgtttgcaacgctttctttgttgatttataaatgctagatcttttcatcatatctcctgttcgatcgaaaacctagttccactattgggaaaaaaaaccacccacttcatttctttaacatgtggngatattttccttcaaatttggtaacattaattacaaattttgaattatgcaactaaaatttattt

SEQ ID NO: 78784 - DNA, 120 bp, Glycine max
  unsure (1)..(120): unsure at all n locations
  Clone ID: PAT_MRT3847_42157C.1
atttcctctgtctttgctcaatgcagaagtagcagctatgccgnngcacagtgacttgcaaatccacgtcaatgatgaggncagtattccttttggacnagaagttcatatcanaatact

SEQ ID NO: 78785 - DNA, 604 bp, Glycine max
  Clone ID: PAT_MRT3847_42158C.1
ggctcgagaaaagagaaggagagagagaagttatgttgacaactttaatatccattttgatgtaatgtaaacttcgtgttgttgttttgtgcggttttcaatttgaggggtctttcctctttgttttttctctctctctgagtgagaaaaagcaaaatcttcattgagagaatggcccagcactgcggatccaaatccccattcttttctgcttttgtaaggcatctcacaaagcaaaatatcactttttgattcccaatttcttctgggtctctctctctctctctcctcttcaacattcattcatcaatgcctttcttctccttcttctgcaaacaatgactcatccggttttcattccctttgaaatgacgatacattatcatatcttgttcaattgaaacctctgcattatcatctatggcattaatgggcatgagtgcaaacaggcaatgcaatagctatttcccaggatatcattccccaaggtatctttgttttggtgccgaaggaagcacatgtacctcatctaatggtagcagtgaacgtgagaatgactgttaccaacttgggttcttgccattgtcatctgcttgtcatcttt

SEQ ID NO: 78786 - DNA, 266 bp, Glycine max
  unsure (1)..(266): unsure at all n locations
  Clone ID: PAT_MRT3847_42159C.1
agaaacaaacgaatggagcttaccattaaagccttttaacctgttatacctaaactatgagacaaatcaagtggacaaagtacacatccagaggatgaattatgcaccatcaagttgttgtgtttngtaaattgcagcccataccacttgttggaactcgacacaacagtgtaatcaggacgtgttacncatacacctcatagagaccataattaatttaaacggattggggggtgccaatacaggtaaaatacttaggaacaaca

SEQ ID NO: 78787 - DNA, 410 bp, Glycine max
  Clone ID: PAT_MRT3847_4215C.1
aaaaaaaaactaggttgtctctttcttaacaaagaaaaagtaaacccccctttaaggtttttccaatttacatgagcagagatccccttggggggagactacttttgcgtggggataataaagagcaaacccttgttttttttttaagggcctgggagagccattgaaagccttcaccataccccattttggggacaattctggacatgaaaacctccaagggacaaacattggggtcaaccaaattaaccttgcctttgcctggggggaaattaggggggcccatttgaaaacgtagttcttcctttgaagcagcataggggttttcaattttgtttcccaagagggggaagggcccatttgttagggactcgtcaaagaaaaaagcctccacctccttttttgatttt

SEQ ID NO: 78788 - DNA, 140 bp, Glycine max
  unsure (1)..(140): unsure at all n locations
  Clone ID: PAT_MRT3847_42160C.1
caatgtgtcggtatcgtacctgctcagcctctcagctattngggcactgatgacacactccgaatgtgggactgtgtacctgactttgacttaccagcatgcgtctgtcatgcgcttcttcctctaattctccaccttga

SEQ ID NO: 78789 - DNA, 226 bp, Glycine max
  Clone ID: PAT_MRT3847_42161C.1
gttatgggcatggattctgtacgtgaggtgtatgcgtctgcagatgcagttgaagatcacctacaaccatctcctcagaaatcgacttcgaattcatctgttccgcagccctcatcgtctctgttgctatctctggctctactctaatcgtctccttcgtcgtctctatgtgaatctcttacttcaacgtcgcagccttcgagcgctcgtgctactattccgaagg

SEQ ID NO: 78790 - DNA, 248 bp, Glycine max
  Clone ID: PAT_MRT3847_42162C.1
acgaggacgcaattcatccatgcggctccggaaaaagtgagaatggaggattgccttgagggtcctctcttaggcaatcatggaacacagctccaaactcgaaagtggaggacacatgaatgacaacgcaattcatccatgtggctccggaaaagcatgagaatggaggattgccttgagggccctctcttaggcaatcatgaaacacagctccaaactcaaaagcggaggacacatgaacaacccct

SEQ ID NO: 78791 - DNA, 241 bp, Glycine max
  Clone ID: PAT_MRT3847_42163C.1
ggagaaggggaaattacagggtcactaaataaaccaaatgttttatttgtcccttctggcgtcttctcgaaaccgtacccttttgtggttttttcgaagccgtacccttttgtggttttttcaaaaccatacccttttgtggttttttagaaaccatacccttttgtggttttttcgaaaacgtacccttttgtcgttttttcaaaaccatacccttttgttgttttttcgcaaccgtaca

SEQ ID NO: 78792 - DNA, 501 bp, Glycine max
  Clone ID: PAT_MRT3847_42164C.1
atgggtgccaagcacctcacaaggaccaaagaatggtcgcatgtcatcaagcaaaggtccccggacgaaattagggtgaccataaaatctccacatgcaaatgacttgttgttccagaatttcacaaattgcctaatgatgggtgccaagcacctcacaaggaccaaagaatggtcgcatgtcatcaagcaaagaatgaccaaacttggtctctgcttgtcatcgggcccgccgcctctggatgacaaaagggtgcgaataaccgtaagaatgaccaaacttggtctctgcttgtcatcgggcccgccgcctctggatgacaaaagggtgcgaataaccgtaagaatgaccaaacttggtctctgcttgtcatcgggcccgccgcctctggatgacaaaaggggtcagtatgacaaagattatggtgcggccgacaaaagcaaggctcttgctcctacgtatcctccaatgaggaactcagacctacgtagttctggatag

SEQ ID NO: 78793 - DNA, 692 bp, Glycine max
  Clone ID: PAT_MRT3847_42165C.1
tactgttataataactttaatttatcttgcattttacagaagtctatgaacgattttaaaaagtacctccttacccccatcacgtttctctgacagttgttaaagtaggcaacgagtatgtcaacagcttgaatatcggtatcttgcaaggtatttcagaacaatcacttgccaaacaacttggcagtttttctatcttgtttttaactcaatggtacatccactctgatggtaacctgtccagccaaatctccaacacattttggaaaaatcaatggtgattagcaaattagttagctttggcacggagctgtgctcgcttgcctgtgacagcctggaagccagttttgatactggcaacagagcatcgagaatgacaagtttcacattgtaagaaatagagtcgggtgtccttctgtaggattgtgtccggtgaccggcatgtgtgacaagtgacatattccttgatatatcttctcaagacattttctatttgtttctgttggaatcttcctttgattacaagttggttattaccatctatagaaccacttgtacccaattctgccaataaaaatgcaaggagatgtttgggttgacgatgtaatagtttacagatatctgtaaaattgacaaaagaagttttcttggttcctactcggacgacctgtggaggtttcataacaaatttc

SEQ ID NO: 78794 - DNA, 1344 bp, Glycine max
  Clone ID: PAT_MRT3847_42166C.1
gcctaacttggctgtttacaataggttggttgatgggttggttaaggttgggaagattgatgaggccaagggtttctttgagttgatggtgaagaagctcaagatggatgttgctagctaccagtttatgatgaaggtgttgagtgatgaggggcgattggatgagatgcttaagattgttgatacgttgttggatgacaatggggttgattttgatgaggagttccaggagtttgtcaagggggagttgaggaaagaagggagagaagaggagttgaccaaactgatggaggagaaagaaaggctgaaagctgaagctaaggcgaaggaaatcgaggcagctgaagctgccaaaagaagtgcaagagcagcagtagcttctttgcttccatccaagttgtttgggaacaaggaaacggatttagaatctaaacgcgagggtgaaattcaagctctcaatgaagagaacactaatgccactgcttccgaggcggagttggtggaggaaacgactgaaactgagggtgatagagcaagtgaacagttaacaggttgaagttgttgcaacttcttggtgcttagatggggaggtataataacgtaattgtgcatggatgaggaggtatgatgtctgtgtctctttaccagaaaatagttttgaatcatcaaaacctacgttaccaacattttgaatcattttacatgtaattaaatttgttggaaaggattatgcaatttacggttttcccattttacagtgcctttttatattggtgttcctgtactggagcaacaagatcagccatttatttctaaaagggatagtgttttctggggattatgatggattttcttaatttgcaagtaaagcaatgttgacattggtggtagatgacaggttagaagaaagatgaagcaacttattgtattttggacaccgagatgagttgtgaacaacattgtggtgcgtaaaaagcttacttcttttcactgttctgctatcaatgatctcctgattcaactacctttaagatgcgtgcactcgtacacactcttccaaacttttaaattttgaacaaatccaaataccaagatgttgaatcaaatcttacaattcgttgtgggtttggatggaattagattattttaatactccattacagatataattgatttaggcatgttatgggaaatttttttataataatctattttgtttctatatccgaaacaataatttttatggcaatttttttttaagagtaggcttaattatcagtttagtcctcaagttatattaaaagattaaaagattaaatatgatgttgaagtttttaaaagatt

SEQ ID NO: 78795 - DNA, 370 bp, Glycine max
  Clone ID: PAT_MRT3847_42167C.1
gtgtggggtttttttttttgagaaatcgaatcggaaagacctgggcagataaaccacttgacaaccttgagctagggcttttgctgggaaggggtatcttcccctgagcaacaaagattcctcggcttggaggattcctgcgaacacacttgatccggggcgctcaggaaaatgcaaacacaagctttctgaacctattgttgtcttctttaggagagattacagttgacagcacattttttgcctcaacacgtgaagacttagtccatgtctcagcacggttgtcccaagtatactgcctgagacactcaatgatcccgcagacaacctcgtgcctctgagactctactcctacacgcaaggatgaacc

SEQ ID NO: 78796 - DNA, 285 bp, Glycine max
  unsure (1)..(285): unsure at all n locations
  Clone ID: PAT_MRT3847_42168C.1
aaacacactcattgcacatgggaatgcgctttatttaagtgaataaaatatttcatactatttttctaatgcataaggacacanancaacctaattttaatgactcttacagttttcaagaaggcgctgtagcataggattagtggcggtagaactcaaaatttcaatcttaacgccaaaaagaacagcctgtttagctactggaaaaggatcaactcttgtaaagaaaaacaattttcttacctttcccaagggctgggcgaaaatttttttcgagccgaattt

SEQ ID NO: 78797 - DNA, 127 bp, Glycine max
  Clone ID: PAT_MRT3847_42169C.1
ggtttggattcaaaaaaaatttacacgtgatcagtgcaagcacgatcacattgcatcctcacataagcaaacaacctgctaagccaaaaaccattagaatccatcacgaagcgtaaaagggaaatta

SEQ ID NO: 78798 - DNA, 359 bp, Glycine max
  Clone ID: PAT_MRT3847_4216C.1
cggaaatccgggtcgaccccgcgtccgcttttttgacttctcttgctagactcagctgggaccgcttacttacctgttcgcgctagcgtgataggaactgacaacgtgctttggtgctgaggattcacttgaactttctgctgagcgccccttgccctggaatgatctgtgttatcatcttcttcgactagagagagagactctacgttgcttcgcgacatgagaagaggccgatgcggctgtcgccctgttgcgcttgccgtacccaccatgcccgtgacgccgcgaccggagacacctacgagcgggggactctatgccgccgggagggcctcgcgctgtcgctggcgtggggagac

SEQ ID NO: 78799 - DNA, 388 bp, Glycine max
  Clone ID: PAT_MRT3847_42170C.1
tgaaaaaaaacgacagagaggggttttcacaaaataaacaactctaatgcgtgcggggcaattagagacgcaaccatggggcgaaaactcgtgaggtgttatatgcaaattaataacacaccatactccaagtcacggctttgccgctgtgtttcttatcccaagatcacgatttactataatattatgaagaagaatggtgctgatgagtttactttctgggtgcatctgaatagttggcagaatgaaaacgatggtattgaggccctggatgctgatttgataccttgcctcatgttcaaggacaaatttgctggaaagtatgctcttcacttgagactcaaggtgcacccattggatgatattaggatcaacaagatgcttttgt

SEQ ID NO: 78800 - DNA, 184 bp, Glycine max
  Clone ID: PAT_MRT3847_42171C.1
atgagtactgtattttgttttgatggtaaaagtctgagattttcaaattcacaagcaaccataaggttttagtccatttcctttgctgctgaagagggatgtcgtaaatttgcatttaatttacaaggaagttttgttaaaaaaagcatctcagaatcaaataaagaagatctccaattgaaaa

SEQ ID NO: 78801 - DNA, 2106 bp, Glycine max
  Clone ID: PAT_MRT3847_42172C.1
ggctactccaggactcatgatagaccatttacgcaatgctatgtccgtggatttggatgatcttgctgttctaatccttgatgaggcagatcgtctattggagcttggatttagtgctgaaattcaagaacttgttcgcttgtgtcccaaaaaaaggcagactatgttgttttcagcaacaatgactgaggaggttgatgaacttgttaaactttccctgtcaaagcccttgcgtctttctgctgatccatctacaaaacggccagcaaccttgactgaggaggttgttagaatacgaagaatgcgtgaagtaaatcaggaagcagttcttcttgcaatgtgctccaaaacttttacttccaaagtcatcatcttcagtggaacaaagcaagctgcacatagattgaagattatatttggattagctggcttaaaagctgctgagcttcatggaaatcttactcaagcccagcgccttgaggctttggaacagttcaggaagcagcaagtggattttttggttgcaacagatgtggctgcccgtggccttgacattattggtgttcaaacagttatcaacccagcaaccttgaccgaggaggttgttagaatacgaagaatggcgtgaagtaaatcaggaagcagttcttcttgcaatgtgctccaaaacttttacttccaaagtcatcttttaaaagccattgcaaagagggcaggttcaaagctgaaaagcctcattgttgccgagcaatctatacataagtggtctcatatatctgagcaaatgccagcgcaaattagctttggaacagttcaggaagcagcaaaaagatttttaagaaaagacgaaatggaggccacaaaggctgaaaacatgattgcacatagggaagagatcttttcccgccccaaaagaacctggtttgtcacagagaaggagaaaaagcttgcttcaaaagcatccaaggcatccatggataacttttgtgactgacagtgaccgatcacttttaaaagccaagctgaaaaccgcaggttcaaagctgaaaagccgtattggcgtgagaaacatttgccttgaaagcagcgttataagttggaagcagctagagagatgctggaggatgaggaggaggatggtaaacaagtagaggctaagggggggaataaaaaagacaagggtggaatgtcacttgttgatcttgcataccgacgggcaaaagcagtaaaggctgtcaagaaggcattagattctggcaagattgtggagaagaataaaaagaaatctaataataattcccggaaaactccttcaaggacagaagagatgcgggagctattccagactgacatgaaggataaaaagccaaaaagaggtgttggaggaggaaagaagtcaaagagttcattcaaaagcaagtcaaggtacaagcgcaagtagtctgaggctaataatccttgtcataaatatgtgcatggaaggaccataaatctccaaaatgcgtgtccttataccatatggaggtgattaaatggagctccactgtgaatttcagctagtgattgtgggtcttttgggtggccatggtgatatggggtatggtagcagtaactactacctaccaataccctttttttttgttcattgtatctcgtgagcttggttcttatcccaaatggatagcataatttatagcattgagttttaaatgttaccaatagaaaaaatatttattttagattaactctttaatatcattgattctgctgtatatccgttaatgctccgttatttgtgaaaagctcctaattattgagtattgaccccataaaacaaaacaaatccactatgaaggtgtgagttaaaaaaaaaaaacttgtgggtgtttatgggtgcccatggtaatatagggtatggtagtagtaactactgtaaatacccttttttttcttttaattgtatcacatgagctttggttcttgtcccaaaactggtcagcataatttatagctgctcaattttgtaatcctagggttatgttgattttgtaatgtccccgcccccttagtatgtttttttcaattaaccaaaaaaaaaaggacggc

SEQ ID NO: 78802 - DNA, 1361 bp, Glycine max
  Clone ID: PAT_MRT3847_42173C.1
ggctcgagcttaaaagctgctgagcttcatggaaatcttactcaagcccagcgccttgaagctttggaacagttcaggaagcagcaagtggattttttggttgcaacagatgtggctgcccgtggccttgacattattggtgttcaaacagttatcaactttgcatgtccacgtgatcttaccagctatgttcatcgagtgggtcgtactgcaagagccggaagagaaggatatgctgtcacttttgtgactgacaatgaccgatcacttttaaaagccattgcaaagagggcaggttcaaagctgaaaagccgtattgttgctgagcaatctatacataagtggtctcatataattgagcaaatggaagaccaaatttctgaagtacttcatgaagagagagaagaaagagttctaagaaaagctgaaatggaggccacaaaggccgaaaacatgattgcacatagggaagagatcttttcccgccccaaaagaacctggtttgtcacagagaaggagaaaaagcttgctgcaaaagcatccaaggcatccatggataagtgcaagagttctgggaaagaggttattagtgctgaacaagctgaagacctcagaatgaaggagaagaggaagcgagagcgagagaaacatttgcctagaaagaagcgtagaaagttggaagcagctagagagatgttggaggaggaggaggatgacaaacaagtagagactaaggggggaaataaaaaagaaaagggtggaatgtcacttgttgatctttgcttaccgacgggcaaaagcagtgaaggctgtcaagaaggccttagattctggcaagattgtggagaagaataaaaagaaatctaataataattcccgaaaaacttcttcaaggacagaagagatgcgggagttattccagactgacatgaaggataaaaagtcaaaaagaagaggtgtgggaggaggaaagaagtcaaagagttcattcaaaagcaagtcaaggtacaagcgcaagtagcatttgaggctaacaatccctgtcataaatatgtgcatggaaggaccataaatctgcaatgcgtgtccttataccatatcaactccactatgaaggtgtgagtttgggctgtgctgcttgtgggtgtttttgggtggccatggtaatatagggtatggtagtagtaactactgtaaagacccttttttttcttttaattgtatcacatgagctttggtacttgtcccaaaactggacagcataatttatagctgctcaattttgtaatcctagcattagtttcagttttaaatgttaccaatagaaaaaaatatttatttcaaataacttttttcttttc

SEQ ID NO: 78803 - DNA, 357 bp, Glycine max
  Clone ID: PAT_MRT3847_42174C.1
atcttggcgtctgatcttggttggggcttgtcccgcacctaaggcaagaggatggtggctgcaaagaagacgaaaaagtctctggagtcaatcaactctaggctccaacttgttatgaaaagtggaaagtacgtgctggggtacaaacagactctgaagatgatcagacaaggcaaagcgaaattggttatcctcgccaacaactgtccagctttgaggaaatctgaaatagaatactatgccatgttggctaaaactggtgtccatcactacagtggcaataacattgaattgggcacagcgtgtggaaaatactacagagtatgcacactggctatcattgacccaggtgattct

SEQ ID NO: 78804 - DNA, 1198 bp, Glycine max
  Clone ID: PAT_MRT3847_42175C.1
cagcacctgttgcatatgcctcatgccccatagagacaatcaattatgtttctgctcatgacaatgaaaccctatttgacattgtgagcttaaagactccaatggatatcagtgtatctgagagatgcaggataaaccatttggcaaccagtattatagcattatcacagggtataccattttttcattctggagatgagatactccgctcaaaatcactggatcgagattcttacaattctggtgattggttcaacagacttgacttcacatacaatagtaataattggggtgtaggacttcctccacaagagaaaaatgaaaagaactggccactaatcaaaccaagactggcaaacccatccttcaggcctcagaagactgacatccttgctacggtggacaatttcttgaacctgctgtgtataagatactcttcaccacttttccgcttgaagacagctaacactatccaggaacgagtacgctttcacaacactggaccatcatgggtttgtggagtcatagtgatgagcattgaagatggtcacaatggctttcctgggttgtctcagttggatcccatatattcgttcattgtggttgttttcaatgcgagtccaaaagaagtatcatttgttagccctgccctgcaattgagaaatctccagttgcatcccatacaggtatcatcatctgacgaccttgttaagagctcaagatatgaggcatcttctggctgttttgttgtgcctcgaaggacaacagctgtgtttgtggagccaaggaaaacgtgagtcactgcttcaatcaaacattgatttaagccaagaaagaatgtaaaagttgccttgggatactaatggggtgatgatgctagttttggttcatgaggatggattcttttgtgaccttcacacactgaacacgtttggatgttcccaaataatctcctcttaagccagggatggaacctgaaataaacaataagatattagttgcaaagggaacgaatgaaactgaaattaagcaaaaaactttaacttattatagactatagaggtcagactttcagctaaatgtgattgcagtcctgagtcagcatatcttccactcatgtctaatctaaaggattagcaaatgtggaaatgcaaaaaaagcaaattctccataaaatacagttcttgaaagggtgtcc

SEQ ID NO: 78805 - DNA, 156 bp, Glycine max
  Clone ID: PAT_MRT3847_42176C.1
ctagctattagctatagctagaagtacatccactccctctctgtcattgtgcttttctagttacttccaaaataacaccagaagtagagacaatgcgttgccaagcatggcccgaccccatcgttcgagtccaatccttagctgaaagtggcctaa

SEQ ID NO: 78806 - DNA, 896 bp, Glycine max
  unsure (1)..(896): unsure at all n locations
  Clone ID: PAT_MRT3847_42177C.1
ccacgcgtccgcaacgacatcgacaacagcaattttacaaattgttcctggttttcgttatcccttgtctctccctttttctatctgtcttaaaagctttatttctctcacaaacacaacacaatacgcgtccgtcttattcttcttcttcttgtcactattcaaacctcgcaactaacgttccagttatagaaacccatgtttcagctcttcgatttgtcaagtgccattgttgattgattcatccaacgaggttcaaattgaatcaaattttcacccacccttgaagttctcatcgttttatacaaccttttttttaatctgttgcataagtttaaggcgggttaaccaataaaggcagtgtttgtggcctgaaatatcaaaagggtgtcttcaatttcgcggctttgggcaatgcagtggcgaaactcgaagtgggggtggtgaattttcaattgggtcgctaattttggatcaaagttgagaaatttcggcggttttcattggtgggggcgtgaccaattatggtgttatcggcttcgccatgttccttggcgagaagctcgctagaggagatgctcgattcccttcgtcggagagatgaggaggaggagaggaaaaaggactcgccgccggcgttgcccgcgaggccggcctcgcgggcacggcttcctccggcgccggcggtcgctggcgaacaacttcaaggttagcggcagcgagctcgccgtcgcgccagagcatggagctgggactaacggggagaatgatttgnggcagaaaaggagaagaaatggttttgggagcaagagggtgaataaggatgtggagtctccttacgtgggactttcttcagtgattcatctgggatgatttgggatttggagggtgatgat

SEQ ID NO: 78807 - DNA, 579 bp, Glycine max
  Clone ID: PAT_MRT3847_42178C.1
gtgagagtgaatgcgtgagattgtgtgtatgttgcgctacacatcttcagcccaatccacttcctatcttcaggttttatggtgcccaattgtggaagggaaagggaggtattttaaaataatttaaattgacaaaatgaattattttatttaaaccacttgtagaaactgattatgtggacttcattttggtttcctgatgtttattttaactgtgaattcccatccctagaatgaatcctcactagcgtaagtcatgagatctacaatgcagcagtttgccgttctcgatagcgtagtgaatcaatcaactgtctgtcatgtatgttgtgaggaataatttgttatttttttatttttgtacaagttcagttgcggtcatctgcagtgcatttttaggttgtatttatctatttgtatcatattgtaagacaagcagtacttgtttgcataaaacctctttgtacaaatacttgggaatggacaaccattaattgaatcaaactcgcgtcagtcattgtacaagttacatgcatgtctaatctaattaaacgggcaataatttgtgtccacatttta

SEQ ID NO: 78808 - DNA, 349 bp, Glycine max
  Clone ID: PAT_MRT3847_42179C.1
cccgggtcgacccacgcgtccgttgacttgagggatgtaaatgatggtccttgtatcccggaattgtttaaatgctaattttaccattccacctttggatatttgttgtagatgttagtctcagctcagagggtgctaaaatggcttacaatctttgctcctccccttcttgtctcttccatgaccttccttccattatttcttcttcttcttcttgtcgtaagttcaaacttcgaaactcgtcctagtttctttcaaccctctccttctaccaccctccattataaaacccttctccatgtattcttgcacgaacccattcccgagcacctaccaccccacgcaaatt

SEQ ID NO: 78809 - DNA, 626 bp, Glycine max
  Clone ID: PAT_MRT3847_4217C.1
ttgaaaaaaaatcatttttaattaaatagttgttgaattacatacatacactgaacttagacaaaaagatttacaaagtaagaactacattgaaaaccaaaaacttagaactatccttccctctatttttaacttaaaatatcaaacaaggggaaataagtccatccatttcttcgcttatccactcgttcccctctcccaaacatagcataacaacagcatgtccccaattacatcaagaacgttcatctactttgcacctccccctccaaacagcctgattcaagcattgtgttgaccaagatattcattaaacttgatctcactatggaagttgcaggctaaaagactattccctggcacacatgcccgcctaagaagcaccttcatgttactagtcacaactacctcgcactcgccagtcaccagcacttaagaagacaaaaaaaccatgggatgcaaaatttgtgaaagtgctggtgcacccaaagcaagaaaacatgtttgcactgcctctggtctaagtaaaaagcatcttcaactcctcaatccttggagttcgaacttcttgatcaggcaagggaccagaaaatattcgttgtttccgggcgttggactgcctccat

SEQ ID NO: 78810 - DNA, 428 bp, Glycine max
  Clone ID: PAT_MRT3847_42180C.1
tacgggcgagaagacgacagaaggggacacaaacacacggtcattggcattttatcgtacccacatagaccttttctataggtctaaaacaatattcccctccaaaggtgccatggtgtcctcaaggtggaaataaggattaaggaaaggtctcctgtaaagaagaagaagctgttcactccccaactattgtcacactcaggtaatctaggttgtgttttgcttaagaaggaccactatatctcaccaaacataaaagatggatgatccaaagggtagttcctcatggttaaaaattctaaatataagtgacatatttggctggaaagatcatggagagtatggagctcttgcagctatagtcataagcattcttgttcctgtcttgttttcagctttgttctttgcaaaacaaaaaaaaaataaaa

SEQ ID NO: 78811 - DNA, 271 bp, Glycine max
  Clone ID: PAT_MRT3847_42181C.1
accaatccgtcgttcgggttgcaggaggaccacttaaggggaaggaaggaaggaaggaagaatggacggtaaagatgcctttggggagggttttaggggtaccaagggttggcggtggttttggcatgggcaattcatttcttaatatttactggtgaggggttccttaagatacggagagtgggtaggcacgcgatcaggtgtggtggatactcatattataatacgcgacggggtttgtggtgaaatacaatatgtgtgtcacagggta

SEQ ID NO: 78812 - DNA, 845 bp, Glycine max
  unsure (1)..(845): unsure at all n locations
  Clone ID: PAT_MRT3847_42182C.1
gacacaaacacacggtcattggcattttatcgtacccacatagaccttttctataggtctaaaacaatattcccctccaaaggtgccatggtgtcctcaaggtggaaataaggattaaggaaaggtctcctgtaaagaagaagaagctgttcactccccaactattgtcacactcccacgcgtccggtgctgtgctgtgctgtgctgtgttgctgacaactgcttaccctaaaataaatgactttactaaaatagagacacacaaacacacaaacacaattacacaaacacacggtcaagggcattttatcgtacccacataggtaatctaggttgtgttttgcttaagaaggaccactatatctcaccaaacataaaagatggatgatccaaagggtagttcctcatggttaaaaattctaaatataagtgacatatttggctggaaagatcatggagagtatggagctcttgcagctatagtcataagcattcttgttcctgtcttgttttcagctttgttctttggaaaaaaaaaaaggaaaaataagaggtgtgccggtagaagttggtggtgaggaatgttttgcagtacgtaatgctagaaaaactgagttggttgaagttccttggaaaggagccccaaccatggctcatctatttgagcaatcctgtaataaatatacctgcaatcgatttcttggaactagaaaactaatacaaaaggagttgggttacattcagtgatggcaggaagtttgagaaacttcatttaggagactatgaatgggaaacctatggagggtattngctcgcgtgtccaattntgcatctggtcttcttaa

SEQ ID NO: 78813 - DNA, 816 bp, Glycine max
  unsure (1)..(816): unsure at all n locations
  Clone ID: PAT_MRT3847_42183C.1
tttcaggtttttttgtgccaaatatttttaaagggtttttttttttattttattttttttttttttttttttttttttatttttttttttgagtgtagaattatatatcttgtatagtaaaatgatgtgtcaaactacatgcatggttgatggaaaaccggtcaacctatgacagcccaagcacggatagagtccatgcttttatttcttatttcttacatatatactttattacatggagtacactcaagtatatgagtgtgttcagttcatatatttgtgatttttacttcagcaacatttgcagccctttcgaccgcagcatctgcatcctccgccatgtcctccaccgtgtcctcctccgccatgtcctccaccgtgtcctcctccgccatgcccccagtctccaccgtgtccccagcttccatcatgccccccacttccacctcttccccaggcatctggctgtgtctttggttcttctgcttgtgtctcatctttggatggctcagttgccacaacagagatgagaagcagtgcacagaggaagcacaagaagaaaacgggcttggtattcatctttgcaattaggttatataaagatgaggcgtggacgcgtgggcggacgcgtgggcacgtcgtgggtcgacggacctaaaaactcaaccaccactattaagcaccatagagtttcgtttcgtttcttctatatagcactgtagtactaccgagagttgcagattgaatgcacgttggtccaaactcgatgacgatcgattttgacccctgcgnacgcgtggncgnacgcgtggncga

SEQ ID NO: 78814 - DNA, 132 bp, Glycine max
  Clone ID: PAT_MRT3847_42184C.1
cccacgcgtctcgctctctcccaaattggctttgactcatttctctctcccgaatcgtcatcgggcccttcttggctcctactttccatttttatcattcttcccggaattctgtattcacttacatttaaa

SEQ ID NO: 78815 - DNA, 336 bp, Glycine max
  Clone ID: PAT_MRT3847_42185C.1
ggatcgtgcaacaccaaataagcacccgtttaatcccataacctctgcttcccatctacccacatcccattctttattcaaaatcccaatgcgctggccctccataccatccacatcctatacgaaatctcatacaaatacccatacacccaaccctaaaaaattaggcagctccctctaaaaatagacatggaaattgtgccattcctcacctataaaacctttaattggatctcaaatgtatctccaacaaactttctaatcagatataccttactgcacctttttctgacttgcaagaacataactcacttcaccctcaaataatgaataccc

SEQ ID NO: 78816 - DNA, 264 bp, Glycine max
  unsure (1)..(264): unsure at all n locations
  Clone ID: PAT_MRT3847_42186C.1
ggcagnttgcatattcacggnggcacangacgggacngcanttttccnaacggngnaggagtgctntcgangccgtgccgntgggcaacattcgncggacggtgattcgggtctcgccgggaatctaccggcanccggtgtatgttcnnaacaccaataatttcatcantctngccgctctcagncctggtgacnccgtncttacntggaacnanactgccaccgggtttggtcaccacnaanntncganggtnatngggatgg

SEQ ID NO: 78817 - DNA, 673 bp, Glycine max
  Clone ID: PAT_MRT3847_42187C.1
tggaggaattaaaatctggtatagtaaaatgatgtgtcaaactacatgcatggttgatggaaaacaggtcaacctatgacagccctagcacggatatagattccatgcttttatttcttaattctacatactatacttattacatggagtacacacgtaatgtgtgtcttcagttcatgtttgtgtttttttacttcagcaacatttgcagccctttcgaccgcagcatttgcatcctccgccatgtccaccgccatgtccccagcctccaccatgtccccagcctccaccgtgtcccccgcttccaccatgtcccccacttccaccatgtcctccacttccaccacttctccaggcatctggccgtgtctttgtcgccgtgtctttctttctttctcaacctaaaaactcaaacaacactattaagcaccatagagtttcgtttcgtttcttctatatagcactgtagtactaccgagagttgcagattgaatgaacgttggtccaaactcgatgacgatcgattttgacccctggagggaccgtggaggcagcgtgagtttgtggaagtgttattttaataataagcttaagaagaagctaatttagtttcggaggcggtggaaagtgttagagagagagagagagagagaatgaagagcggacgcgtggg

SEQ ID NO: 78818 - DNA, 277 bp, Glycine max
  Clone ID: PAT_MRT3847_42188C.1
cccacgcgtgcgcgcttgttgccgttggaattatgccctagctagctgcacaatggctgacgtgtaggagcatgatgcggatggagtaatagctgggcaggcagagaatagaacgttcaagaagaggagtatcatgggcagttgatctagctgcacttctagccatgttcagctatgtactgctgaagatgtgcatggctcatgctcatagaaaggtatacagagggttcaccagaaagtgcatggactacatcaagaaactgtacgtagatggaag

SEQ ID NO: 78819 - DNA, 1306 bp, Glycine max
  Clone ID: PAT_MRT3847_42189C.1
ggtgtggtgcgctagcgagccctgggaatccgtgttcacatctcttcactccacctgagtcttccgcagacttcagcactgtggagtacttgcttcaggtccctgctgctcccccttgctgttcctgggcaaagcggggctgtgcgacgctgccccgctcctccgcggagcggggctgaggggctcggatcagcgcgggtctgtggaagtttcaggagcttgccccaccctggcccaagcatgcccacgcagcccacctctgcggcctggctggtcttggctgttgagttcttcagagaccttccgagactcttcgtgaaaaaagggcaaactgcaagtgtataagcatgccaaaggcagatacaaatcaaattgcttgatcacctttctttatgagcaatgcatagcaaagatggcttggatcggatgcttttaactttaatgctgaacaagtagaaagaaagatgctaatataggatgctattaccagaaataggaggatgagaaatagagtagaaataaggtgaggaagatgtgttatttggattttggattgatagaaataggagagaaagtagagaaagttctctttacatatttggatgagtgctaaggatagttaaaagaaataattcaatcgtgcaaagaaactatttataacaataataaaaatttaaaatttttactataatattttttcatgataaaagtttttttagtttcataacttttatattatataaaatgaaaaaaatctctaaattttgagaaatttcatgtcaactgtgtccttttcttttctttcttcatatttccttttaaacttattttctcctttctagttttctccgtgcaatcctctcctactaatatacacataatataaaatagagtttaatgttacaatgatataaagtaatcttattagtcaatcacaaattataatgtaagactgtttatacacagttttttttttctctctctgtaaaaataggtgacactgaatcctagagtttttagcttttcaccacaaaatctaggttctttaaactaagggtgcttcaatttcggagtcaatgaaccaagtagcatatttgtaactttatatactagagttcgaataaagcttttccttttaaagtaaatgtacttcattttctaatgtttctagaaatgtgaaagtgttaaatctatagtcaggatatagatgaggcctatttgtcgcttctcatgattgaatttttggatcatataaaaattaattaatataataataatatgtaaaaaaaaaaaaaaaaaactcgag

SEQ ID NO: 78820 - DNA, 465 bp, Glycine max
  unsure (1)..(465): unsure at all n locations
  Clone ID: PAT_MRT3847_4218C.1
aggtttcctgtcatcactgtatgacgtcctccttctttggggggggggggggggcataaataccaaatggcaagagtcagtaaaggagtaagcccacggagccagtaagtaggtgagcgcacgtcggaatgtcgacccatacgaggcacagtatgcgatcgcggaggtgccgggaggaataagaccaagaataagagtgttgaaggggtgtgcgcgtagacacaagtacggggtaaccatgggtagttaaattggagtacaccaaaacccgtgggaaccaaggagcgatctgcccaagggcgcgcgcgtaacgtaatcgagattacttagtagtaaccacggtgttatgcgaantgtaagggcaaggtcgttagggtggcacgtaagcacagcagagggtgtcggcaggtggggcggccgaataatcgtacataaggggagagttatcgaatttacatgggttgg

SEQ ID NO: 78821 - DNA, 1235 bp, Glycine max
  unsure (1)..(1235): unsure at all n locations
  Clone ID: PAT_MRT3847_42190C.1
ttcctacccaaaacaatcatgatcttcagctatatattataatgcgccatcattaaataacaataatgacagtcaactatattacatatatataatataatcatagatgctaaaaatgtacagctatttctaatccaaacttggcaaaaaaaaaactataacacatataataagcaaactcactattttttttttcggggccattgagttcaaaaaagaaccccatcactgtgttagacttccaaatcttaatttactatgattctatatatagcatgtgtgctgttgggttctgtcaatcaacatcacggcacaaaattaaaaaccaatgccaaactcatgaacaagatgaagccatattgtttagctgacaccaggttgaatcattgggaaaaaggaccaatccttggatgcctctctctccttccctgcaactttctcattagcccaccagtcagcaactatattgggagcaagagaatctcctccatctgcattatcaaaattgaattctttagcggaagaaagagttaaggactgatccttctcatgaactgttgttgccttatctccacccaaagtggtttccagtggttgatcattgtgagcttcagaaactacttgtttgtcatcaagcgcactttcttctgatttttcttctttgtctgttgttggagcatcatttttcaattttggcaggacattagtccacgctgatgctgctggcttgttttccagagatttcaacactttttgagcggataattcaaatgaaactctatgatttatactaatctcattgaggcgattattgctaggatgtggggacattttgatctcagaaacccaatgatttgatagaaaaccagattgagttgtggaccttgcagcatctggggtcagagacccggaaccatgatttgacttctggttttcacaagaagacagtttattatctaagttgagaagcttcggagggtctgctctttggaaatcaaggatatgggcgaaagtggcattaaattcagagtcagggagtggcgatgaggtgccggaaactgagatggcagatcttggtgatatgagttgaccaacagggcttccaggatgaaactgataggattggaagtcatagtgagatatttggaacctctgaaaggtttcactgttcttattgttggggtcaagtagctgagcaaatggaacctcgggcgagnaannnnnnnnnnnnnnnt

SEQ ID NO: 78822 - DNA, 466 bp, Glycine max
  Clone ID: PAT_MRT3847_42191C.1
cctcgttctcgtcaatccgccagcgacgtgagaaactggtcggcatcgcctaagatgaagcagccgcgacccgccccctagctggctgctcaacagccaacggccaacaagccatcctccctcctcctctactctctacccatcgtcccatcaccaccactttcgcatcgccggatagcaacacccccttcttcgtcatcgccgctgtacatactcgccgtcgcagtcgcagtcacagtcgcgagtagcccggggcctcgacgctgtcaccggcttagccacaagaaaggctgcaatcccatccgctttgatcaggacccggcagcctctgcaccactctccctcctcacccccatcatcgcctccatctcgcccgcctgcacacccttcgccgcttgtcgccgtccgcaaaaaatatcatggcttccaccaaatcagccaagtccttgacagtcgtcctcaagct

SEQ ID NO: 78823 - DNA, 397 bp, Glycine max
  Clone ID: PAT_MRT3847_42192C.1
tagcttcgcatcttgcgtccagattgcgcagcaccggagatgcttctgtggcagtttttttatttgtgacatgaacgcgggactattctcgggctacgtgtgctgaccctgtccatgttttaggcagagatggtcattgctgatggctggtcttccggtctgactggtctccagtctaaatcagaaacaaaaggtcccgaattgagtctttcaagcccgtgtgattcagtcctctcaagtccttaccctactaactcctctgcggaaggaaatcctggtctggacaagataccgaattgttaaattctcgccggacccccggagaaagaggctgcccactttggacgcgatcctatttgataaagcatctactacttctgggacatctcaatcttct

SEQ ID NO: 78824 - DNA, 237 bp, Glycine max
  Clone ID: PAT_MRT3847_42193C.1
ttctgaactatgaagtacagagcgtttgtttctggtttttggatactgccactctttcacggtgaaattcaagctcgttttcctttcaactcaaaatccctaatcatcaacacgaagggtttgtggaccaaaacgctgcgtttccatttcactcacaatctcaagctaacccagctctatcttatggcgtatcaggtagagataatgcaggaaatttccatcattgcttcaaaagga

SEQ ID NO: 78825 - DNA, 286 bp, Glycine max
  Clone ID: PAT_MRT3847_42194C.1
gaattaggctagaggctccaccaacactcgcattcgagaatgcctatggttcgcgttcgtggcatgagtcgtcgttgcatggacgacgacgactaggaggaatacgatgagcaagacgagcaggccgcctacttcatcgaggacgaggtcgatcaggtcgccaatcttctcattgaggaggacgatgacagcctccgaatactccgcggctgtggcggcatgaagatgggaagatctggcttcatcgatgactacgccgatgatgttgacgtgcacaaggtggagg

SEQ ID NO: 78826 - DNA, 226 bp, Glycine max
  Clone ID: PAT_MRT3847_42195C.1
atcgattgactttattgcaggggtaatgcgtgcataaagtccaactagtgtacattatcaggtctaattattaccatatacgctattaatcaatgacaatatgatatcccatgatcgaccagttatccttatgagcacactcttaaagacctttggttacctccacattcaatatctacctcctatatagactctacatctgaatgcagctcaactgctatcactt

SEQ ID NO: 78827 - DNA, 298 bp, Glycine max
  Clone ID: PAT_MRT3847_42196C.1
atcctgtatagcgggctcgatacacacatccacactttctgtcactcagatgaagactgcagccattaccaatgtaatctggagcaggaatctttatactgactacgatcgtaagcccagctgcgtattagaatgggtcagccactgtgtctacagttctagctgctttgcgagcctcactttgcttgtctacaatagctccattctcagtgtacttcttagcattatcccaatcaccaccagctgtgctcagacaaagcgccatactaataccagacactggtgcccacatgagcaa

SEQ ID NO: 78828 - DNA, 526 bp, Glycine max
  Clone ID: PAT_MRT3847_42197C.1
tcatggaacattgtcccacgtaattggcaatttggccaaaccttcgctggaaagaattttagaatctagttactatcccgtgtttggatcatttgcgtttttgaaagtgttttcttttcttttcccgcctttttttttgttttgtttttggttgtttgctatctacaattttccttcgaatgtggatacatatggagaaaatggtagtgaacctttttgacttttgatcatgttttcgggagtggagtgaaggatcaattatcaattatcatggggcacagtgtacatcttggagagaaaatgagggtaacgaagtgtgatttttgtcgggatcaagctgaagtggctgcaaaggcaaattcataagcccgcagcaatgcttactgcatatttattaatactactatatgatttcatcatttgaggattcatgtttggctttttcttatattattagtaatattgattttttaatcttgtataattgccatgagacccgtgaagtaactaatgatttaattaaaaa

SEQ ID NO: 78829 - DNA, 803 bp, Glycine max
  Clone ID: PAT_MRT3847_42198C.1
attttcttattactccaacgtgtgtaccagtagtagtagtttatatggttcctatgtgcacacggtgaaactcaacactttagttgttaatttctctaaagctcaaaaaccaacatatcccagctagttgttgaagctaattaagtcccccgtagccacgttgaacttcttcaagcttaaaacttaaaagaaaattagaacaattaattataccaccgtgtaactgtcaaataggttttaattgggtgtgcaaaagtcattttagttatcttataacacattgtgctagtgctgattatgtgatgtttcacttgtgtgtctctatagtctataccatcaagttatttgtttctcatgtttacaaatccacctttgtttaagcttggcactagaagactttgctaaataaaattagaaatctcataggttgcacaacaaacaccaacaaccaaggtaagcaagacccaggaaacaaccccagtcactaaggctcctgcaacagaacaaccagcagctgagattcctgcaacagaacaaccacccgctgaggctcctgccccagaattaaccacccaagcaccaaaggaagaaaccatcgaggcaccaacagaaacagtagagaaaacaactacagaagtagccccagaggagcctaaagaagttccagttgagaccgaggaggtggtggcaaaggagacagaggaagagaagcagcagaagagaatcagaggagaaaactgaagaagtgaagaagaagcagaggagcctaaggaaactactgaaacagaatcagcagcagtagc

SEQ ID NO: 78830 - DNA, 369 bp, Glycine max
  Clone ID: PAT_MRT3847_42199C.1
gttgggccgtttttggacgagggtaggatttttttggaaaaattcccggttcagggctcgggcaaaaacaattcgggggggtgagggggtttttttccctccccgaaaacaagggggttgggcaaaaaccgagccttcttgggcgggaaattccaagggccccccttccattttaaggggaaattattgatctttgcccccgggggggccccctacccccaaaattttagaacccaagccgaaagggggggcccaacccttttgtccgggccgctgaaaaccaaaaagggcctcctttcaccttttaattttgccctttcccggtcacccccttgccttttaaacccggggggggggggggttaaaacc

SEQ ID NO: 78831 - DNA, 695 bp, Glycine max
  Clone ID: PAT_MRT3847_4219C.1
cctactcgtcctgtctttaacagaactgatttcggggtttctattgagtttttcccgaattggccgcttaatatgatagttatattgcggatttcagtttacaacagcttgtgatgcgtgatgtgtttgatctgcggagaaatcggttttgtgatctgacatgtggattgattcaatttttatttatttatttatttatttatttttatgaggctgagcatgtggatttaacttcttttatttgataattatgcgtggaattttcaaataaggcatatattcttgttctgtttttgtttttggttgcatatattcttattcttttattagatttattttggtgatgtttcttatattaaatttattaatgagtaaatatgattttattttgggatttaagtgacgacaaacataacgcggctttttatttttttattgatgtttacttattttggcactaatcactgtctgcttctatcccctttatttggacgatactgggtttgttgaattattattatttacttcgctagttggcgacatattcctataacatttcattgttcccaatctacaaatatagtttctttttttgtaagcatttgattttctgtggcaagtttcaactctattatgttgacaatccttttttttttctctttcctggagtaacaatttaaatggaaaaaatatta

SEQ ID NO: 78832 - DNA, 261 bp, Glycine max
  unsure (1)..(261): unsure at all n locations
  Clone ID: PAT_MRT3847_421C.1
caccctttttttatttcccccaaccnaaagtaaaatagggggaccaattaacaacccttcgggctattaaaccactaatctgattgcattccacccccttaacttgccctttttctctttcttggcatgtacataaaaagaactctacactgaaaaacaccaccaagtgcatggcacgtgcctctcatgttccattaagaaaacaaaaacactaaagataaacaaaaaaggtacaataacacaaacctagcttctctactt

SEQ ID NO: 78833 - DNA, 383 bp, Glycine max
  Clone ID: PAT_MRT3847_42200C.1
accaggggaaatggccaataagcatagattggttcgtacaccgggaaaaaaaatatggggtataaggtgaggacaagtatgaagagcctgtgttacacagaagcttgaaacatgaaacaatcataataatggagggtggggattgtatgaaccataacatgactggagctatacataaatccatacactgacaaatgaacagaaccagaagtggcaatcacatagaccttctccacattatacaatatctgacaaattttgagaacagaaatggaacatgaactgaaattgggatatacaccgaacacgatgactacagcaagaccgttacgcctaacttatgccatctgatcttaaaaaggtatactccaatatgggttgag

SEQ ID NO: 78834 - DNA, 501 bp, Glycine max
  unsure (1)..(501): unsure at all n locations
  Clone ID: PAT_MRT3847_42201C.1
tcctctagagtggccgcccttggggttggcttttttttttttttttttttttttttttttttttttttttttttttnnaaaaaggggcccaccaaaaagtttatattttcttccttttttcaaactactacaagagggggagaggaacacataaccaggggggattggttttttttacgggggggggagtctggaaatcgaggcaaaaacaaaacaggccgcagcagagctaccctcttgatttccactgaatttttacacatttggaatccagggaaaccgagccttccctcccgtgggcgggggggcaccggagtcccataaaaaaaatggtcatggggggcttataatccggatcgctctcccgggtnggaaaaggagggggggtgatttttcggccggcttttaaagagggggttaaaagccttgaaaaaaattcttatgttgggcctgaaatcccccttttactgcacccacagggcaatttcgggagcacttttg

SEQ ID NO: 78835 - DNA, 262 bp, Glycine max
  Clone ID: PAT_MRT3847_42202C.1
tcagagttccctcggcataagttcctccattactctttgcttccatgtagctatctgttggctactggttcctaaatttggattcggtaacttaggagcagcattttttattggtacttcatactggctgaacgtgattttacttgtattatacatgaaattctctattgaatgtaaaaagacttgggtaccaatttcatcggaactattccatggcattggggagttcttccactgtgctattccttcagctggaatgatc

SEQ ID NO: 78836 - DNA, 384 bp, Glycine max
  Clone ID: PAT_MRT3847_42203C.1
agaaatttgaacccaatgatcaaataatcccaccatccaaaatgctctccatctttctcaatctcttagtgttctctctttccttccaaggaagcaattctattagtcccttatttcgtttctgttttaaccgcgaaaattacactgatcctagcccttatgctaccaacttaaaccagttgtttgacctgctacacaccaaagtgcctcctactggttatggatatggttccattggccaaggcatggaccaagtgaacggtctagccttgtgtcgcggtgacgtcaacgccacaaactgcatggcttgtgtcaatgaagcaaccaaaaagcttcaagagaggtgctcaaagaagaagggggcaatagtatggtacgattact

SEQ ID NO: 78837 - DNA, 270 bp, Glycine max
  Clone ID: PAT_MRT3847_42204C.1
gttttagcctttctccataaggcaaggcctgtgagccacaagctgtaattgttggcttcattgactaaccaacaatgactcaatgaggatccacattcctttcgcttctctcttaaggaaaaaattcccatacagttcttaaggcgttgttctctagtgagactaggagttttatttggaccatctacatattaaaagctttcatttaaggtttatacagattggggaagcgaggcttacttttcatataataacagcacaaagtaaaaa

SEQ ID NO: 78838 - DNA, 203 bp, Glycine max
  Clone ID: PAT_MRT3847_42205C.1
tcaaaagcttacaaacattcatttacaacatgtacaacaaactctcaaaataaggtaatcgtatattcataaggctccactcaagatacaaacaatttactcacatctagctcttagactaactattacacgcttacaggctatcaatgttatttcataacatgatcatccgaccaaatattggaataactaattttataaac

SEQ ID NO: 78839 - DNA, 315 bp, Glycine max
  Clone ID: PAT_MRT3847_42206C.1
gggggggacccaaacatttattttactttcacaagaaggaaccccccttaaaatttaaaaatggacaatggtttttacaaccatgccctttgtcatttaaaacaattcacattgggggaaaattgtgaagaaaacccccaaaaagaaagaaagggctttggttttacacaaacatttacccaattaaggacacaaatgggggtcaatcgacatttaaaatggacttcctaaaaaaaaaatcaagggtggcatacatttttaaaagagagctgggagaacaaaaccctgggttaagatacactgagcccaaaattt

SEQ ID NO: 78840 - DNA, 342 bp, Glycine max
  Clone ID: PAT_MRT3847_42208C.1
gctgtctcgagtctttgtatacactcaccaatggacgagtgatacagcaggaagcaagacccggactggtacctaaagacacatgggactgtggtctaagtaacaggaccctcagccacttgagtagccccaagtatcaactactgccgtgatggacccggacgttctgaacatgctcgacgatgccgccaacgtcacggagcgtgagcctaacatgcagggtgtcgactctgacattgacagtaccctggggaacagagatcttccgctctggaaggacgatatcaatgtctatacctgcgtggctcacaccggacctaggacacttgttggaagcattcg

SEQ ID NO: 78841 - DNA, 700 bp, Glycine max
  Clone ID: PAT_MRT3847_42209C.1
agcctggaatcctctagagcggccgcttttttttttttttttttttttttttttttagcttaatgaaaattcaggtgtctaccctcagattttgccaacaaccccagtagatggaggagaaccttgaagggtattaaagagcgtcatgggagggagagaaagggttggatgataatgatccatgatctctctggctcacccgttgcagctgcctccgtgataaccccatttgtcccttcccctggttcagacagagtatcaagatcaaacccaggtgcatggctcattcttcgcaccaacaatggtgcctctgtgagtagctggaagccatggggccgtctcgaagcgtggcgagaacgaggccctgtcgatggcttgggctacaagtttgagctcgtcactgagaatggacctgccaatgggataccaattgctgaggccacaatgaatgtgaaaaagggtggccagttctgcattgactacaaagtgatgagggattctggattgggttcaaggttgaaaggaaaagggtttgtgatgggttccacagtggaaggtgaaggcaaagttagcaagcctgttgtgcaagttggtgcacagcatgtgacatgcctggctgatgctgctttgttcattgcactttctgctgccattgatcttagcatggatgcatgcaagctctttttcgcataaactaagg

SEQ ID NO: 78842 - DNA, 343 bp, Glycine max
  Clone ID: PAT_MRT3847_4220C.1
tcggtttgaggaacatatataaagggtctggaatagggttgagagggatcaaaacgcacaccagaacacggtactgagttattagtaattgtgttgcgatgtgttgagcaagatagaaggatcaagaaaggataagacgaaagagggaatagggttagggctaggtttagggttaggtagaggatgcctgagaacaaacgtgaggtagcggagaacatgatgattggaaagaacgatgctgaccaccagaagcgagtgctggtgttcacggatgacaggcaggagtacacgcaagtgctgcggatgcttgataacgctcggagcaaagcgatgtgcatccacg

SEQ ID NO: 78843 - DNA, 516 bp, Glycine max
  Clone ID: PAT_MRT3847_42210C.1
gaccaacgcgtcagcccacgcgtccggagaattgttcctctcttctcttccattcgtgtacgcgcaaaagaatcatgacgagttcctctgctgccgctcgcaagaatctgagtaagattgcctgcaataggctccagaaagagctcgtggagtggcaggtcaatccccccactggtttcaagcacaaagtcacagacaatctccagaggtaccagattcttctcaatccacaccctaaatattatcgatttcgttcttccattattcctttacattcctttgctttgtttctctctggaaggtgggtggttgaagtcactggagctcctgggacactttacgctaatgagacctaccagcttcaggttgattttcctgagaattacccaatggaggctcctcaggtgatattcttgcatccggctccgctgcatccccatatctacagtaacggccacatttgtttagatatattgtatgattcatggtctccggcgatgacaggtagttctatct

SEQ ID NO: 78844 - DNA, 761 bp, Glycine max
  Clone ID: PAT_MRT3847_42211C.1
aaaccggctccgaaccgacgcacagaaagcctgtgcctcggcttcacgttgtggtccggtccgaaccggacccgcggttcgtgtttcagttcgggggagaaccggagtgtagcccggtggttttccagattcaggagaataatatcagacagcctgtctttagttgcaagttcagcgcggatcgtaactctagatccaggtctttaccctcagattttgctaaaaaccccagtagatggagaagaaccttgaaaggtgttagagagcgtcatgggagggagagaaagggctggatgataataatccacgatctctctggctcaccggttgctgcagcctccatgataaccccatttgtcccttcccctggttcagacagagtatcaagatcaaacccaggtgcatggctcattcttcgccccaatggtgcctgtgtgagtagctggaagccatggggtcgtctagaagcgtggcgagagagaggccccgtcgatggcttgggctacaaatttgagctcgtcattgagaatggacctaccaatggaataccaattgctgaggccacaatgaatgtgaaaaagggtggccaattctgcattgactacaaagtgatgagggattctggattattgggttcgaggttgcaagggaaaggggttgtgatgggttccactgtggaaggtgaaggcaaagttagcaaacctggtgtgcaagttggggcacagcatgtgacatgcatggctgatgctgctttgttcatt

SEQ ID NO: 78845 - DNA, 1003 bp, Glycine max
  Clone ID: PAT_MRT3847_42212C.1
gttggtacgtattataaacaatcctccttgcattttattttattgtcattggctcagggtctcttccattcacaaccttaaacctttctttcttgtaaactttattgattgattctgagaatagaactaagagggtatagacatggctagcgcaattgcagcttcttttttggttctgcttctggctttccccactgtatttggagctgaccatgaagttggtgacactagtggatgggccctcggagttaattacaacacctgggcctctgggaaaactttcacagttggtgacactttggtgttcaagtatgactccactcatcaagttgatgaggttgatgagagtggatacaacagctgcagctcaagcaacagcatcaagaactaccaagatggaaactccaagattgaattgacttcaccaggcaaaaggtacttcttgtgccccatttcaggccactgtgctggaggcatgaagctgcaaattaatgtggctgctgctagtgggacccccccaacaaccccaagtggcaccccaccaaccaccccatcaaacccttctccttctcctccctctgagtcaggatccaccaacaccacttcaccaccaaagcctagtggagctgtaactgtttccagtggcattggccttttggtggggtctttctttgtgtcagcaattatgtttggtttcatgggctagggaagaggcagtgctgttttttttttattctcctttttattaatatgttattgttttgctgagagtttgtgtgaatttcatcatttaatccagatgtatatctaatcttgatatgtatctccttttaatatttaaaaatgacacatttctttagctgcttccccccctattcttttgatagctgggatgatggtgacattatatatatctaatatcccttgctttattttgttaaaaaataaaaaaaaataaatccaaccaaaaaaattgtagcccacttaaatagtggtctttttg

SEQ ID NO: 78846 - DNA, 309 bp, Glycine max
  Clone ID: PAT_MRT3847_42213C.1
ttatctttactagaaccgaaaatatatttatgccgcctgattatatatatctttacaaaaattgttagaccttggatatattattaggcactggtgcccgatgctttttacaaccagcgaacacaccggactttggtggcgaccgtttcatttcttattgatttacaaccttttttttacacgttaaacaagggagccaatacctacctgcagaagggagtgatacaatggcgtggagaatccactgtttttatagaatcaacccgggtttgtggcttcttaactgtgaacataaaaaaagccctcttg

SEQ ID NO: 78847 - DNA, 184 bp, Glycine max
  Clone ID: PAT_MRT3847_42214C.1
tataaccgctattccttgaattttatatatgagtggtgatgctgtgaactcaattgttactgacatgctccgatggcctcataggattggggttccacttggtggcattcctgttgataccattgaattggaccttagaccctacggaagacttgcactgcctgtactgaatgcgactgctcta

SEQ ID NO: 78848 - DNA, 302 bp, Glycine max
  Clone ID: PAT_MRT3847_42215C.1
aagacaaacattgtttttatcacagcacatgcaaaggaatgggagggtagggataaataggaaacacgaagggtagaaaaatataagaacgtaggagagagaagaggtcaatttggttcatctcaaagtttatcaattttaatatccgaagtttagggggagggtgaaaaaagagtatggtggaaagaattaatataagagcataaaccaaatatgatatgtataaaagaaacaaaattagaagtggagaggaaattttttgttatgcaatgataggaatgggatttttgttgggggtttta

SEQ ID NO: 78849 - DNA, 1622 bp, Glycine max
  Clone ID: PAT_MRT3847_42216C.1
gacggctgcgagacagcacagagggggctcgacaggacagctcaaacgagacgtcgtggtgaatgaattattcgaaacctttcaatcttccataatcccgcaaggtaaacgacggtgacgattggtgggtggcgccgtacgcctcatcccatccatcgccatcggcaccttccttaaacgacatcgcgtccatcaccccttttctcttcctcacagtcacagcagtggtagcttcccaaaaaagagtgccaatggcatcttcttcagactcatgggtgaaggaatataatgaagcactgaaacttgctgatgatatcagtggcatgatttctgagcagagttcatttcctgcatctggaccagaaacccagcatcattcatctgctataaggagaaagattacaatattggggaccaggcttgatagcttgcagtcccttttgtcaaagcttcccggcaagcagcccatatctgagaaggagatgaatcggcgcaaggacatgctttcaaatttgagatcaaaagttaatcagatggcttccacgttgaacatgtcaaactttgcaaatagggatagtttgcttgggccagaaagaaaaccagatgcaatgaccagaatggttggcctggacaacaatggacttgttggacttcagcggcaaattatgaaagaacaagacgatggccttgagcaattggaagagaccgtggcaagcaccaaacatattgcattggcagttaatgaagagctggatctacacactagactaattgatgacttagaccaacatgtagatgtcacagattctcggcttaggcgggtgcagaagaacttagcggttttaaataagcgaaccaagggtggttgctcctgcatgtgcatgctattatcagtggttggtatagtggctttgattgttgttatttggctattggtcaaatatttgtaatgtataaatacccaacttggcttgagtctgcttttcatctttgtttctgccgtgtgcactaaagaatcataatcaggtttccccatttctcttggtacttttccaatgcaatggaatttgttgaggtcgtgaaaggcgatgtattgtaattggcatacttggtgttttatatatcgtgtgtttttctcttttacaaatatgaaagtgaatgctactggctggagtatcaatgtggtgagttttcacatgttagagtgcagaagaacttggcagtgttaaacaaacgcaccaagggtggttgctcctgcttgtgcatgcttttatcagtcattggtatagtgggtttggttgttgtcatatggctgctggtcaaatatttgtaaagataaaaatacccaaactcgtgaagtttctctttatgtttctgaatgtgtgcactgaaacatgattgatttttcttggtgctttggcaatgacatggaatttatcaaggtattgaaaggctttattatgtaattgtcagatttgaaatgttgatacccttgagttctctttgtaaaaatcagtaaattgaggtgacttccattaatgacttgagctcttgcactctgagcgtttgcgtgggtgggaagggaaataatatgtattgcagaagctgcaatttcgttttac

SEQ ID NO: 78850 - DNA, 550 bp, Glycine max
  Clone ID: PAT_MRT3847_42217C.1
aatcttaggacaccttcctacacagcaaacattgctgtggatgagaataaattttccatgctgatgatgtgctttgtttctgttccactcttagtaggcccaacaaaattggtgatattatgttttgggttttgcttttttctggttgattgagttagtggggttacgctattttcaactttgatgagcctccggccccggaatgatttgcgggtatgatcacgatcattaatgaacatctaagggactgagttatccagtttatttcctgtttttttttttaattttttctttagatttgggttttgaaactttggttcttgtttaaattttaatattttttgtgattggggctaatggttgaaaggcttcagctttctttgagatttttgcttgcactttggaacaatccattggtgcaattttcatgcagcatttggacgttggggaactaaattgcttatgtcagaattgtttttttattatttatttttgagttaatttttaccacgaaatgttgatgttattgatatgttgccatcgggttgag

SEQ ID NO: 78851 - DNA, 495 bp, Glycine max
  Clone ID: PAT_MRT3847_42218C.1
ttcatatacgcttcccaaatcccatagaaacacaaacaccatcacatcctccactcactcctcaccgagaaaaaagaaacagacactaatatccgatagatccaatgggaaagaaatctttgaagttgccctctcttttcaaaaccaaagaacccccaagaaatcaacatcatcatcatcatcatcataatcataatcctaatcatccatggcaattcatgccctcttgtggccactcaaagaccctctctttccgaggtggagatgatgacatgttcaagacagttaactctgtgttcttcgacccttcagctgagagcactattgaaactccaaagtcatggttcacaacctcatctgaatctgcaagcatctcaactgagtcagaagactaccactactgtgatggggagtctttggagatgttggtacgtggtgtgaggtcagagaggctttttttcgaacctggtgacacaagttccatcttggaaaagg

SEQ ID NO: 78852 - DNA, 126 bp, Glycine max
  Clone ID: PAT_MRT3847_42219C.1
ggataatgtctctacacaaagccaactctatataaacggaggttttttaaggaggatgtgcgagtgtattttaatcgttaactttccacaacccaatatcacttcttggtataaattacctttcaa

SEQ ID NO: 78853 - DNA, 306 bp, Glycine max
  Clone ID: PAT_MRT3847_4221C.1
cattcttgtttaatgaacataattctttagttactgcttttccaacaagaaatacgagatgacaaaatggaatatcccaaatcgaacataacggacccgggagtggaaatacaaaggaacaacccacaggacccactggaaaaaatttccacaaagacaaagggggggtaaacacagaaaaaaaccagccccccagatcatgaaactatgggggggtcatcgaatcaagcaggggctcttgcggccaacaaatggtggaacagacagaaagactctgccaccgactttgccgacaaagaaggacac

SEQ ID NO: 78854 - DNA, 233 bp, Glycine max
  Clone ID: PAT_MRT3847_42220C.1
cggctcgagccagttgcttttgatgatctggatcttgctcttggcattctgtgttatgatgaacactatgactgcaggttttattgcaatgtatgccactcttgctagcagctacgtggactgctgcttgattccagagtggcgctgctacattggaggaaagggtgtacttattccattgatccacatactgctcaaatgcactgcctatatggtcatagtcatagcttagg

SEQ ID NO: 78855 - DNA, 555 bp, Glycine max
  Clone ID: PAT_MRT3847_42221C.1
cataatctcatctattactctttacatcggttggagaacagtacagcagctctcttcacttgtgtaacaaaaacggacagacgacagcctttcattaagcttagtaagggattagtggtgtaccaagaggctattgaaccgttaaccctatcaaaaaatactgaatctgagacctgctctgaggaacactagaggcacgttaccatgggcatgcaaaaagctcgcacgccggagcgtgtgcaacacccggctcaaaaaatgatggacgcttaggcggcacagttccttaattgtgaaccactgatcaaattacagtacctaagcattccattaagtgagaaaccgcgcatcaactcggtacgaacttttcgagggggggttctttagccgggccacttcacaaaagtcagcctgcacgtctctcatttttcatctatccacttactcgactcttttgacgaagaatatctcttatatgctgaagaccgagagctatgctcttctcgggcctctaactgcctattgcataacatgtcctgaacgcgctaccgaaaa

SEQ ID NO: 78856 - DNA, 361 bp, Glycine max
  Clone ID: PAT_MRT3847_42222C.1
ctcgttcggctcgtggggcacacacccctcgcagtcacaatggctcggaccattgcctccgacctgtgcaagaccggccgcccttcgccccaaactaaagccaaagctatggggcgccggcacaaccaccattggatgtgggaccaccagacaacaccaagaatcgggacgtggggtgggacctgaaagccttttcggctcgctgaccctctctctcttcctgctttacgccctctccctggggtggccaacttcttggggatgccccatccgaggagccgaaacaagaagcgaatcgaaagagcaagccgacacgaagctcgagtgctcctggagctctaccaagtcggcggcgcccccg

SEQ ID NO: 78857 - DNA, 375 bp, Glycine max
  Clone ID: PAT_MRT3847_42223C.1
gcaaagtcaatgttgtgaccagtttttctgtttacaataggagtggcctctgcgaatcctcgactccatggctgaatcttcttattcttcctttctctctctcacaacactcacactctcacctgtttccccaaaacctttccttttcacccactttcactccctccttcaccctttacgctcttcatgcctaccaaagccacagcttcgtatggcactgtgctagtgctgctgctgaatgtgataggccaacggtgatattcgtgccgcatttcgtggtcaaagaagattaccaaaaacttctgttgtatcttcaacagaaaatcccttcatgtgaaaatttgagtgaacctgctggggaatattcactattcc

SEQ ID NO: 78858 - DNA, 120 bp, Glycine max
  Clone ID: PAT_MRT3847_42224C.1
gaaaatgaaaatctcacctgataagggtttctggcaccctggattgtggggttgctacaacaaacaaaagcttaactggcaaggaaaggtctaggaaggaaaacttcaaacatattacat

SEQ ID NO: 78859 - DNA, 311 bp, Glycine max
  Clone ID: PAT_MRT3847_42225C.1
gtatcctgaaaatgaatacctagatagtctaatctgtatatcatgtaacaaattcaaactaattccaattacattagaaaaaattactctttactcgttaggaggtgaagagcttgaaaatctaataattgcatgcattagaaaccatttattgtattcctccagctaggtgcatgttctgcttttattaaaagctatctaatttcttgggaaaatatacccctacagggtacaggtatatccgccttggcttttccctgaaaaaccaagacattttttgagggagaatattcggatatttcccatttttt

SEQ ID NO: 78860 - DNA, 197 bp, Glycine max
  Clone ID: PAT_MRT3847_42226C.1
actgtttctcggccgcggacagagggtgcgggactttgcaaattaaaaagccggacgatggtgagatggtgaagacaaccttcccgcagaggacatacactagacgccccctatttttggccctggacagggcaagggcacatactcttaatgtcatgagcattaacctgagaagggatgaactttgactcgagaga

SEQ ID NO: 78861 - DNA, 503 bp, Glycine max
  Clone ID: PAT_MRT3847_42227C.1
gggtgatgaggagaactacctgcgactgtcactgaacacacagaagtgggagcttacttcttgtgtttggtactacacaatgcgtaaggaaatgactgctccaaaaacatactggtgaacctctaattaagcttgctgtcatatctgaacactctaaatccaacataataatcatacaccaggatgctcttctaaatgcagatccttaagaataaatatattatcgagatggccactatcggatcgaagagatgccttgaaaagccaagctattaaaattcatcctgcgccttccttttccgaggggcaaaaatttcaattggcagaattatataactcctcagttctctagatattctcaaggccattattgaagatgcgcggtatctggcgaacgttgccattgattctactggtggccatactgtcaagggggaccttatggccacactactttatgagccccctactaaaacgagactttcatttgaccctgccgtgag

SEQ ID NO: 78862 - DNA, 115 bp, Glycine max
  unsure (1)..(115): unsure at all n locations
  Clone ID: PAT_MRT3847_42228C.1
tcaagaagaaccaangccggggctgcggagtngagggttgtgtntggtgccagtgtcatgcccactgcncgttggnagtgacactggggcagatcattgggctccagccctagga

SEQ ID NO: 78863 - DNA, 284 bp, Glycine max
  Clone ID: PAT_MRT3847_42229C.1
aacaaacaaacactaactttactttcacttttgctatccaaggagattactttgtgttcatctataaggggatggagaattctccttcaccacaaaaacatcaaacattcacattaagagtccaagcatataattccattttctacaatttcttaatgcatccttataaagacactatttatctacacaccatgcgtcaattctatagatattgcacgatttcagaatccattgactatgggtaccctaattcactgtctattttcaaaaattcaactttcggt

SEQ ID NO: 78864 - DNA, 166 bp, Glycine max
  Clone ID: PAT_MRT3847_4222C.1
caatatgagctcactcaaatgcaataatactactattcacagaatcattttataactcattaaataacattttatcaaaatcccatcatattgccattaaccttataaattccatgtttccagcattttttccatattcttcatctccctaactatcattacttaa

SEQ ID NO: 78865 - DNA, 428 bp, Glycine max
  unsure (1)..(428): unsure at all n locations
  Clone ID: PAT_MRT3847_42230C.1
ggggaaaccctttttttttttttttttttttcttttttttttttttttttttttttttttttttttgaccgggaaaggccaacccctaaattttccacaggggcccaaacaaaaatggggcccaggggacaacaaaaaaacggaaaaagctccgataaaggggttttncaaaaaggaaaaaccccccaagaaaaaaaaccccccccgggggggtgcgggggggaggccaaattggtggcacccccccccggagaaacaccgcccggggcaaaataaaggggcgggaaacgctggggagaagaagcccccccccccccccatttcccatcaaaggaancatccccaacctcccctttgggccccccctaagcgaaggcctcctcacccccataacaatcacccccgggttaaagcccccccaacctagc

SEQ ID NO: 78866 - DNA, 1372 bp, Glycine max
  Clone ID: PAT_MRT3847_42231C.1
taagctcggaattcggctcgagctttttcccttgaaagctcaaaattgttcatgaaagcttcgtttccgattaacaattctttgaataatagagactttactttctgaggttttaacccctttaaggctttccctaacttgaggctgtgctcatttgctgagagttttgctgcaaggacttgacacaaattgtgtaaatgtctgtggcttttaccaacctctcttggtggttgtggagtggaaaacatcaagagccaagaatcccaaatgggccttctataaattcttccgccgattcaaatttgtgggaatcggatgttttgaggtttcctttggttcaggcgaatgtggggtcctcatctagaaaggtgaagcgcaaatggcatagtaggggggagaggaaggtggatagggaatatgatgttgttctggttccatctgatgttggatgtgtttctggttccgaatctgatgattctgactggtctattggctggttagagcctcacggacctggcttcccaagtgatgatgaaacagataacaggtttgctgtgattgttccctgttacgggcgagactatggcagaatagtggaggatccaaaaggcaatttactgaggggtgttgggaactttccagacagttattcagatgagagcaaaaaatttgtggaagactggctctcttcccttagaaatacctgatgcacaaccattcatcattgtgatcctgcacttccttagaaaaatcttcttttgtggtccttagctaataaaccatttgtataatgtaaatattgtaaaaaaaagaaagaggcattgatgtgatgtcagaatatgattggttaaggtcgagtcttggttaattcaaatctatgaggagcagatatgggccaagtatgaaagcagttgtgatgctttggcactgagaatgatgtgcaaatgctgttgtcctctcttcttcctttgattcgagagtccaaacatcgtgactgaatttgagagctgtattgaagtgtgacttttggaacttgcaattcgttcatgtaaatatggtaattgtttgaatgcttgatcatgtactcaaatttgtacataactgtatataaattttgtataacatgggtgtacttatgtgtatatatgtgtgttttttgtagtttgcttggatgtatagttaaattagcactgttttgtataggcccgttaataatcaaaagcctctagtcttttctctgtttctctaaaagataatagcatttccctttggggattcaaggttattggagtttcttgtaagcgtttatttggactacttgtgtatcttaattttaatgaagggtaatttgatggatccaatattacttgtg

SEQ ID NO: 78867 - DNA, 429 bp, Glycine max
  Clone ID: PAT_MRT3847_42232C.1
ggaaacattaaggtacatggtctgactgaatcactttaaaccgaggtacttctgcttccttcagaaagcaaaatagggctaaaagacggaagataaacaaaaaatctttatctgcaaaagacaccataatttgctaagcaacgacactttgagttttaacagagggttcttattaacaccaagcgccacaaccgatttaaccatgtcagtttatcaaaaactaaataagctttcttggatgcccggcgacgaacgttgctaagccgaattcggaacatcctacgggtcattaccatctcggatcaaaagcttcggatttcaaccaatccctcctttcgaggcttccaccccgcgctctaaccataacaaataaactagttccttagctttgtctagaaagtcgtcctaaatatttcttttacggctaat

SEQ ID NO: 78868 - DNA, 420 bp, Glycine max
  Clone ID: PAT_MRT3847_42233C.1
aaggggtttttcttttgtggacctatcttttcgtctggcatatcattgataaacatttcagcacatacttaatagactagatctcatcttcctcgaagattacatacctatttacctaccgctacctgtgcctcatttgttgtacctacttgctttctatacagcccatctatttctactcagatggacactcgcttccttctgtcgttgttacttgtactttgttcgtgtactcaatgcgccacctttgtacctctttttattcttttcttttccgttcttggttaaatacattctcattggctgcgacagtcaactacttattagatatcggtcaaatctgattagtccacaaattaagttcagaacgttgaatcaagcttccgggctattctgaacgtatattccatatgtgatatg

SEQ ID NO: 78869 - DNA, 159 bp, Glycine max
  Clone ID: PAT_MRT3847_42234C.1
gtattgatgaattgctagatacattctctacctgggcgaatttgggctttagtgacataaactgcaatctaagataatctgtctgataatcggtactgtgagtctgcatattcactagatgcaatcatggtatgctggtcatattctctcttatgcata

SEQ ID NO: 78870 - DNA, 1216 bp, Glycine max
  Clone ID: PAT_MRT3847_42235C.1
gcacgagcaaatcttcattcacagagatcttaagtcatcaaatattttgcttggggatgattttagagcaaaagtctcagactttgggttggtaaaacttgctcctgatggcaaaaaatctgtagtgaccaggcttgctggtacatttggatacttggcaccggaatatgcagtgacaggaaaagtcactaccaaagcagatgttttcagttttggtgttgtcctaatggagctgctaactggattaatggcacttgacgaggatcgacccgaggaaacccaatacttggcgtcgtggttctggcatataaaatcagacaaggagaaactaatgtctgctattgacccggccctcgacataaaggaagaaatgtttgacgttgtctccatcattgctgagctagctgggcactgctctgccagagaaccaaaccaaaggccagatatgagtcatgctgtgaatgttctttcaccgcttgttcaaaaatggaaaccattatctgatgagactgaggagtattccggcatagattacagtcttcccctaaaccaaatggtgaaggattggcaggagacagaaggaaaggacttaagctatgtggacctacaagacagtaagagtagtatccctgcaaggcctactgggtttgccgagtctttcacttctgtcgatggccggtgaaacaagttctttatggatttcttgaaagcaagttgtttttccattttctagttttcacttggtgaaatccggattgaaatcacttgtcccattttgtgtctccttcccaaggttttaaatggcggttatgactgtagtttcggagtcttcgaaaccttaaacattgcagaaaattggagacaaatgtgttagcattgtggtggtttcggagaccatgatagtttttttatgatgcggctaaaattgcggttttacacctcaatttaaaaccttgctccttctttccatgtctccacaattaaataaaagtgacacgtggttaaaagaataaaactctttcaaagttggtaattttctttactcacgtgtcacttttttaattgggggctatgaaatggagacagtgatttggtacagtgtagacatcacagcagcatgctcttttctcagtttttcttcctgtctatgttttgtattttcatgtgtatgttttgtatttttaactttgatatttaagagtcaatggttgtagat

SEQ ID NO: 78871 - DNA, 314 bp, Glycine max
  Clone ID: PAT_MRT3847_42236C.1
ttccttttttttttcgttttttttttctgtttggggggggtcagctaagcaagtaaatataatagcagtcaatttgaaaagataattgaaggataataatgggacacgttatgacaagcacttcacaacataactgctgcctccgtatataaaagggcgggaggagtccacaaaataagccttaagcaaacctgacatacaggggagcttaaattccaaacacaccatggctttcttaccctgggaatggcaactactatagttttattaggatttttgagaccaactctatgggggccaggaactgactttgc

SEQ ID NO: 78872 - DNA, 1015 bp, Glycine max
  Clone ID: PAT_MRT3847_42237C.1
ccacgcgtccgaccaaacaccccatttggtgatgagcataagtaatcttctgaatctaaagacaaaaccctctctgaaccctatcccaaccctatccctcttctcagattcatcccatcatggctctctccaaagccaccttcttgacgcacctcagaaccctctccaattctcaccgccgcccttcctcgtgcgtttcaatccgcctcctctccttctcctccccggaggaggccgcggcggagcgccgccgaagaaagcgccagctccgcatggaaccgcccctctccgccctgaaccgcacccaaaccgctccaaagcccctacaatcaccctattatctaaaccctaacaaccccaagctcccggaacacgtgtctgcgctcaccggcaaccggctgaaccttcacaaccgaattctaaccctaatccgcgagaacgacctcgacgaggcggcgctgtacacgcgccactcgatctactccaactgccgccccaccatcttcaccattaacgccgtcctcgccgccctcctccgccagtcccgctactccgacctcctctccctccatcgcttcatcacgcaggccggcgtggtccccaacatcatcacacacaacctcgtattccagacctacctcgattgccgcaaacccgacaccgccctcgaacactacaagcagttcctcaacgacgcccccatgaacccttcccccaccacctaccgcgtcctcatcaaagggttaatcgataacagcaaactcgaacgtgcaatggatattaaaaccgaaatggattccaaagggtttgcccctgatcctcttgtttaccattacttgatgttggggcatgctagggtttccgatggtgatgctattttgaggctttatgacgagctgacagagagattgggtggtgttgtgcaagatgggattgtgtttgggtgtttgatgaacgggttttttgttaaggggatggagaaggaggctattgatggttacaaggagcttttggg

SEQ ID NO: 78873 - DNA, 535 bp, Glycine max
  Clone ID: PAT_MRT3847_42238C.1
cccacgcgtccgcccacgcgtccgggcgaaattgacagggttttagattccacaagaaactcaaatgcatcaaaggaggagacaaatggtatgccttctctgacaaaggaggaaacaaatggtagtccttcaaaagctgatgcaattctagataaaccagtagaagcagatctcttgctcacttcagaaacaaaggactatagaagtgtaagatggaaatatgtactgtggaagtcctttgtttacataatcacattaggaatgctgattgcaatgcttctaggtttgaatatgtcatggactgctatttcagctgcactagctttggtagttcttgatttccaagatgctaggccaagcttagagaaggtttcttattcactcttgatattcttttgtggaatgttcatcacagtagatggcttcaacaaaactgggattccaggtgctctttgggatgtcatggagccttattctcaagtagatcgtgccagtggagtagcaatacttgctctagttatactcatcctatcaa

SEQ ID NO: 78874 - DNA, 512 bp, Glycine max
  Clone ID: PAT_MRT3847_42239C.1
gtttgctccagccacaatggctcatttcaactcccttaattctcaagaatggaatgcccgcatagacagttttaatattccaaattcccctcaagttcagactctaagaaaccggtcagcggcaattgatggtgaaattgacagggttcttagtaacacattagattccacaagaaactcaaatgcatcaaaggaggagacaaatggtatgcctcctttaacaaaggaggaaataaatggcagtccttcaaaagatgatggaatagtagataaaccagtagaagcacatgtcttgcttactttagaagaaaaggactatacaagtgttagatggaaatatatactgtggaaatcctgcgtatacataatcacattaggaatgttgattgcaatgcttctaggtttgaatatgtcatggactgctatttcagctgcactagctttggtagttcttgatttcaaagatgctaggccaagcttagagaagtttcctattcactcttgatattctt

SEQ ID NO: 78875 - DNA, 288 bp, Glycine max
  Clone ID: PAT_MRT3847_4223C.1
tgaataatgaatattgaatctaacccagaagccatggaattgtaacccaattccaaagcaaaagcacgatgaggatattgaaggttgcgacatgcaatctgaaccaatgggcgatggacttcgattgcaacgcgaagcaaatcaaggagtccatagcgaaggccaaagaagccggcgctgccattaggctcggacccgaactcgagattcccggttatggctgcgaagaccacttcttagagctcgacacagttaaccattcatgggagtgcttgaaagatttactga

SEQ ID NO: 78876 - DNA, 1716 bp, Glycine max
  Clone ID: PAT_MRT3847_42240C.1
atggagaagagaaagggaggtagaattgaagaaagtgatgaagagaaatgggtccatgatgcatctgtggattacaagggaagaatccctctccgtgcttccacggcaattgaatttagtgaaaggatagcccactttgggatatccagtaatcttatcatgtatctgactgaagtgatgcatgaagacctaaagacagcaaccaataatgcaaacttgtggaaaggagcaacaaccttgttgcctatgattgggggatttcttggtgatgcctacaccggtcgatttcgtatggtagtcttttcttccctcgtatacttcaagggattaagcctcttgaccatgtctcaattcattccaaatctaaaaccatgcaacaatgatatatgtcatcagccaagaaaggttcatgaagtggttttcttccttgctctttactgtatcgccttgggaactggaggattcaaaccatgcttagaaagttttggaggtgatcaatttgatggtgacaaccttgaagaacgaaagaagaagatgtctttcttcaactggtggacctttacattcagcattgctttgttgctagcgacaacggtggttgtttatgttcaggacttcgttagctggggagttgcttatctcatcctcgctatgttcatggctctcactatcattgctttctatgtggggatacctttttacaggtacagaatgaggccaaacgcaaatcctttcataccaattctacaagtcctaattgcatccataaggaaaaggaatttgtcttgtccttcaaatcctgctttattatgtgaagtcccaatgtcagagaattcccaaggaaggcttctaaaccatactagcaggctcaggtttcttgacaaggctgcaatagttgaagaaaagtatattgagaagaaagctggcccatggagattagcaacagtgacaagagtggaggagacaaagcttattctaaatgttgttccgatatggctaacttcattaatgattggtgtatgcatagcacaaggttcgacactctttgtcaaacaagcagctgctatgaacttaaagataagcgacaacttcaaaattccaccagcttccatggcgtccctttcagcctttagcaccataatatctgtcccaatatatgatagaattattgttccaattctaaggaaagtcagaggtaacgaaagaggcatcagcatccttgggaggattggcattggcttaatattcttagtcatactcatggttgttgctgccttagtagaaaatatgagattaagaatgcctggtcatgagacaatgagtgtgatgtggttgataccccaatacttgatccttggcattggaaattcattttatctaattgctttgcaagagtatttctatgatgaagttcctgactcaatgagaagcgtaggaatggctttgtatcttagtgtgattggaataggattcttcttaagcagctttctaataataattgtggaccatgtcacagggaagaatggcaaaggttggattgccaaggatgtaaactcaagtcgtctagataagttttattggatgttggctgtcataagtgctttaaatttgtgtctcttcctattcttggcaaagaggtttacttataagaccgcacggaggaaagctacggaaattgattgttctaactgtgatggggtggatacagtggcatga

SEQ ID NO: 78877 - DNA, 207 bp, Glycine max
  Clone ID: PAT_MRT3847_42241C.1
ataattgacacatatatccaatcaacaatgcacaaccgagaggcacagacctatatatgaaataaattcaagccacacatacatcccaggtggactatatacatcccatgcccggaacgcatactgaaacacacgagagatgctgttatccctgccagcccaatcaactattcgtagataatccaaatgggtacctagacatgaatc

SEQ ID NO: 78878 - DNA, 220 bp, Glycine max
  Clone ID: PAT_MRT3847_42242C.1
ggcgatggcttccaaaatggcgactactggtatgtgggttacggatgaatgcacgaactcatccatggaaatgaagtggaagaaggtgcacatatacatattcttgaagatcgatgataattcaaggcttgtcaccgttgataaagtcggcggtcccgtcaagagctaaggtgatctcgctgcctactggcccaacgaagatatgcagataatactgttt

SEQ ID NO: 78879 - DNA, 2437 bp, Glycine max
  unsure (1)..(2437): unsure at all n locations
  Clone ID: PAT_MRT3847_42243C.1
aaaatgatatatacttgagataataaattaacccaaaaaattctcagtgagaaattagaaggttacaccttcaatttgtaaacatgaagcaggaaatggagaagagaaagggaggtagaattgaagaaagtgatgaagagaaatgggtccatgatgcatctgtggattacaagggaagaatccctctccgtgcttccacgggtgtatggaaagcttcgctttttgtccttgcaattgaatttagtgaaaggatagcccactttgggatatccagtaatcttatcatgtatctgactgaagtgatgcatgaagacctaaagacagcaaccaataatgcaaacttgtggaaaggagcaacaaccttgttgcctatgattgggggatttcttggtgatgcctacaccggtcgatttcgtatggtagtcttttcttccctcgtatacttcaagggattaagcctcttgaccatgtctcaattcattccaaatctaaaaccatgcaacaatgatatatgtcatcagccaagaaaggttcatgaagtggttttcttccttgctctttactgtatcgccttgggaactggaggattcaaaccatgcttagaaagttttggaggtgatcaatttgatggtgacaaccttgaagaacgaaagaagaagatgtctttcttcaactggtggacctttacattcagcattgctttgttgctagcgacaacggtggttgtttatgttcaggacttcgttagctggggagttgcttatctcatcctcgctatgttcatggctctcactatcattgctttctatgtggggatacctttttacaggtacagaatgaggccaaacgcaaatcctttcataccaattctacaagtcctaattgcatccataaggaaaaggaatttgtcttgtccttcaaatcctgctttattatgtgaagtcccaatgtcagagaattcccaaggaaggcttctaaaccatactagcaggctcaggtttcttgacaaggctgcaatagttgaagaaaagtatattgagaagaaagctggcccatggagattagcaacagtgacaagagtggaggagacaaagcttattctaaatgttgttccgatatggctaacttcattaatgattggtgtatgcatagcacaaggttcgacactctttgtcaaacaagcagctgctatgaacttaaagataagcgacaacttcaaaattccaccagcttccatggcgtccctttcagcctttagcaccataatatctgtcccaatatatgatagaattattgttccaattctaaggaaagtcagaggtaacgaaagaggcatcagcatccttgggaggattggcattggcttaatattcttagtcatactcatggttgttgctgccttagtagaaaatatgagattaagaatgcctggtcatgagacaatgagtgtgatgtggttgataccccaatacttgatccttggcattggaaattcattttatctaattgctttgcaagagtatttctatgatgaagttcctgactcaatgagaagcgtaggaatggctttgtatcttagtgtgattggaataggattcttcttaagcagctttctaataataattgtggaccatgtcacagggaagaatggcaaaggttggattgccaaggatgtaaactcaagtcgtctagataagttttattggatgttggctgtcataagtgctttaaatttgtgtctcttcctattcttggcaaagaggtttacttataagaccgcacggaggaaagctacggaaattgattgttctaactgtgatggggtggatacagtggcatgagagccgggccccccccctccccgcccccccccccccccccccctcctccccccccccccgcggacaacagagatcccagggcccgcagccccccgcctcttttttttttttctccccccccccccccccaacccccgccactacgcggccccgcccccccgcccccgcccagcaccaataaaaacaccaccatcaacgnnnnnnnnnnnnnnnnnnnnnnnnnnnnnnnnnnnnnnnnnnnnnnnnnnnnnnnnnnnnnnnnnnnnnnnnnnnnnnnnnnnnnnnnnnnnnnnnnnnnnnnnnnnnnnnnnnnnnnnnnnnnnnnnnnnnnnnnnnnnnnnnnnnnnnnnnnnnnnnnnnnnnnnnnnnnnnnnnnnnnnnnnnnnnnnnnnnnnnnnnnnnnnnnnnnnnnnnnnnnnnnnnnnnnnnnnnnnnnnnnnnnnnnnnnnnnnnnnnnnnnnnnnnnnnnnnnnnnnnnnnnnnnnnnnnnnnnnnnnnnnnnnnnnnnnnnnnnnnnnnnnnnnnnnnnnnnnnnnnnnnnnnnnnnnnnnnnnnnnnnnnnnnnnnnnnnnnnnnnnnnnnnnnnnnnnnnnnnn

SEQ ID NO: 78880 - DNA, 295 bp, Glycine max
  Clone ID: PAT_MRT3847_42244C.1
tcaaaattcttctgcctttccctacttattctttctctcaacctatttagcttaagtcaggttttgaccaatgactagcggttttggtgaatcaactacatcttctgcacctatcccatcatgctcagataacattttaaactatgcctttgattttcaattcaacatattcttcaatttgtcacaagaccctttgatcacactctgttgtcacctattctagattcacaattccttatatttttctccatcatcactcccattctcataattgacctatttctattcccttttt

SEQ ID NO: 78881 - DNA, 600 bp, Glycine max
  Clone ID: PAT_MRT3847_42245C.1
ttccacgcgtccggtgtggtgggacttgtgagagagagagagagagaaagaaaatgattgatagcaataacaatgtcaacatgagccaccacaatcctaatttcacaggaacaaaggaagttgttgttgaagacgaggaatcaccattgttggcgttgccactgctaagaaacagagaggaagatgaacaagggtcagggtcaaaggcatcggttactggttctgtgttcaatctctcaacaaccatcatcggcgccggaatcatggccttacctgcagccatcaaagtcgtcggcgtcggcgtcggtgtcgtcgccatcgttttcctcgccttcctaacacacacctctctggagattctcctcagattcaccagagttgccaaggcttccacctacgccaacctcatgggtgatgcctttgggagttctgggacattgctgtttcacctctctgtacttatcaacaactttgggatacttgttgtctacgttatcataattggcgatgtcttgtccggaacatcatcgagtggtgttcatcattttggggtacttgaagggtggtttggtcagtgctggtggactgcacgtacttttg

SEQ ID NO: 78882 - DNA, 535 bp, Glycine max
  Clone ID: PAT_MRT3847_42246C.1
aatcatcaaagacattaaggagtctaaggaaagcactcacgttcactatgaggttgtcctgtggacacacaacacatagaggtacatcaacctaattgtgggactaaactacaccatggaaaacctcttttcttccttgtacaagaacgaagctgagatatccccttacaccttgtatgccattgcttgtgtgatggaaaaagttcctttcatcaatggaagctgttaaagcatcttgcttccacggctgattgatctggcgattatgaggaacagctagattgtaggatatgactttaagagtggtcagaccaaaatgaaatctgtgatgatggataccctagcgggggcctgcatcaagccatcatctatagtgacatgcatccatctgagcaacatttatggcatgattctgtcatcacctcacacctatcgctataatgagatctacatgagcaatgatgccgaccatatcgtcaacagcacctccatcctctatgatcctcgtgtacatccataccatgtggctgttatt

SEQ ID NO: 78883 - DNA, 894 bp, Glycine max
  Clone ID: PAT_MRT3847_42247C.1
ggtcgacccacgcgtccgcccacgcgtccgggcaaaacgtaacagtgagttgcaggcttcaaggagtagttttgctaaaactttgagcaaacttcaaattttggaagcacaagttcagacaagtaatcagcagaagggatctcctcaatccatcatccatataaatcatgaaagcatttacagtcaaaatgcaagcaatgcaccaagcttcatctccttgtctgaagatggaaatgatgatgtgggaagttgtgcggagtcttggtctacagcaattatctctgagttatcccaattccctaaagaaaaaaatactgaagaattgagcaaatctgatgccactaaaaagttggaactaatggatgactttctggaggtggagaaattggctcggttatcaaatgatttcagtggagtttcagttacttcaaacaatatggcaaatgaaattgtggtcaatgatctatcagaggtcagtactgggaaagatgttccctctaacacccaagagaacagtgagccaaatccattgccaagtgaggtttcttctgctgaggaattgtcagcacctgatccccaatctgatgttccagctggcttgtcgctagcagagcttcaatcaagaatatcatcagtttttgagtccttggctaaggatgctgacatggagaagatcctgaaggatattaaacacgctcttgaagaggcatgtggcacttccatccaggactctgtatctgccattccccatgatgtcaagccttctgatactacgtgtgatgagctgggtaatgctgaagatgctgctggctcaaatgcagaaaaagaaattatttcgtcccagcgacctatataatatgtgcagatgacttctgatttagaagtcgcaacttc

SEQ ID NO: 78884 - DNA, 695 bp, Glycine max
  unsure (1)..(695): unsure at all n locations
  Clone ID: PAT_MRT3847_42248C.1
tcaggagtcagaatcaagncagcagtaggaagagnagggtatgtgaaggacatatatgtcaagagaatgaccatgcacacccatgaaatgggtattttggatgactggtaactatggttcacatgctgatagccactatgatcctaaagccttgcctgagatcaatggcatcaactatagagatgtggtggctgacaatgtcaccatggctgcaaggttggaaggaatctccaatgacccctttactggaatctgcattgccaatgtgacaattaatatggcagccaaggccaagaagcagccatgggcatgcactgatattgaagggatcacaagtggggtgacccccacgtccggcaattctttgcctgatcaagggcctgagaaaatcaaagcatgtgattttccccaagggaatctaccaattgatatgttggagctcaagaagtgtgcttacattatgaagcatgcatgactatacttgttttaagatgtgtcttctagttatttatttaaggccagtctttcccatttcatccagaaatcattgctcaagatgagaaatgaatgttcggtctcgtaatgaaacaattttcttatcgctctataagttaattttagaaatggctttatggttgtttgagcccaagcattatgctgttgcattaatcaaattttgctagttctgttctgtc

SEQ ID NO: 78885 - DNA, 746 bp, Glycine max
  Clone ID: PAT_MRT3847_42249C.1
cttacttacacgagttgaattgactcactaggcaccccgagtcgagagttataactcgttcgctctttccttacactcacactctgtctctctttcttcttcaaacttccctcgtcatgattgccaattctctttactggtaaccagatcctccaaaaatgatgaatcacgattccaacaacgaacaacatcagattctccatgtctcgcaggacgacgagataatggaatcgctaatcctcgatgacgacggctcttccgttcagcagcaccaccgtcctacgtcgccgcagagccctaattcccctttcaactcgttcctcgaccctccctcctacgccgacgcgatcttcacctccttcgattccaacggtcacgaccaagccatcgaatcccccgccgcccgatccggctccgaagactacctccacatctccgtcaccgatcctcagaaggagcaggacatcgccacctccctcgtccccggcgccgccgccttctacacctacctcatcaccacgcgcactaacctccccgaatatggcggcatcggtgctgagttcgccgtccggcggcggttccgcgacgtggtgacactctccgaccggctctcggaggcataccgcgggttcttcatccccggtgcggcccggacaagagcacggtggagagccaggtgatgcagaagcaggagtttgtggagcagcggcgcgtggcgtttggagaagtacctcaagaagctggcg

SEQ ID NO: 78886 - DNA, 130 bp, Glycine max
  Clone ID: PAT_MRT3847_4224C.1
gtgatgatggaattggaagttgacgagaacgaattgaaagctgcaggtgctgagatattcgtagacggtggtgggagcggcatacgaatcaatggttgggtgatcgagattaggaggaactccatactca

SEQ ID NO: 78887 - DNA, 260 bp, Glycine max
  Clone ID: PAT_MRT3847_42250C.1
gtagaagaattgattatctaggattcaatctcagggcaacatgttaggattaatgattgctatgcagcaaacaacggtccctaacgtcttagaaaccacgccgcggtgccagtctcagcgtgaccccacataatccatagtctcgaaaaagagcttaaccgcaggggctgaaacaaacactgcactaacagagactcacaacagggcactgacctgaactccctgtgaataattaccatggtttaacaccctatctcggt

SEQ ID NO: 78888 - DNA, 511 bp, Glycine max
  Clone ID: PAT_MRT3847_42251C.1
tgaatttaaaaaactatggcatgctttctgtttgtcctttggttattctgattcaatttatttatccccttctatgattactggtcggattgataagtgtgaaactgagattttagacttaatagtggttttggcttttgtgtttttggcttgtgcttatgttgtaagcagttcttgtggttgtgaattggttttagcatgtgtttggaggagacagggtcggtcataggcgttgcagctggactggctaggaacattgtgacaggaatggtggaaggaactgtaatgatggttggtgcatctgaaggtgcgatgagtggtgtaggatttgtggggaaaattgaggttggtgagttatttgtgtattgtagaattattcgggttaggcacttcactgcccaggtaatttgacatttgtatcttatgttctaatggattttcaagatttatccaataggcttgttaccccattcccacaaagtaataaaatatttagctgcttttttttgtt

SEQ ID NO: 78889 - DNA, 963 bp, Glycine max
  Clone ID: PAT_MRT3847_42252C.1
aagatagtggcttttcaataggaggatgtaatacattgcctgttaatgtcctttgccaaacagtttcaaatgatgcacgacaagaattcttgcaagatgctgaagtgaaggagaggtcaccagaaaaaagaatgatttacattgagtggagaagaatcagcaatctgaggttcaggaggacacgagttcatgagagtgccttttatctaaatattggatcttcaggcttgagtggaagtgtgcgaaagttgtacaggtcaatgaatgttcctgtgcctcaacctcttccctccttaagggatcttataaattccagaaaacgtgccaagaggggaattaaatattaatcttgtttttcttcagttttcttccatttatcatgcttggagatgttcatgcacgtacgttaagattttacaagaattttttttgccttgctcttttccgaaccatcatccatgtcacgagtgcttgacaagaagcaggaaggtggaagggaagaatatgcaggattgtgtaagagttgtcaaatctgtttcaatactgttatagtcgttttctttgaataagagacacatcaaaggatgcttcactatcattatggcaattgaaacattatttttaaagttttacatataatcacaaggttgaggcctaacaaggagcagcagaagtcagcagcaagcttctttggctatagaacatagctactatccccagtatatagtgaagagattcattaactttcctgacctggatatacattgtattctattttatcggctggatattcattgtattgtcgcaaccaatactaaagcattctgtttcactgcttcatttttcatgatgaagtgtacttgcatgttaaaaaaaaaaaaaaaaaaaaaaaaataaaaaaaaaaaaaaaaaaaaaaaaaaaaaaaaaaaaaaaaaaaaaaaaaaaaaaaaaaaaaaaaaaaa

SEQ ID NO: 78890 - DNA, 283 bp, Glycine max
  Clone ID: PAT_MRT3847_42253C.1
cgtcatatttcagagagtgttacactcacctcactttggcctatcataccgactggccacaacgactccgcacactgtcatctcatggaagcgcgcaccgagggcaggcacaaaaaggaacagatgctcaggtgttgccgatgctgcattgccctcgggacggtacataacaatggatcgggcgacgtagacgggtgtaccgagcatggacatgcacctgatggacaaaggtgtcggttcacaactgatacaacacacatggttcggaaatgtcaactgatca

SEQ ID NO: 78891 - DNA, 354 bp, Glycine max
  unsure (1)..(354): unsure at all n locations
  Clone ID: PAT_MRT3847_42254C.1
cacctctncctctnnatcttcaccttcacatttaccactcaaacaaaaacaccataatccgcgaaaaattaacaccaactttctgtccatctataaactttctttttaactacccttcattcaaatccttttttttttcttttccatatctcncactcccaactacaagttttttttttttttgaacaagcaacacaaaaataacaccaataccaacaacctctacctcctccacaacaaccttaaaaaactctattacacccactcctctcctcctccgttcacggcgctagacttttactcctccacttcctcgaactcctccaccttctaccactaccgttccttcattaa

SEQ ID NO: 78892 - DNA, 565 bp, Glycine max
  Clone ID: PAT_MRT3847_42255C.1
gtttgaaatgaagttttgaacttcaaactatataaacaagggacagccaatcctatcaggactttaatttagaatgtatagggcctgtttggataaacttctctaaaaaacacttctaggagaagaaaataagaaggaaaaatgaaaaagcttctccataatctatttctaattcagttttaatggacctggttcatggacatacttgaaagtaggatccaggacaaggtgttttgaagaagctgattggtgacacacttgccaaggtaggccaaatttgtgctcgatttatttaattcctctacatcctagttccacagatcctcacttcctgttttatactaggatatgctgagaagctttctctttaatggagttgatgaactaggaagcaaaacattcaatgattattttccacgctactgctgtcaagagggaactctaaataaaaaaggcaatgttattgggaagtcctttgaaaatcgcccatggaatgctagaggagaatttattggtaacagattttcaaattggcctgtctaattgctgctttcttttcatctct

SEQ ID NO: 78893 - DNA, 293 bp, Glycine max
  unsure (1)..(293): unsure at all n locations
  Clone ID: PAT_MRT3847_42256C.1
gggtggagtgaaagatatgagtcctggagcttactgaggatttgaaaacgaacgtcattgccgacaaggcgatattacagggagaagggatagaacttatggttgatcctcaagcagattaacgtcataaaggctgtgaatcacataaccagatctcaaaatgtggttaaagctcgtagcagtcacaaaacaatggtgttcaaagcaaactacaacgctgttgctttggcgagtagaaaaatcatcagattgcgtacatctgccccngtatgatgtggatctatccattggtg

SEQ ID NO: 78894 - DNA, 284 bp, Glycine max
  Clone ID: PAT_MRT3847_42257C.1
ctcgagcgagtatctttctcttctcttactgcaaattcaaaacgcaatctcaatcttgtcctttcgatccatgtgcttcatgctgcattgagcacacgcacgcagataccagatttcccactcgtagattatccgccttttgtcacattcagaggacagcagccaatccacgaccgatacaatgccgctttgaatcgcgtgccgtcctgcttccctgagcacatctgtatgcttgatgacatcgatatatggagcagtagggtcgatgagtaacacgtgacact

SEQ ID NO: 78895 - DNA, 528 bp, Glycine max
  Clone ID: PAT_MRT3847_42258C.1
ccacgcgtccgctagttctagatcgcgacggccgccctttttttttttttttataaactcatataacggaaacatcgtaaccgaagcaaacacacgaaggaagcaggttgggatccgaacctgagaggcaaggaatcatagtgcttgcgaatgttgcacactaacttctcggggagctgggaaccggggtagaggtggatgaggtggcggaggacggtggtccacacgaggctgcgaggcgcgtcgggtttggaggactcgacgctaacggtgctgctgctgttaagggagtttttgagggaagcaatggcttcggagacgttgcgcgtgagtttttgaagcttcttgtgaacaatggaagaagaagaagagtctcttggttggggtattgttgggtcctgttcgggtggctgcatgaggacggcgtggtcctcgtcgacggtggtggtggcgcggcgcgaccagcactccaaagctgcggccattgcaatgaggagaggagaagattcagaaggagctagatcgcga

SEQ ID NO: 78896 - DNA, 579 bp, Glycine max
  Clone ID: PAT_MRT3847_42259C.1
ctactttccaatccaggatggatgcctcttatgtctacttttcaaggcatatatttttattatgggttatatttatgagaactctgaagatattagctaaaaatttaatgaaaaaatatattggctaaaatatattaaatatactttattaaatgtttttaattatttaaaaaataaatatagatatttttatgtttagatataatattttgtaatgggattttgtgaattttattttctcaatcattgttattcttaacacttgctttttattactgatattgaaattaatgagaaattagaaagataattaagttgaagagagaaattgatagaattggtgaattttaaataaggataattttaacatttaaaaataaaaaataaaaaacagtattaacaaaatttcttataatatatgtgaattaataaaaaaatggaggaagtatttttcaatacctcaatatgaattctcttgaaagaacacacctaggaaagatagagatatattattgcttctctctttctctccgggagagagacagagagactagaatatactttttatactaattttgt

SEQ ID NO: 78897 - DNA, 175 bp, Glycine max
  Clone ID: PAT_MRT3847_4225C.1
tggatctcatggtcgagacactctacgaacctcccgagctcaccaatttcagaaagtgcagcaactctgcctcactagtccaaatgccaatgattcatgggacatgcatgaggcaacgctgaccaactctgaagatttctacaaagcgtcaaatcttccctatcaagccgcctcc

SEQ ID NO: 78898 - DNA, 478 bp, Glycine max
  Clone ID: PAT_MRT3847_42260C.1
aagagattcacacttgagagggagattgttggaatataagtttgaagtgagaataaaacctataaacctaagcattaagattttaagttagagtgtagtgtcaagtttatttatgtggttgcttgtgacccattgatttaaaatctcctcattattgatttcctcgatttttcaacatagtgcgtgtttggttctacgtcacgttgaaccaaaatcacgtcaaattccaaattaacgtaaaagttagtgtatgttgcttttgatttccatgtccaatatgcatatattccctctctaacatgcaaccaaacatagtgatagtattttgatctttcttatcacgaaagcaggttttagtttgtccaaagatgttacacgttatatgcatgtatttatgaacaagaggaccgagtttggcatggattaaaataaatataaagtcaatgaataagttttcataaaaaatttaatttcaagg

SEQ ID NO: 78899 - DNA, 274 bp, Glycine max
  Clone ID: PAT_MRT3847_42261C.1
tctgactcgattttttcattcctttattgaaatcacgatttttcattttagtgtatgtgattaattctacggttttagttagatctgtaggtgaggtgtgtagctgtgataggagctaggtggttgagatttgagaaactctaggcgtgattataattaattttcgttattaggtttttttaatttgactagatctcagccttgagctgttcaaatagctatggtcatattcatgttttagctgttaatttaatatatagatagaaatccaagg

SEQ ID NO: 78900 - DNA, 214 bp, Glycine max
  Clone ID: PAT_MRT3847_42262C.1
gttcccaccattgggttcaacgtggaggctgtggagtacaagaacatttttttcactgtctgggatgttggtggccacgacaagatttgttcccttgtgaaggaactacttcgaaattccacagggcctaatttttgtggttgccaccatttccaggaccagatttgttctggccagagataagttgccctgcttgttcattgcggaggaactg

SEQ ID NO: 78901 - DNA, 249 bp, Glycine max
  Clone ID: PAT_MRT3847_42263C.1
ttattgaagagtttacgttcggacacgataaaaacagagacatggattaaggtggcacagtggcagctattattgaagagttgaagagaaacctgaaactacaatttgacccaaccattagagaaagttgaagttgggttgctgcaacaatggcacatgctactaataacaatccttctgctgatgcttccttacctgaaaccaaatatattgatatggtgaaacatgtgatcaacattagagtcctag

SEQ ID NO: 78902 - DNA, 1104 bp, Glycine max
  Clone ID: PAT_MRT3847_42264C.1
caaaaacgtgttacagattgttgaacgagcgtccgggcagctacaaacaatctcagccagtggaatagttctggaaacactcacaagagacaactacgacaactggagtgctcttgtgaggaactatctaataggtcaaggtctttgggaagctgtcaattctgtttctgaaattagtgtgcaacccaaagaggtttctgattcttggaagaagaacaatgccaaggctttgcatataattcagctagcatgtgggatggagattcggctcgagattagaggcgttgaaacagccaaagaagcttggaacagattgggcgcgttatatagctcacaattaaaagcggatccagatattgagcaaggtgtggtggatgatagtctccatgaatataaaccgctgcacagatatgtggagagtggtgattggaaaaatgcaaaatcaatgatcaataaagatgtcaaggccatattttccacctcctctacggggaggaccgttcttcacgttgcagtgattgctgggtacgaaaacattgtgaggaatttggtgaagatagggaaagagaaactagttaaaatgcaagacaactatgattacactgcccttgctctcgctgctgaatataccggaaacgtgaacatggcaaagtgcatggtggatcagaagaagggagggaaggatctgctactgataaagacaaaaggtggtgaaatccctgttcttctttctgctgctaagggctacaaagacatgactcgctatctttactctcagactcagcttgaagcgttcatcgacaaaaattcccacattggggttttgcttcttgcacgatgcatcaccgctgaaatatttgatgtggctttgagtttaatccatcgcattccaaagctgcctctaacccatgaatccgatggccaacggcctttatacgcattggcacacatgccttgtgcattccctagtggcagtggatttggacgtctccaacaactcctttatgacagaaggttctgtgatatggctttgaattttccgcctgtaaagctcttgggtcgattgctcatattcctttatctgtgatttcaaaattatatact

SEQ ID NO: 78903 - DNA, 1701 bp, Glycine max
  Clone ID: PAT_MRT3847_42265C.1
gacgattgccgctaaagactcagccttattatacagacacggcgttacacaaataccgtacactgctccaagccaaagaccgaagacggagccgaaaatgactactacttgcaaataattcccatttttttctccgaaactcaaaacttttcatttgaagagttatcatgggatcagcttgttgtgttgctgcaaaggatcatactattcccagcactagcagaactggaggtgaaagtttaaatagaaatgctgggccgtgttgctggtgaaattgaggatccttcctttcacacatctcgcagagtcagcagaaatgtcagcatggagttaaaagggtcattaagttctgaaagaggcaatttatctgattggggaagcaccctggataattctgtaacacctttgtctctgaagtcccctgttcgggagcatttggttacaagtcagatgactccatcttcaggtctatccatgtcaagtaattgctctgcagtggtgaagaatctgattgaatcaccagagattgcagaatcttcaataccaaatcgttcagtaccttcagttttctcaatccctacgacagatccaatgactaatcataattatcacaatcttcctaactcaacaccatccagatgggctcattgttctcccggacacccactgttaacacaaatttctgatagtcgaattctgggtcttaaatcacctgacaactcaatttctgaaggcaggccatcatttgtactctccaactgtagcaatgatatggcaacggcatcccaatgcggccctgtgatcggctggtctatgcgcaccttttctggatgggtggccccatctcaagtggaagggtgccctcttgctaccgtgttttcaggttcagctcgtcccaagattcgtggatctagtagcaggttctcgtattccccctccatggatttacaatcttgtggggcttgctcaaagctcttgaccgatagatctgcatggggtagccagaaatttattgccagcagtgacctctcagttgttgctgtactggtctgtggtcatgtttaccacgcggaatgcttggagactataacgccagaggcagatagttatgatccagcttgtccaatttgtatggttggagaaaagtacatgtcgaagttatccaaaaaaggtctttggaccgagtcagagactaagaccaagaactacaagatatccagaaaccgagtagttgatagctacgtagatggtgggaatgatgtttttgatcgcctaaaagatatagtttcaaagatggagcctagtagctccagtactaggagttcatttggaaaacccttcctgaggcggcatttttctttgggatcaaagtggagccggtccttattggagaatgattctgccaggaagaagggcttttgggcgagatgtcgcagagactgatttcccctagccatagcttttagtcgcaggagttcttcaattatactagtaacaccaaccaagttagaattttatattttctatgcagtctagctttagtaatagtttagatttatttcaaattttattttaacttgtcaccaaaagttcccaccatgttgacgtggatcatattgattgtatgaatgaagcgtcttttggcagaatcagagccttagcaatgacgaacacaaggatgcgaaggaaacaaatacacca

SEQ ID NO: 78904 - DNA, 588 bp, Glycine max
  Clone ID: PAT_MRT3847_42266C.1
acttgcaataatacagaattgtctaacttatccaaataaaaattggggttaaacaattttatacatgactaatacaaataaaaaaattgcatcaaccatttaaagtacatcatataaaattacctcaaatacaactctgtttcttccaatattaattatttagtccataatccaaaaaaaatatttgtggaaaagctacttaaacaagcactttacggatggtttggtgtgtggggctattccgtgtgcattatggcaataggaaaaaaccttctgccctggaactgaaggtgttatgtaaacatgatcaaccacaatgttggagcaccctacattttggccacagctcaaattgattgccttgtccgtcaatgatgttccaacaattcctttgtatgttacatcacttatcttgattgctcaagtctggttttggcagtccgatctatgagggcaataaaactggtcaatgataatggggttattggctcgaacaaatctaatcttttcaaacgtgatcctcctagcatatccagctccaccctgccatgtcttgattcttactccagttaatgtttcggtcaaagt

SEQ ID NO: 78905 - DNA, 613 bp, Glycine max
  unsure (1)..(613): unsure at all n locations
  Clone ID: PAT_MRT3847_42267C.1
cggnaattcccgggtcgaccacgcgtccggtcagcagtggctcgaggatcggcttgttgtgttgctgcaaaggatcatactattcccagcactagcagaactggaggtgaaagtttaaatagaaatgctgtatgttcgccaacatggagttttcaatgggatagttggggccgtgttgctggcgaaattgaggatccttcctttcacacatctcacagagtcagcagaaatgtcagcatggagttaaaagggtcattaagctctgaaagaggcaatttatctgattggggaagcaccctggataattctgtaacacccatgtctctgaagtcccctgttcgtgagcatttggttacaagtcagatgactccatctttagatctattcatgtcaagtaattgctctgcagtggtgaagaatctgattgaatcaccagagattgcagaatcttcaataccaaagtattcagttttctcaacacctatgtcagatccaatgactaatcataattatcacaatcttactaactcaacaccatccagatgggctcatcgttcttccggacacccacttttaacacaaatttctgatagtcgaattctgggtctgaaat

SEQ ID NO: 78906 - DNA, 1466 bp, Glycine max
  Clone ID: PAT_MRT3847_42268C.1
gtatgtccgtagtttttaagatatgatatgctacttatataagactcaacaacataaacttcttggtctttattcttctaagcatttttttctcctcttgctttgatcttgttctttgcttaaatttcttatctttgagtagccaaaggaatggaacgtggggttcttgatggtaatcatcaataggctgcttcaagtcagagggagacctgggaaacaggttcagctttcagaggcagaaatcaggcaactttgtgcggtttccagagatatctttttgaagcagcccaatctattggaacttgaggccccattgaagatgtgcggagacatccatggtcaatattctgactttctgagtctattagagcatgctgggagaacttcttcctccttagaggcaatcttggatgtgcttccatataccgcgtctacggcttctacgacgaatgtaatcggcgagtcaacgtcaggctatggaaaatatttgcagattgcttcaactgcatgcctgtggcagccttctgtgagccgcggattcgccgtctgcgtcgtgggctctcgccggttctgcgccagcctgggcagataagtagttggccgcgtcacctgccgaacgtacccgccagtggtctactatacgagttcgtgtatgcatggcctagtcaagacagaattggtcggggagagtcagattagtagtttgccgcgtccaacagaagtacctgagagtggtctactatgtgatctcttgtggtctgatcctagtaaagacattgaaggttggggagagaacgaccgtggagtttcatatacttttggtgctagcagggtcacagaatttcttggaaagcatgatctagacttgatttgtagagcacaccaggttgttgaagatggatatgagttttttgccaatagacaacttgtgactatcttttctgcacctaactactgtggagaatttgacaatgctggagcaatgatgagtgttgatgagacactcatgtgctcttttcagatactaaggcctgcggaacacagaaagcctaagtttgcttttgggagcaaaactacattcaaggcaattcttgatgctgctagagtatgaccccattgagctgacttagatcaataaagtttgtaacatagcaaaaaattgacatggacaaattgatatccgtgttcactccaatgtgaaggaagggtattacaactaccaatataatgaagaacgtaggaatattatctctgctttttcttttcaagtatagctgaaagtgtttttctgtgctggcgcattctcaatatgtaccatgttgtcaacacagatttagggggtcaggttccatttttcttttctttcagctttttgatgtgagagacagttatgcaattctccttttcatatctcctgttgtattataaatggcagcatacttttcgacttgctttctaatttggac

SEQ ID NO: 78907 - DNA, 249 bp, Glycine max
  Clone ID: PAT_MRT3847_42269C.1
tgttaaactgagctgtatgtgataattttcaaatgtttctctcacctgatacatttcatatagatggatacatttaatggtttcttttcattattaattgatagaagaatttaaaaattaatgaatgaaattactgataaggagtttaagtaaaattaggtgtggtaatagaaaattaatttaactaggagaaaataatgatattgataaaatagatatgaattagttgaattggatacaagagtaaca

SEQ ID NO: 78908 - DNA, 549 bp, Glycine max
  Clone ID: PAT_MRT3847_4226C.1
gcctgatatactctgcctttcctgtatccgcttcatagtcacataccctaaacgccgtggagtattgccgccgccatccagtttgagggagtatttccgccgacgccggtcactgccagtgctccattttctgatcaggaggaatgaggcctacactgatgcttaggtctcataaccagccagcttcttgtaatggtaggggacgctgcacacactgttgctaagaaggccaccctgcctgctgctgtgctggcacgcgaacctgctttgattgctgcattcttgtacgagatggggaggaccccagatgttttggcgaacacgaccatgtgggcacggagatccactatcttggcagaagctgttggtaccaccgtcgagatgtaccatgttgaggccactattcgttgaaggatcactgagggagaagtgtgtcataggacaggcgagattgctgtcaccaggaaacgcatgaccagagaacatgccgatgccgatcttgttcaccagcttaggaaggagaagtgatagttatcttctgtacttttg

SEQ ID NO: 78909 - DNA, 741 bp, Glycine max
  Clone ID: PAT_MRT3847_42270C.1
ctttaatttcttatctttgaggagccaaagaatggaacgtggggttcttgatggtatcatcaataggctgcttcaagtcagagggagacctgggaaacaggttcagctttcagaggcagaaatcaggcaactttgtgcggtttccagagatatctttttgaagcagcccaatctattggaacttgaggccccaattaagatatgcggagacatccatggtcaatattctgaccttctgagactatttgagcatggtggattgcctcctcgctccaactacttattcttaggcgattatgtcgaccgtggaaagcaaagccttgagacaatatgtcttcttttggcatacaagataaagtaccctgagaacttcttcctccttagaggcaatcatgaatgtgcttccataaaccgcgtctacggcttctacgacgaatgtaaacggcgattcaacgtcaggctatggaaaatatttgcagattgcttcaactgcatgcctgtggcagctatcattgaggaaaagattttctgtatgcatggtggactctctccagaattgcacaatctaagtcagataagtagtttgccgcgtccaaccgaagtacccgagagtggtctactatgtgatctcttgtggtctgatcctagtaaagacattgagggttggggagacaatgagcgcggagtttcttatacttttggtgctagcagggtgacagaatttcttggaaagcatgatct

SEQ ID NO: 78910 - DNA, 448 bp, Glycine max
  Clone ID: PAT_MRT3847_42271C.1
accaggggaaaaatatgtaattttttgtaacatcttcacaggggaaatgatttattctgatagggcaagaaaaagaaagttatataactagggattttttatatgcttgcgatttttttgtgtgtgattatcatccattgatgtgattatgttttattgagaaattatcaatgtctttgtacaaatatattgtgcatttatataaaatatgtttatttgatttatagtaatgtatttaagctgtataatatcttgaatttttaagaatttcctgaatccatgttgcattgtacttcacttgttagttattgaccaagggggtctaactcagttggttgagcagggtgcgtgagttattgtaaactccttagtatctatcttcgtttcctacgggtaaaagaaaacttagttattaagtattggggcttcagtagttctttgcgaaaat

SEQ ID NO: 78911 - DNA, 244 bp, Glycine max
  Clone ID: PAT_MRT3847_42272C.1
gtgggtcttgcgaactgttggaatcccaagttcattaatggctttaatcctgaggtcttaggctattatgattatgatttgccacacacgcagaagggcataaaatattgacgacttgatctactactggtggagaatgatggataacaacacagctgcttacacttagagagcaactaatgatatgatcattgctgcacactggatcatgaacatatgactttgtgatatcactaatattgac

SEQ ID NO: 78912 - DNA, 618 bp, Glycine max
  Clone ID: PAT_MRT3847_42273C.1
ttacccaaggaagaaaggtgctagagattcgtcccactattaaatgggacaaagggaaagccttggaatttttattagagtcacttggtttggccaactgtagtgatgtctttcctgtttatattggcgatgatcgatccgatgaagatgctttcaagaaattaagagacagaggacaaggttttggcattcttgtctccaaatttccgaaagacacaagcgcatcttactctttgcaagaacccaatgaggtgatgaactttcttcaacgcttggtggagtggaaacatgtgtccctgcgagcacgttcctgagtgtaaatgagaaagatgaaatgacatgtacatccctaccctgccatgaaaaagaagttcagcttgggtagaatataggatgttttgtattttttgttcagtcagaacaaaagtgtatggaaatagaaagacaaaagtgtctttcttagtttgaaagacgtccacattcatgtaattagccaagtattactcagtacatgggaaaaaagtttatgtagccttcagatgcaagtctgaatggattaaaatttcgcttccttgttacatggatcaaactatgattaagtaagtatggtttctcaaa

SEQ ID NO: 78913 - DNA, 272 bp, Glycine max
  Clone ID: PAT_MRT3847_42274C.1
aaaactttgagtcgaccacaaaaaaaaaaaaaaaaaggcaaaatcctttaggcccttgatgaagcaaaaagcggcggaaaaagcccaaagaatctaaaataatttctggacccccctaataaaaaaagcctttgggcattaaaggtttcccgaaaatggccaggtttggattggtaaaacccccccttccaaaggacagacacacacaaggtaaaagggggtttaactgggaaccaaaggcggttccctttttggcgggtttggttaaaaac

SEQ ID NO: 78914 - DNA, 402 bp, Glycine max
  Clone ID: PAT_MRT3847_42275C.1
aatcccccaactttaacaaaaaaaatggaaacacggggggagggcaccgggaaacgggcaaaaatctaaacccctcggcaaacacgggaaaaaaaccggttggaacccccccccttcacggaaaaaaacgggggcgggccccttattcaaacaaaagcattaggccttaaaaaaaaaaagccataacccccaccttgaaacccctaaaaaaaaaccttttttaaaaaaaaagggttgggaaaaacccccccgggaaccgcatttcccgccaaaagcaataccccatttggaagagggtttgggccccaaaacaactgattcccgccaaaatgggggggggggctaaaaaacaggttttttattccctgaaaaagggcggctggaaacccaccaccccccttg

SEQ ID NO: 78915 - DNA, 392 bp, Glycine max
  Clone ID: PAT_MRT3847_42276C.1
tccaggaaggtttcccgtcatcactgtatgacgtcctccttctttgggggggggggggggaccacagagcacgaaaatgcggaggataaataaacaaaaatagaaagagggttccagaggtaggttgtaactaagtcaaggatggccgatgggcagcatgaatgggatggagcaaagtgtgggtgctacaggtggttatgcgggtggggtgtaaaagaaacaattaaaaaaagtacacaagaagaaaacttgtaggcggaaaacttgtagagagagaagtacaacctgctttagttgcaactgcgccgtcagttacacgccggcgacgccccaacagggggtgcgacggcacaaaaagtgcagaaatatcgcccgccaagcgggtatatggg

SEQ ID NO: 78916 - DNA, 694 bp, Glycine max
  Clone ID: PAT_MRT3847_42277C.1
ccacgcgtccgcggacgcgtgggtagcttcgctgatgttgaagaatgaatttttgcacaataaattaaaatggaaataatgtacatgcatgtagaacctctacatgtgggtacatctccatgttcatttattgtgcaaaattggttcatttggcttggtaaagtcatgtttatcattcttaggatttttgtcatagtacatttggctttttcctatgactgattgatctttagccattcattcattctattcaacataaaggattttgaaaaattaaaaaatagataaacacaataatctccatattgatttattcataatagtttataagaaagtttcttttagtaaactaatataacaaaaatatgatttttctttgggaaaattgtattgcacatatgggacttctggatagaaaataaggattttttaagcaaaactcaaatgcacatggccacatgtatccaagatgtataatggttgcatggaatcctaaaacttttagcatatgataagtccacttatttggatgtgaaccctctctatcatatctatagggaagcttattctacttacaaaatcgagtgtcaattcttgaagaaagtataaagaccacctctctgatattaccaatttgataattgagaacaaaggctcaagattcttcaatgactctaaaaatttttttgctaag

SEQ ID NO: 78917 - DNA, 1340 bp, Glycine max
  Clone ID: PAT_MRT3847_42278C.1
tttcgaccattgcagcatcaagcatgtaaagcagctttggcaaagcaagattcttttattcttatgcctactgggggcggtaaatctctttgctatcagcttccagctactcttcaaccaggtgttacagtagttgtatctcccattactttcactcattcaggaccagattataacactaaacctcaagttcggaataccttctactttcttaaattctcaacaaactgcttcccaggtcacagctgtgctccaagagctaagaaaagacaaaccatcatgcaaacttttgtatgtgacacctgagagaattgctggcaaccaatcgtttcttgagattctaaaattcatgcatcagaagggacagctagcaggttttgttgttgatgaggcacattgtgttagccaatggggacatgattttcggcctgattatcggggattgggatctcttaagctacactttccagatgtacctgtcatggcattgactgccactgcaacgcatgctgttcgtgaggacataatgaagaactgatgaattccccatgcacttgttcttgaaagaagttttgacagacctaaaattgaaatacgatgtgtattgcttagttatgggagccactaaagcagctaggacagttactaattgatcgcttcaggaatcaatgtggaattgtttactgcctttcaaaaagtgaatgtgttgaggtctccaaatttttgaatgagaaatgcaagatcaaaacagtgtattatcatgctggcttggctgcccgacagagagtagccgttcaaaaaaaatgcgctttgtcattcacaatacaatgtcaaaatcaatcgaaagctattatcaagaatgtggaagggctggatagttaatttagcttcaccttgcacagctggacctcctctccatttttgaagcgtcaaattttttaagaacttgaaatattttctcggtcaatatgggatgattttgggaacacattatgctaataaagagattgatggggttatacatttttataattttaatttctgtttttcattagttcaatgctgaaaataagcatgattccagtaatactgtctgttcatgttaatttcattcaacttctgatctgaggaatccaccatacaaatcttctggggccagtaatgatgctgaattgagaacttgtggacatcgagtacatatgaataaatgcatgcatttatttctaactgcaagggcaccaccgctattaaatgaagagtccattgagcaaagtggattcaattctgatgtaccatgaaaaataaattacattatcgtataaatgattatcataaatcaa

SEQ ID NO: 78918 - DNA, 489 bp, Glycine max
  unsure (1)..(489): unsure at all n locations
  Clone ID: PAT_MRT3847_42279C.1
cgttacgctttcgagacgctttcgcgagcacattcgcgtgaatattccgcggagttttgcgcgcgctttgtgcttcaaccggtgagtgttcgaatacgcgactttcaattcatttcttgttgtgtttgctttcatctttatttcgttcactttcggctgtattttcttccttttttaacgagctttaactgatcgtttaagccgctatctcgcctaaagaatgataaaatgaattccaaccgatcatttgcgttgtaatctcgtttaatcactgttaaagcaaaatctaaccgatcgatcacattgtaacnccaaccgcggttttaataaaaaaaccccccccaaaaaaaaaaaaaaaaaaaaaggcaagtaattataaataatcaaatatctttgaataaataatcaaaaaataattagactttttctttggaagttcttgatgaattgctagtaccaagtgaactaagctaaataactacaatcagc

SEQ ID NO: 78919 - DNA, 372 bp, Glycine max
  Clone ID: PAT_MRT3847_4227C.1
aattcggctcgaggggggaacacgatctgacttgtatcattgttattgagatggcggatcctctaactgcatggaaaaagactgagttgttgcatcaagggagagcgatgaggctaatgatgacgatggctcttcgcgctacctaatctgacatatgaaccagcgatagtcgacactctgttactatcgggtctatatgatgccgccactatggcgtctccatcaaatgcttgcctaccaattcaaccactatacttggaatcagaaaggcaacaccatcactctccctcagaccacccctctaccctctgcggtcacccaacggcctgaaggacacaggtttgcttctagacatagaaaccattgggagat

SEQ ID NO: 78920 - DNA, 380 bp, Glycine max
  Clone ID: PAT_MRT3847_42280C.1
cgtaacgctttcgagacgtttccgtgagcaatttcatgaagattttccgtagttcttcgttcgttcttcgttcttcaaccggtaagttttcgaatccgtgactttcaattcatttcttgttttgtttgctttcatctttatttcgttcactttcggttttattttcttccttttttaacgagctttaactgatcgtttaagccgttatctcgcctaaagaatgataaaatgaattccaaccgatcatttgcgttgtaatctcgtttaatcactgttaaagcaaaatctaaccgatcgatcacattgtaaccacggttaaaccaaaaaaggcaaaataataataaaataatcaaaatatctttgaataaaataatcaaaaa

SEQ ID NO: 78921 - DNA, 541 bp, Glycine max
  Clone ID: PAT_MRT3847_42281C.1
tttaaaataacacacaccttcacacatgcattatcgacgaattaaaatgagggcgtggagaattttacaaaataggccagaggcatacctcacaccaagaaggggcattgccctaactttccttttattgaatttaaaccaaaccgaaccaagccgaagagaagaacacctaatttccaagatccatgccagaaagatctcccccatttttcaaaaagatcctgggcaagacccctggtggaacaagaaaaaagctggcattaaaaagtattaacccaaccatttgcaaaatgcttggaaaaaatccccacaagaaaatcaaaaaactgtaaacctgtttggggattgtcattacgggaaactaaatggcccggaagtttgtttggcccactcaaaactccactttttaaaaccatttttgggaccacatacctctattgggaagattaattcccaggaatgtggttctgattttgcccacttacatgcatcaaaatgctctgcactgatgctgtttgttaaaaacactcgtaccactgag

SEQ ID NO: 78922 - DNA, 263 bp, Glycine max
  unsure (1)..(263): unsure at all n locations
  Clone ID: PAT_MRT3847_42282C.1
aaaaaaaaaggggaaattccccaggccttaattcaacccggaaggcacccccccttttgcgtatcgaaggagaaaaaaaattttttcaccataggcctgtgaaaaatcagtttagcggttttttggcgggggcccaaagaatcatagagggcccaaacctgaaaccaaaggatgaagnccccccttcttccccaattacccccttccgggggggaaaaaaaaacccaaagcgctttttatcccccccaaaaaagaaggaggcc

SEQ ID NO: 78923 - DNA, 195 bp, Glycine max
  Clone ID: PAT_MRT3847_42283C.1
gcaaactacttagacatgaaatattgcagagaaaatgattagttatattctaaaaaacactcgttaatgtagaggggtctatcatgcgaaccttacactaaaagaaaaatgtaaagcagcatgatcttgacaggcaaacgttttatacccggaagcttcataaatgctccgtggggaacctcaaaataaaacaca

SEQ ID NO: 78924 - DNA, 261 bp, Glycine max
  Clone ID: PAT_MRT3847_42284C.1
tttttcaccagcggcgacacatcgggtaatgggggggtttaaattaggaatgggggggctaaaaattagtattgccgcgatagaggaggctctactggcagtgagggaaaaggaaacagatcagcggggcaatacgaggcgacgatgtgccttgacagaataaggaacggcggagatgaaggctagcatcatggatggtccataacgacgatgcagcgcgctatcgggtcttaccacagttaagaaccctatatcgctagc

SEQ ID NO: 78925 - DNA, 317 bp, Glycine max
  Clone ID: PAT_MRT3847_42285C.1
aatggttggggacaatggtagtttccacataaaaggggggaagtcctaattttcacaagaaaaaaggcccgtgacacaggtccctcccaagggaaattgatcaccaacttgcaactgcagacctctgttggtgcaaaatgagagatccatattacccttctacaaagggggacaaccccgggaatccccttccgccacatggctttaccagttacaagaaactcatgacggcccgggagtactccggtggggttcccatcctgagccccaacaagggatatataacattgctccaaatgcccatgaggcttatgcaa

SEQ ID NO: 78926 - DNA, 256 bp, Glycine max
  Clone ID: PAT_MRT3847_42286C.1
gtattcttatacatctgacagcacaccagactcagacgatagcttctgacgacgacttttcccagcatgcgccttagtacaccggccaactgcaagaattgcacttgtggtgcagattggcattctaaaaggaatgagtgatcagaatttgaatggtgaaaggcaacacctcttcatttgagaaaccgttgagatacgttgaatgcctgatacaacgagggaaaagtggttgccaatgcagctgacgaaaaacaat

SEQ ID NO: 78927 - DNA, 489 bp, Glycine max
  Clone ID: PAT_MRT3847_42287C.1
ttttgcttttttttttttttccccttttttgaacaaaataaaatcttatggcccaaactttatagtcaaaactcaaccggggggtctttcccacatattttatctttggcaagttttttcccagcattgcctattccaccccaagcctgccataatagagcctcatttgtgcaagctggattttccctataaaacctacggccatcacagttttctaatgaacaaaggcggtaacaacatattgcgagtgacatacaaaatgacaaaactggtttcatactaaagaggggtggcgcaaaccgatgggatgcagaactcctgcctacacaactgagtggaccttcactggttcctcccaagacaaacatcatcatatccttgattcaagtttcccccaccaatttgagcttggttattatagaaacaaataagcccacttcctaaaaagctattaggtgctgggttattagcgagagtacctcttgattc

SEQ ID NO: 78928 - DNA, 571 bp, Glycine max
  unsure (1)..(571): unsure at all n locations
  Clone ID: PAT_MRT3847_42288C.1
ccacgcgtccggcaacgacgacgacgacggcgctcaggactcaggtgctttcggttcaggcggaggagggcatggagcgcggcgactgccagttcacggtggtgccgccgcggcagtacgacgaggcccagttcatgcaccagctgatggtggccggcgaccagcaggaccccgcgggcgcggggcggggagctgccgccgccggcggggagaggaagcggcggttcacggaggagcaggtgcggtcgctggagacgacgttccacgcgcggcgcgccaagctggagccccgggagaaggcggagctggcgcgggagcttggcctgcagccgcgccaggtggccatctggttccagaataagcgtgcgcggtggcgctccaagcagctggagcatgactacgccgcgctccgggctcagttcgacgcgatgcacgcccgcgtcgagtcgctcaggcaggagaagatcgcgctcgccgcgcaggtagacgagctgcgngggaggctgaacgagcggcaagaccagagcggcagctgcgaggtcaacgacgcggaggcggctgcggacgacaa

SEQ ID NO: 78929 - DNA, 221 bp, Glycine max
  Clone ID: PAT_MRT3847_42289C.1
gtgtgtttccttttttttttttttttatggtgttttttttccttggcgcctcttcactctttgcccataagggaaattgtggtctcaacccttttccggattataaacacatgggcttcaacagattgggcatgatcgctctttcgtttgatcccaaaccggggggcattggtatgcaaaacctgcccccatattagagcaggggaattttctggcccaac

SEQ ID NO: 78930 - DNA, 475 bp, Glycine max
  unsure (1)..(475): unsure at all n locations
  Clone ID: PAT_MRT3847_4228C.1
acgctgcgagaagacgacagaagggacattcacacttatgtgattagtgtcaatgttgatgcttacagtccaaattaatgaacaatcattaacaatgcttcttgagagagtaaaaaaagaatgtaaatgcaaggactatattgtattaatgagtttaatattttatattattaatcaattacaaatagttataatttttaagatgattattgtaaaaatcaactaacttatcgcacataataaatgtgattgaatgattatctaaattttttttacactatccatatatatcacttattttctcaattaatatagtgtagatccaaaacttatgtttcatttcatatcaagattaagttatgaagtaatatcacctataaagatcaaataattatattaaccattaattntagctagatcattatcacatgtgtcaaccttatcaaccacatcttgaggtcattaactaagatgt

SEQ ID NO: 78931 - DNA, 404 bp, Glycine max
  Clone ID: PAT_MRT3847_42290C.1
cttctttttttttttttttttttttttttttggggggttttttaaattttttgggggttaaaacagacccgggggcggacccgggggtcccccccggaaacccggaccggaaccgggaggcgcaccagggagccctaaaaggagggggaaaaaaactgggaggaaaaaaggccaaagccaaatccgggggaaaaaagaaacccgcacaaaatcccaaacaaaaaacgagcgggaaaaaaaaagggaaaaaatagggggggctaacaagagcgcaaaccaaaattaaaagggtccggctaacggcccggataccaaacgggaaacctgacataaaaagagtataaatgcatgggccaacgcgcgaggagaagacggccggaaattgggccccccggtgggctttt

SEQ ID NO: 78932 - DNA, 489 bp, Glycine max
  Clone ID: PAT_MRT3847_42291C.1
ggggaaaggggtttagggggttaacagggatttttttacagggcccccccaaggaacaaaagggccccatgaaaaaaaaggggaaaaggggggttgagttttggcaacgaaaaaaatatggaaaaaaacatataaaaccttcaggggaacttgaaacgggcaaaaaagttgttgggcccggggccacccaaaagaactaagagggtttgggaggggccaaccccggggaaaagagcttgaacaaaggaacccaaaatgggcaaaaaagccaaccttccatttttaacttcctgggggttaaaaaccttaagggggttttaatccttaccaaaacctaagggggtaaaaaaagggcccccgggaaaagggggctaaccaaaacctccaaaacccttttttaatccaaaaaagaattggtggcccaaaaagccggggtgggcccaaccttgaaaattttgggggtctgaaaaacccatgagggccatttaa

SEQ ID NO: 78933 - DNA, 235 bp, Glycine max
  unsure (1)..(235): unsure at all n locations
  Clone ID: PAT_MRT3847_42292C.1
ctcgaagagagaagattgatgaaaggagtccaagcaagccatgnnctacttactcaagcctctaacaagaaaaatccaaaaggaaaggttgttcctagtccatttgttgaaaccatacgagcngatatatcagagaagccggggattgtcgattacaagacacaaagtagtgatacctcgctaactgagtatatttcgctgacncatcaaaagagagtaactaganctctntcgt

SEQ ID NO: 78934 - DNA, 1239 bp, Glycine max
  Clone ID: PAT_MRT3847_42293C.1
ccacgcgtccggaaatgtttaccatgctgtccttaaaaagctgccactttgagagttaagttaggacacacacacaaagaagaaaccaaaagcacaagaaacgtcacaacacacattctatattggggtgaaggaagaaaaaaaacctctgttttctttgtgtgatttctcttctggttccgagtattgtgttattcaccaaaagcttgcacctttctgttgtggatcacctaaaacttgggttttggttgagatggctgagaaggaagaagccatgcatgctgttttgaaggaagctgtggatttggaaaacgttccacttgaggaagtttttcagactctgaggtgtgattcaaatggactcacaacagaatctgctgaggagaggctggtcatctttggccacaacaaacttgaggagaagaaggagagcaaggttttgaagtttttaggatttatgtggaatcctctttcatgggtcatggaagctgcagcaatcatggccattgctttggccaatggaggaggaaaacctcctgattggcaagactttgttgggattatcacactccttattatcaattcaacaataagtttcattgaggagaacaatgctggtaatgctgccgcagctctgatggctcgtctagcacctaaagctaagttccttcgagatgggaaatgggttgaggaggatgctagcattcttgttccgggtgatataattagtgttaagctaggggatattatccctgcggatgctcgtctacttgaaggcgatccactgaagattgatcagtctgcacttacaggcgagtctcttcctgtcacgaaaggccacggtgatagtgtttattcaggctccacatgcaagcagggagagatcaatgcagttgttatcgccacaggagttcataccttctttggcaaggctgctcatcttgtggactccacaaatcaagttggccattttcagaaggtcctgactgctattggaaacttctgcatatgttccattgctgtgggaatgatagtagagatcattgtcatgtacccaattcaacaccgggaatatcgtcctgggattgacaatctgctcgtgcttcttatcggaggaattcctattgccatgcctactgttttgtcagtgacaatggcaattggatcccatcgcttagctcagcaaggtgctattactaaaagaatgacagcactagaagagatggcaggaatggatgt

SEQ ID NO: 78935 - DNA, 1254 bp, Glycine max
  Clone ID: PAT_MRT3847_42294C.1
gtcgagctactaattcgccacgagactgccttcactttgacaactgctataaatgaatggagctccacgttatactcaataatctacagttcattgccaactataattgttggtattctcgacaaggatcttggtaaaaggactctccttaagtatcctcaactttatggggcaggacagagacatgaggcctacaacaagaaattatttttgttaacaatgttagatactttgtggcaaagcatggttatcttctgggcacccctctttgcatattggagtagcacaattgatgtggcaagcattggagacctttggactttaggagttgttattttggttaatttacacttggccatggatgtcataaggtggtattgggtgacacatgttgtcatttgggggtccattgttgcaactttcattagtgtcatgatcattgattctatccccaatcttcctggctactgggccttctttgatgctgcaggaactggattgttctggttattgttgcttggaatcatagtaacagcattgcttccgcatttggttgtaaaatttgtttatcaatactattttcctaatgatattcagatttgtagagaagcagagaagattgggtatgacagggttgttgaaagtggacaggtagaaatgcttcctatctcagataatccatcaagataagagaagtgatcttctgtctttttttttctttcttatgcatagttccatattcttttggctacatgagagtatatctgtttattaccggatttcattggttgctatccgaaggatagaggttttgttatcactgcagaggtttgttgtatcttcattcttttgtatcataaatttagcatgttgtaaattaatcttgattacagcagaaaaagaaaaagaaatagttgattgcatgttgttgcaaacaatgctggaggaagttcacatgcaactccagtagccttgattatcgatggtaccagccttgtgcatattcttgacagtgaacttgaagaacagctatttcaacttgcaagtagatgttctgttgttctatgttgccgagttgctccgctgcaaaaggcagggattgttgcccttgtgaagaataggacatctgacttgacactagctattggagatggtgctaatgattgtctcaatgatccaaatggctgatgttggagttggcatcagtggacaagagggtcggcaagctgtaatggcatctgattttgcaatggg

SEQ ID NO: 78936 - DNA, 289 bp, Glycine max
  Clone ID: PAT_MRT3847_42295C.1
caaacccaattttgcttttaaaaaggttggtcacaaactgacggggaattccatgggagaataaatactgggactgtaatccggagaacacatggcagctcatttttggagggaccttggaacacgacttataagaggaaaagacggtctcataacctagcaacttgttatgccttccgccagaagcatagaatatctaactggctctgtcacctaggggaaaggctttttacaaacgtatcctggggaaggttgcccaactgaaatacatggactaataacccgaatc

SEQ ID NO: 78937 - DNA, 279 bp, Glycine max
  Clone ID: PAT_MRT3847_42296C.1
gaaaccccataatgaagcttccttggttttttaaaatcaaaaaagaaaaatgggcttttttttgccattcaaaatttttactttttatcaaagaaatgcccaatttttgtttcattaaagtccccaaaggaaaaagaaaaaggcgaaatttaatttcaaggggttctttttttgccattttttccaacattgggcaaccatccaattcctttgggggccttggagaatttgggaagggttggcctccccattcctaaattcattttccctggggggaat

SEQ ID NO: 78938 - DNA, 297 bp, Glycine max
  Clone ID: PAT_MRT3847_42297C.1
cagtgtgcctttacgccaattcacacttctggaacattttcttgcacaacctttcgatgctggaatatggaaacggatctgctgaaaactccgggatcgctgatgacatgttactcactaggaacatgaaattgaattctaaggccttaatatcttacaatccttatactacttattgccacaccctttaccttaccgtagctgatagtcaagatatgttagatcagtcttttactaatacaacgaaactagtagtccactccgctggaaccaaccgaacattcgaatactatacta

SEQ ID NO: 78939 - DNA, 131 bp, Glycine max
  Clone ID: PAT_MRT3847_42298C.1
ctttcttctactgttaacgttttctgtttttttttaagatggctatgacgacaacaaccgagatcgattctcaattactagctacgatgtctcaagcttacccaaaccgattccattaatgtttacaaaaa

SEQ ID NO: 78940 - DNA, 1783 bp, Glycine max
  Clone ID: PAT_MRT3847_42299C.1
gtttggcaggattcatgtaatgaaaacgtgaaagatgattctcgctcttgaaacatccatgcagtgcagatgtagttacaaaatagctgattttccaactctgcgttgactggtctcccacaaacagcttccaggaaatgacaatgagactttccctcccattttgttttctactccactctacccttccttaatcattccactctctctaaattcaatcaatcaattatctctctaaacccatggaacacgccttcctagccatcgtcgccgccaccgccagcttcttcgtggtcatgctcctccttgccgccgccatcctcctctgccagcaccaccgcaactccaccaaagccccaacccgcagcacctcccatatccgaacccgctccgccccccaccgtgacgcctcctcccgctccgtcctggacaactggtcctccgaccccaacctgatcaagatctcctgggaggagctcgcccgcgccaccgacaacttctcccctcacctcatcgtcggcgatggcagcttcggcctcgtctacaaggcccgtctctccaacggtgccaccgtcgccgtaaaaaaactctcccccgacgccttccagggcttccgcgagttcaccgccgagatggaaaccctaagccgcctccgccacccaaacatcgtcaaaatcctcagttactgggcctcaggccctgaacgcctcctcgtctacgagttcatcgaaaagggaaacctcgaccagtggctccacgaacccgatctctctcgctcccctctcccctggcccacacgcgtcaacatcatccgcggcgtggcccatgggctttcctacctccacggcctcgacaagcccgtcatccaccgcgacataaaggccagcaacatcttactggactctaacttccaggcccatatcgctgactttgggctggcccgtaggatcgacaacactcggacccacgtgtccacgcagttcgcgggaacaatgggctacatgccgccggagtacatagaagggtccaatgtggccaacacgaaggtggatgtgtatagttttgggattttgatgattgagaccgcgtcgagtcacaggcccaatttgcccatgaaattgggcacggacgacattgggatggtccagtgggccaggaagatgaaggagaataatgcggagatggagatggtggatgtgaatattgggttgaggggggaggtaataactgttaaggagtacgtgcgcatcgcgtgtgagtgcacacgtgagatgcagaaggaaaggccccaaatgccacaagttgtacaatggttggactccatgccactttgaaacttttaactaatctcctgtaaataccttcttctacgtatctatgcgcttctatcactgtatgtaagtctataacattaattactttacatcttcataataaatgtgatcaaatcatcgcattttgtttttgctgccaattcagttgtgtaatgaactccgatataagggttttacaaggttctaagccatgcgaaagttccccaatttctctcctttctactttgtatatatagtgtttacaaatttgatgggcatacagaaacagccatacagccatacaggcatgcatttttatttttttaataattttattcactttctagtttgtagtgttgttatggacatgacatgacaatacaaatgtgtggctttcagcaatgatggatgggccttaataatttaccatgcaataaaagttttctcaatttatgacgagagttcattaa

SEQ ID NO: 78941 - DNA, 191 bp, Glycine max
  Clone ID: PAT_MRT3847_4229C.1
gctcgcaaccgacagaaggtgtactagaaggtctgggatcaattgacgaaatggtaagggtgggcgttccaatgcctatgtttcactgctgaaaatatcatttccgtaggggaataatagctccttactcccgcatttgagatgcaaatggtattcacatccagcggaccatttacagggtcactcctgct

SEQ ID NO: 78942 - DNA, 368 bp, Glycine max
  Clone ID: PAT_MRT3847_422C.1
gtacagtgtggaactggattacagggacactgacttaacgattaaaggactataccgcgccgtggagctggtggatccgtaagagacataattcaacgtgacatttaacggcacccacgtgaacatgtactatatataccctgtagctgtacgcgtgcaaacaaaggtgcacgcgatcgatgaggagcttctatacaagtactgggcaaatgtcaaccacatatgggtattgcatgagcgctccaagctataaatgtagaccctgacaatacttgaccgtgtgaataacatgacagtactatggatatgtgtatttaagattgcacgctctccattactagagctacctagctgatgaggacgcacac

SEQ ID NO: 78943 - DNA, 733 bp, Glycine max
  unsure (1)..(733): unsure at all n locations
  Clone ID: PAT_MRT3847_42300C.1
gacccacgcgtncgattgagaccgcgtcgagccacaggcccaatttgcccatgaaattgggcacggacgacattgggatggtccagtgggccaggaagatgaaggagaataatgcggagatggatggtggatgtgaatattgggttgaggggggaggaggagagtgttaaggagtacgtgcgcatcgcttgtgagtgcacccgtgagatgcagaaggaaaggcccgaaatgccccaagttgttcaatggttggactcaatgtcactttcaaccaaaccttttcatctcgtgtaaatacctttacttctatatatatatataagtctataataacattaattagtttacatgttcttaataaatgtgatcaaatcatcgcattttgtttttgctgccaattcagttgtgtaatgaactccgatataagggttttacaaggttttaagccatgcgaaagttccccaatttctctcctttctactttgtatatatagtgtttacaaatttgatgggcatacagaaacagccatacagccatacaggcatgcatttttatttttttaataattttattcactttctagtttgtagtgttgttatggacatgacatgacaatacaaatgtgtggctttcagcaatgatggatgggccttaataatttaccatgcaataaaagttttctcaatttatgacgagagttcattaaaaaaaaaaaaaaaaaaaaagaatttt

SEQ ID NO: 78944 - DNA, 160 bp, Glycine max
  Clone ID: PAT_MRT3847_42301C.1
tttagaagaatgcctttttctttctatttcagaatgtgatgaatttttctgatactaacaagtgacaaaaaaaaaaacatttatgtctgaactgagcttctcttggttaatatattggacttgttagtttgatgccctctatgcaatacactcagcttcc

SEQ ID NO: 78945 - DNA, 277 bp, Glycine max
  unsure (1)..(277): unsure at all n locations
  Clone ID: PAT_MRT3847_42302C.1
aatagagtacactacttgtaataaatattgttagagaaaaaaataagtggaaaganatagatcaatacattgcttaaaggtattttgtatatatagattgattagatattaatttattccatttccttcaaaaacatatcttnctaactttcatgatctggttggaataagagatgattaagataatagctacaagtacaactttaatatctcnncatatagattcttaaatttaaacaaaagantgttccaaaggacacattagaaaatgactagc

SEQ ID NO: 78946 - DNA, 357 bp, Glycine max
  Clone ID: PAT_MRT3847_42303C.1
ttttattttaatttttttgggggttttggggttttgtttttttttttttttttttttttttttctattgttgtaaatttctaactattttttgtgttgtttctaataagccaattttggggcggcacccccggcttggaaaaaaagaaggggttaaaaaaacccggggggctcaaaaagaggcaaaaaaagaaaaaaaggggggtctgacaaaaccgccaaaagcaccggctttttaggggaaggttcatggggaaacggggggccccaatgaccccctcacaggggaaaccccccctggagaacgggttggcccccaccaaaaaaaaaaagcgggcccggcgaaagaaaccggggg

SEQ ID NO: 78947 - DNA, 111 bp, Glycine max
  Clone ID: PAT_MRT3847_42304C.1
ctcgggcatatgacgagcctttgctaacgttctatagatcaccaacttgcaaatgcagcgagtgctacctggacccagctcggtcttcgcacaccaggctgagaaacatga

SEQ ID NO: 78948 - DNA, 287 bp, Glycine max
  unsure (1)..(287): unsure at all n locations
  Clone ID: PAT_MRT3847_42305C.1
acaaacaatttntgtggtgactttgatcccaaatgccccgcctttctagagtctgtgaccctgcgaacatagggggcatgcatccagtcggatcaagttttcaggaaatcnagtgcatccacccccagcctgcttgtaggaatgtatcatagttttctttcttttttgtggtnatttttttntncanngtaatatnatncattcaatttngatgttatatncctgccttttctgggggatgaactangaactatcctcgngtatgtgggtgcatagncctcatctcc

SEQ ID NO: 78949 - DNA, 367 bp, Glycine max
  Clone ID: PAT_MRT3847_42306C.1
ccaacaaaataaatttgggggggcttatttcaaaatcggttttttaaattcttaaaccggcaaccatggtcaaatggttgccgattggaaattattaccaaccaccttttgggaggggtggattggaatttttggtttttctggccccaccaaaatggaagaacagaattaaaaccagccatgacccccaagaagggcctaccttagggacctttttcctttttccgtttctttggcttaacttaaggaatttaagaagggccgggagggggggcttaaattttgttttttgggcggaaattttggcaccccaatggctattaaagtggcttaacggccggttggtccatcctaaaatccttggcat

SEQ ID NO: 78950 - DNA, 564 bp, Glycine max
  unsure (1)..(564): unsure at all n locations
  Clone ID: PAT_MRT3847_42307C.1
ctagctatctcgatcgaactgtccaaggatcctgtcacccgggatggcgcaagcaggggcgttcaccagccgaacaaacccacgtggagactgtggatgagggcgagagtcgtgtgcaaaaccgcccagagttgcgtgtgcnagcggaacggccggacccgacgtgacggcagtaccggaagataacgagtaggtggccgtaggacgcacaccaaattacacagttaaggtaaatagataataatacaaaaagtaggagatgcctggtacaggcggggcaagctaagcgtcaaccacaaatatagagtcaaatcaacgtggtatcaatgcgggcagcatagaaaaagcatgggccaggcgcgaaagtagttaatgcgtggcgaaagtgcagattcaagtacaaactaaataatatggtaaggtgaagggcacaaacgtacgttatacaaggcgtaattgtaggcaaccaagggtgttaaacgtagggagcgctaataaggcgttacagggtggccaacacaggaagtaggtacatagagtctaagtattaatatttaacgatga

SEQ ID NO: 78951 - DNA, 217 bp, Glycine max
  Clone ID: PAT_MRT3847_42308C.1
gacttcggtgcgagggctcacagcgtctgctgccttctcctggatcctgaactacatccgtaagacccagccagtctggtagaacctcgccgccgccgtgtagcatcatctcgccgacgcggcgtagtacgtggggcatacgacgatggaagagcgtctgaagaccatcgaggttgcgcaggatgttcagagcatggcacacgatacaaggaaggca

SEQ ID NO: 78952 - DNA, 611 bp, Glycine max
  Clone ID: PAT_MRT3847_42309C.1
caaaatcatccctggtaggaagcaggtagataagatggtgccagaaggattgataaacatacccttgccaacccctgtaaatgccaagaaacaccctgatttaaaggttgcaaatgatctccattttgagacaaaaatggaggaagtgaaggaagacttgaataacataaagcagcagtacaaaacatcaaccaaacgcatccaggagtcacagccaccgaacaaatcggatgatggctttaaggaaatcaatcatgtgcagagcaatggaaggagagtattcatccgatctcgactgtagaatggaatttacatacactaggattctacatatccataagatagtgaaacataatatgtgctttgtttttctgttctcccctctcaccatgttagatgggaagggggatgataaccaggtttgaggtttgatcgtatgagcctgggtactatcaccacttgaagtatactaagtttattaggtcctataacatgtccttccctatagtatttatatcatatagtatgtcctataatatctatttttcaaagccctgtatgtaacatgtcctataacatctatgtttcaatggatatactgcaatttgtcc

SEQ ID NO: 78953 - DNA, 553 bp, Glycine max
  unsure (1)..(553): unsure at all n locations
  Clone ID: PAT_MRT3847_4230C.1
actatacattgtagacattttattcacttggtgcaaaagtatcgaagccaaccatataaatcccaacttatagggaatttctaaaaaacttatgcatgttgcagatcttatcagtgtaaaacgtcaaaccatggcatgcccttccattttttgttacctttagtcacaattcaatccacaaatttccaacaccacatcacttttggccaagaatgggttgattctcacccaaagtagggttaagattgaagacaggagaatagcccagaccaaaatgatggtaggaacaccttcttgttttcccatgacacccttgaggaaagggtaaaggtgtacaatgacccaaagggcaaaaaatagcctcccaaacaaaggaccccatgaatcatatccattgtttatagcatccgagacaccgacaatgactccgatgatgtttatgattagtagggtcaagggagggatcaacaaggatgtccacttgaagatgtagaggtcagcanactctccatcatctgctgccttggatgtgactgtgaagtttgtgttgact

SEQ ID NO: 78954 - DNA, 1122 bp, Glycine max
  unsure (1)..(1122): unsure at all n locations
  Clone ID: PAT_MRT3847_42310C.1
agctaccaacatgaccacttatgcaacccagtgtctatcctcatctgatagcatacaatagtctctgactcacttcctatcattttcttcctgcttgaacaaccaaagagtgaaaacactttcatggagaccaacttagattattccaagatgctctttttactcctccttggttccacttcattgattttcctctcacacttggcttctgcagccactcccaagctcaacactcaagaggtgaaggcattaaaggaaataggaagcaagattgggaagaaagactggaactttggggtggatccttgcagtggaaaagggaattggaatgtgcctgatgctaggaaagcctttgtgatgagttctgtgatatgtgattgttccttcaatcacaattcttcttgccatgttgtaagcatatactggaaagctcagaatctgtcaggtagtctctcaccagagttttccaagcttcattatctccaaaaattagaccttagtcgtaacatcatcactggttctatacctccacaatggggtaccatgcgcttggttgagctctctttaatgggaaacaaattgtcagggccattccccaaagttctcaccaatatcacaaccctcagaaacttgagtattgaaggaaatcaattttctggccacattccaacagagattgggaagttgaccaatttagaaaaactcgttctgtcatccaatggattcacaggagcattgccacccgtgctttccaagttaaccaagttgattgatttgaggataagtgacaataatttccttgggaagattcctgatttcattagtaattggacattgattgaaaagctgcatatgcacggttgctctcttgagggtcccataccttctagcatttctgccttgacaagattaagtgatttgaggataactgacctaaaaggtagtaaaagctcagctttcccaccactaaataacttgaaatccatgaagacactggtattgagaaaatgcatgattaaaggagaaatcccagaatatattgggagaatggaaaaactganaatcttagatttgagttacaatggcttgagtggagagataccccgatcttttgccaacttg

SEQ ID NO: 78955 - DNA, 361 bp, Glycine max
  Clone ID: PAT_MRT3847_42311C.1
gccgcccttttttttttggggggtacctaaaaaggattcccccgtttcccccgcgtttaaattatagaatttatacttgatttcaacatcttaatttttgtacctttattttcatacacacaagaggggaggggggacatgaatataaaaccttggccttatacaacgacatacggtaggtccatttttcagccaacattacaggaaaagaaaggacaagtttacttctcacgcgcagtttaactgaagatacacaggcattatgctttttccaacacaactgggaaaaaattaccatccaaggccaaaaaaacccttttattttgaggcaagccattttcattgcctcaaaaaaacttac

SEQ ID NO: 78956 - DNA, 464 bp, Glycine max
  unsure (1)..(464): unsure at all n locations
  Clone ID: PAT_MRT3847_42312C.1
tttttgttttttttttttcatttttactccttggatagaaaaagggcaaccaatggtgatgcccgttttgaaagcccaggcccacaggaaaggcacacatcggttggtgtcgaataaacgcgcatgggggaagtcccattgctttccaccctccgtaggccctagccgctcggaacatcgccactccacggcttcttttcttttttggctgcattcctcataggcctgtaaacctgcgtgccgnatcttccgccgagatggggttgccaacgtatttggtggggatacgtttacttgaaggccttgcctaacatgaggagctgggcgcggacgtagatgaacaggacaccggcaccgggaaccccacgatggatgctggcctccagaccgttggaagagggagcggacacccctctgtggctattatctggcaaccagtattcgttggatggacttgtacttga

SEQ ID NO: 78957 - DNA, 346 bp, Glycine max
  Clone ID: PAT_MRT3847_42313C.1
gtagctccatcgatctatatcatgtgctctagtttaggaaaattgcatttgcatttgcattgcgtcaagttttaattagtttctgagtggtgtttaattctctcatcaacctagctagcattcaagtgatgaggacatggaatctatgcaatgaatagactctcaggtaccatatgtatgtatgtattaatagaattgcatagggtctttctatgctactttctctttcaccttacaaattctgcttctgttgtgctgatgccgctgctgctgctgctgctgcatcatatgtaggaccttatgacatcatttttcaagcggtaaaaaatgatttattttcttgctc

SEQ ID NO: 78958 - DNA, 200 bp, Glycine max
  Clone ID: PAT_MRT3847_42314C.1
tgcgagaagacgacagaagggtggtgtggtgttgaccatcactcaaaatgactatttgttcgtcttccgatttgcaggatccggatgacaagatgtaaatgcatgcatgtttatgatcggacgttaaatgtaacaattaaacatgtgttatcgtgttcaattttacttaaacgcttacaacatcttgttgatcgagccga

SEQ ID NO: 78959 - DNA, 251 bp, Glycine max
  Clone ID: PAT_MRT3847_42315C.1
gtgatcacacattagtttgatagaattctccacaacaagatgatgatgatggggaacaatgtgcatagcattggtgtcataggagtgatggtgagtggcttagtgttgatgatggtgtcaaaaggtgtgagtgtgagagctcaaaactgtgggtgtgaggcagagttatgttgcagcaaatacgggtattgtgggagtggtgatgactactggaggtaccgattgttagcgggtctttgctctggcattgc

SEQ ID NO: 78960 - DNA, 319 bp, Glycine max
  unsure (1)..(319): unsure at all n locations
  Clone ID: PAT_MRT3847_42316C.1
ttgccngtgattgccacagcgacacagcaacccggctggagtggaattctaccttccaagcactacgctgcgtatgagacggaggatgagagacatgggaggaactagcactactattctgtggaatcagagggacaaccaaccgaggaccctgtggctctgcggctcaaggggggacctggctgctctagctccaagggataaatacatgaccatggacctaataattttgagggactcaagtggctcaagaggttcaggtggttcaagaggttctggtggctcaggtggttcaggaggtactggaggctcaggtggt

SEQ ID NO: 78961 - DNA, 164 bp, Glycine max
  Clone ID: PAT_MRT3847_42317C.1
gggtgtgatataagaatagatttgaagattatatgtggtactgttattatttcgcaaaaggtaggttatgttcctacaacatcgatcctcctctgacctcgttttataacctcgcatgtcgaaaagtgattacactgcatatcatgcattgatgcatagctgaa

SEQ ID NO: 78962 - DNA, 735 bp, Glycine max
  unsure (1)..(735): unsure at all n locations
  Clone ID: PAT_MRT3847_42318C.1
catttacggctccctgcaggtacatgcattctctgtttgnatgacccagattacttcccaactttgctcaaggcttgcttgatggactcaaggctggcgttagctcaagagatattgtccacattcaaaacgccaagggtcttggctatgcaatgaatacatcggaggagcttaattttgtaaaagaagttgctgccactatttttgttgttcttgacccagtatacaggtatttatttgttccatacattgtatacagtctaagtgctctttaagaacgaaattactttatcttcattttttcactaacagaggaccattctttgtacatcacacgaatctcatgttcacaaactcagtagctttctctatcttattttagtagcattatcttaactaattaattattattctatagctggaaaatagtttcttggtaagtgaaaccaaaacgccatgtcatatttgtatatgtatcttgtaaaagtttgtgttgatggtatcctttgaacttggtgaaccttctgaaaaagataatactaaaaattgatgtaattnttttattggcatcataaaactcatgtagtttacgttcatcttcattntatggctaatcattaatcttcaagagacagaaaataagtcctatggaaaaagttngtgaatttataaaaacttaattatantatactaanacttatgggccttgcatgttaagaagctgggaccattcat

SEQ ID NO: 78963 - DNA, 488 bp, Glycine max
  Clone ID: PAT_MRT3847_42319C.1
cggtgaacgtgccgcttatgccgatgagaagacaccaccaccgcgagttcgacgatgacgacggtaacgaggacgcggcggaggaggagatgctgcctccgcacgagattgtggcgcggaattccgctcagtcgccgatgctggcttattcggttcttgaaggagtagggagaacgctaaaggggagagacttgcgccaggttcgcaatgcggtttggccccaaacaggttttctcgattgattgaactatgaagaaacgcttttggattttcggttttgcggtttcattcttttagatatgttcgttttccttttaggaagtgctaaagccctaaagcctcaattgattgtaaaattgaagagttggtcaataatggcttagtgctttattgttggttaattggtgtttgattgctgtatatcttatgcaataatttatttttgtggtccataatgagctctattggaagatgttttgctgtttgct

SEQ ID NO: 78964 - DNA, 828 bp, Glycine max
  Clone ID: PAT_MRT3847_4231C.1
ctcgagccgaatcggctcgagtacggctgcgagaagacgacagaagggggagagtttgctgacctctacatcttcaagtggacatccttgttgatccctcccttgaccctactaatcataaacatcatcggagtcattgtcggtgtctcggatgctataaacaatggatatgattcatggggtcctttgtttgggaggctattttttgccctttgggtcattgtacacctttaccctttcctcaagggtgtcatgggaaaacaagaaggtgttcctaccatcattttggtctgggctattctcctgtcttccatcttaaccctactttgggtgagaatcaacccattcttggccaaaagtgatgtggtgctggaaatttgtggattgaattgtgactaaaggtaacaaaaaatggaagaagggcatgctttgatgttttacacagataaggtctgcaacatgcataaatttttggtcagaggcacatgacagatccctgaatgcagagtagtatctgttggtgagagctagctgccactgcaaaaaaaaaaaaaatgttacttgtggcgggtgtttgtagatacaacatatgttttgagaggttttattattctttttatacatgtgcattatctaaattatcctgaaatcacaggtgagatgttatttataacttctgtctgaataaggcatctcatatttgtaatcataagtgtgcccatgtgttttttgaaatcccctataaggagttgggatttattgttcgttttgatactattgtaccaagtgaataaaatttctacaatgtataaaaaaaaaaagagaaag

SEQ ID NO: 78965 - DNA, 1092 bp, Glycine max
  Clone ID: PAT_MRT3847_42320C.1
ccacgcgtccgaatggatctgtggtttggttgcgatgtggtgtgaatcactgtccaatcccgttcgcgtgacccggccagccctataaactatatatcgtgaatcggattcagagagactgagagaaacgatgagggcagtgagtgcgttaatggtggctcggatgttgacgcgggaccactctctccctgtcctttgcagcgaaagcatacccttccgatcggtctggtggttcgtctatgccggcatctcatgtttcctcgtcctcttcgccggcatcatgtccggtctcaccctcggactcatgtctctgggtctcgtcgacctcgagattctcgagcggagtggttctcctgttgagaaaatgcaagctgcggtcatacttcctgtggttaaaaaacaacaccagcttcttgtcactctgcttctatgtaatgctgttgccatggaggctttgccgttatacctagataaactattcaatcagtttgttgctatcattctctctgtaactttcgttctatttttcggggaggttattccacaagcaatttgtagtagatatggtcttgctgtaggtgccaactttgcatggcttagtctgggtctgcatccctgcatggcctacttctaatgcaactgtaaatgatttattttattgctggataaattgaaatgatttatatcttggtatacttttttccattaaatgcttcaatgcaggacagaagaattaaaatgaatttaaaagtgatgggttcggtgatgagattaattgttttgaagtttgtttatgatgattccaaatttttattccagataggcattgtgtgtttgtgtaatgcgtatatctttataatatctggtcttgattttaatcattcagggaggtcaaagcaagccagggctaactggaagaaatctgcagaggaggagggatcgaatacaaggacacagtgagctcgttttttgttttttatccggaaggggctactattcgtacatttgtgcataaagtgttatagtgtatatcaaaagggtgttcatacaaaggtgataaatgttaaatttaatggtcaatatctacctttc

SEQ ID NO: 78966 - DNA, 164 bp, Glycine max
  Clone ID: PAT_MRT3847_42321C.1
cacacccctactgcggtactctcttacgattatcctctcatgcactccggcacgtaatcaaatgctctcccacgatctctgatcctaggaaatactagcttggaaacgcataatatctaacgttcgactactgcaaccctaaatgacgctgctcaactacctat

SEQ ID NO: 78967 - DNA, 1183 bp, Glycine max
  Clone ID: PAT_MRT3847_42322C.1
ttgacttcattactgtgttcttattgctcctagattgatggtgattgtgtgtgtaaactgacttattatttatcataaatttctttaatttagggtgttttgttttgttttgattatttgtatgtgcagtatatagtgtttatattttgtattataacatttaaaaattaaaatagaggtcattctggtatttccagagttggctgctatgcatcgctatccaggatgctaatatcatgattctagattcacataactgaaattgcacttacgaatatacacacataaatatataaatatatgcataacagataatgttgtatccttgtgtctattgctttctgctgcattcaaggtaattaatcataggcatctggatgtcagacaaaaatttgaacatgtttatgttgtcttgtctcttttgtgctttctttcatgtaaactggaacagaaattgtcaaatgtattgcatgcaaggatacaatttcattatctcccgtccattagtcaaagtatgattatgcattaaggcctcagtattgcagggaatatattaaagtcttctttttattaaagtaaaaaatgtggaactttgtttcttgaattttgaagttatgcttcctctatagagtttgtagttaaaaagtcattatgtagtatgtactcaagagcataactcaacggctcagctcctcaagtatttttgaagattgcttgagcctaagattgaatccctggcccctaggtcgctagttaatggttgagtccatccaagttatcatcatctatcatcatctcaagttacaagagcatcaatttccaaacatagaaatggctgcttgggtttggttagaggagagaactggtaaataggtggatggaaattaaaaaaaaaaaatccaaatttcatcaattgaagagtagactggtcaccctcttgatgtaaatttcttccatttgtaaaagcaatgcttaattacttgtttctttggtgaatgaagcactcggaataatattttaaactcatttactttataattttgcagtagatttgatagttgctactatttagtctaacaagtgtattggcatgtaatatatatttttgtattccttgtgttttctgacatgtgaatctattcaacctgatcttatgacctccacagatatcagcaattgatca

SEQ ID NO: 78968 - DNA, 459 bp, Glycine max
  Clone ID: PAT_MRT3847_42323C.1
gtctggtgaaagctaaatttaagacactgatttgttgtattgcatacatagttacaccatacaaagcatcatgtttacatttaggaaattgatgtaggagaattactgtttggggaaacaattttctatgaaaataatttccttcatgacaatctttttttttttgattggcagatggaaattgttgttcagcatatattttatgtagcttttatctacatgattttcaaatgcaagtgactatactcggtgagttacaataaattttaggctgaggggatgataacacacccatataatcctgtgggaacaattatacacatatatactcacataatacttgtgacatttagaaaataaaataaaataactgccacccattagccaatataaaggtccctgactatggatcaattaactgcgaacgaaattgcgttccatcttatcactggaaatgtg

SEQ ID NO: 78969 - DNA, 339 bp, Glycine max
  Clone ID: PAT_MRT3847_42324C.1
tttccaggttatttgcaaaccgcgatcacaggtggccggaccttaaaaccggagacaaaagcagtcgttacttgagtgcaagaatctctcaatttcttcctacttctttgtggacgatttcttaagggaaagaaaatgactctctgcgctggccacagacttcgtgaatcattttcttttccactcttagttgattagctggacactcttctattgggcataggacttcgtgtcagatgtaaacctcattctgtctgtttgtcagtgctgtgtttaattgcaagatcaagctggagaaatcttggattaggactcccactctactgtcgggagtaggat

SEQ ID NO: 78970 - DNA, 484 bp, Glycine max
  Clone ID: PAT_MRT3847_42325C.1
atacagccacaatccaacttacatttaagccacgcatggcatagctcactgacgcatacatgctatactagggcgcataacggataccccctcacaacaagaatcttgctaccccaacgctggggcccaacgagaccctaaaattggaaaaaaaggacaagacgaacggttgcagacaaagaaaacgcagggtgagggataactgtagaggctagaaatgtgattctgcactatgaaggcgagaaacgaaaggtgtgaccattcttccaaacaggaaagctcatgacattgcccttccaaggcgggagataccactggactatgggctgtcattcggctgcataatagggatatagtgtgcctacaaacatgagaggctcccttatagcattggaagtatactcgcacgagaactcttccatatcctgaaacaataacaggtgcaatcgctgggggaaccctgccataacctgggacaactttt

SEQ ID NO: 78971 - DNA, 340 bp, Glycine max
  Clone ID: PAT_MRT3847_42326C.1
gttacactgcctgctacacctaattcggaggctactccgatggaatggcccctggatcgacctcgggacatacctcgtagcgtattgactacagctgtggctacatctgttggcacattgcatggggcatatcatgctggatttgatggttttcttgaaggtgccactaccatgacgcccctcgtggagcacattgttgataaggttgctcataaggtggctcaagacatggttgagggatgggatgagggggatgcctttgaggaagcctctgtagaagcagctcttaatgcagcacttggtggggactatgtggagagctatactgttggcacatctg

SEQ ID NO: 78972 - DNA, 413 bp, Glycine max
  Clone ID: PAT_MRT3847_42327C.1
tttccgcttttgcacttcccgaagggggaaaagactgcctctttctatagggggaggagctggtgcaaagaatgctattctcatgaatatgccaaatgctgttctttcaatgtggggatgtttcgttggagatctagtctatgaagtctctaagatgactggtccctacattaaaggtacagactctgtcttaatagcatttggaaattgggctgacgacaccatgaattatgaggcttctccccacaagctggtgcagattggagagattcaggacacagttgtatggacattttcacaggaggaattatttacagcttgttcaactcaggtgcgttctgcaacaactctggtggctgatgggagtccatatttgtatgctatggtgcatgatagttcaccgtctacaatac

SEQ ID NO: 78973 - DNA, 460 bp, Glycine max
  Clone ID: PAT_MRT3847_42328C.1
tgggaagatagaggattcagctttctggatcccacacccacgcacaggaatttacttcccaaaagggcatgagtgggtgatggatgatgttccagaggatgcagctcgtttaaaccagacttattggttcagaaatgttgatggtgttgaccaccccagacactaaccataatatatgctccacaacattccaaaaataactacataatcgggaatcatatggtggtgaccaatctttatgtgatgtgttattaactagttttcatacattagaaaatatatgaatactatatatagtttaatagaatcatatagtcttggataatttcttcctgctaaaggcccaattacttaataagggcaattggatggtccaaagtagttgtgactttttaagcattcataatgactatctgtatcataataaagtttattaagctatctgtatcacaagtttatc

SEQ ID NO: 78974 - DNA, 195 bp, Glycine max
  Clone ID: PAT_MRT3847_42329C.1
actcactatttgtgaggatggtgcgcccgccggcaccgccccggactgtattgctcgacccacgcgtgcggtcgtctcgatgagatgtagactagcccgctactgtggtactagtagaaacatggcatatgtgcagatatagcacagtccaaacatgagcattggggttctctagctcgttctccctaccgaact

SEQ ID NO: 78975 - DNA, 2423 bp, Glycine max
  Clone ID: PAT_MRT3847_4232C.1
taactatgccagtatcattttcatggccctcttcacctctatagctgcagctggcatcctggaaatgcagtggggaggtgtcagtatacacgactggtggaggagtgagtggttctgggtcattagtgcagcatggtcctatatcgcttcggactaatgtcagagatcatcccggaatgatacaggttttccaaggtcaaaatggtattcataagatcgaaggaaatgaattacctcgtcttgtctatgtgtcacgtgagcaaaagacctggatatgctctccacaaaaaagctggagctatgaatgctttggtgagagtctcggcaataatcaccaatgctccttatgtactgaatgttgattgtgatcactacataaataacagtaaggcccttcgtgaagccatgtgcttcatgatggatcctacatcagggaaaaaaatatgctacgtacagtttcctcaaagatttgatgggattgatcgtcatgatagatactcgaatcgcaatgttgtattctttgatatcaatatgaaaggtttagatggcatccaaggaccaatatatgtgggaactgggtgtgtcttcaggagacaggcattctatggatatgatgcccctacatcgaagaaagcaccaagaaagacatgtaactgttggcctaaatggtgctgctgtctgtgttgtggatctaagaagaaaaagattaaagcaaagtcaagtgtgaaaaagaagatatagaatatggatgatataaagcaaatgccagcactagaaaatattgaagagggaattgaaggaattgacaatgagaagtcatcactaatgtctcaatcgaagtttgagaagaagtttgggcaatcatctgttttcatagcttcgacactcttggaagatgggggtgttccaaaagcagcaagttctgctacactcttgaaagaggccatccatgtaattagttgtggttatgaagataagacagaatgggggaaagaggttgggtggatatatggctcagttaccgaagatattttaacaggtttcaagatgcattgtcatggttggagatctgtatactgcatgccaaaaaggcctgcttttaaaggttcagctcctataaatctctcggatcgtctgcatcaagttcttcggtgggctcttggatctgttgagatctttttcagtaggcattgtcccatatggtatggccatgggggcggcttgaaatcgctggaacgattctcttacataaactcagttgtttatcctctgacttcaattcccttaattgcctattgtgcattgccagctgtctgtctgctcactgggaagttcattgtccccgagataagtaactatgccagtatcattttcatggccctcttcatctctatagctgcaactggcatcctggaaatgcagtggggaggtgtcggtatacatgactggtggaggaacgagcagttctgggtcattggtggtgcctcctcacatctctttgctctctttcagggtttgctcaaagttctggcgggagtcaacacaaacttcacagtcacatccaaggcagcagatgatggagagtttgctgacctctacatcttcaagtggacatccttgttgatccctcccttgaccctactaatcataaacatcatcggagtcattgtcggtgtctcggatgctataaacaatggatatgattcatggggtcctttgtttgggaggctattttttgccctttgggtcattgtacacctttaccctttcctcaagggtgtcatgggaaaacaagaaggtgttcctaccatcattttggtctgggctattctcctgtcttcaatcttaaccctactttgggtgagaatcaacccattcttggccaaaagtgatgtggtgttggaaatttgtggattgaattgtgactaaaggtaacaaaaaatggaagggcatgccatggtttgacgttttacactgataagatctgcaacatgcataagtttttggtcaaagacacatgacacatccctggatctgttggtgagaactgccactgcaaaaaaaaatgttatttgtgggtggtgtttgtagatacaacatatgttttgagaggtttcattatttttttttatacatgtgcattatctaaattagtctgaaatcacaggtgagatgttatttataacttcttcggaataaggcatctctcatttgtaatcataaagtgtgcccatgtgttttttagaaattccctataagttgggatttatatggttggcttcgatacttttgcaccaagtgaataaaatgtctacaatgtatagtatcttcaaatccaaaaaaaaaaaaaagaaaaaaaaaaaaaaaaaaaaaaaaaaaaaaaaaaaaaaaaaaaaaaaaaaaaaaaaaaaaaaaaaaaaaaa

SEQ ID NO: 78976 - DNA, 246 bp, Glycine max
  Clone ID: PAT_MRT3847_42330C.1
gttctagatcgcgagctgccgcctattattactttataccctcttcactatatctatatatagtttatcgctagatatatatataatagaacgttcaaaggaaatagaattttcctcagaaccaggatcctgcaatcatataaaaagtaaacggtctctttcctttgtggttaccatgggcccggacaccgtcgctgactcaatagcctctgtaagacatgctgccttctttttcaacggattggt

SEQ ID NO: 78977 - DNA, 278 bp, Glycine max
  unsure (1)..(278): unsure at all n locations
  Clone ID: PAT_MRT3847_42331C.1
tnangcnaagcngtgtttgcataaaatgtactaaacagtgtcattatacactactttgaaaattgtcacatgtttctaagaaacaattactttttatgcnaacacagcttggctttaagacaatgacaaaagttatgcaggttacacagtggagtattactcaactcccaactacgacagtgnccntacagtctctctttaaacagcatagggcttcaatgaaaacagagtgcaattaatgtcatggcttgtaaagtctgattacagaggtacagcaa

SEQ ID NO: 78978 - DNA, 504 bp, Glycine max
  unsure (1)..(504): unsure at all n locations
  Clone ID: PAT_MRT3847_42332C.1
ttggtttgtacttttatttggtccaaatgttatgtaaagctcgctatggtatagagtatggactacttggcatccctattactatattgtcctgtgcaggcagccagtcaaaggcatcctcagctaaattctaaacattcttttcctcccatagaaaagcaaattatcttggtccaacatattntgggggaggggtctctttgttgaaaacattttgatatatgcccattaaacttattaaacttctctacttagtgtcaccaacagttggttttcaatttatcaattttacatgctagaaaatgaaatgaagttttaattactcttactattattattttggaactttacccaaaattaccattatttaagatgccaaagttgatagtaaaggattcaaaagtaccggtcaattatattgagaatcatagagagggaaaaaaaatgttctttaaaggcttctttaaattaaaatagattaaatataacacattaatttcttag

SEQ ID NO: 78979 - DNA, 696 bp, Glycine max
  Clone ID: PAT_MRT3847_42333C.1
cccacgcgtccgggctattccttcactagtaaaccagcctctagcattcagcttctccttcctcctctttcttgctctctgcaccccattggctgctaacaacaccgatttcggaggttcagcctgcctcaaggtttcccccacccacttcgccggctcagtcaccgaagtcataactgctatacgacaagtcgcttccatcctctcacgcttcagccctcccttcgccaacttccgcctcgccaccgccctcgccgactgccttgacttgctcgacctctcctccgacgtcctctcctgggccctctccgcctctcagaaccccaaagggaagcataacagtacggggaatctgagttcggatttgaggacatggctaagtgcggcgcttgcgcatccagagacgtgcatggagggattggaagggacaaatagcattgtgaagggtttggtctcagccggaatcggccaagtggtgtcgctggtggagcagcttcttgcgcaggtgggcccgtacaggatcaatttgacgacgccagcagcaaggggcaatttcctttgtgggttaagcccaaggaaaagaagctgctgcaatcaattggaatgacagctgctgatgttactgtagcgttagatgggagtgggaactatgctaagatcatggacgccgtgcctgcggcaccggattacagcatg

SEQ ID NO: 78980 - DNA, 688 bp, Glycine max
  Clone ID: PAT_MRT3847_42334C.1
ctcaaaattacatgccactccttctctctctccctccctctctctctctctgcaatggcaatagcaatagatcagcaatgctgctacagagtctgagataaaactgaaaatttttgtgtgtgtgagaatcatgagcgaagaagagaacaagggttgtgcttttctgggaaccaactccacctattcaggttttcttcttgaccctgaaaaatgtgatatgctgagtttgccagacaaacaaagactagtccgtgagattgctcgacagtcaaaagatgcctcaagtatgcttcagtcatttacacgtagggaacttctagaaataatctgtgctgaattaggcaaagagaggaagtacacaggatataccaagagtcaaatgatagaacatcttctgaagataatttctaagaactccaacttgcacatcaatggaaatacacctcctcaatctcctgccaaaagttgcattggaactaaaaggaaaaaaaacctgcgactcaggatttacatcatgctcctctagggaacagtaaagaaacagtgaaaacctttttgtgtcaaaatgttgcttgcaaagctaaattgaatccagaagattctttttgcaggagatgttctttggtggatatgtcatcattatgatgataacaggatcctagtttgtggttgacctgcagctctgatc

SEQ ID NO: 78981 - DNA, 382 bp, Glycine max
  unsure (1)..(382): unsure at all n locations
  Clone ID: PAT_MRT3847_42335C.1
aatggatctcctataggtttgaaaactccccatattagagacacatcattgagtgtagcattgatgaagtttcactctcatctcagatagatgcttaatttatggtgttattatcatcgacgctgcactcaatcatgtttttctggcaatatgggattgtgcgaagtgaaagacattcatataattagcaagtgaggatcatatttctccattacttttatgagtttatccttttcttttgcttattaatttgtaggatttttcggtgcatatgaaagttggaagccatattttctatttctttttcccattttaagaaattttgagcaattttatttcaggcgaaacctnnngcgntgcctcnctctcctcttgttttttt

SEQ ID NO: 78982 - DNA, 592 bp, Glycine max
  Clone ID: PAT_MRT3847_42336C.1
gacaaacacaaacacaaaaagttcatcgtatatgggcccacacctctaccaaactgtcccaactctcacgtattcttcttcctctcgagaagacgacagaaggggaccaacaacaacgtcgtaaaagttcttccctttcactttctcacaatcccatagtaaccttctcttctttctgccactttttctcagtctttaatggctgcccgcatcaaaattccgcgttaaacaatcgtgggccggtgcaagttagcatttttcttatcttttgggatgtcaaaaagatacccaataggaaaagtcttttttcttcttcttttggggtgctttttttttgtcaaatttgattccagtttcaccctccaaacattgttctgtgagaatatagtgtttcacaaggcatttttttttctctttctctatctttttgtgtcttagtgaaagtgaaactgaggctgagggagagttttaatgatgcagattggttttttgttttgtgttagagtttcagtgagaatggtgtgcaagagttcacagttgagtgagaatgtcttgggaaactcctctatgatgatgtgttgttgctaactta

SEQ ID NO: 78983 - DNA, 779 bp, Glycine max
  Clone ID: PAT_MRT3847_42337C.1
ggatctttttctcctctctctctctctctctgaatcagagggacagcccctttgctccgcagattcgattcaatcgccgatctttatcactcactgctcctcgggaatccctcgtctcccccctttccatctctgtctcttctccctcaatataatgttccagattttcaagggctggttctgactcgatcaagcttttgactccttaaaaaagaaaaaaaaaatatggagggtgacacattctctggtcttggcaacggtacccagattgatagcaagatcttgcagacatttaagaaaagctttgttcaagtccagaacatcttggatcagaaccgggtactcatcaatgagataaaccagaatcatgagtccaaggtccctgacaacctcagcagaaacgttggacttattagggagctcaacaacaacatcagaagagtggttgacctttatgcggatctttcaagttctttcaccaaatccatggaagtttcttccgaaggggattcaagtggtgctgtaaaatctgatggcaaagctggccacaagcgacacaggcctctttagggagctctttttttttttatttcttcttttttcttttttgtttggtggagatgcacgacataacaattgtgttgaggggtagaacaagattaagttctgtagcaaaagccctcttgtattacagaactttctttagctcgtcacttactgcttactacatttcaaataaaaagaaatgattttccggaggggcctgtaccaaaaaaaaa

SEQ ID NO: 78984 - DNA, 625 bp, Glycine max
  unsure (1)..(625): unsure at all n locations
  Clone ID: PAT_MRT3847_42338C.1
atctcaagagacaacaccgacaacatcaaaatcattaagaaacattacagatacaaagtaatttgttgaatacaataggaaagtaaacacatacaatcaacttacacatgcacaacaatgacaaggaagaaaaagagttgaagaagtgtatatacacaattacacaccacaacactcactcaatataccaaatttaagattttttaacattaggctcgagtcctaattcctttctggttttcccaaaaacaaatcccccaggaagccttccaagactgtgcaacagctattttccttccaagtgaaactatagatattggtggctgtgccttgtatgttcccaacttacgctctttgcctcctccctctatcaatagcttcaggttcttggcaaccacttgagcatgagcacttgcatacatcccttgtttgatttcttgaacatctgtaatatctccaattgcaaaaatgttgctcttgcccttcactctcaagtgctcatcgaccttgatccttccatcagcatccaagtcattctttagaagagtttctctaatccatgttgaaccaagtggtttncctgtgcatagaaaatgaagatctgcttttatagtctctccatttg

SEQ ID NO: 78985 - DNA, 376 bp, Glycine max
  Clone ID: PAT_MRT3847_42339C.1
tacggctgtgatagacgactgagtgggaacagcactcatagtggagtaaccaataggagagtgcacttacctcgatgtacatacctagtgtgtgggatatacatggctaaatgtgtgtttggatgttggttcttgctctggttgtggccacaggtgccagatacgttcccaaccccatggatgctggtcttagggaccagatgaacttcatcagctatggtggagttggtgtctattccaggattggaatcaatggactgccttttgtaggaactggtgcccgactatgtgatggttttggcggaagaggaggacttggtggaggacttggtgggggactagttggtggcctcggaattctacagtgggaattgaa

SEQ ID NO: 78986 - DNA, 851 bp, Glycine max
  unsure (1)..(851): unsure at all n locations
  Clone ID: PAT_MRT3847_4233C.1
aaagaataaaagaaacgagcggcagtgaggtaggtccctgttcctgttggaatacacacgcgcttttacctttctcatcaattcattcatcaaaatcactccctacgcttttaaatagaatcgaagagagagtattgttcttaatttcttaatcctccgtcgtgggtggcgatgttgttcttctccggagcggattctcagatccatggagcaggctcatattattaagccaaagcctctcagatccgcggtggcggcgtgacggaaatgaagtcctcaagccgtctcttcacgatcggactggtgtcggcgtggtactcctccaacattggggtactgctcctcaacaagtaccttctcagcaactatggcttcaagtatcctatcttcctcaccatgtgccacatgaccgcctgctccctctttagctacgttgccatcgcctggctcaagatggtccccatgcagaccatccgctcccgcctccagttcctcaagatcgccgccctcagcctcgtcttctgcgtctccgtcgtcttcggcaatgtctccctccgctaccttcctgtgtctttcaaccaggccgtcggcgccaccacccccttcttcaccgccgtcttcgcttacatcatgaccttcaagcgcgaggcctggctcacctatctcaccctcgtccccgtcgtcaccggcgtcgtcattgccagcgggggtgagccgagcttccatttatttgggttcatagtatgcattgcagctactgcggcacgtgccttaaaatctgtgttacaaggaattttgctttcttctgaaggagagaagntgaattctatgaacccttctttttacatggc

SEQ ID NO: 78987 - DNA, 208 bp, Glycine max
  Clone ID: PAT_MRT3847_42340C.1
aaatgcctgaggatcactatgattgtgactcgatacataccaacggtagctttgctgagtcaggacatcaactatgactattggaatatgttcacatgacgcatcacttttatctcacactctaaaactgtgagaataccctctgatagtgtacatgcacattaacacgttcatgaacaacgaaagatactctgtatccccctctaaa

SEQ ID NO: 78988 - DNA, 2007 bp, Glycine max
  Clone ID: PAT_MRT3847_42341C.1
aatattgtcagcaatgtttattctagggctacttagaactgcccttgggttggagaactttgggttcgatatatgctttcgttggagcgtggtcatgcttcggagaaagacttgtctgaaatctttgagaagtccctgctgtgtaccttttcaactcttgacgagtatcttgatttgtttcttacccgggtagatggcttaaggcgaagaatggcatccagcaatgaagaggatttggaatataaaataataagggagacctttcagcgtgcatcggattatctgtcgccatacttgaagggcagttcttagtcgccctagaataaacattgttgacaatattaccaaccttcaaagtgttgtccaaattgcaagtataatccagccaaagatcaggtgttataggaaagtcagtaatggctcgttcatatagaacttgaattctggctggcgttccagaagactgctcaaatttcaaatagttcatgtagtgttgtaatctttctgaatcagaactcgagcggctcgagcggctcgagcgcaaacttcaacttgtaatcaagggagagagaaaatttcaagcacaaaaaatggcggagaagaaagtggtgatcctaggaggtggtgttgccggtgccaaccttgcaaaaactatacaacatcaagccaacgtcacccttattgatccgaaggaatattttgagattccatgggcaagtttgaggggattggttgagccaacttttgctgaaaggatagtgatcaaccatagagagtacttcaaaaagggtaaccttgttgtatccagtgctgtcaacataactgaaactgcagtggtgactgaagatggccagcagattgcctatgactatcttgttattgccactggacacacagaaccaatccccaaaaccaggagtgaaagacttgaccaatacaaaggagaaaatgcaaagatcaaatctgcaagttcagttttgattgttgggggaggtccaactggtgttgagcttgcagcagagattgctgttgattttcctgataagaaggtcaccatagtgcataaaggaacgaggttgcttgaatacattgggacaaaagcttcaagcaagactttaaagtggctcaaatcaaagaaaattgatgtgaaactagaacaatcggtcgatttgagctcctcttctgaagaaaataagacatatcaaacttcaaatggagagactataaaagcagatcttcattttctatgcacagggaaaccacttggttcaacatggattagagaaactcttctaaagaatgacttggatgctgatggaaggatcaaggtcgatgagcacttgagagtgaagggcaagagcaacatttttgcaattggagatattacagatgttcaagaaatcaaacaagggatgtatgcaagtgctcatgctcaagtggttgccaagaacctgaagctattgatagagggaggaggcaaagagcgtaagttgggaacatacaaggcacagccaccaatatctatagtttcacttggaaggaaaatagctgttgcacagttcccattcatgactgtgcttggaaggcttcctggcatgatcaagtcaggggatttgtttgttgggaaaaccagaaaggaattaggactcgaacctaatgttaaaaaatcttaaatttggtatattgagtgagtgttgtggtgtgtaattgtgtatatacacttcttcaactctttttcttccttgtcattgttgtgcatgtgtaagttgattgtatgtgtttactttcctattgtattcaacaaattactttgtatctgtaatgtttcttaatgattttgatgttgtcggtgttgtctcttgagatatgggattggagtcagaagcagaatgagttagagtgttattcattggacaatttactttcggttttatactgtgtatctttggttttgcattgactttttcagaatcccgttgaaatagaagttaacgtgattttaggtac

SEQ ID NO: 78989 - DNA, 319 bp, Glycine max
  Clone ID: PAT_MRT3847_42342C.1
ttccgggtgcgccccacgcgtccgggcagccataagacgagagacggggacttcctcgattgaagtcttcctcaaaaccatctttcgtgatctccaccctctctctaattttcacacgcagcggcttcatcgtccgttttcatgactcggtgtgcatactggcgacgtctgctgtgatggaccccaccttgccagggttggaggagtcccaggaattgattgatcagatggagatcatcctgtcctcgagacaggtctgttagctcgagactgtttgtgcggacatggttcgtggtgcaaacgacatgcgcctcacggt

SEQ ID NO: 78990 - DNA, 607 bp, Glycine max
  unsure (1)..(607): unsure at all n locations
  Clone ID: PAT_MRT3847_42343C.1
atttaccgtgtgatggtgccaaaccaggaccagtacacaacttggcagacaaaataactggaacacaccgagagcaacacaagccaatgcactcgtgcgcacctgcagcaccctcaagaagcttgcgatcctagcacgattctanggccataacagcagacacattgacaagaagcagtgcgcaaaaacctacattctacttcgctgcatatccatgctcttgggtggtcatgagcgcgttgactcataataaggtctgtcacacagaatgataacgtttgtctatcattgaaacataaatagggtgctactatgtcacactgtaacatgtcactatcctctataatatgcattattagcatagtgtgtaattaacgagcatctactaacattgctgaaagagatatgatctgttggaactttgacaactattattcagtagatctcacatttgatgagtgtgaagagcctgctctgaaacttgcatatatgttagtactaatgaggcttaatgcatttggagagctcgattgaacttatatgcatacaaagcctctttctgcttcaaatcttgagagtgatagaccagttttatttgngctaaatg

SEQ ID NO: 78991 - DNA, 195 bp, Glycine max
  Clone ID: PAT_MRT3847_42344C.1
atttcctgtttacctaattgcttttactcatttgactacggttcccttatatgttctatctccctttatatatatatctcataactaatcttatcatacaacaaattcaatctcacacttacacttacacacatattaattctcattttatttctcataactaatgatttcatactcattattctctataactat

SEQ ID NO: 78992 - DNA, 265 bp, Glycine max
  unsure (1)..(265): unsure at all n locations
  Clone ID: PAT_MRT3847_42345C.1
aataaggcggcaagaaacgctttttcctttttctctttctctcactantttctctctactacaacctccgatgtcccctcccntcnccattgnctccttccncgtcntctctctncggttgtggtanttggaaaangagggtttttttggcggcaatgganggggaaccgagcnagntgnagngtgncgcgnttgatgcctctgcnggagntatctccggtggcatatccaggacagtgacgnnaacttctcgatgttattaaga

SEQ ID NO: 78993 - DNA, 522 bp, Glycine max
  Clone ID: PAT_MRT3847_42346C.1
ggctcgagctggtctccaagatggttttcaacaaagagtagacctggtgggtgggtactatgatgcaggagatcatgtgaagtttgggttgccaatggcctacagtgtcacaatgcttgcatggggggccattgagttcaacaaggaaatcacggacttgaaccaaatgggacacgcattatgggcaattaaatggggaactgactactttatcaaagcacacactcagcctaatgttctttggggacaggtgggagatggagtttctgatcattactgctgggagcgtgctgaagacatgacaacttcaagaggtgcctacaaaattgatgaacaacaccctggctcagatctggcaggtgaaactgcagctgcattggctgctgcagctatagctttcaggccctacaactcttcttactctaatctcctcctagttcatgcaaaacagctcttcacattcgcagataggttcagaggtctctatgataactccatatcaagtgctcagcaattctatac

SEQ ID NO: 78994 - DNA, 446 bp, Glycine max
  unsure (1)..(446): unsure at all n locations
  Clone ID: PAT_MRT3847_42347C.1
tcccgggtcgacttacgtcgnccgcccacgcgtccgacggctgcgagaagacgacagaaggggacacaaacaaaccaagccaaacccactacattctcactctcattttcatacattttgcgtgtcattctttcatcacataaaattcttctgagaatgcattaccaagcagcggcggcggcgtggtgggggagctacgtggcggcccctcggaacgcggcggcggcggtagtgggggacccgctggagcgcatagagaggctggcgtcggagagcgcggtggtgatattcagcgtgagcacgtgctgcatgtgccacgccgtcaagaggctcctctgcggcatgggtgtgaacccaaccgtgcacgagctggacgaggatccaagaggcaaggacctcgaacgcgccctcatgcggctccttggaacccccttgggggttcctgt

SEQ ID NO: 78995 - DNA, 569 bp, Glycine max
  Clone ID: PAT_MRT3847_42348C.1
tccggggcttcgaagtgatggtgtgcatctggacctcctggactcactcgactgggtcggtagtaatggcttcctgttgcattgctgtttctgaacccaatgctgtaagagaccttaacacttttcttggctaggctgctgccttctgattctggataaaggtagtgcttgatagtactaaagaagagggggctaggggggaaatgagaagaaaatggatcgtgattcctcagggggcgagtctcggacaaggagaatgaaagcaacaggagtaaggtgcagaaacagaaactcagtttcgccattttcctttcaagattttgaaaaatgatagacagattttgttatatcctagctaagaggtaacatgtatatatataggcatcaggtgcccaaagtcattattttatgttatagtaatccaagtggaagtccgaggaggcaaggacataaaaacactcgtctgagtctgtcgtgcaatttatttttgtatctatgtgagcacttcctaatcgtcaaaagcttttattgtccttattgtaagctaaatacaaatactctgtttggac

SEQ ID NO: 78996 - DNA, 360 bp, Glycine max
  Clone ID: PAT_MRT3847_42349C.1
cttacacacactcatgtctatcacacaatctactcttacaccaatgttaatctcctccatttacacacatgattgaggttccgcaacttcatggatttggaccagcttccaaacacttattttaaacccctataaaacccttttaaaattttggcaaccccccgtaatttttagcccacatatcacaacttttctttttttttttttagacacaccacaagccctttttttttacacaaataaactttctaaatgaaacttcatttacactgtttaatttcgaactcttgaaatttctcttcttttcaattttcctgaacaccggtgagaaaaagaacacttttccccaaaactataaaa

SEQ ID NO: 78997 - DNA, 700 bp, Glycine max
  Clone ID: PAT_MRT3847_4234C.1
atcactggtaaagaatatgcaagaaacagtgtattattagaaagtacataaaattactgtatcatttaatcataaatcagtcacatttgataacttttataaaagcaactttcaaaaattatttttgaggataatttctgatttatggataatgtaaaactttttacaataaaagtgtatgaaaaataaactcctacaatgataaaaaaaaatgtgcaaggagtgtattattagagactctgttgcatttctcatcatatatataatatatataagtaaaaataatttcatattaattaaaaaaagcaattaacataatttacttttactaatcttaagtaaaaaaaaagttatttttaaaatgtctttcattataaagtactttatatcatgaataaaaaagtcattgaaaataggattagaattaaatgaaaaatattttaagaataataacattaaataagataaaattagttaaatttatatagtgatatataaaatcatttttttacttttatatatagatatatatatatatagatatgagtcaagagagagtatcattttaaggaagattgacatagcttgatgatgtgatttctttacataaatgtgattgcagggatatagaaacgtgatggaaaactgcagggacacattgctggtgctgaaagagggactcgagaaaacagggcgattt

SEQ ID NO: 78998 - DNA, 494 bp, Glycine max
  Clone ID: PAT_MRT3847_42350C.1
ggctcgaggttacaactactatgctgtggatacatgggcaaatatctacagttcaaacagtgaaggttatctgttggttggaaatttgttcctgtgtgatttgtttgtttgaatcgccctaaattaagatttctcctttgtgaaagtctctctgttaaactgatctttgatgcatgaagattgaagaacacttggattcaactcattgcaatgcctatgctgtgggtaatgggcattgccttttctaaacttattaggatttgtttgtaccttcagccgtttctttagctgttccactggctctaatgtccctgacaagtgaagttaatgggaagggacaaaattctcccaatgtcttggcatcggaacagattgctcctcgaggacagcttgttttctctgtgggtttaggagctttgatttttgtcccagtattcaaggctcttacaggtttgccctcatacatggggatgctgcttggactcggtgtgctt

SEQ ID NO: 78999 - DNA, 423 bp, Glycine max
  Clone ID: PAT_MRT3847_42351C.1
ggaaggtttcctgtcatcactgtatgacgtccgccttctttggggggggaggcggggggtaagcaaaagaatggtaatgtagtgcaataatacgagggtttagacaacgcccgccacaactaagttgtgatagaagagggtaagagaatgtagtggaatatggactataggtagtttagggatgagtaaacgagttagcgacagtagagcagagcaacgcaactaggaaaatacgtggactgctgtgccccaattttacgttgtgcactcaaagttgtggttagaagaccaaccttagattaatgcattggcccgttagttacaaaggttggcgtggatccaagcgtcctgggtgcggatcaccaagctgtactacacgggtgtaattagagggagtgttatgggctcagcaagaattgtggg

SEQ ID NO: 79000 - DNA, 724 bp, Glycine max
  Clone ID: PAT_MRT3847_42352C.1
gccagcttcatctaatttccatttcccattcccattctactcacacactcttcccatgagttcgtttcgtaaacccttcgtggccattctctgggttgttctgtttctgggtctccatgaggcagcggaaccagagaagagcacatacattgtacacgtggcgaaatcggagatgccggagagcttcgagcaccacgcgctgtggtacgagtcgtcgctcaagaccgtgtctgactcggcggagattatgtacacctacgacaacgcgatccacggctacgcgacgaggctaaccgctgaggaagcgcgtttgctcgagacccaagcggggattctggctgtcctcccggagacgaggtacgagcttcacactacgaggacgcccatgttcctcggactcgacaagagcgccgacatgttccccgagtcgagttccgggagtgacgtcatcatcggagtcctcgacaccggcgtctggccggagagcaagagcttcgacgacacgggacttgggcctgttccgagcacctggaaaggcgcgtgcgagacgggaacgaatttcaccgcgtcgaattgtaacagaaagctgatcggagcgaggtttttctcgaagggtgttgaagccattcttggtcctattaatgaaaccgaggagtcgagatcagcgcgcgacgacgacggccacggcacccacacggccagcacagccgcggtgtcggtggta

SEQ ID NO: 79001 - DNA, 488 bp, Glycine max
  Clone ID: PAT_MRT3847_42353C.1
cccacgcgtccgattttaaaaaaagttttgaggataaaaaacaaaaaccaaatacctataaaaaaaaaaaaacaaaaactagggcggccgttctgggggttccgtttttaggacccacccttatctaccgcgatagcccacatataaagcctcctaaattgaagcccaaaaccatttttttgccctcctttcaccgataaaaccccggggaaacccatcgtattccccttctcactcatcttccttaacccacctttttttttagcttaggggccaccaacaagtccccttccgatctccttcgcaacctgattggcgactggaagcccccctgtagcccccccttaaacgccccatttaccgcggttgcgcgcgccgttaccgctacacttaccagagccctaccccccgccctatccccattctttcctacctttttccctacgtttgccgcctttccccgcgaatctctaaatcaggggctaaat

SEQ ID NO: 79002 - DNA, 513 bp, Glycine max
  Clone ID: PAT_MRT3847_42354C.1
atcagaatgcttcaaacagttatggggggttacagctgcagcacccacagtacttcaggcaatcatgtcacaagaaaacaagctacaggaagtgatgattggactagcggcaagtgttttctcattcatgacttcctctgaatcaagcactgtatttgaagaatctgggatcaccgaggctgaactggcaaataaactaatccatattctcaagaaacaccgatatcctccaactaaggtccccaggataaggagatttgtgatagagctggcaatttggatgatgaaagaaagagaagaaaacattcatactttcaaggatttgggaatggaggaggtgctggagggtgtcttagagaccacttcagagcttgaaagctttaatggtttctctggaactgtgggactgaaccggcacaatctaacaattcactcactggttgaaacagcattgaaagttctggaagatagggaaattaatgaagcacaaaaccatgtttgcaaaatcagtaa

SEQ ID NO: 79003 - DNA, 499 bp, Glycine max
  Clone ID: PAT_MRT3847_42355C.1
ggttttggtgattccttttttttttcttttttttttttttgttgttcttttttttttgtttttcccttattttgtcctctggaaaaaaaaccctttccccctaaaaagaggccccgagaggctccctttggagtttttacacaaataggtccttttgcaagaattgtccccgggagggggggaaaaaacaaaacccccgggggggtccgggggggctactctacctgggtttcttgggaagaaagggggttgcttaacgtttgggcttgggggggccccccttttccgaggggggtttcccgtttcttttgtggggtttgggaaatttggctcgggaccccttatttggggggttttcgggggggcggcctaaaaacctaaagggggggggcatatgggggggccccccaaccccggggggaaaaacgtgttttttgggggagcgcgcgcccctttacgtggggggaaaaaaatggggggcccctggattttttccccg

SEQ ID NO: 79004 - DNA, 194 bp, Glycine max
  Clone ID: PAT_MRT3847_42356C.1
tcaccttattcatcccttttatccaaatcacaacaacttctctccccatacctacattatcaaatacttcccatacactgaaactgatcttatattaacataatttcacccctacattcaatatcttctttacaactcattctataattaataacacatataatcatttaaataccacaacaaacctatcatct

SEQ ID NO: 79005 - DNA, 249 bp, Glycine max
  Clone ID: PAT_MRT3847_42357C.1
gcgtttaacttatgagaccaggttaggagctcgtgtccttgtcccagtataagatctgcgatggcacgttgcttgtaccatctgtttacttatttttatcatgcagtgcatgtgacttgaaactgtgatggacttgtattgctttctgccttatggcacctgtagtagtgaactgatgaaggaagttcatgcggactctgaagctttgttggcttagaatggtaattttgctgtattctatttcacagg

SEQ ID NO: 79006 - DNA, 274 bp, Glycine max
  unsure (1)..(274): unsure at all n locations
  Clone ID: PAT_MRT3847_42358C.1
gtctgacactgccaccccaccaccatccacctccacaaagcccgcacgcagcaagaagggcacgatgaaggagaccctgttgactgcaagagtccacaccacggactgtgatgagcaggggacactatccagcaccgggatcaacanaaacctcaaccaggatgagctggaggcaccgctccaggagcgcaagacggacttcaaccagacacacttcgccaggatcaaggaagtcaaggaagccggtcgcaaactcgagggtcccctcagacag

SEQ ID NO: 79007 - DNA, 556 bp, Glycine max
  Clone ID: PAT_MRT3847_42359C.1
gcaaccaaagccatgggttcttaggctcattgctgtctcttgcatttctcttgctgtgaagatgatgagaactgaataccctttcactgatgtccaggcccttttgaatcaaagtgatggtgggatcatctttgagacacaaacaatacaaagaatggaagcactcatcttgggggcattacaatggagaatgagatcgatcaccccattctctttcgtagctttcttcattgccttgatggggctcaaagacttgccaatgggacaggttctgaaaaaccgtgcctctgaaatcatattcaagtcacaaagagagataaggctttggggattcaagccatctataattgctgcatctgcccttctgtgtgcttctcatgagttgttccctttccaatatccgtccttcttaaaagcaatatccgattcttcatatgtaaataaagaaagcgtggagcagtgctacaaagtgatacaagacatagccatagaggaagagtactcttctgcgttgaatggggtttcaagctcagacacaccgattaatgtgttggac

SEQ ID NO: 79008 - DNA, 289 bp, Glycine max
  Clone ID: PAT_MRT3847_4235C.1
gaaaaataatggccctcgccacacttgggatatgctatgattatgttatttattccgacaattttacccgacccccaatgcttcattatggaataccatggactacaagaatgtactaatatgatacgggggccatatagtaacatattggaaaaactccaccactaagaatccgttttttaataactccaatcgcgcctgatattacataatgaacagaggcctccagaatagctgcactggtactacactagaagccgcgtacagcacacacactacttgtattgcc

SEQ ID NO: 79009 - DNA, 174 bp, Glycine max
  Clone ID: PAT_MRT3847_42360C.1
gaaaaggcaagatacatcatttttgtttcaagtcatcctgatacttgcatatctgagtagctgtgtgccaatacaatgaagataaaccccgatgtgttatttcgttcagtcacgaccgctctccaagtttgacgttttcgtcaatcgacctagcattcctttcaataggaaatg

SEQ ID NO: 79010 - DNA, 367 bp, Glycine max
  Clone ID: PAT_MRT3847_42361C.1
ggctcgagaaaccaacaaagccataagaaagaatggatgggatgcttatgagcatatctacacctaaagggacagcctcaaaactgacaccatatgggattatgttaccgatgctgtacctcacgcgttaatgctctgtcacaggcaactgacgaactcccaacccaaagtaggccacgatactcactggcttatctactctcactcccatggctctaatacacatcatcactctacccataatatcacatggtgatcctgaaactccactacattcacgctgcctcttacgacacaacgatggaacaggtttgacacgcaaggttccacgacttagcctagaatgtcataggcgaaatcgaactct

SEQ ID NO: 79011 - DNA, 398 bp, Glycine max
  unsure (1)..(398): unsure at all n locations
  Clone ID: PAT_MRT3847_42362C.1
agacggcccccggccgccgccagagagaagcaccggccccgaggggccaccaggacgccgggcggacgcccacgcgcgnctcacggtcagccagcagaatgagggggggggactgattcaaggtaaactcacgctccagaccgccggtggtcacccggttgtgtgggcgactggccgcagcactggcgccttggggctgcgcgtccgcgtccctgctggtgctcccgcccgtccacngttcgaaatcctggtcatggctgcctcctgggggcggttgcttggcgcgtactatcccgcacnttatactagccggacgcgggcggagaaccgcctgtgccgcctgaggagtgngcgtgctctcattcgctgcggtgcgccggctgaccggtcctccggcc

SEQ ID NO: 79012 - DNA, 260 bp, Glycine max
  Clone ID: PAT_MRT3847_42363C.1
gatagatgggacacaagatacacacacagctggatacagaaacttcaatgccaatgcctgaactgtgtccgctggaacaacaccatgcggagcaaacaacccgcactcttacaacaaagcagggcactcagaagagttggatgcaactaatcaggagaggctcaaagtggctgaagaagaataacatgaactacagagactgctctgacactcaaagaaaaccacagggccttacaccagaatggaacactgactaaaaa

SEQ ID NO: 79013 - DNA, 572 bp, Glycine max
  Clone ID: PAT_MRT3847_42364C.1
ggttattattcagcctcgaggaaacataatggagaggtttttgctggttggaattctttgttctcatgtaacggttgcttcaaggccaacaattttgaatgctttgaagatgttagaaggggatattgaggtcccaccaattccagataggccactgagtcatgggaactatgtgttgtacagtggtgattgctctgggatgagctcaggatgtggatttgtgagctcatgaaaagttgaatgattcataaaatccatccttgatgagttggacaagaaaatgcggatcattcatgagggagaagctggaggatgtgaagtgcaagataccaagagccatgccctttgggacaagagtgcacctcttgttggaaggtcttgcttgtgggatatgtacgacagatatttgcctggaggagattaaggggattaaagaaaagagttagaccaaggtacagctctatggatatgcagttataattttttatttgtaagttagtagagctactaaactgattgtatctattaaaaattgtaaaattcaaataaaaatgatctttttcctcccttcc

SEQ ID NO: 79014 - DNA, 1123 bp, Glycine max
  Clone ID: PAT_MRT3847_42365C.1
cacgcgagccgaatcggctcgaggtagtatcataattcataatggcttgcttgggttaaaatatttagaaccctaagccactcaccgatagagaagccgccgccaccttcactagtcaccgtcgccgccgccgccgccttcaccagtcaccgtcgcattcctctttcagcaaaaccccttcttctcactcacactctcacacccatattctcaaacacacaaaataacaaacacaacacagcaccaacctcgggtgataacaattcaaagaaacacagaaatacacagacacaaacaatggctggtcgattccgtgagctgatgaagaaatacggaaaagtcgcactcggcgttcacttgagcgtctccaccgtttccatcacgggtctctatgtcgccatcagaaacaacgttgacgtggaagccatcctcgagaagctccacatgggcaccgtttccgaggaacaaaaccctaaccctaacccctccgacgacgtcgctgcgccgcccaagaaccggacggctcagctcgccgcctcggccggcggcgccttcacgctggcgatcctctgcaacaaggcgctgttccccgtgcgcgttcccatcaccgtcgccctcactcctcccatcgccaggttccttgcgaggaggaagatcatcaagaccggcttatgaattggattcggtgaggagaatcgtgagattatatttatataccttgttgcattgttgggttttgtgagcatggaagtggaattacaagagggtttttgttttgtgaagaactggtttttctgcttaataaaggtcatggtatatgcttggcctcatttcttgttattcggggagaattagaattttaattggttacaatgttgggtttttatgttttgcaacaattagaaggatggggcatgtaactaacttgtgtcttgttcatttttagggtcatgctttactttagacataaaattggaatgaagtttcaattaatggatttgctttttaacttgctttctcaaattggaatgataacaaaagtttcaattaatggaaaaaaaaaaaaaaaaaaaaaaaaaaaaaaaaaaaaaaaaaaaaaaaaaaaaaaaaaaaaaaaaaaaaa

SEQ ID NO: 79015 - DNA, 265 bp, Glycine max
  Clone ID: PAT_MRT3847_42366C.1
cggacgcttgtggctggtaatactcttatgccagctcggggtgttattgaggctactgccgggtcttttgaaaatgcggcatcctatggctgatctggcatgtgtcttttgtttcgtttgttcgcttgcttgattgaataaaggagatcaggcgtgaccctattgcagagtatgctctggctattagaaaatgtccacacctattttaattgtcgcaatgatgtgtgaagtgtgtgttatttttgcctatttctatagggggagg

SEQ ID NO: 79016 - DNA, 549 bp, Glycine max
  Clone ID: PAT_MRT3847_42367C.1
agattgttgaaaacggcatagtattgtatggcttgcttgggctaaaattagaaccctaagcccctcagcgagacagccgccgccgccttcttcaataaccgtcgcaatcctctttcggcaaaaaaagaaaacccttcttctcactcatattcttacgcacacaaaacaagaaacacaacacagcaccaacctcggcagcacaacgtgctaacaattcaaagaaacaaaaacacagacacaaacaatggctggtcgattccgcgagctgatgaagaaatacggaaaagtcgcactcggggttcacttgagcgtctccaccgtttccatcacgggtctatatgtcgccatcagaaacaacgtcgacgtggaagccatcctcgagaagctccacatgggcaccgtttccgaggaacaaaaccctaaccctaacccctccgacgacgtcgctgcgccgccaagaaccggacggctcagctcgccgtctcggccggcggcgccttcacgctggcgatcctcttgcacaaggcgctgttccccgtgcgcgttccc

SEQ ID NO: 79017 - DNA, 145 bp, Glycine max
  Clone ID: PAT_MRT3847_42368C.1
ggcctgcggccacagccgcggaccactctttcgagcagcatccgaagcagaagagagaggaccctgcatcaacatcactacgcgctgagaacaatgtctctggaggaagaactaggattcacatcacattctgcgtgtgctaaac

SEQ ID NO: 79018 - DNA, 1139 bp, Glycine max
  Clone ID: PAT_MRT3847_42369C.1
tttttttttaagggactaaactaaaattattcacttagaagtattctccataatatctttacaatacatataatggtgcagcaaaatacattaattaaaaacaaccaagtgaattatatgatcaatccttaatttgctttgcataagtacacaaaaaggaaagccagagccattgacttgcaaattgtggataagggaattccatactttcctttctcaaataaccctttcaaaaatggccaatagcacacaaccaaatatgtactacagaacacttccccaacaccagatccatgtccattgtttctaacaggtggttgccatcccaaccacatggtaaccagtgctgtgagttgaataagcaaaatagttgtgccaggtataaaaacaggagacttgttaaaaatgaatctaccatcattttcatttgcaccctcattggaaaatgtttcgtctttccttgttatttcaaagccaatgttagatatccttaatcgcttaagtaggatggccaaaaatccaaaaaaccaagaattcatggtggttatccttgccattcgttgattgttacaccatgttcgaattgacaatcctattttcaagttctctaaaagagtagacacgttgtaaatcacaagcaaagtggcggggatccattgtccgagttccttgggcaagaaactggagttattaatgatgcaataggcagggagagcagcataacatatttcaggaacgggtcgtaagctccaagtagtgatccaaagataccccaagcattgtctgaattggagcttaccaaatagggttccaaaaattggacaatgcttgcttaggaggatatcaagcaaccctgagatccatctcttttgttgaccaattacaactaaaatatcttgaggtgagcatcccataaaaggcgaaagttctggtgagcacacttcagatctccaaccttttgtgtggattttcagtccggtaagtaaatcttcagatgttgatccatacatccaacccacctgttttccccaagcagtgccgtattcatattcacaactagaaacttcactcgcagcctcaagagatttgcaaatattgttattgggtgtaaatgtcttcccttccaaagcatgagtagc

SEQ ID NO: 79019 - DNA, 420 bp, Glycine max
  Clone ID: PAT_MRT3847_42370C.1
atgaaatctctgtcacgattcaggtcttgcatgcacgggattgatcacctgctcacgatttaatagcatgttgtcaatctgcatactagcacttgagcgatccggcctggatagatatgtgactcgtatgacattgcattcaaagtcaatctatctgcagaatttgctacattgacatggaacaatattgggatcgtcaaagttctcaagaggaacctgccatgcctgatcacctgagggttcaccctataattcttgatttgttgttacaacatactgggtcacatacaattgagggcttggctttgcaggacatacagctattggacttcacttcggtactatagcatttgtgataatgacggaattggcacttttgctacatgatcatgtacaccttgttgcccattatgaatagct

SEQ ID NO: 79020 - DNA, 219 bp, Glycine max
  Clone ID: PAT_MRT3847_42371C.1
gtaaatatgtggtacaaagaacggggctcgctgttggtcacgttcctgtgtcctgagaaaatctgaggagtgaatacgattacctccagagaaaaagggtggtagccaattactccactcatgatgtagggcatttattcacagccagttactttattctttcaacaattcattatatttcatcgacttcaagattttcataatcttgatataagctgt

SEQ ID NO: 79021 - DNA, 353 bp, Glycine max
  Clone ID: PAT_MRT3847_42372C.1
ctcactcgtccgcacatgcgtgctcccacgcatacgatcacgcggataagaggcagactactgatagtccacaatctcgcaagtaatagaacgatacgacggatccatccactagagctgatgccggtctcagaaaagttactgtatcagatcataccctatcacaaactcacttgataagtgatggatgccaatctcgattatattcacatacgataggtcatggattccatcgctgtttatcatactactgatgcaccatgcatgctcattaggcaattcgcattcgctgctagcgatatgcatgcgacagatcaagatatactacaacgtgcactgggacccatcaccat

SEQ ID NO: 79022 - DNA, 416 bp, Glycine max
  Clone ID: PAT_MRT3847_42373C.1
ccaacccttccgttctttttttccaattttaagatttgtaaccggttttcaaaaaaaaaaaaaaaaaaaaccaaacctttaggggggtgggtttttttgttaaaaatttttgtttgggtttgaaattttttggttttgggccggcccagggttttttgagatagaatttgcccgggaaagcacccccaatcttggcattagaattgggggttcccaaaaatttggggtggtaccggtttttaataactttggtggttcaaatggggctttacactgatcgtttgggccctttaaagtccccttttgttgggcaggagttattggaggctgaacctgttttggtgggggcggctgactttggccatttgattttccggccgaaggaaacttttacggtttttaaggaaccattgggg

SEQ ID NO: 79023 - DNA, 476 bp, Glycine max
  Clone ID: PAT_MRT3847_42374C.1
ggtgttttttttttttttttggggggaagggtaagcctcagtattattattattctgccatcaattgcgaccaagggaagttgttgcccttccactatgattggattcatgcctattgaacagcgattcctcttttaggacattggttgtggaatgcgggggatttaacttcttgggcaaaaccatgacaagagactactctgaatacggtcattttactgctttaaatttagcgtgctccgggtttcgggggccattgtgaaatgaagacagtgccttcttagtttaagaacacgctatgcatatatatactcgtaatatcctgatatgtctgacccgggacaacacccaggtcaccgtttgttaaatacacaaacacactcacacagactcttgtctaaaggattgcaagcaagcttctttgatgattatattaactttagccccacagaatacgttttgggagcgcagttgtt

SEQ ID NO: 79024 - DNA, 1368 bp, Glycine max
  Clone ID: PAT_MRT3847_42375C.1
gccaattatgtgaggaaaaatatcacagatcctgtattgaggcaaatgatgccaatactgatgattccagggatgtcttcttttgtggaaacagatgtcaagagttatctgagagacttgaaatgctcctaggtgttaaacatgaaatggaagatggatattcttggacttttatacgacggtcggatgtcggctttgatgcttctcagataaaacctcagatggttgaatgtaattctaagttggctgttgcagtatcaataatggatgagtgcttcatgccatatattgatcatagaagtgggatcaatctgatccacagtattctgtataatcgtgggtcaaatttcaatcgtctgaattatagtggatttgttactgcaattctagagagaggtgatgagataatctctgctgcatctatcaggatccgtgggaaccagctagcagagatgccatttattggtacccgatatatgtacaggcgacaaggaatgtgccgccggcttctaaatgctgttgaatggggactcggctctttaaatgttgagttattggtcataccagctatctcagaactcagagaaacttggacttctgtttttgggtttgagtcacttgaatctacaagcaagcaaatattacataataagaatctgttggtatttcctcatgtagatatgttacagaagaagatatcaaaacataaattggctggtcaaaatctgaatccttcggaaggccagataaatgatgaaaccatatctattgaatctggttgtcatcttcctgatggttcattgaacaaggtacctgacattgctagcaatgctaaagatcataggaaatcttcaacagatgacacatgtcaagttgtatgtcaggcagctcccgaaattttggtgatggaagacaacaatagtattgaaaatgcccgtgattatgtgactggtacttgttgccgagctggagatagccagttgaacagttgctgggttccttgtgaggagagacagtgcctcacgtcttgtattagatctgaggccaccgaaggaaattgtgttagtgtttcgttggaggttactgaaaactttctcaatcaggtcaaagtagcaaatgaagctatttcaaatagcagtgctgaaaattctgcatcctgtggtgcagaaagaattcctcttgactcacaaattgcatttgatacaagggattcaaaagattctggtgactctattcaccaggattcatataagatttctgacagttgtgaactgagaagcaagactgattgtggtgaaccgaactttataggaacaaaagaagtacatgctgaacctgttcgtgtttctggttttcattctagaccca

SEQ ID NO: 79025 - DNA, 991 bp, Glycine max
  Clone ID: PAT_MRT3847_42376C.1
cccggtcgaccccgcgtccgccccgcgtccgccccgcgtccggagagatggcagcttctggttcgtggaagagtgggagtggttcttcgatgggtctggagaggatgagcgtggagcagctgaaggcggtgaaagagcaagccgatctggaagttaatcttctccaagacagcctctccaacattcgcaccgccaccacccgcctcgagatcgcctcctccgccctcaacgatctctccctccgcccccagggcaaccacatcctcgtccccctcaccgcctccctctacgtccccgccaccctccacgactcccaacacgtcctcgtcgacgtcggcaccggctacttcatcgagaaaaccatgcccgaaggaaaagattactgcgaccgcaaaatcaacttgctcaaatctaactttgatcaactcgtcgaggttgcatccaaaaagaaaaatgtggcagatgaagctggtgttattttgcaggcaaaattgaagcaactagagtcttcatcctaaaagtagttggtatagaatttaataatgtttttcttccaatgcattgtaccatagaactatttaaactttttatttgaaaactccctttttgttggcacctccaaaatttggcttggaactattggatgtgtatttagaaaatggagtcaaatcaatgacaattgaaatttagagggtatttaggaattttacactggtgtttcaagtacattatctcttattagagaagactgttgcagttcccgttataagtgttatttgctggcctttctggtgtgttctaatttcaccaaagctgctcctgaaatatgcttgcgtgtgggggtagagaagggtgtcctcgagtaatattgtgttagtctggggaagagggaagggtttcctctaggctaacgcaataatttggatagctttagagtgttcgtttggtgttgcggtcgaccttttcataggtaaataaacgaggttacgac

SEQ ID NO: 79026 - DNA, 367 bp, Glycine max
  Clone ID: PAT_MRT3847_42377C.1
cttgtgggagttaactaccacaagaattccctggcaaggtttgaacccaatgcaggttgttggagctgttggatttcaaaataaacggcttgaaattccagaagatgtcaatccagtagtagcacagataatacgtgattgctggcaaacggagccacacttgcggccatcattctcacaactgatgtctcgtctttaccgtcttcaaaatttgattgtcccaaaaacgggtgcaacacattaaaccaagttgtctataacatagctactgtaataatactgaaagttggtccttggttcaaagaaccggaacggctaaagttttttttttttagtccatcttgacatatcaagatattgctgaact

SEQ ID NO: 79027 - DNA, 332 bp, Glycine max
  Clone ID: PAT_MRT3847_42378C.1
caccagcgccaaacaagccctaaatctctcttttttttcttcttcttcctttaacggtgatacagatctttttacaaacacccatggcactgccctaaccaaatcacttccaaattctccaacgtgatctgctactagcacatcatcgatcccaccggaaagtacaactaggaatgcaacatcatcatccaactcgaaaggatcaatgtatattacaacgatgcctctgaccaaaggtacattcccccttccatgcttatgtatctctaacctgcaaccatggacaccattaaatctggaccctaccgcaagatcttcctttccgacaactt

SEQ ID NO: 79028 - DNA, 503 bp, Glycine max
  unsure (1)..(503): unsure at all n locations
  Clone ID: PAT_MRT3847_42379C.1
aagagtatatatactaaatatctagattgattctgtttgtacagtgtttatggattgcatgctttacactctataaaactcaacaaaaaggttgaaaaagaataattgtaagtttagaaataaacgatttcacagtcaccaaattgtatttctgtctttacagaaatcatttctgccaaacagatgtcagccgagcatggtataacaaacagaactattgtggctttgacggagttggagatgatggtggcttcaaatccgggtaattgggataaggagaggaggatgctacagaaccagttttcacttctgaaataaactctacagagcttttcacatgaccatcgtctgttgtttggttttcaacagaagatctatcttgggttaaggaactattattgttactatcattttgctggatggctccatttncatttgnatngagtttctttgaagcttttacccctttncttatatgcacagaaggnggcaaaagggaatcc

SEQ ID NO: 79029 - DNA, 749 bp, Glycine max
  Clone ID: PAT_MRT3847_4237C.1
cccgagaggccctgtagttgcaggggttcgtcgtttacccttccctaaagtatctggtgtgctttgttcggtaataacgaaaaacgatgggagctgaaactgaatcatcacaggaaaagccagcacaagagaggccaaaggctgctctctcacaggaacagttcctctcatggaaacgccacaaggacgctgcagtatcagccagaaaagctgaagtatccaggaagcgtgctgaagatattgcagcaggaactgtccaaatgaatggccgagaactgtttttacatgagccatgggtgtttgataattcacgttattgaggtttcttttcattggctcataattcataaaaactctttatggtcatgctttgaaaacttatatttcgggtcaaaatcttctctgtagcaagatatttttgaaatttaaagtttgtaccttttgcaaaggaaaggaaacaatgaaaagattgtttctggatgtcacaagggtggatctgtttcatgttaagaactttgtgaattatgagctgctggaaaattacaagttgttgtccatgtaatgacgaatttattctcttgagattaagtattttcatataggtgggcagttgaaatatcttctctggtattaacattacaaatttttattgcattgctctttagctatgctggagaggttttcggcagattcattagtacaaaggtacctagctacctgctatgtaccttttggtgtgtatgctatga

SEQ ID NO: 79030 - DNA, 451 bp, Glycine max
  Clone ID: PAT_MRT3847_42380C.1
gagctcaagaatctggtggttgaagaagggattggaacgttacaggggttgactatccttattacttgagattggggcatcgccctcttttagatgatggaacgattgtcgtttgcacttttctatgcctgtctacttaagttagttggtgattcagagcatataaatggggatcaataaatctgacacccaacttcaaataattaataccagctgacatgaaatgatcacacttttgttttctgcaaagctacaatgattgacactctaattcaagttgtggtaacaaccccctggtgtgaaaggacggctgcacaagtctctcaccattatgagagggtcatatataaacagccttggagcgtggcctgagagttacatgctacattaaatcagccatcatgctcttgtttctaaatgagttttttattaaggaaaaatgaaagaactc

SEQ ID NO: 79031 - DNA, 401 bp, Glycine max
  Clone ID: PAT_MRT3847_42381C.1
aggacgcgtgggcggacgcgtgggcggacgcgtggatccgcctggtgttggaatatacgtagggccaccacccaccaggctgattaaaccaggtcctctctatctctagagagcaagagggcctggacatgtggatctagctgcattaggctgttagtagaaagacatggatcatcccagttacaacggtgatctgaattataaccaccaggaaggtcaagttcagcaccaacagcagcatggtcagtgggcggcggcggcgcatccgcatcagtatgagcagcgatggatgggtatgcagtacccggccaccgacatggacatgatgcagcaacagacgctgatgtacccgcagaactgtatgacctatgctaacccttattacacgacgacgtcgacga

SEQ ID NO: 79032 - DNA, 257 bp, Glycine max
  Clone ID: PAT_MRT3847_42382C.1
cggactcgcgacgcagcacatgacgtgagcgaaagactggcacgaccatgaacatgcggattcggacccgataacacgtctgtagggctcggcgtgtgacagctacaccctctcttaattacttacaccggatctactaactatgaattggctaaaaaaggaattgatgctccaactgtaacaggcgcgtctgaatacatgaactcttagacgcttgtaatctggcagctgaactactatatcgcacagagaagcac

SEQ ID NO: 79033 - DNA, 360 bp, Glycine max
  Clone ID: PAT_MRT3847_42383C.1
aaagactcccacactagctaattcctacaacaatgccaagacatccttgtcgtttatcaggcgggggaggactatcacactatctacacacctcatccacatcatctgcatgaatcgccccacagctgtaactttccaagtccattctcacattaagactatcgcaggcctgaactaacgattcatcttctttccaaaatatgacctcaatctacaagcatgtctctaagcatgatcatcgcaataacacccaattttcttgcattggcaatgctctcttccaaaacaggcgcgcaaagatccaacctatgtatttccctccccaaaacactaagattatatttcactaccataattctc

SEQ ID NO: 79034 - DNA, 408 bp, Glycine max
  Clone ID: PAT_MRT3847_42384C.1
gaactcggctcgaggaacaagcataatatgtgacatgaaaatggcacgcgacaaaagtttatgactacaaaagctgaggtgtttttccttgatcggtcttaattactatgcgctgataaacacttttgctgggggagaagccaagtatacaagactctgctccacaaaaagcgtctcgactctaaatggagaatttccccgaccaactattatagccgacagaggacacacaatttctatatatgcttacaacaagggcaactacaatattactttacactggcattgagtgaatcctgcgaggaattcgtggacagatagaccttcatacatcattcaatgcccaatccaacctggtaagaaattcacacccaaattgatttttacttctcacgtacggaccatatg

SEQ ID NO: 79035 - DNA, 442 bp, Glycine max
  unsure (1)..(442): unsure at all n locations
  Clone ID: PAT_MRT3847_42385C.1
cacgggagtttctctaacgtgctttgcagagtgatgcttgccttactgcaggccgctgattgttttgctagggctttttatctttgctgtgggaaactgcatatctgaagctgtcttatttatggcaacttctgtttgaggccctaatgcttatgttggtgtggaacatcaaaagaatgcttcttaacccattttcaagccccaaaaagttgatatttcactagaccttagcttttcagctgttggagaagtatgcgtttttccagaaccattgtccattcactttagtgctactcaaaagagctgctcccagaaagctctggaggataaaaacacggctctcttatctggggatttgctgttaggctgacagtgaccatctggtgacaagtgtgacgccgggcacagcantcctgtgaggctggtctggtgtcttgctggt

SEQ ID NO: 79036 - DNA, 336 bp, Glycine max
  Clone ID: PAT_MRT3847_42386C.1
attgaatacgcgaccgacaaagccaacaccccgggcgggggtccacacaggcaaagacccccacccaacacccaagaaaagaagcgccgccccaaacggaaacccgcgacccggcaccccccccaaacgcaaaaggcaacccaggagagcgccccaaaacaacagacgcaaagcgcgcaccagcacgacaagcgcagagcacaccaggccaagagccacaagagcggggaaaggcacacacaacgaccgcgcccgagaaagacacgcacaccccaccaccacgaagaggagaaacccccccccaagacagcacacaccgaaaaagaaaacggggag

SEQ ID NO: 79037 - DNA, 1662 bp, Glycine max
  unsure (1)..(1662): unsure at all n locations
  Clone ID: PAT_MRT3847_42387C.1
agggccgaaaaagcaattggacaaagcaatccctttagacgctgggatacagcttcgagcaagagtgaggtccctcagttgacagaagcaaggatgttttcttttgaagagcttaaaaaatacaccaaaaatttttctcaagtcaatggcattggatctgggggttttgggaaggtttataagggaaaccttcccaatggacaagtgatagcaataaaacgagctcaaaaagaatctatgcagggaaagcttgagtttaaagcggaaattgagctcctatcaagggtccaccataagaatcttgtcagccttgtgggattctgctttgagcacgaagaacaaatgctggtttatgagtatgttcaaaatggaagtttaaaggacgctctctcagggaagtcaggaattagattagattggattagaaggctaaaaattgcccttggtactgcccgtggtttggcttatcttcacgaacttgttaatcctcccatcatacatagggacatcaaatcaaacaatattttgctggatgaccgcctgaatgccaaagtttctgattttggtctctccaagtctatggttgattctgagaaagatcatgttaccactcaagttaaaggaacaatgggttacttggatccagagtattatatgtctcaacaattgactgagaagagtgacgtttatagctttggagtgctcatgttggagctgatttcagcaagaaggccgttggaacgagggaagtatattgtgaaagaggttaggaatgcacttgataagacaaaagggtcatatggtcttgatgagatcattgacccagccattggtctagcgtccaccacactgacactgagcggttttgacaagtttgtggatatgaccatgacatgtgttaaagagtcaggttctgacagacctaaaatgagtgatgtggtaagagaaatcgaaaacatcttgaagtcagccggtgcaaaccccactgaggaatcaccctccatctcttctagttatgaggaggtcagcagagggagctcaagccatccttataatagcaacgacacctttgatttgagtgcaggacttccatatccaaaagttgaccccaagtaatccataattcactacctcaaatccaaattgtttatatatatacaagtttactaaatgttgagccagtgtgtgtacatagtgcatgtttggatttcagttcaaaatgccatgcaccaattccaaaataaaggtagggtctagatgcttttacaaacttcatcttgctacaaatgttcgtttggaattgtaaaacaaacatgcacatgatctttagcttgagattggacacgtcatccgaacttcttatcagtattttgaatatcattgattactgttggttttgatcaaaaaaaaaaaaaaatgcctgcttctttcgtgcatagtagtcatctcgagcttcaattanttcctcgtctttcttctccaaaggtttagaggagaaaggaaaaaaagggatagaagcccaaagaggtgaacaaatgttcatgttattataatttaaaggcaatgacaagggaattggtattgcgatacaaagatacatgaagaaatatgattccatgtcctgtgcgtgtttttaattattctatagaaatttggtcattg

SEQ ID NO: 79038 - DNA, 404 bp, Glycine max
  Clone ID: PAT_MRT3847_42388C.1
ggccaaaaaagggtacaacatttttttagcaccacaccttgaagcatggttattggacaaaattttttaacagcggcttagttttaaggtttcattatgcgggtacacttaaactccgggttttgggtaccgggtaaaaagagctttaactttcctacccaactttgataccttttttcccaaagggaattcagaagatgtttcaaactttaaaaaattttggggctttgttcctgggaccaaacttttggcttcaaaaattatttgcccacccttttgaatgaaaacagggatgagtgaaaattttttctcaccaagtccttttggtgtcattggtggggccccaaagcaaatgccttctggaactagggcgcttttattaccaggccctgaatttttgttgg

SEQ ID NO: 79039 - DNA, 377 bp, Glycine max
  Clone ID: PAT_MRT3847_42389C.1
gaaaaaaaaaaatattttgacaatttaatcgcccggagttttttgacatctgaacggtcccaccaacacacctttgatgtccaaaccccatctaacagaactaccagcttcccatatagtgagttgtatcagagcacggcgtaatcacgttcaaagctgccttcggagggaaacagtgaagcgaacacaacctaacacaccatagggagccctaagcaacactggtaaatccagaggagccttttttgtgactaaactgacattaaaagcgtacctctaaataccccctttccaagagggaaacctggaacccccgctggataaataaatagaacaaccttcgaacaaaagtgcgattgttatccaccgccagagag

SEQ ID NO: 79040 - DNA, 279 bp, Glycine max
  Clone ID: PAT_MRT3847_4238C.1
tacggctgcgagaagacgacagaagggggcatgtgggcatctaatggctaggttttatcttcattattctccggataagttaaggtagatatttggtttgagttgtgaccatcattatagatactcttaattaggtttgtattttgtaccatattagatttaacccgctcccctgtattactgatgttaccttttatttgtcatattgaatagtttgttttttttgcctgcttgtaaacattattattgccttctaatttagatcaatgttctttttag

SEQ ID NO: 79041 - DNA, 408 bp, Glycine max
  Clone ID: PAT_MRT3847_42390C.1
ccctatcgacttgatataacctctctatcagctaagattacggccatgaaaaaatttcacattattctacagatgcaaaatatatgaacactggtgaaatgtttctgaactagaagcaatgattgttcttttttactataattattttttgagttactgcgcctctcttgaggcctgagaccaaaggattatcaacactggctttctttctccacctaaaactgatccggggccttccaatctttttcagaccttaacccttatttgacaatttagaatcaagattaaaaaatggtatggcatccctttgatgccatacacataatatcctttacacctccctcacagaaaggaacagggattccacctaaattactcaaaggcgtccgtggaatgggaattagagct

SEQ ID NO: 79042 - DNA, 257 bp, Glycine max
  Clone ID: PAT_MRT3847_42391C.1
ctcctcttccaatcctattggaaccaccattccaatccaactcccgcatgccccatgatttgctctactcccatctctacatctaccattttccatctcctcatatataaattagccttataatcgttttttcattttaatcacaaaccccaaagtcctctaccaaacccaccatagcttagccacaacatggaggccaatccttctcacactacaacccctcatcttgatcatgctctacaaactcccttgctgaa

SEQ ID NO: 79043 - DNA, 440 bp, Glycine max
  Clone ID: PAT_MRT3847_42392C.1
ccttgctctctaatttaaaaataagccgcaaacatggccccaagaacggaccggcaggaaagagaaaggcaaaaagagggagaaaaaaaacgggggggaagggaaaaatatgtagacaaaaggcagacaaaagaaaaaaaaaaagggggccaaaaccaaaacaaaaaaaggacaaccagaaacactccaatcacaaacaaaaaaaaaggaaacgaggaacgaccaaaaaaagaacaaaccggaacccgcgagggaaccacccaccccctacagggaggcgcaagaaagcccggcgaaataaaggtcaaaagtgttgcctgaagaaagaggaaatccggtcaccagtccacacgacgaacgacccgagaagcctaacaggaaaagcctggggggccgaaagagggagccaactaggaaaaataggggggggcaaaaggccc

SEQ ID NO: 79044 - DNA, 332 bp, Glycine max
  Clone ID: PAT_MRT3847_42393C.1
aaaaaaaaaaatctcgtttcgtaaatcaaaccctttattaacatttaaaagcctttgggatttcagtctttaaaagcccgtttttacgggacacccattattggaatgattcccataaaaaacccttattttaaaagtcctaaaaagaaagcgtgggtttttccccaaaaaaaaaaggaaaaaagggtggaggcccctttgtccccccacaagcttcttgacccaaagtgggaataagggctaaccggggattattttcttctttttccccctttttccctttttctttcccaaaaaaaggggcccccccttgaaatcatggttttggtgat

SEQ ID NO: 79045 - DNA, 951 bp, Glycine max
  Clone ID: PAT_MRT3847_42394C.1
cacgcgtccgacagacgaaagaagcaagcatgtgtggcggagcaatcatcgcagatttcatacctcggcagcgtccccgcaccctcacagcctccgaactctggcccaagcgcagcgaacctcaacctcaacctcctcctcctccagttaagaggcagaggaaaaacctctacagagggatcaggcagcggccctggggcaaatgggccgcggagattcgcgatccacgtaaaggagttcgtgtctggcttggcaccttcaacaccgccgaagaagccgccagagcctacgacaaagaagcccgaaaaatccgcggcaagaaagccaaagtcaatttccccaacgaggacgaccctctgccgcaatacggatcttgcaagagcctcaacttggagttcggttacgatctcaaccaaacagggcttttcccttcttctaacgctgatgagaattgcgggtcccacgtggcttactccgttacggaagccaacaacaaagtagagaagctttccgaggagcttatggcgtacgagaatttaatgaggttttatcagattccggaaaacgtcgttggggatttgtgggcctttcctgacacctctccacctctctgatttctgtcacatcgtttcttctatcattaattctccaattctgttcttaaaatatgatatgtacaatcagcaatttcaatttgcatgtatttaactttcagactcttaggagatgtttggttcggttgttttctgttttcattttcactgaaaataaaaaacggtgatgaaaatgtatttgattggatttctgaaaacattttcaggaaaaatgaaaacaggaaacaaccagaaaatgaaaacaagaaatcaatataacaaaaaaaaccagtatttttatttcatgaaaataaagaactctaaatcaaatcaaacataatttcagaaaaaaaaaaaa

SEQ ID NO: 79046 - DNA, 808 bp, Glycine max
  unsure (1)..(808): unsure at all n locations
  Clone ID: PAT_MRT3847_42395C.1
cccgggtcgacccacgccgtccgaaagacgaaagaagcaagcatgtgtggcggagcaatcatcgcagatttcatacctcggcagcgtccccgcaccctcacagcctccgaactctggcccaagcgcagcgaacctcaacctcaacctcctcctcctccaggtgagtcaatatcttcttctctttcaacattaatttcccaactaacaaaacaagctcacgtgacgtgacagttaagaggcagaggaaaaacctctacagagggatcaggcagcggccctggggcaaatgggccgcggagattcgcgatccacgtaaaggagttcgtgtctggcttggcaccttcaacaccgccgaagaagccgccagagcctacgacaaagaagcccgaaaaatccgcggcaagaaagccaaagtcaatttccccaacgaggacgaccctctgccgcaatacggatcttgcaagagcctcaacttggagttcggttacgatctcaaccaaacagggcttttcccttcttctaacgctgatgagaattgcgggtcccacgtggcttactccgttacggaagccaacaacaaagtagagaagctttccgaggagcttatggcgtacgagaatttaatgaggttttatcagattccggaaaacgtcgttggggatttgtgggcctttcctgacacctctccacctctctgatttctgtcacatcgtttcttctatcattaattctccaatnnctgtcttaaaatatgatatgtacaatcagcaatttcaaattgcatgtanttaaacttcagactcttagg

SEQ ID NO: 79047 - DNA, 304 bp, Glycine max
  Clone ID: PAT_MRT3847_42396C.1
gaaggaagtctctttctacttgaagaaggttggttacaacccagacaagattccatttgtgcccatctctggtttcgagggtgacaacatgattgtgaggtgcacctaccttgactggtacaagggaccaactctccttgaggctcttgaccaaatcaatgaacccaagaggcccttaaacaaaacactcaagctttcattgcaggatgtctacaaaattggtgagattggtaccgcgccaatggacatgtttagactggtgtccagaaacccggtattgtggtgacttttggtccccctgggc

SEQ ID NO: 79048 - DNA, 390 bp, Glycine max
  Clone ID: PAT_MRT3847_42397C.1
tgagtctcgaggcaacagcttaagtaaaccaataacaaacaaatcaaccgccaccgccttcaccagttttttcattcaaatcctcacaacacaacatgttcatgtctctcttcagccacttcgacatcgcgcatggacagaagtggagattttcctttccctccaccgagtcgaaaaccaccagaaaagattcgaatggatcatcacccgtaggacccaagcaaaacccgcccaggtttgcgccggagttggatggcttgcactgctttgaatccatcgtaccctgttagatggattcctttcgtctttgatcctaatcacatcataggcaattcgattcaatttatttgttctgtacgcgatagatcaagttgtgtttccctgtaactc

SEQ ID NO: 79049 - DNA, 112 bp, Glycine max
  unsure (1)..(112): unsure at all n locations
  Clone ID: PAT_MRT3847_42398C.1
taaatccttcttaaatctccctaaaaaccaatatcttaacactaaaaccaatccctcatcactaaaccaccaacactcctcttntataccttctctccattcatatcacaaa

SEQ ID NO: 79050 - DNA, 282 bp, Glycine max
  Clone ID: PAT_MRT3847_42399C.1
ggagaacaccccttttaaaaataaagggtaactatctcattttttttagttaaaaaacatctacgggtttttgaaaacaaaaaagccccttccaacattcacatagtcaaacttttaaaagaggaaatatttaaggggcacccggcgggcagttttttttaagttctcaccccagggaaaacagttttccaaaaaatccaatcaaaaactgccccgggtcccaaggggcccccacttttttgtttccttggctcaggttaaaaaaaaaaggcatttttttac

SEQ ID NO: 79051 - DNA, 259 bp, Glycine max
  Clone ID: PAT_MRT3847_4239C.1
cggccacgcgaacaccacctataagacttacaatcgaggacacaaacaggggtttagaacaaatgccaactacactaatatctacaacaactcacattacattaaggaaccgatacacgtttaatatactcatcaaatcgaaaggcatatagtcacttactcagcgacaataatctcatgctcttctaggaagaacaacccaaataaaacaactacatacaaaaatctgaaatggagaggttgctgcaacataatcaac

SEQ ID NO: 79052 - DNA, 724 bp, Glycine max
  Clone ID: PAT_MRT3847_423C.1
gtcatcctcacataccagtatcaacaacagcagcaacagagcaccaccaccgactactatcccagtgtcagagatgatgaagaaggtgaaggaatttctaaaatacgagtgcccagacagaaacacatccctgtttccaagtcccaactcctagacgccatcatcctctctatccaagatgatattgatgcccatcactttcgtcttctcacctcgtaagtcttaactattaacttattttccttatctgcatctcactttctttttcttaacagatgcttagactctatacttcatgccgagcataaaactatcttaaggagatgcgtcgattatcaacttaccgattcactccaacaacttgtgtccaatcccaatgtcaaggaggaagggaacctctatgactatcagcctgctttggacctcaccgctcttttacgatctctcgacatacctaccaagaaagattatgataccggctccagagttaccattgctacccgtttccaacgtgctttcatgcagcttctttcaaatgcacaatttgaagaactatcagctagggacctgatgttaacgtctgcattgaacacagactatctccttaccttgccaatatatgttgattggaagagagcatatgagtctaatgcccatatatttaagggtggttatgcaactgagaagcagaagggcctattaattggtgaaaactggattacta

SEQ ID NO: 79053 - DNA, 261 bp, Glycine max
  Clone ID: PAT_MRT3847_42400C.1
cggctcgaggcaggcaggaacaaacagggctgccttctggccttgtaagacccttattgctgtcctcggaggggctggggacttgtgtctgcggggatcagagcgcacagggagtgcacatatccaggcaccaggactagggctggagtgaggggggggtatttcaattactttctattggtctcccttctctacactcttgtaataaaatgtctatttttaatgtttgtacacaacaatccttctattctagcctgcatt

SEQ ID NO: 79054 - DNA, 240 bp, Glycine max
  Clone ID: PAT_MRT3847_42401C.1
acgagtatgggtttcaaaggaaaccaacaccggggccggacagggcgacgacccaagagctacgaccttgtctaagaggctatgagacacggtgctagccagtatggaacgacatgttcttccacggacaaaccacgatgttacggagtgacccggtcgaagattttaagtccgtatcgaaggtgacggggttattcgatatgagtaaagggcatcaaccaacttagagaacctgtgatt

SEQ ID NO: 79055 - DNA, 264 bp, Glycine max
  Clone ID: PAT_MRT3847_42402C.1
tgagtgcttagttactaaaaagaaaagaaaaacaagaatcaagacatcacacactacgtatcttgaagcaggatctttggtctaagtaacgattctaccgaagacgaaattagtaaaaagaagtatataaaaaatttccaaaaccctaaaccctgaaccggcgcaagccagaacgcggtttggaacttggaaccattacagagtccagagcaatgtgtaccctcgaacccgacgtcatcggcatccgcggcttcgagctacgcc

SEQ ID NO: 79056 - DNA, 729 bp, Glycine max
  Clone ID: PAT_MRT3847_42403C.1
ggtccggaattcccgcgtcgacccacgcgtccggtccgtttctgcagcagttgagtgctgaacagtgggcaatcgttgatgtatccatagacaaagtagaagacaacattgacgcgtccctcgtgaaatgcagaaaacgcccttccggttgcattattgaggacaagtccaatggccattgcaaagtaatatgggtggagcacttggaatgccagaagagtgcagtccattcaatgtatcgcaccattgtgaacagtggcctagcttttggggccaggcattggattgcgactctacaacttcaatgtgaacgtctagttttcttcatggcaacaaatgttcccatgaaggattcaaccggtgttgccacgttggccgggagaaaaagcattttgaagttggcacaaagaatgacatggagtttctgccatgcaattggcgcgtcaagcttccacacatggactaagtttacaagtaaaactggagaagacataaggataagttctagaaagaacttgaacgatcctggtgaacctcttgggttgatattgtgcgctgtttgttctgtatggttgcctgtctcacctaatgttctgtttgatttcctgagggatgaaacgcgacgaactgaatgggacatcatgtcaagtggtgggacagtgcagtccattgcaaatttagccaaaggacaagaccgaagaaatgccgtagctattcaaacaattaaat

SEQ ID NO: 79057 - DNA, 2136 bp, Glycine max
  Clone ID: PAT_MRT3847_42404C.1
taccgtagcagtgtctagaggaagattccgagcagttttagggaaatacgcaccagggtcaacgtccccttcatgttcttctggccatgaccaagagaatagaagctctttggatttttacactggaatttttggacttgataagtcaaggataatggatacagtaaaccaagctatggaggagctcatcaagatggctaccgtgggggaaccattatggcttcgtagcttcgagactggtcgcgaaattcttaactatgatgaatatgttagggagtttgcagttgaaaattcaagcagtggaaagccaaggagatccattgaagcctcaagagacactgcagttgtttttgtggatctccctcggcttgtccaaagttttctagatgtgaatcagtggaaggaaatgtttccgtgtttaatatctaaggcggccactgttgatgtaatatgcaatggagagggtcctggcaggaatggtgcagtgcaactgatgtttgctgagctgcaaatgctcactcctatggtgcccacaagagaagtctattttgtccgtttctgcaagcagttgagtgctgaacagtgggcaatcgttgatgtatccatagacaaagtagaagacaacattgacgcgtccctcgtgaaatgcagaaaacgcccttccggttgcattattgaggacaagtccaatggccattgcaaagtaatatgggtggagcacttggaatgccagaagagtgcagtccattcaatgtatcgcaccattgtgaacagtggcctagcttttggggccaggcattggattgcgactctacaacttcaatgtgaacgtctagttttcttcatggcaacaaatgttcccatgaaggattcaaccggtgttgccacgttggccgggagaaaaagcattttgaagttggcacaaagaatgacatggagtttctgccatgcaattggcgcgtcaagcttccacacatggactaagtttacaagtaaaactggagaagacataaggataagttctagaaagaacttgaacgatcctggtgaacctcttgggttgatattgtgcgctgtttgttctgtatggttgcctgtctcacctaatgttctgtttgatttcctgagggatgaaacgcgacgaactgaagtaccactctcttgtctcctttccttctcaatccttttgtcaattttggttaataatttgaatggttaaatgtcctgatacgtatcacattatcttagtgggacatcatgtcaagtggtgggacagtgcagtccattgcaaatttagccaaaggacaagaccgaggaaaagccgtagactttcaagaaacttatttcggttcaaaattgagaaatttaaaaagaagatgcaaaggtgaaggaggttaaaaagacatggatataagtgaaatatggaattcttgtgattagtcagacaattaaatcgaaagaaaacagtgtgtggatactgcaagatagctacacaaacccttatgagtcaatggtggtatatgcttctgtggacattactggcactcagtctgtgatgacaggatgtgattcgagcaatcttgccatactgccctcaggattctctattattcctgatggtcttgagtcaaggccattggtgattagttcaaggcaggaagaaaaaaataccgagggaggatctttgtttacaatggcattccagattcttaccaatgcttctcccgctgccaagttaacaatggagtctgtggactcggtcaacactcttgtatcttgtacattgagaaatatccgaacgagtctacaatgtgaagatggctagtcaaaatcagataatcacttgatagagagtcatagactttaattagctgtgataatcttaggctctctattcccttttttggatggtattcggtttggcaaaaatagcttgcttttgtcccctttctccgtttctgggttagttttactcattattccactaccaaggagggttggttgagtttgtatatctgtatctgcagttctgtaggtagaaagatagacaaaaagcttttagaacctagagtattaagtatggcgtgtatagaattatcatttgttaattccttatgcagttggttttttggtagt

SEQ ID NO: 79058 - DNA, 1305 bp, Glycine max
  unsure (1)..(1305): unsure at all n locations
  Clone ID: PAT_MRT3847_42405C.1
cacgcgtccgctctatggctgcttccgccgcattcgacgacgccaagcacggcttttctcggccggagatgtacaaggaaaacctcgccggcaccttggacgcctacgaccgccacgtgttcctctgctacaagaaccacctcgcctggccgcctcgcctcgaggcctccgacgccgatcctcttcccaagcgcgtcgccaccgtctggagagctcgcaaaaacgacatcgccgtcaagcagacgaaaatcacggtgtgcgaggcgcgtgaggaggcaggtttctccgacggtgatgcgttgattttccccgacatgatcaaatacaggggtgtggaggagtcaaacgtggatgtgttttttaatgatgtgatagtgagtggtaaagagtggagtggtggaaagcaagggaaggnnggtgttgaagggttcgcatatatttgtatgtgctcatggaagtcgtgatgtgcggtgcggtgtttgtgggccggttctgatggacaagttcaatgaggaaattcagctgaggggattgaaggatcagatatctgttttggcctgttctcatatcggtggccataagtatgctgggaatgtaatcatattctctccaggatcagatggaaaaatcatgggtcattggtatggctatgttactccggatgacgtggcagccttgttggaccgacaaattgccaagggagaggtcataaaaaaactttggaggggtcaaatggggccacccggtgccgaaatcaaggtagcagatgaccataaacttgctaacggagtttataataacaaggccaatctaagcaacaatgaaaatgttacaggatgctgtcagggtgttaatggggtttcttgctgcaggactgcaagttttgatgataaaaccgcagaagcatataaaaagcaagggagcaataatataagttggtgtttgcctgtattaaagaagcgtgacattcttacggctggtggtatacttggagctttggcagctgttgctgtagctttcagattttacagaagggcaagttgaaattcactttattctcaagatttagatctcaagggatctgatttagttggttgaaaatgatgtatgattattttaaattttctcgattcctgcgtattaaaaaaaattctcaagttttagattcatgggggatgtagtgatgagaacttttgttattacttttttaaattcaacgtcattgtgattgtgttgtatttgtttctttacgttgctggttttctggtaaattcaaagtttctggttgattgcttttgttgttta

SEQ ID NO: 79059 - DNA, 357 bp, Glycine max
  Clone ID: PAT_MRT3847_42406C.1
ctgaaccctaaaaacaagcctgttagaattacaggcattgttagaatgggagctgagaatatgcgagtggagctttcacatcatatcaggtcagggcgtagagcatgtcaaaagggcacttgggttagtgtccccatgcatgggaacaccattaaagcttcatctgtacttaaaacccgcttttttgatgcaataagggctgagctgagtgcattctttgatgtgcatgatcaaaaaagaagctaccctagaagagtttatttagagatggcagggcagaacgtgacctaatgtgttggaggcttaaggacttttacttaagatgacttgagctcacgcttccacacacattgggat

SEQ ID NO: 79060 - DNA, 436 bp, Glycine max
  Clone ID: PAT_MRT3847_42407C.1
acggctgcgaagacgacagaaaggaggtatcatacttttatattcaattgaatcttgcttacattttctatagcctatttttcccttaagaaaggaatccctagaggtgattttggaacattataatcaccattaacagtaatactccaaagtgtgtattaactagatttcatgaacattttcatcgtgtccctctaataaggatttttatattcaaagaatgttatagaatgttttttaggagccaattaaagtacaaatgatatgacataaaatttaagttataaacaatgataaggagggaaatggttacataagattaattagaacatgactattgaatggttacataaataaaacaaaattttatttatgatcatctttcagaaagtttgaataggtataggcttatttggaagtgatattgggaaagaaa

SEQ ID NO: 79061 - DNA, 211 bp, Glycine max
  Clone ID: PAT_MRT3847_42408C.1
ccaacaaagacgaggccggggaataatacggccgcgtcaaaggcgcgcccgccgtcctcccctcccgcgggggccatagtcgtacctacggaatcgagtcctactaaaagcgactacctactaagccacgacgacgacgagcacctcaaattccgtccgcactctcgtacccgtatatgtctaacgttcccccaacgtacaccccaagaca

SEQ ID NO: 79062 - DNA, 332 bp, Glycine max
  Clone ID: PAT_MRT3847_42409C.1
ggttgggggtttttcaacaccaagggattcaatcattcaataactagcaggactgaataggtccttactcattggaaaagttacattttatgggggttttttttaccaaaaaagttttatgggggttttattacagaatttatttttggattgatattccacagggggaaacactgaaccccaaaaagtgctacgacttttaaaaaaaatgaaataaagttttaaaaggttggggctaatattttatcaggcccaagtttttaaaccatagtagtacctctgaaagtccatttttaaggcttttgggcctataataaagctcccttttagct

SEQ ID NO: 79063 - DNA, 544 bp, Glycine max
  unsure (1)..(544): unsure at all n locations
  Clone ID: PAT_MRT3847_4240C.1
gatcgaattacnccgaggtaggagctcactaggcagggggcgcccttgtaatgatgttttgaaaacattacactgattgcaacagacatccaaggtatagggacaaacatgatcctattcagattacgagcttcacgatgactaatattcagggcgattgacactcatgtcatatgaggataaacttactctggacagtcagaactcctagaaactcattgtaaggacgctaccaaaggcatgatgtgcaatatgagattggacaggacaatagcatgaccgctgataatgatgctagaatcgatagacatgcttactatgtgaagatactgttcggatctgcaatgcgtaactgggatgaggttcaagagaagagttacgacattgacaaaatcactgattgggagaatacctctgccgagctggtgcagattccattcaagccagctagagtgcttctggacgactttactgcggtgcctgctgaaggttgacttgcgtgcatgctagatgcactgaagcaacttgctggagactctaatgg

SEQ ID NO: 79064 - DNA, 736 bp, Glycine max
  unsure (1)..(736): unsure at all n locations
  Clone ID: PAT_MRT3847_42410C.1
ctgttggttttgacatcaatgagagttcagtgcagaatggttgccaaaagggtttgaagagagcatgagagacacccaaacgtggccttttggtgcacaaatggggaccccagttggagattctgtcacacacttctacaggagcttttctaagccattgtggatggaactctgtgttggagagtctcagctatggggtgcctatgattgggtggccaattgttgcagatcaaccttataatgtgaagatgttggtggaggaaatgggtgtggctgtggaacttactcgttctacggaaactgttgtttctagggagaaggttaagaagaccatagaaatagttatggactatgaagggaagggaaaggagatgaaggagaaggcaaatgagattgcagctgacattagagcggcagaaacagagaaaggtaaagaaaaagggtcttctgtgagagcaatggatgagcttgttacaaccattttatcacccaaggttctgtgatttgttgcatttagaatttaggatttgaatgatataataaagttgcttgtgtgagcatacttgtcataaactgctcaccaatctttaacataagactgagtctttgacagtgtctgtatgaagatcatttccagaatttgctctgattatttaaaatctttttctacttgatgttgctcaacccaaccgtcccctagaggcagtnccaaggccttagcggtagcggcggtggc

SEQ ID NO: 79065 - DNA, 412 bp, Glycine max
  Clone ID: PAT_MRT3847_42411C.1
ccctaaacaggcaaatagtttttttgcgaaagcattttttttggaaagtaaactttagatccaatacaaggcgtgtttaaaaatttcagggtttggggggggggggaaaaattaccttggtggagcccttaagggccaaaataaaaagcgggggggcccaatttccctttaccggggacccctaaggaacaattaaaggttgggggcgaagagccaggccgggaaaagaattcccatttttttgaccctctttaaagcaaatccccaattccttaacgaaggggttcacgaaaaacccgggttccaaatccctattaaagattctttttcggccaaataaagcgacttggaaccggccgcgccgggggaaatggggtccaggtacaaccccacttccagccccgctttgggg

SEQ ID NO: 79066 - DNA, 647 bp, Glycine max
  Clone ID: PAT_MRT3847_42412C.1
ctcgagccgaatcggctcgagctcttttaattttctgattttagcaaattaaaatagtagtgttattggtaggttttggcaaagatgttttcagttccaggggtgtcgggaatcctgaacagaggaggagggcataagataaaagggacagtggtgttgatgaggaagaatgtgttggacttcaacagcgtggctgatcttactaaaggaaatgttgggggactcataggcaccggcctcaacgttgttggctcaacacttgataacctcactgctttcttgggccgaagtgtcgccctacagctcattagtgctaccaaacctcttggttcatttcttcttccttccacataatcaataacttctatattcaaaattaagtgtttaatctctatactctcattcatttcattcaatgaaaaaaaaatcataagacttttaactaaaattaacctatgtaaagaatcgcaaacaaaaaactatataatattaagtttatttactttttttataatgacaaaaaaaattattgtatatggtgcacaaatttttgtactcttaaaaatatatcactttatacatagccaaacatatttattttgtattagattaacttatttggggtacgtaccttaataaattattat

SEQ ID NO: 79067 - DNA, 518 bp, Glycine max
  Clone ID: PAT_MRT3847_42413C.1
ccttgctgcttcctactgttctaaaagcaaaatcaatgacaccaacttctgctccccaatatctatgtaactggctagaacgttcttttttgtaagaattaagtctttgcctatgttgatcttaatggagtgtgcgttagttttctcttctcctttaatatttgcctcgcttccatgttatataccttcaaattgagtgatggcaccaagagtttcgagtttagaagcagcccagaaagccataaactcaattgggttgggttttgacataacacaagatatagcttttgacaactgtaagaagggttcaaggttgatatttgtcaatgagaagcagtgccgtaatctggagattcctggaggggtttcaattccaaatgtccctaactctatcaaatgtgtcagaggggaatccattagagtccattcagaagttctcaccttgcaacagatgttggagcacttcaaccaggaaatgtgccttggaggacaaactgcatctggccatttctgtgctt

SEQ ID NO: 79068 - DNA, 247 bp, Glycine max
  Clone ID: PAT_MRT3847_42414C.1
gtggaaatgcgctgggtggatacttatatcccatttactaatccaccgtttgaactggaaatatatttcaaggaaaagtggttggaagttttgaggtgtggagtgacagcgccagagagtctggagtgagatgggaaacctaataatgttgcatgggcttaaggcctatggttagagacgtcagctatggttctatttgacataccagatattcgtctcatttagtcacatgatgagcgagttacct

SEQ ID NO: 79069 - DNA, 380 bp, Glycine max
  Clone ID: PAT_MRT3847_42415C.1
tttacgcgtgggttttcgcatgggaaagcttaggattagcctgggctctgaattgctccttaagggcacgcgccattcctgagttgtacaccatctgatttaaagactggtaattatggtatcctgattgcaacacaagcaatgactgtgtcatttaatccaaacccatgttctgatgcttggagtagggaatttctgaatcgtaccggatttcattgcgatatcatatgcgtcactgcatggactgccactcctatgcaggatgtctcaggcccccattgactggcttatttcctttcaggaatgtgctcccaggacctattgtgttttaaatccacaatattcttttgtgttaaataggtgtatggggaaactgactt

SEQ ID NO: 79070 - DNA, 361 bp, Glycine max
  unsure (1)..(361): unsure at all n locations
  Clone ID: PAT_MRT3847_42416C.1
cgtctctnttctctaagaagaccacagaagggcctacctgcattgaaaaataacattccaaataaggtaaggtatgtgtattctcagagttatacaccaattcaatcagattaaataggaacatatcttttgcatgtaagttcattaactgttataataattacaatacctaaagagttattccaacaatgatttctgattggtagatggtgtttacagtgataatgcatgacaaataaactcaacattataagtactaattcattgtgactaatattcctgctttatcattggtgataattcattatggctgaataaaggagataggtcaaggctaatgattacaaaattctattagtac

SEQ ID NO: 79071 - DNA, 346 bp, Glycine max
  Clone ID: PAT_MRT3847_42417C.1
ggaaaaaaattggacgggctttatgagtaacattccactcccaccccaaaatacaaagttgagttgtacaaaaacaaaaatgacccgcatattccttacaacatatcccgcatatgtttgaaacgactcatctttgcctaaattacatttttttccgggacaaccctcattttttggaatatgaattgaactaataaggggaaataatcattttagccgaaaaaagctgaatcaaacaaggtggggctatatgaattgctctaatgaggggaaaaaattattttagctgaataacgctaaatcaaacaagttgatcaccggggacctgttgaaccaaacttcccat

SEQ ID NO: 79072 - DNA, 564 bp, Glycine max
  unsure (1)..(564): unsure at all n locations
  Clone ID: PAT_MRT3847_42418C.1
ccacgcgtccgcgggtattgcattcaccctggtcggaccacttttgatccaaatttgggatctttggttgcaataaagcaagatcgatttagctgataaagtccaagttgggtatgaagtaacctcgggtagcttttgcttcatccaataatatagatttgttggacctcttcaccgattgtaaagtggcctttcttgtctgcatcctgcaaacgtaagaacctgaaattggatacaagatttaaatgtctttgaaatattaaaagcctagcctattagatactgccatgattgtgaagctctagagttttaaattttaaactcttccaagtttattatactaggacaaacacaagcttacagcatgtttggataccaccaaaaatcgtggtggatccaataaaatcacggtgaatacgtgaattttctaaagcatctaccagtaacttcaaatacaacgtgattttagaatcgaatttgattgaccccaccgncattccaaacataccattaatctcttctaaacttattttttgtcaaacttgcacaatttcagtgaacgtg

SEQ ID NO: 79073 - DNA, 290 bp, Glycine max
  unsure (1)..(290): unsure at all n locations
  Clone ID: PAT_MRT3847_42419C.1
gtcgcangcacgcgtacgtaagctcggaattcggctcgagnatgngnntccgtngncattnatngnaatttnngntcagngaggnnaganagcnggnaggtnctgttgnaggngggtnantantagtatnggncnngttgnnganagatcggnatggnntctncttcagcttctcctcgnccgnncgncgncgcggaacattcgaggaagatattagggtntatggcgcacgnnaanaacgnnncgncagcttcatccanttctnngccatgacgggtatcctnctatnn

SEQ ID NO: 79074 - DNA, 340 bp, Glycine max
  Clone ID: PAT_MRT3847_4241C.1
acggctgcgagaagacgacagaagggagttacatatattagatagagaattaatgtatataatctttgttttacaaaaattaaaattaaggtgaatgcatattaatcataagttatacactaatactggattgaggaagcatcttaccatgtgaacctcattcacttctcaaatgcaattgacaagaatatgtaatatttaatgaaatccaatatctattatataaaaaaaatttaaaacagttttatactgtggattaattacacactaatatttataataattttgtttacttttacataaattacttaaaaaattagattaaggataatttttaatt

SEQ ID NO: 79075 - DNA, 208 bp, Glycine max
  Clone ID: PAT_MRT3847_42420C.1
atgatcacaggagtattgaccctcgtgatgggaccagtaccgttggagaacgtggacgattaagccagatcccagactgtgcccgctccaacagtcctcataaatgggcctctgcgaatgatcaataccagaggagggagctcgcatgcgtgagaagagagagcagcctgccgtcctacactatagattatgcatccatacgacgacc

SEQ ID NO: 79076 - DNA, 466 bp, Glycine max
  Clone ID: PAT_MRT3847_42421C.1
ctcgagccgctcgagccgcttgtgtcgttcgaggaggccacgaacacgggaagcgccgaggatatcgatcgatttaataagcgtctggtgcgtgccacgcctcatcacattgaagactgcaaggaattgctgaaactcatgggagtcccacacattacggctccgtgcgaggctgaagcttcttgtgctgcgttggccaagggtggacgagtctatgctgcaagcaccgtggatatggacgcactgacgtctgggggccctgttttgtatcgacgctttgacagtgtcacccggcgaaaaaggttccaattcttgagattcgattggaacgcgcacttcaagagctggatctgactaatgaacagatcgtggacttgtgcattttatgcggctgtgactactgagattcgatccgaggtgtggctccgaagaaagcatctgcaggtattaaggagcacaacaacat

SEQ ID NO: 79077 - DNA, 310 bp, Glycine max
  Clone ID: PAT_MRT3847_42422C.1
gaaagacgccaagggtccattatctcacgaggctagggaccatgggattgaccactatatcgctgaatgcagcgcatggggcaacatctgtgggaaccatgcagatgatagagagctcattcattggagatatatgacgtatgctaggggtccagatcagccagccgatgtctacggagttaggacctgatacagcacaatgccacctagacagcggatcgtcaaggtctacactggagagaccatggatagagtgcaggtgccagatgtagcatacgctgccaagctatccgatatcatggtattaaag

SEQ ID NO: 79078 - DNA, 319 bp, Glycine max
  Clone ID: PAT_MRT3847_42423C.1
ggctcgagcagataccattacatatggaagaatatacattgttaaaaccgctttacctacatttcaatgtgcgtgtggtttaaatgccatgtacgattggttagactacttgcgagcacatttagagggggaatcaatagttccacagatgcactcaataaaattagccccctaccagagctcaaggatatctttcgcactgatggcgaacacctgctcaagtttgcaccacctcatgtcagcgaagttagtaaacactgcatggatgactgatgattaatcaggaagagagatgcttgatggcgttgatgcatgccta

SEQ ID NO: 79079 - DNA, 807 bp, Glycine max
  Clone ID: PAT_MRT3847_42424C.1
cttcctttcaactttctcttcactaaaatatcttaaaatccaattttctctttgatactctttgtccacaaaattaattcacccccaccttctcaatttcttagccttctgctttgtattacatctttgtttcaggtttcatttgattgattcttttcttcaattctggtttgtagttgtttatatctgactcatgtttctaaatccatgaacagcatatgattttcagtgtcttttccttttccgaaggaggaaaaagaagaaaagaaaaaaaagcttggtgtgagactttgagagtcaattggttggttgagttctcaatttcttgtggcagttttgttgaacccatcaatcctttctttctatgtatgtacacatgactgtaccatgattttaatttggaaatgaagtagttcggttcagttgtggagggtgaattttggtgtggatttcttcttgctctttaccttctttgctgagatggaggaacataaatctgttatctccacctgtgaacaagatcaacatgtggttgctgccgctcagcacattttgaaggcactagcagcaagtaagaatgtatctgatgacttgagaaaaacccttttggatattgagacacaattgtcttcaatttccatagtcaatgagagaaaaggaagagaaatcaagcatttagagaggcagcttaagtgtgttgaagacaaggtaatgaggtgggaggcaaacccttccaacgagtcttctgagtatttgaaagttgttggtgaaatccaagtactgattcacaatttggaaagcttttct

SEQ ID NO: 79080 - DNA, 231 bp, Glycine max
  Clone ID: PAT_MRT3847_42425C.1
aactacaattgggaccgttcaatctaccactctttctttttcctctcatcaacacctttctcccctaatatgcagacttgcacccaggatcacagtttatctctcaatatatccagataatgattcttactttatggacagatttttcacatttatatagttatacagtttgatctatggcttgcaagaaatctctgaagcattatcatatgtttttaaacctcactattc

SEQ ID NO: 79081 - DNA, 674 bp, Glycine max
  unsure (1)..(674): unsure at all n locations
  Clone ID: PAT_MRT3847_42426C.1
ggcattggttctagtcttagaattggcaatgtcacattgcaacactcaataaagagaagaattaagagaattcgacaaaggcttatggctttaaagtatgagtttcttgagccccttcttggtggtgaaagtgctagcctgggatatagagtagcagtgggtgctgctagggcaaaagttggccggtggcttcaagaacttcaaagacttaggcaagcaagaaaagaaggggccacaagtatcgggctaataatttccgaaatgatcaagtatttggagggaaaggatcctgagttacaagcatctcgtcaagctggactacttgattttattgcttcgccttgcctgcatctcacacatcaaaacctgaagcatgccaggttatgttgcacttgttaaaacttctgagagttgtgctatctacacctgcaaataggagttatttccttgcacagaatcttttgcctccaatcatcccaatgctttcagcagctcttgagaattatataaaaattgcagcatctttaagtattcctggcaacatcagtttgccaccaagtaaagcatcagttgagaactttgaatcaatttctgaaatattaaataattntctgtggactgttactgctatttttggtcatataaacctcgaagaaagacaacttcagatgcga

SEQ ID NO: 79082 - DNA, 468 bp, Glycine max
  Clone ID: PAT_MRT3847_42427C.1
catccaatagaatatcataaaaaatatttatcagcaggtcctttcaccacttggagagctaaaaaaaatcggatattgatttgataaactgcattacaaaactccacattcaccagcaggtaaggtcgaaaactccaattctcggttcttattttacctcaaatcaaaccttggaaatcgagaacacgaaaggggaacatcgcctcgaggacaccgaagcacgcgccgaaaaaaacatcaatgacgtaatgcctcccgagagcgactctggaaatgacggggatcacggcccaggcccaagcgggggggaggagcaaatcaacggggagagcgtggttttttgcaaaccagcgacaaacgaggattgcgacacgtggacggctgaaatccgcgaggagtgagtttcgggagagggagaaaacggaggcgacaaaccaaacccgggaggagtggccgctagggaaggaa

SEQ ID NO: 79083 - DNA, 857 bp, Glycine max
  unsure (1)..(857): unsure at all n locations
  Clone ID: PAT_MRT3847_42428C.1
cgccgtgttcatctacccaatctccatgaagagggctttgttcatctacccaatctccatgcatgctgtgaatcatccaattcccacccatgttctctcaatgcagaaaaccattttaacagttctatttcttaccttggagttgcattgcttggagtaggaatcgctctagttttttctctttcgccggggagtgtgtcgggttgcctgtcttcgttgggaaccaggaatggaatggcttagaagaaatgtatgtgaaaacggcttgtggtttcacccatagcctgcggaaaatgctttattgtgtttcggatatcaatttaaagttcacagttatgcaaataaccagtgcattagtgaatggcagcgctcttcgtttccacttacctagatttctatgtgtgcgtcatcattcatcaaccaagttgtttgtcacagggctttcctatgataccaatgaaccgattctgagagatgcctttgggcaacatggtgaaatcattgaagttaaagtaatatgtgatcatgtgactgggaaatcaagaggttatggatttgtgcggttcgtttctgaaactacagctgctgcagctcgcaaagaaatgaatggccagatactggatggaagacgcattcgggtgagttatgcacacaaaggcgagcgactaagtctgccataccatccctcagacactgcatggttgccgcatattcactttctaactgtgatactcgaagtctatagttttggcttttaattttagccattcaacgcaccttttttcatttgatggcgatctagatagtctcagtttgtttcganngcttgaatnnttgttctcatgtnnctgnncnnt

SEQ ID NO: 79084 - DNA, 1946 bp, Glycine max
  Clone ID: PAT_MRT3847_42429C.1
cgaaaaatttcattgcagactttttttgcaccactagtgtaatgaaattacgattcttttttacattttgggaaaggatgttttcagaaattttgggagtcaatagcaataccaaggactaatatggggataacacaattttaagaatcaattattatttttctgtccttgaaaggcaaagtaggacagttgagtgttaaagttgtcgatgaaactgttggaaagaaaaaaacatcagtgtcttgagtaactggcaatccatccgtgtaaaacgtggttggatttgggtcactaattattgtacggagtactatgaggtagcattttaggttgaagcagagacgtgatttaagtgttgaatggtgtggaacatccggctcctagaagcacgttggcgtgaacacgatgatgaggtcaaagatagtgttgtttggagactccatcacggagcaatcgatccgagagaatggatggggtgttcctcttgccaatgcctattctcgcagggctgatgtacttgttcgtggttatggtggatacaacactaggtgggctatgttcttactgggccatctcttccctctggactcaactaaaccacctactgctaccacaattttctttggcgctaatgatgcagctttgttaggaagaaccagtgaaaggcaacatgtacctattgaagaattcaaagagaacctcagaaaatttgttcgacacttaaaggattgctcaccaactatggtaattgtgcttattactccacctccacttagtgaggaaggacgcctggcatacgcaagatccgtatatggtgagaatgctactaaaatacctgaaagaacaaatgaagtaactggtcaatatgcaaatgcctgtgttgaggtagcaaaggaaatgggcgtgtggtatatcaatctatggtccaaaatgcaagaaaccgatggctggcaaacaaaatttttgtgggatggattgcacctgacaacagaaggaaatgcagtagtctacgaagaagtgataaatgtgttcaatgaagcagggctttctgctgataacatgccaatggatttccctcaccactcaaaaattgattccaaacatcctgagagagctttccagcagaatgtttgtgatatcccattgtgacactgctttggtctagtctagcaattttataccacgttctatttgatgatctagattttcttccagaactatattcgagtttaatgctttgatgaaaccccggtgaagaatattttttgtaatgacgtctgattcatgtagttcatctcatataataatggaataaaactattgttgttgtaaaacagaagaaaatgcagtagtctacgaagaattgataaaggtgttcgatgaagcaggactttctgctgttaacatgccaatggatttccctcaccactcaaaaattgattccaaacatccagagagagctttccagcagcatgtgtgatatcccattgtaactgatacaggggatcaatcactgcaaaccaatataaggacagcaacacaaactcaagcaacaacacagactcaagctaccacaatggcagcaactcagactcaagagcaggatgaatatacagagactacaacagagcagagggtgcaattagtagctaggcccaagagagcagtcatcaaaccatcttacctgaaagactacgtctgagggtgagatgggaatttagctttgtaattttagctttgtaattttccttgcttgatgcttgtctggtagtgggagacaagccgaactttgattcccttatttcccttgcaagcaaaatatcccaattctgttagagacacttagtacaaatagctatgtgaataaatcaagcaaggcatgaatgagaattagctttccttgagttcttttaaaaaaaaaaaaaaaaaaaaaaaaaaaaaaaaaa

SEQ ID NO: 79085 - DNA, 3827 bp, Glycine max
  Clone ID: PAT_MRT3847_4242C.1
aattcggctcgagtgccgtgtcttgtttcttctctgcaccctttgggatctcttgcatagaccaaccccagaagaaggaaaaaaataaaaaataaataaaaatcaacccttttttattttggggcttgttggtgattctgttgtacagaagtgttcgttagttatacatttgttcaagattgttgtatagattgattcattattttaacgtactttggagcattgcatgagggattgccctctgattcttttgtgaagtcaactaaagttcctataattacaaactgagactcagaagcctccagtagggaatatagctagagcttattgccttgagttaacaccgtgtgaagaagatggctggtattaagagaagattatgtagtctgagtcaaaatccatgctcttcacaaagaattggatgaagtttcatgtcctatctgcatggaccatccacataatgctgttctcctcctttgcagctctcatgagaagggctgcagatcttacatttgtgatacaagttatagacattcaaattgcctggaccgttttaaaaaaatgagggacaattttaaggagaaccaaaatttacccagttctttagtaaacacaaacaattctggatcaagacagggtgatgcccaagatccaaataggcttttagaccaacatgatgaaggaattttacactttgctgatctgggaacgttggactgcacggggcttctccatctgacatccctgcaagaggtaaccggagagagttgtcctttgctggagaatatggtgggagaaaggcttcctgtctctctaataaaattaaccatagagagttgtcctttgctggaaaaacaatgccgcaggaagcaccctcaaatttggcctaaaatatcccgagaaaagctggatattacaatgaagagacctaattttcttctacaagaaatctggattttgaactgggccagaaagtctttgttttaattgtattttaccatatgataaattttcttttgggattggcttcaagaagtagtagattaatagtcactaaagcaaagtgtcattacattgaaagttattatgttttggtatctcatgttcagactttggtaaatatacaaagtgtagtttcagcagataagattgatcgtcatagtccatttctaatcgaattagttttagttcaatgttatggaatgacaccattctagtataggtcttttagtttaaagaatctgttaatgtaggtgccattagattgagtgatgatttgatatcctagtcaaatggtcagttttgaatccaagatgatgttatattcatgtctatcgggaagtatcaagaagtaactgcactttgtttaaatctataattcaaatgatgcaattggggctacctagtaatttggtttttggttcattttgtgggggcgacgggctgttctgctaatcggttttttgttttcttttcttactgttttacatttcttttatattgatttctatatagtcgagcaaataaagatttttgtgtcatgaaagtttaaacatctgggtggagggggaggggggggggggggagggtggaagtgtgatatacttcattttgaattataaattaacggatgcactacagagtcaacatattcaaaccctagatgaagattatacattggtgatttaaatctcagaatcatgcatagaatcaaaatatgactttcttcttatcatgttgtgtaggaagggtagtatatagacttcactggtgtgtaaataaaaaggaaaatgttatacaagatttagtcaaagtcaatttttcccttttgtatcttgttcttttttaatgtctgagagggggaaaagaaagggcaaatataattaaatttaaaggaatgcataaaaattggttgaaaggaagtaattagaattccgaacaatataatccgtcaatcttatcaccttccttcttgctgttgtttatgcattcttgtgctcatacattcacaataggacaaagcttaagtggttcatatggactttattatacctagttttagttaaatagaatatttcttctactgctgaccatgtcttttatttttaactttatgtaaaaaagtgtatgttatcttgttatgaaaaaatgaaaaaaaaatagtcttgtttcttgcatccttttctaattagttcaatatgttcattagttaacaccgtgtgaagaagatggctggtgttaagagaagattatgtagtgattcagatatccatgctcttcacaaagaattggatgaagtttcatgtcctatctgcatggaccatccacataatgctgttctcctcctttgcgagtcttatgagaagggctggggatcttacatttgtgatacaagttatagacattcaaattgcctggaccgttttaaaaaaatgagggacaattttaaggagaaccaaaatttacccagttctttagtaaacacaaacaattctggtaatagttttgatattaaccttactgtgcaatctgacatgcatgatgttaatgaactccatcaaaatgaaattaatgctctattgtctgttggacttgcacaaggatcaagacagggtgatgcccaagatccaagttggactgcacggggcttctccatctcacatccctgcaacaattaaccatagagagatgtcctttgctggaaaatatggtgggagaaaggcttcctgactctctaataaaattaaccatatgggaatgtccttttgctggaaaaacgatgccgcatgaagcaccctcaaatttggcctaaaatttgccacatccctggcattaaggttgacgatagatggatttagccaccaaggatgatcaacagagaatcaacaaattatcaaaaggcaacgtgtgatatcatctaaatcaaattcactgaagagtgctgcttaacccctagcttcgaagaagtacccatacaggtactaagtatcaacattgataaatacttaaatataatgattctccggaaaaatgttacacattagtgttgttatattccaacttaatttctccttaagattattgaggtcagagtgaaattcatggccatgggaaactttttttttgtttttcccatatgattgattggccagatggatagcaccatgaaaataatttcaaatttgagagaacactaaatgtaacttttgatttaattgtcgtgaaattgaacgtttgcgctatctgtgaatttttattttaggtttttggttagataatgacattgaggatgatctgcgtatatttaggaatgcgggagaagatgcatctcctgtgccaagcaggcgtcggcgtttgacccggacaaggtccaatgaagatcaaccttgatgactgccaccattttacctggtaatatttatagttcagtttttgcaggaacttgtattacttgaattgttttggatttgtcatcagttaacccacttggtttcttcactagaattgtctgaacagcatgcagaacttgttcaaagttttgtactggaaacatgcattaatgtaccagctttggacccagtagagtatgctgaagcagcaagttcagaataaatcatggtcaaatccttaaacacaagtttaattgaaacaaggaaaattgctaggaggatgttttcaaagaaccctttaatgtaaagacatttagccttgggcacgctaaacatctgggtgatttggaaggttattgcacagttaatatttgtattattatgtataacttgtactgtaagtctatgttgttcaattcttatctaatctcttctact

SEQ ID NO: 79086 - DNA, 531 bp, Glycine max
  unsure (1)..(531): unsure at all n locations
  Clone ID: PAT_MRT3847_42430C.1
ccgattctgagagatgcctttgggcaacatggtgaaatcattgaagttaaagtaatatgtgatcatgtgactgggaaatcaagagggtgtggatttgtgcggttcgtttctgaaactacagctgtctgcagnctcgcaaagnagaatgaatggccagatttacctggctaaaaacttagcttctatttcacccaacattattatatgtggaccttgttccttatcatctcacagatactggatggaagacgcattcgggtgagttatgcacacaaaggcgagcgactaagtctgccaaacaattcataaaacagttcatggttgcaacatattcactttctaactgtgatactcgaagtctatagttttggcttttaattttagccattcaacgcaccttttttcatttgatggcgatctagatagtctcagtttgtttcgatggcttgaattgttgttctcatgttccttgaccttgaaatgctaatatccgatgaataacaaaatataatttagggttcattttgtttt

SEQ ID NO: 79087 - DNA, 435 bp, Glycine max
  Clone ID: PAT_MRT3847_42431C.1
aaaagagggctttgttcatctacccaatctccatgcatgctgtgaatcatccaattcccacccatgttctctcaatgcagaaaaccattttaacaggtctatttcttaccttggagttgcattgcttggagtaggaatcgctctagatttttttcttacaactgggggaggaagtggatttgagtcttcattgggaaccaggaatggaatggcttagaagaaatgtatgtgaaaacggcttgtggtttcacccatagcctgcggaaaatgctttattgtgtttcggatatcaatttaaagttcacagttatgcaaataaccagtgcattagtgaatggcagcgctcttcgtttccacttacctagatttctatgtgtgcgtcatcattcatcaaccaagttgtttgtcacagggctttcctatgataccaatgaa

SEQ ID NO: 79088 - DNA, 567 bp, Glycine max
  unsure (1)..(567): unsure at all n locations
  Clone ID: PAT_MRT3847_42432C.1
attcggctcgagattgaatttgtctaggaatcggttgacaggaaacatgcctgattctatgatgaactgcaccaagctcttggctcttgacataagccacaatcacttggcaggccatgttccttcatggatttttaagatgggtgtgcaaagtatctctctttctggggatggcttcagcaagggcaattatccttcactgaagcccacacctgcatcttatcatggtcttgaggttttggatttgtcatccaatgcattttctggtgtgcttccatctggcattgggggacttggtagcctccaagtcttgaatttttccaccaacaatatctctggttctattcctgtgggtataggagacctcaagtctttgtacattgttgacctgagtgacaacaagcttaatggaagcattccttctgaaatagaaggggcaacttcactcagtgagctaagactgcaaaagaacttccttggtgggagaattccagcccanattgacaagtgttcatctctaacattnttgattctttctcacaacaagcttactggttcaatccctgc

SEQ ID NO: 79089 - DNA, 329 bp, Glycine max
  Clone ID: PAT_MRT3847_42433C.1
attgttgctgatatcatacgcagctgttgtgattcgcaccgtgaacaaacagagagccatggccgtcagaaagaacaagcgcatattcaaagggaaaaagggtcggcaagaagaacgcagctgatcccttggccaagaaggattgggatgacattaatgcccctgctatttatcaagtgaagaatgaaggcaaaaccctggattctcgtacgcatggtaccaagattgcttgtgaaggactgacacatagagtgatagaggtctccttggctgatcttgatagtgatgatgatcatgcatgcaatacgattatgttgagagctgaagat

SEQ ID NO: 79090 - DNA, 299 bp, Glycine max
  Clone ID: PAT_MRT3847_42434C.1
ctcagacctatacctaaggttttcgttacacaatgaaatgcctttgccttgtgccggcttttgctgctagtgccgatcttgggttaagagcctatggacgcccctcaaacagaaagtgctgttatgagccacctcacttgcactcacggtgagtcgctcaccctacattcatatgatcagcagctatatcagcgatgccagaattagaagagaagctagtgattgatggatagatggcttatttgctaggttaagatctgataaagagctctgattcaggcatgactaagagcgctgga

SEQ ID NO: 79091 - DNA, 580 bp, Glycine max
  unsure (1)..(580): unsure at all n locations
  Clone ID: PAT_MRT3847_42435C.1
tccttgctcaaggaggccaccgcggtggcggccgctctagaactagtggatcccccgggctgcaggaattcggcacgagcacgtacccagacttttgcccccagtcggagcttaccaagctcgctggtgtcgtcgtgaccaacggcaacgatctcctctcgtgccagaccgcctcgggctggaccttcatcccgccaacggctgagccaacagccactcaggagatcacgatgtgcaacacccagagctgcaagaacctcctcaccgctgtccaggcccttcagccgtcggactgcttcctctcgctctcgaacaacgagaagggcatcaacgccaagaagctcgtggacgagttcccaactttctgcgctgtcttcgctaacgcgacccgattctaagtccacacactttgagcggcctgcctgtctaggtttgcagcctcttcctaatgcggtaatgcatctagtctcattgtccaaaaaaaaaaaaaaaaactcgaaggggggccggtncccattccccctatagtgatcgtattacattcatggccgtcctttttacactcctgactgggaaaccc

SEQ ID NO: 79092 - DNA, 258 bp, Glycine max
  Clone ID: PAT_MRT3847_42436C.1
aagagtttcaaagtgctagtttcatgctgaagcctaatgtatgaaaatatatgttgggttgtgcttgccttttgcagaatgttattgttaagagtcatttttgtttcctttgttatatcttcatctctatgatacattaaacggttctgtaattgcatagctgatttctgttctaactcatttggttttcaagagccatatgattgattaatgctatgaaatgttggtttaggtaaaaaaaaaaaaaaaaaaattcct

SEQ ID NO: 79093 - DNA, 310 bp, Glycine max
  Clone ID: PAT_MRT3847_42437C.1
taggtatggctgcaagaaaactacagagagggacagcacaattaattaatatgcattagtttgacaaacaacatggtcgtgctgaatgtgtgtttcttccttcctttccgtgtgggggttatagctgcatgcatctgaccgaccttcttcatgattgatcagtcatcaacttatgatgatgatgagtattcacaaccattcattgatctctgtatatacacacactcaatgcctcctcaatgctatctgtaacatagcacgcttcattcaactcactcagattgtaacatctgtatatacacacactcac

SEQ ID NO: 79094 - DNA, 587 bp, Glycine max
  unsure (1)..(587): unsure at all n locations
  Clone ID: PAT_MRT3847_42438C.1
ggatgatnnnttggatnngcncgagaagaccatcaatcaactacaggagggattgccacaagtttgatcggatctgggatcaagtatgacaggagttcttgagtggttggatcagcttgtgctcaacattactacaaggaatgccaatcttgaacaacaacgaagaaatccaagtgtttcttctgcttttctggtgaaggatgctaatggcagattccccacattgagaatgacgacaaaatgttaagactttctgaatttttaaaagcagtaggttgccacttgcctcctttcaacctaccactaaccaaagccatggcttcagccaaatttcaggaagttaaattacaacagattagcaatccaccgaagctagtttcaccatatccacctattctacctactccacccgattttactgtcactaaacctgtgactacaattggagaccatttatcctctacgctgactacgcacaacacacacatttccaacacacctnnccaacccaagcaaactattcagnnnttgacacaggctgnnnnncaagcnntgtgtgaaaanngcttgcgtttttacnatgaaaa

SEQ ID NO: 79095 - DNA, 171 bp, Glycine max
  Clone ID: PAT_MRT3847_42439C.1
tttttgtatacacatcacaggaccatgggggtgcctgccatacatgctgctatcctatcccatgaaacccctcaaaaggatgagtttgggggggccaaaccattcaaacagggctgcccaatattttaactttttttttaaaagggggggttgagcacccccggaaagaat

SEQ ID NO: 79096 - DNA, 2989 bp, Glycine max
  Clone ID: PAT_MRT3847_4243C.1
gattcagggcaaacacgcggcttattttttacagcagaatggacattcctgttttataaggtgatagaataagaaacttcccagatattatatctaggagaatgaacgtgttaggttttatttctccttggaatcatagtaaaagtacacccaaagaaagccacttgttggtttctttgttatcaatcaatgtcagagataactctcaaagaagccctattttggaagatatatcatacaatttagaataggctaccaatcaattagaaatgcaaatgagctaaattgcaccaattacttcaatttctagttaagagggccttcacaactattggactcgtgacgtaatgcttgccatctgaccatatcagttttccaaacgcgtagttatttgtggcctttccttgcatggccttgaaggttaatttaaagctcttctcttcaccaacatttttgaacttcaagatgcttggcttcacagaaacggtgattccatacgggttttgaacatgagcaatgtaagtccctggagaaccaacatttttcaatgtccttgtaactgtcactgacccagagagttttgggactgtgattgagggatagttcaggttgaggagactaaatttcttgcggcatttatatggaccttctgtgaacactgagatctgtgtctcgttgtatcctaaagcacataagaagttgaggtaatcatcaattgttatgtcataaactagcccgggatccattgctctgtttggttgaacatgccctgccccgtaactgaatggtgtcgccttgccatcagtagcattcagtagtggctccacctcattgtctagtgttgtagctgtggtcatgattgctgatttaattgcagcggtactccacgtaggatataaggctctcaacagtcccacaatgcctgaaacatgagggcatgacattgatgtgcctgagactgagttaaacggaatcctgcgcttgtcgaacacttgattggttggtccttgggcctcagtataggctgctataactgacacgcctggtgcagtgatatcaggctttaggatctctggcaccatagtatttggtccttttgatgaaaatgctgccataaatggggctggcttagtatccaattgagtctttggatgtgtaatatatgccactgggaacttggttgagttgatgtaattaaagacagcactaccatcagtaaaattgatatgagaagcaggaaggacatgaggatccgctataatttcattcccagtagtcttgtcattagcaaggaccattcccacagcaccagctagaaaagcttgctctcccttgtccactcttgcatttattcctcggagacacaccacgatctttcccttcgccttgttgggatccagggtcccattctggcacagcaccgcgtcttcagctcttgcactcgccaatttagcatctgtggctttaataattggatagaacttgtgtgccaatattgtagctgataagctttcccccttgaaggtaatatcgttaccaaggacaacgtaagtggggaactgtcgatccatggtgctggcagcaaccgtaacatgccagggtgcgagattttccgcagtggcttccgcgggcccactgttgccagcagagcaaaccaccacaacgccacgcttggccgcatggaaggatccgatggcaacactatccttgaaaaacgtggaggaagagccaccgagcgagacggagaggacatcgacgccgtcgtggatggcgaggtcgaaggccgccaagatatcagcgtcgaagcactcctcgcctccgacggggggccagcagaccttgtaggctgccacacgtgccattggtgagccacccttggctgttccctggccctggccgaagacgctgacacgtgcgaccatgttcccgccagctgtggatagggtgtgggtcccgtggccctcgttgtcacgtggcgagtcaaaggaggagttcagtgggcccgccactgaggcgtagcccttgttgaagtaccttgcccctattagcttcctgttgcagtgaaaagtatgatcaattccgttatcacagattcctctccactttgatggaattggtcccaaaccttgctcactaaagctctttgattcaggccaaacacctgtatccaggtttcctatgatgacaccctcaccaaatctagctttcttccagattgagctggattggatcaccccattatgctctagctccatgaaatcccatgatcgagtggtgtgtagctttctcccacggttctcgaacactgacaacactttggggtgcttagctatctcaacagctacttcttcgtccaaagttgcagcaaaaccattgatgtgccttgtgtacgagtaaaagatggagtctttggctgtattagaacttcctaagaaagatcccagaaagtcatggtgggactgtgtcacttgattgaagtcaactgaggataattctgggccgtgtgagtgggctcccaagtacaccacatatgactttttcactgcaaagctgggtctgtgcaatagacagactagaagaatttggagcagaaagtggatggaaggacttggtggcctcattgctttgcctatctaggaagccctcctttgctcgagcccaaatcaagcaatgcccaagaatattgagtcagctgataatgtttatatattaaaagtaactcctagatcaaagtagtttttccatcattttttgccctaataatattaattttgactgacatgacaagtgtccattttattttacgtgaaatctcttacaatgccccatatccccaaattatcttgatatgataaagtgagataagggctaacttagtctgttataaacatttaagggactatagaactccattgtaaaaaataaaaattcccctcaaggtggataaagttcaactcttcccaaatttcccccaaaaaaataaacccac

SEQ ID NO: 79097 - DNA, 287 bp, Glycine max
  Clone ID: PAT_MRT3847_42440C.1
gattgtgattcccagcaataaggttgcttctatattcttaaccttcttgacatcatatctgcacataccttaaaacaaattattagcattagtttgtgtttttttactctatttttcatctctctaccttaaactttatcatagtatcagagttctcctttttttttagagctttatataatcattaacattagttgcgcaatcttttctttggtccgctcatggcttctgttcgtgatgctgcttctcatgaacttggttttgaagaaggcatgatctggctaccc

SEQ ID NO: 79098 - DNA, 292 bp, Glycine max
  Clone ID: PAT_MRT3847_42441C.1
attttgttctctgctgtggtgtgtactggtgcatgataatcttaatctagtgtgcatgaatatgtcaagcgcttactttagtggttctaaattgaaaagttttctagctggtcataatatcaccattactgatggtattgacacaactagtgcagctgtgtaatgtagaacgttagcggattgtgattctctcaggagaaactgtgagcagatgtctgatgacttgtgtgtggcttctgaggacaaggctagtgtatggtcacgactccgtcttgttacgtcgtataatctc

SEQ ID NO: 79099 - DNA, 990 bp, Glycine max
  Clone ID: PAT_MRT3847_42442C.1
atcatgaatacaatgagcaaatgaggtagctactattgcttgccatacaactacaacagttcttaagagaacccttcctataccggaaaacaagagcacaagaaaagtccgcggataagtataacacttatcacagcacaaaggaaattgaaagtgaaacaaaatttcttctagacaataacagtctcaactcaagaggacagatagtctgtaatatttcaccatgatatcagatttcatgtgcatttatcaagctttctctttaacttccaacaatctggctaaatatcattgttaaatcacacacattcttcactaacatttatgaaatatctattgttttatgtttgagcattgagaaataaaaaatctatggaaacatgaccacttaaaaaattcaaaatacataatattacagtcaacacaacacaaaccatcagctcatagagcctcggacttacctcaactggcatactgcaagagcagcaacaaatttcaaagaagccctcttcttcttttgtaatcactgactgtcagcgtcaacgcatgcctcctaccatcattttcagagactctaaatccaactgttgattctattctttgttttcttgccataaatcctgcctgagctcctggagccccaccatacttttgaagtaatgctaatgaaattggcagctcgaaattgtgcagcatatttgactctgtcccttgatccacaggagcacttgtatccaccaacttcccagcaccagcagcagcttccaaggcagcagcggtagccaccatgccagcctcggctgtcactggtgctcctgttccattgctgccagcaccagccacattgccattagcactattatttccagcagcagccttttcaccaggttttgcagcatagtaattccttgatctagtcgatctcgttggaaatggatcataacctgcctcccctgctttcaaacccctctccactgccgccaattcagc

SEQ ID NO: 79100 - DNA, 218 bp, Glycine max
  Clone ID: PAT_MRT3847_42443C.1
tctgatcttctcctaattcctaagatgttgatataagatatattgttgttttattctatcagatcttggtttatgacttgtatacatcacatatcaggaaacttgtttgtaatgtgcatttaaaatggccttgatactgttgtgattcagttgtaacatgttgcttttaaatttcagtgttttatttgacttaattgaatatgtttttatttattcgc

SEQ ID NO: 79101 - DNA, 476 bp, Glycine max
  Clone ID: PAT_MRT3847_42444C.1
aattcggctcgaggtaagaacactttctcttctcttttcccactattgttctgttactgtttttgcagcagcacttcaattcaattcaattaacgaactgcagcactggacttgttcgcttttgcctttttttcttcaactgctctgtaaccgaaaaccaccctttgccagttttgaatcttttgtttctggttttggttacagtttttccgagccttgctattcattattgtccttcgaatcggattgatttggacactgcattgcatgtaaatcaggaaatcatgactacatctactcgtgacatctcagataatgaagctgatgagcagcagcagtcggaaccacaaatgcagcatttatctgcaaatggaatttctcatgcaggtattggtactcagaatgttcagtatgcaacacctccgcagcttggaactgggcatgctgtggtaccacccacttacccatatccagat

SEQ ID NO: 79102 - DNA, 791 bp, Glycine max
  Clone ID: PAT_MRT3847_42445C.1
tgttgtacggctgcgagaagacgacagaagggggacgggggggttgttaaattaaagaaggaaggaacgcggaaatggaaatggaaatggagaggagaaggcgaggttgatgattgtgatggcggaagcagagacaaacaggaatggcagtggcatcctccttcatcatcatcatcgtcgtcatcatcgctctcatcttcttctccctaaaccctcctcctgcaccatcacgtaggtcacttctcctcaccacttcatcgtcttgctccaacgaatccaatggccttctcaactaccactgcatcttcccccaaacttcctctttctcaatcccctccctctcgctcttcctcctcctccacttctacatcctcatcaccaccgcgcagcaccacttctccctcgtcaccacaaagctcgcctcgcacctcaacctctcccccagcatggccgccgtcacgctcctctccctcggcaacggcgcccccgacgtcttttcttccctcgccgccctccgcgccggtcagtaccgcaccggcttcggcgccattctctccgccggcgccttcgtctccgccctcgtcgtcggcttcgtcgccatctacgctgctccgttttccgtcgatcccgcgcccttcgttagagacgtgctcttctacttgaccgccgcaatgttcctcttctatgtgtacctcagcgccgagattttcctctggcaggccgtcggattcgttggattttacttgttcttcgtcggatttgtgttttacatggatttggggatggcggat

SEQ ID NO: 79103 - DNA, 972 bp, Glycine max
  Clone ID: PAT_MRT3847_42446C.1
agcccacgcgtccgattgaaacagaaaatttgaagagtttgtttattgtgaaaaaaagaaaaatgcaggcagcaaagaaagccatagagacctttaaggaaaccgcagccaacattggcgcctctgccaagtctggcttggagaaaaccaaggccactatccaagagaagaatgagaagatgaatgcagaagatcaaactcaaatggatatggctaccaagaggaaagaagagaagatcaaccaggctgagatggagaagcagcaggcccgtaagtactacgccgctgcaaaacaatacgccatggctgagcacatggcaaagggcaaccacgacaccgccgggcctagaatcgagactgccacacacatcaccagtgggcccgggactgacaatgctatgtactctaacactgggcctgggactgagactgccacgtacaccactagtgggcttgggcatgacaatgctatacccaccagcactgggcctgggactgccacatataccacaaggcctgggcatgacaatgctatacccataagaactgggcctgggcctgggcctgagactgccacctaccccactggtgactatggacaaatgggggctaaccagggccatgagcatggacccaggcaaggaggactcactgaagatgtaacggcccaaaatacccttgttgcaggtggcagtgctccttcaagtgggcctgggcctactttcaattgaataataattactgaagtttgaatgttcatttggttttttttaatttatgttctgttggatatttagtttagggtctttgcattactatgtgacatatcttgtgtacttgtattgtctcttatatttcttaattttcttaattatgggaccaatgttgtattgtataagggaacatttcgttccgtgaagttgctatatctgtttatttcaataataaataaaagtttagtagtgacccaaa

SEQ ID NO: 79104 - DNA, 487 bp, Glycine max
  unsure (1)..(487): unsure at all n locations
  Clone ID: PAT_MRT3847_42447C.1
cgcgtncgcccacgcgtccgtctctgtctggtccattgtacgacttgcacgcagaggcaagactcgcagccaggattatataagacaatgagtggtgcgcaactgcaaagtgcttcccctgccttgaccatacaagggtcacagaaaaatgtaggttcggtggctgtggcaactgctgcagaatcaaagccaaagaagaaaatctgctgtgcttgcccagacactaaaaggttgcgagatgaatgcatagtagagcatggtgaatcagcctgtacaaaatggattgaggctcatcgactgtgcctccgtgctgagggattcaatgtttgaggttgatagtgaggaaaagacattagtagattaactcacgtgattttatgaaattgatagaagattttgggctgcaattttcaggttgacagtttaaattttgaataaaagctgggaaattgattgcttccncnnaaaaaaaaaccccaaaaaacaa

SEQ ID NO: 79105 - DNA, 168 bp, Glycine max
  unsure (1)..(168): unsure at all n locations
  Clone ID: PAT_MRT3847_42448C.1
acgaggcaccacattcacctgaggcttccaaagcaatggcttcccttgcagcatcccactgctgctgcttccccttggcaatgtcnagaaaatgccttggataacccccatcaatcttgcatgtggtgcccacaagggcccagctccattctgctttctagtccctgc

SEQ ID NO: 79106 - DNA, 493 bp, Glycine max
  Clone ID: PAT_MRT3847_42449C.1
ttttttttttttttttttttttttttttttttttttttttttgggtggtttttttttttttttttttttttgaaaaaacccaaaacccgtttttttttaattgaaaagcgttcctgtcctttgataaaaacagtaaatcctttttttgatgaaaaaagttccccccctacaatccccattccagggatgaccccccgggccaattaaaatacattgcccctaatgcataccttttacaggctccactaattattatttaccctccccccccccaaaaggaaagttttttgtttgggtggaaaaactggcccttccaaattttggcaccttgaaaggggctccccaaattttctccttattagcaggaaccgcgagaattttatttttaggatttttataacataaatcccccaacaggtggagagaaaaaaccttctttggggaaaaaaacaagtgacttgccccaacccccattaaacaattttgttttatt

SEQ ID NO: 79107 - DNA, 2487 bp, Glycine max
  unsure (1)..(2487): unsure at all n locations
  Clone ID: PAT_MRT3847_4244C.1
tcaatttctagttaagagggccttcacaactattggactcgtgacgtaatgcttgccatctgaccatatcagttttccaaacgcgtagttatttgtggcctttccttgcatggccttgaaggttaatttaaagctcttctcttcaccaacatttttgaacttcaagatgcttggcttcacagaaacggtgattccatacgggttttgaacatgagcaatgtaagtccctggagaaccaacatttttcaatgtccttgtaactgtcactgacccagagagttttgggactgtgattgagggatagttcaggttgaggagactaaatttcttgcggcatttatatggaccttctgtgaacactgagatctgtgtctcgttgtatcctaaagcacataagaagttgaggtaatcatcaattgttatgtcataaactagcccgggatccattgctctgtttggttgaacatgccctgccccgtaactgaatggtgtcgccttgccatcagtagcattcagtagtggctccacctcattgtctagtgttgtagctgtggtcatgattgctgatttaattgcagcggtactccacgtaggatataaggctctcaacagtcccacaatgcctgaaacatgagggcatgacattgatgtgcctgagactgagttaaacggaatcctgcgcttgtcgaacacttgattggttggtccttgggcctcagtataggctgctataactgacacgcctggtgcagtgatatcaggctttaggatctctggcaccatagtatttggtccttttgatgaaaatgctgccataaatggggctggcttagtatccaattgagtctttggatgtgtaatatatgccactgggaacttggttgagttgatgtaattaaagacagcactaccatcagtaaaattgatatgagaagcaggaaggacatgaggatccgctataatttcattcccagtagtcttgtcattagcaaggaccattcccacagcaccagctagaaaagcttgctctcccttgtccactcttgcatttattcctcggagacacaccacgatctttcccttcgccttgttgggatccagggtcccattctggcacagcaccgcgtcttcagctcttgcactcgccaatttagcatctgtggctttaataattggatagaacttgtgtgccaattttgtagctgataagctttcccccttgaaggtaatatcgttaccaaggacaacgtaagtggggaactgtcgatccatggtgctggcagcaaccgtaacatgccagggtgcgagattttccgcagtggcttccgcgggcccactgttgccagcagagcaaaccaccacaacgccacgcttggccgcatggaaggatccgatggcaacactatccttgaaaaacgtggaggaagagccaccgagcgagacggagaggacatcgacgccgtcgtggatggcgaggtcgaaggccgccaagatatcagcgtcgaagcactcctcgcctccgacggggggccagcagaccttgtaggctgccacacgtgccattggtgagccacccttggctgttccctggccctggccgaagacgctgacacgtgcgaccatgttcccgccagctgtggatagggtgtgggtcccgtggccctcgttgtcacgtggcgagtcaaaggaggagttcagtgggcccgccactgaggcgtagcccttgttgaagtaccttgcccctattagcttcctgttgcagtgaaaagtatgatcaattccgttatcacagattcctctccactttgatggaattggtcccaaaccttgctcactaaagctctttgattcaggccaaacacttttcacgcctacagtttggggagcattttgaaaatgatgctgatgtatgcacatttcaattttcttattggtgactttatcatcacttccttggactatccccaccttggcaccattcttagccccacctgtatccaggtttcctatgatgacaccctcaccaaatctagctttcttccagattgagctggattggatcaccccattatgctctagctccatgaaatcccatgatcgagtggtgtgtagctttctcccacggttctcgaacactgacaacactttggggtgcttagctatctcaacagctacttcttcgtccaaagttgcagcaaaaccattgatgtgccttgtgtacgagtaaaagatggagtctttggctgtattagaacttcctaagaaagatcccagaaagtcatggtgggactgtgtcacttgattgaagtcaactgaggataattctgggccgtgtgagtgggctcccaagtacaccacatatgactttttcactgcaaagctgggtctgtgcaatagacagactagaagaatttggagcagaaagtggatggaaggacttggtggcctcattgctttgcctatctaggaagcncccggacggcgtgg

SEQ ID NO: 79108 - DNA, 461 bp, Glycine max
  Clone ID: PAT_MRT3847_42450C.1
aaagaagccgggggtcaccccggaaattcgggcccggccccggggggggtccaaattttcctaaaagggggggcattaaaagttgggcgaaaaaagggcaaaagctgtttccgggggaaaaaggttatccctcaaaaattccaaaaaaaaaacgacccgaaaaaaaaaagggaaaagcggggggggcctaaggggggggccaacccaaataaaggggggggccccaaaggccccttttcaaaaggaaaaacctgggggcccactcatttaaaaaaaacgcccaccccccggggaaagggggttggcttttggggcccaaggggggtttttttttcacccaaagaaacgggaaaaaagggtttgccctctccccccgggccctaaaagaaagcaaaaaagggtcccaacctggtttgcccacaaaggaaaaaatcttgtttgggggggggaaaggggggaaa

SEQ ID NO: 79109 - DNA, 426 bp, Glycine max
  Clone ID: PAT_MRT3847_42451C.1
ggcttggttttttttttttttttttttttttttttttttttttttttttttttttttttttttttttttttttttttttttaacacaaagggattatttgggggattcaccccaaaggccctaaaaaaaaaaaagaattaggcttttttaggaagaggggggggggaaaactttttttttggaaacaatttttaattaattaaggggggtttttcccaccataccagttccttggggagggaaaaaaaaaaaactgggggttcccttggcatccaaagaaacggtggaagcccccccacccgcattgaaaagggcttcttccctaaggggaattttccctgcacccaccccggtagaaatctcgccctccgaaaacaaaacgggtgggggggaaacctgggttgtttttaaacacgattttttccc

SEQ ID NO: 79110 - DNA, 593 bp, Glycine max
  Clone ID: PAT_MRT3847_42452C.1
agataaatataattaagggacgtgtaaatattattaattgtcaaaaaagtaaagtagcagagaactacatatagtattacatgcaacaacaagtggagacaactaagggactcgcttaagtactagagccctcatcggcctctctttattttcattaatataaattttacaacattatgatatatagtatcctgcgactgaaaaactgccctgcagtttcttccttatactagatccacccttcagaacttgatgctgcaatattgtacaaaccattaaagaaatatactcaaataactaggaaatttcaaagtgaaataaccatctatgttcgtcaagtaaaataaagttacggtacaaattaacaagaacgaatataaataattgataaacatctccccgctcccaacaccaccaccaaaaacaaaataattatcaaacatgtgagactagttctaaaactttgaacaacattttaagaagaataattaattataacatatagatatttttcttatggcttttatttccatcaaatcaattaccagtcatcacagtcattttataatcattattttctttattatccttct

SEQ ID NO: 79111 - DNA, 386 bp, Glycine max
  Clone ID: PAT_MRT3847_42453C.1
gtcaatttcaaacaccacagttaacaataaacaaaacaatgaaaaaaaatgaaatttgacaattaaagccaccaataattataaaaaaaatgcaattaaacccgatagttttttcagagagagggtgtgaaaataccaaaaccctcaaagttgaaaaatccaatcacaaagttaatatatacatcctgacagcttaaaagattaaaactttaatcaatttttgaaaaagggtagttcatggaagcatttacaaacgttttgggccacagtacaaatttgctaactgatgtgagaaagaaagagaaagagaatgttgtgtgctatgactcatgagttaagaataatagtaataaaaatatttaaaaaaaaaaaaaaaaaaaaaaaaa

SEQ ID NO: 79112 - DNA, 312 bp, Glycine max
  Clone ID: PAT_MRT3847_42454C.1
tcccacgcgtccgtcaagcattttattcctctttatttctaaactgttttatgcggtagatttggatactttcaaatcaacatgggtcttaacatcatagtgtgtgttttccaacaatgtctcattcctttgctactataatctaggcactcttttccatatccatactttaaacagtcctaatggctcctaatgaacaatgaggccacttctattacaactatatccaatatggaagtcgaagtgtctagagttaccaatacccattacaacactcgaggacatgtatccagacccaataccacactccct

SEQ ID NO: 79113 - DNA, 272 bp, Glycine max
  Clone ID: PAT_MRT3847_42455C.1
caacaacacaaaaattctcaaaggctcaaactcaaacggtacttacaaaaaaaaaaaaaaaaacgaaacgaaccccactctcaccatgatagggtccctaaaaccttttgtcccgggaattgccacaaattcgatgccaaaggccgaggtttcagcccccgagggagtttttcacttgggcgcaaccgccgccgcgggaaaggttttcggggggaaaaaccccgttaagccgggggcggtttttcgccccgctttggcgggcaacgtggaag

SEQ ID NO: 79114 - DNA, 734 bp, Glycine max
  Clone ID: PAT_MRT3847_42456C.1
cccgggtcgacccagcgtccgaaatttccttcttcattctcccttttttcgtccggttttggtaaaccactttaggtaaccagattgctactactagtactactgctactacatatacaaagatgctatcataaaaagagagaaacttgggaagtgggaacacattcaaaatccttgtttttttgtttgtggtctagtattcatctccaaacacacccattgagtatttttcattttttttgttcttttggggcaataaaggtgggtgtttttggcattgattgagacagaggctccaaatgaagaggtctccagcatcttcttgttcatcatccacttcctctgttgggtttgaagttcatcatcccattgaaaaaagaaggcctaagcatccaaggaggaataatttgaagtcacaaaaatgcaagcagaaccaaaccaccactggtggcagaagaagctctatctatagaggagttacaaggcataggtggacagggaggtttgaagctcacctatgggataagagctcttgggacaacattcagagcaagaagggtaaacaagtttatttgggggcatatgatactgaagaatctgcagcacgtacctatgaccttgcagcccttaagtactggggaaaagatgccaccctgaatttcccgatagaaacttataccaaggacctcgaggaaatggacaagggttcaagagaaggaatattagcttctttg

SEQ ID NO: 79115 - DNA, 283 bp, Glycine max
  Clone ID: PAT_MRT3847_42457C.1
tcgtccacgcgtacgatcgtaatgattaggattgttttcaaagtcaggcacacatgattgactcggtcaatgttggtaatcatgatacaacatacttctatagacataagcgtgacagcacaatgctgaatgatcactatagttacattaactaaaaaggaacgtatcaaaaggcgtcattgtatagagcactaaatgatcatatagacttcaagattgtaacctggtcacatgctgaattaaagtggatctggatcatataggaagttctaacctatggatg

SEQ ID NO: 79116 - DNA, 606 bp, Glycine max
  Clone ID: PAT_MRT3847_42458C.1
tatcaagcaaagatttatcattggaaaagtagatcttggtctctttcacaatgctgctgaaagatttggaatatctctaagtggaagcatgggccagcttccaacatttatcttatttgagaatgcagctgaagttgcccgctttcctgagttggattttgaagctgcatattttcaccctaaaattacaaaggggcttctttctcgacattttgagcttgatcggcaccttctcgaatatgttagtggtaaataggatgttagtggagcaagttgtccgaaatttagtcatcactgagaatggcaattttggatttccggatatctgaggaggacattttcgtaaatgaactttgaaagttaacgtttgtttaacaccatcacacaagggtcaaagtaatgtcttcagacaacgggggtgtatgtgtaattagattaaatctcaataggtgttattataatttgttctttattttataatctatcatcggttctaagtgaaagtcaaaaaatttggcgagagaattcaaattttagttgaaattatgttgtcataaaaaaaaaaaaaaaaaaatgaatataatgtctgaagaatctttttatggt

SEQ ID NO: 79117 - DNA, 1448 bp, Glycine max
  Clone ID: PAT_MRT3847_42459C.1
tacggctgcgagaagacgacagaaggggaggcatactagaaaatctatctatgattatgagagcgtagttgaaagcaacgactgaaatcgagagggagacgaaaagtttagatcgagagagatgggaaaggagagtagcaaagatacggttccggtgacgcagtggctgaatcgaatggtctcagaaccttactacctcttccatttcttaaccttcttctcctatttcgtcgttcgcagctccgcaacccaaatcttagcgcctcatctcactcaccatctccttcgtcgcgaaatacaaacactgctagtgttcgcgatattggctttcatcaagggaataaaagaagaaacatgggaagcctttatagctgatgtgcttttcctggccaagatttgtctttttctcctagcctttacaatggatcgccgcttagccgtttggtatattcttgtatttttagtgatacatatgttaacacaacaacctccattccaaggactaggtacgtctagcaagctaacaccgttgcagttggaaagcctgctgacagagggaacaactacaagattgtggctggtggaattccgttcttcatattcacctgcttgcattcgctcaagtcagcagtttcctgagctctcaattacatattcaagcaaaaatttatcatttggaatagttgatcttggtctctttcccaatgctgctgaaagatttggaatatctctaagtggaagcatgggccagcttccaacatttatcttatttgagaatgcagctgaagttgcccgctttcctgagttggattttgaagctgcatattttcaccctaaaattacaaaggggcttctttctcgacattttgagcttgatcggcaccttctcgaatatgttagtggtaaataggtaattgcctgaagttctatcccactgtgttccttttttctggttctagtagattttaatcatttgagatttattttgttggttctagtaggatgttagtggagcaagttgtccgaaatttagtcatccctgagaatggcaattttggatttccggatatctgaggaggacattttcgtaaatgaactttgaaagttaacgtttgtttaacaccatcacacaagggtcaaagtaatgtcttcagacaacgggggtgtatgtgtaattagattaaatctcaataggtgttattataatttgttctttattttataatctatcatcggttctaagtgaaagtcaaaaaatttggcgagagaattcaaattttagttgaaattatgttgtcataaatttcttttaaattgtctgaatataatgtctgacgtttctttttatggtataaaaaataaattttggaaaagaatatattatattttatttttttaaatatatttaattttttgttcatttttaatattgttttttattttttccg

SEQ ID NO: 79118 - DNA, 305 bp, Glycine max
  Clone ID: PAT_MRT3847_4245C.1
aataaaaccccaaccggggtttaaaccaaattaaccaaaccccaaaggaacaaatttgaattttaaaaacaacccccctcccttttttttattgggccttttggtgggggggattgaaaccataaagggggcaattttttccaaaaacttgctggggggaaaagagccccccttctcccaaattattttttgtgggtgccccaaaattgcttttgaaaataacaaatattgcgcttgtcccccgggaaagttttgggggaaaccccagaaaaaaaggggggattaactttaaacaaaggttttgc

SEQ ID NO: 79119 - DNA, 407 bp, Glycine max
  Clone ID: PAT_MRT3847_42460C.1
acgagcttgtttttttttgtctctttcttggggatgggtggttaactggttattctagaattttggttctgtcagggtgttgcaaaagttggatttttcagctcattagatgatgttttttgttgagttttggcaatattttaaaaatcgtggttgcgattgcagtttcgtcatcattattgctattgcaggcaattgtggacaaatatgactgatgcggtcacaattgctgtcatgatgcacaaaaacaatgatgttacggccgaaattgcggtttttttaaaaccgtgcgttttggtgatgaaatcagttttgagggaaacatagttacataattgaagtttttcttttgtgtgtgtggatttgtttgtcaaattctacaaaagttgaatttttcagctcatgag

SEQ ID NO: 79120 - DNA, 1598 bp, Glycine max
  Clone ID: PAT_MRT3847_42461C.1
cggctcgagcggctcgagcctgtgtgggccattgttgtcaacaatttcacctttcactatgctttatatgtgctcatgaactctctccccaccttctttaatttggatcttaagcttagcctacaagatatgggttcctctaaaatgatgccctatctcaacatgttcctcttctccaacattggcggcgttgtcgctgactacttgatcaccaggagaatattatctgtcaccaaaaccaggaaattcttgaacaccttaggattcttggttgcttctcttgccttggtggtgattcccagtttcagaacttctggtggtgctgtcttctgttcttctgtggctcttggtttcttggcacttggcagagctggctttgcagtgaaccacatggatgttgctcctagatacgctggaatagtgatgggtgtttctaatactgccggtacgttagctggtattgttggtgttgacctgactgggaagcttcttgaagctgctaaggctgctaattctgatctttcaagtcctgaaagctggagaatagtgtttttcattcctggttttctatgcgtttttagttcttttgtatttctactattttcaactggggagagaatttttgattgaggtagccttgtcattttcatggctcgtgagctgttgttattctggggatttaatttttattccatctccttattatatcattcttggataggagaggtcatgttgtcataactggatatgaatttttgttgttattattttttctccatcttgtactattcctagctagtaaaggctacaacccagcttgcatcaagagtgatattttcatttatgtatttctgaatgtcacttccatagtttctttaatcgtaaaaatgttttcaccattaaagttctagatcgcgaagcttagcctgcaagatatgggttcctctaaaatgatgccctatctcaacatgttcctcttctccaacattggcggtgttgtcgcggactacttgatcaccaggagaatattatctgtcaccaaaaccaggaaattcttgaacactgtcggattcttggttgcttctcttgccttggtgatcattcccagtttcagaacttctggtggtgctgtcttctgttcttccgtggctcttggtttcttggcacttggcagagctggctttgccgtgaaccacatggacattgctcctagatacgctggaatagtgatgggtgtttctaatactgccggtacgttagctggcattgttggcgttgacctgactgggaagcttcttgaagctgctaaggctgctaattctgatctttcaagtccagaaagctggagggcagtgttttccattcctgggtttctatgcatttttagttcttttgtatttctactattttcaactggggagagaatttttgattgaggtaaccttgtcattttcatgactcatcagctgttgttattctgaggatttactttttattacatctccatgttatatcattcttggataggagagctcatattgtcataattggatatgaatttttgttgttataattattatttccccatcttgtactcc

SEQ ID NO: 79121 - DNA, 106 bp, Glycine max
  Clone ID: PAT_MRT3847_42462C.1
ggctcgagcaaaatcagaatcctctggcttttgcatccaaccgcatggctgtcagccatactagggacccttattgtacatagacacgatgccaatgcaggacggt

SEQ ID NO: 79122 - DNA, 143 bp, Glycine max
  Clone ID: PAT_MRT3847_42463C.1
aaaggtcttcgcttttatgcaaggctttataccattattttttcttaatctggggatttggagcctaatcgttgatctgatcctcttaatgctgtcactgcctttattaccgggggacgataggtggtgtacaaccccactgc

SEQ ID NO: 79123 - DNA, 297 bp, Glycine max
  Clone ID: PAT_MRT3847_42464C.1
gaacggggacacttcaaatcacatttttactaaggtaaaaaaattttcaaaaaaatactttatatctaaaaatatttaccctacacataaatttaaaaattttttcccaaccacccaccacatgaattcttttataaacataatcactataaccatcttccaacaaaaaaccatctttggaacaacccaatcacaattatattctctattccaaacccatttttatcaacatgttaccttgaaaacacgactaatttttacccaaaaaaccccaacattttttgtttttattttcca

SEQ ID NO: 79124 - DNA, 1161 bp, Glycine max
  Clone ID: PAT_MRT3847_42465C.1
cggctcgagattccctgtggtccccttttactcatttccaaactttagcctttaaattctcaagttttcagtttgagttaatcctcatctctttttaagtttgttgtctctagtcgaacccatgccagtctcagctagtccagcgccactgttaggggatcgactgtgtgaaaatggatttgagtgtgttaaaattctccctgccaccaatgatgcacatggaggagtcattgtggacttaaaggagcctttgcactccgaagtttttgctactttgcttagatcttcacttttacattggaagcaacagggaaaagatggtgtttggatcaagtttcctattgagcttgttaatcttgttgaaactgcagttaaggagggtttttggtaccaccatgcagagccaaactatctaatgctagtttactggattcccaaaactgactgcacaatacctccaaatgcttctcattgtgtagcagttggagctattgtcttgaacgataataaagaggtgcttgtggttctggaaaaaaaaggaggatttcatgggattggtgtttggaagatacctactggagttgttgatgcaggtgaggagatttttgaggcagttattagagaagtaaaagaagagacaggaattgatacagaatttgtggaattactggcattcagacacacacacaattcattctttggaaaatcggatctatcttttatttgcatgctgcgtcctctttctgatgactgcaaaaaccaaggggtggaaattgaggcagctcagtggatgccattcgaggaatttgctgatcaaccttttaatcagatgcatgaacccttcaagtacatgattgaattatgcttggcaaaggttgaaaaagtctataatggattctctccgcgacccatctcatcatatttcgtggaggagttgaattatctatatttgaatagtcattgcctggacaagtcttcttaagttttacaaatcaaccttggtcgtcatccataaaagtttagtttgatatttctttcttgtaaggatttaattaagctttttctccttaaatttaggttacttctgtttttgtccttcaaatttattttttttagtcctaaaattatgaaagatgttctttttacttcctcttgcggttt

SEQ ID NO: 79125 - DNA, 222 bp, Glycine max
  Clone ID: PAT_MRT3847_42466C.1
ctcgctctttttttggcggggacatagacagatccccggcctttccacccaacggggcgtttgaggcccagccccttaaccttctcatctacggtcgcacgggctggattggcggacttctcggctgcctctgccgggcccagggcttcttcttacattacggatagggccgactcgagaaccgggcctacctcgaaaccgacataggcctactcaagcccc

SEQ ID NO: 79126 - DNA, 163 bp, Glycine max
  Clone ID: PAT_MRT3847_42467C.1
cccctatataacttgatagattattgaccatcaaaagcaagaccgaacacgatacaggacaaatggcaattacatatcggttcacccgaggctcaacgtcgctggggtataccatgcagggtctgtgtacactttgacagctatatacgatgcggaagccgaa

SEQ ID NO: 79127 - DNA, 452 bp, Glycine max
  Clone ID: PAT_MRT3847_42468C.1
gttggtgacacagaatctctcttttgttgttgctggggccactgtagttgctttactactcaactcatctttgaagttgacaaatttctcagctttcatattgatggtgttgacaatcaatatctgtggtggcattggtgtactttcaactcttgctggtacaatattgattgaaagagagtggttgttagttatatctgaaggtcaacccccagaatttcttacaaagatgaattcagtaacgagacgcattgatctaacctgcaagcttcttgctcctgttgttactgggttcataataagctttgtatcactgaaagcatctgctataactttagcactgtggaatactgtgtctgtttgggtgagtattggcttttcacatctgtatataaagggattccagctttgggtcaaagtagccagaggagaatggcaagacttttaaaaag

SEQ ID NO: 79128 - DNA, 232 bp, Glycine max
  unsure (1)..(232): unsure at all n locations
  Clone ID: PAT_MRT3847_42469C.1
atcactatggattcccattcacacatnatnccctcaacgacgtccacatnaatggnggngaaagtaccgtgtccgtcgcaaaaccctagagcggagaacaatctgggcaaggtggagccccgacttgaggcgttcctctcactctcccacgtggcttctctcaccctcgatctctccttcgagaggctcctccaatcgatcccctccgactccgactacgatctcatcgatc

SEQ ID NO: 79129 - DNA, 447 bp, Glycine max
  Clone ID: PAT_MRT3847_4246C.1
cacacttatcaaagttttaaaactgacgcacacagctagacctccttagtgatattgtcaaggaaatgactccgcacacagatcaattcaaatccactgaatcataggcatctgattgcatctaattgattgagtcataagagtcgtttgatgccatttattttagattctagtcaatgatttgtttgctgatttataggaactaatttagctaattagttttaaatacgaatgtaaataacaattatgaaaacctctatatattggcactgtagtttccgaataatcaatcatccattctctatatggtatcaggataggcatactcccatgagttaagatccatggccggctcaaccaattcttccgcagcaactactaacaacaacactcaaaatgggacaacaacaacccaatccaacccagtggtttttcaactcactttca

SEQ ID NO: 79130 - DNA, 682 bp, Glycine max
  Clone ID: PAT_MRT3847_42470C.1
attccggaactaaaaagatctaaattaacaaaaaacataaacacagtacatcaaaaaaaaaatatcatcgtagtagccatagaaccagtagagacacgggcaaaataaaatccagcatagggtaaaacatacaaatgtttactacttaaaagactagcaatttccctccaaaattactattaggccagtttatatacatatataaaggagggtcccccgctaaagcaaaaaagatgcagggaacaactatacaagtctagtcccatccaggggcaacaatagatgcataaccaagaggcccatttttttaaaccctaccagctccattcaactcacaaaaatcagggggattataactgcccgcagatgcaatattcaaagggtcaaaagaggaatctatgttggagttttggatgtcataggaggcatcatcagcagggtaataagactctacagcatgatctgcattgacatttgtactgtaacagttgttattctccacctttgcttcaataacatttgggaaatcacgaccaccataactcccaccactgttgtaacgctgagctccatagccttgactacccccaccagatgatgaaccctctgcatattggttgagccaagatggaacttcttgatttgcttcctgcaagagtcctataagcgactttgcaatagg

SEQ ID NO: 79131 - DNA, 405 bp, Glycine max
  Clone ID: PAT_MRT3847_42471C.1
gacccggggaagagccggggggtcaaaaacaccgaagcccccacaccccgcaaaacccgcgaaacgcacgcgaaaccccacacaagcggagcccagcacagacgcaagccggaacaccacgaggccggaggacgaaccgaacccaacacgagaaaccaaggcaaagacgacgaccaagaagaagaaacccccggcggcacggacgagcccaccgacggggaacccgcagaaaggaaggaagccgagccaccccaagaagcagccccaagaccgcagaaaacacgcgcgcacaacgcacaggagaaaaaggcagcaggccacaaaccggaaaacaccgcacgacaagggaacaacacaccaccagaccaaaaaaggaaacaccgcgcaggggggagaacacgcaaa

SEQ ID NO: 79132 - DNA, 242 bp, Glycine max
  Clone ID: PAT_MRT3847_42472C.1
ttagcacgacgcacctcatatattaatgaagttctaacccatccataattaaatttgatgggaattatgatgtagcagtagcacacctctcaccattaagatcgaaataccagggcaaagtttcaagttacttaggacagaacgcttaaaaaaactagatacaatgagtatatagctcgggtcattaagccacttagcacttgacctcctttaaagcatatgcaaagtaccggaatgttgga

SEQ ID NO: 79133 - DNA, 688 bp, Glycine max
  unsure (1)..(688): unsure at all n locations
  Clone ID: PAT_MRT3847_42473C.1
ccacgcgtccgtgcagatccaaaaaacagcgtatcgtctgcatattgcagaatattaacctcctccttttgactccccacttgataactttggaataagttcttagaaattgctgtcctcatcatttaatgatgccaaagagggtgaaacatgatatggtgtttagtagagacaaataaatttataaccccagaatgatggacaacatgataaacatatttcaaatcagaaaatatagtagcaaaagaagattggaaaaagttctccttggttgatttatgagattgagtgggaggagtgttgaccaagttgtattgattttcaacaataagtagcttttcccaaaaccaaaggattgagatgtcattgtaggcttaaaccattgatcaagcttttatttaaaattttcctcattcgtttgtaattcttgtttttaatttctttctaaagttatgcaataatctaccttactaattatgctntgttctgcatctgcacatgaatgtgcttacaggctctaggatttccaatgccttattttgcacatgtttctttgattttagctcctgatcggagtaaatatcaaaacgacatggggcaacatcagtgggtcaggtgagggtgattcatcattttgtgtccattntatcaatcttaaagttatgttatgacttatgaggacttgact

SEQ ID NO: 79134 - DNA, 199 bp, Glycine max
  unsure (1)..(199): unsure at all n locations
  Clone ID: PAT_MRT3847_42474C.1
atcggtcaatttggccggactaggacctcccagggggatgcaatccctctagcaatcggaggacccctccgngccacagctcagagaagccaaacaccgacccaaggtcgctcgccagccggcacaggaaacggtgcaacatctgcaactgcaccacctcacacaaccgagactcccccaaccgaaaaccggggggcgc

SEQ ID NO: 79135 - DNA, 473 bp, Glycine max
  unsure (1)..(473): unsure at all n locations
  Clone ID: PAT_MRT3847_42475C.1
agagaaatggttctgaaatttgtttatatcataataattttgatgatatggtgcatgtatccattaacatctgcacagtatctcgatgagactataatatctgcgcagtacgagaatacgactatagcacaaccaggttgtgatagcaaatgtggaaatgttttcattcctttccctttcgggatgggcaagggacattgctatgcaggctcgtggtttgaaatagattgcagaaacaatactactactaccaattcatcaggtgaacagaaaccttacctcaaatacatagatttggaggtaaaattcattgataactggggtgggcaggtgttgatcatcatgaaccctatttatcagagtgggaagaactgtgaaaggaacaagacaggaggaataaatctgaaaggagaaagtccatntgtgtattccgaggattacaactcattcctggccgaggttgcggaaacact

SEQ ID NO: 79136 - DNA, 308 bp, Glycine max
  Clone ID: PAT_MRT3847_42476C.1
ggtgtcccacgagtccataaagctgcaaaatgagaaattcgtcgtcactttcacactttctctcgcattcactcatgcacacgtatcattgcataaaggtgacggaaggcgcttcgtgcatcgaaaatcaccgcggcgaattctgacaaagctacggacagtaacaaacctaattctcgctcttcccgtgctgaaatccagtttcctgtcggacgtatccataggcagctgagacagatggtccaatccaactagacatgttgaggcaacagctgcactgtacttagcctcaactctagagtatctga

SEQ ID NO: 79137 - DNA, 438 bp, Glycine max
  Clone ID: PAT_MRT3847_42477C.1
gggtcgaggttgatttgatacatgatagcacagtaattagaggtagaaaaagaccaagaaaaactctttagtgaaaaccttaaaacagatatagatttaaatggcttatccgaagaatttgtttttggaaaggctttggtgattgttttatgccctcgaattagcactgtacattaaataaaatagtttaaatttaaaaaaaaaaaaaaaaaaaaaaaaaaaaaaaaaaaaaaaaaaaaaaaaaaaaaaaaaaaaaaaataaaaaaaaaaaaaataaaaggaacctctccttaatgttgatttacacaacggggttagtaatggtacatgttttttatatttaatttttgttttatttggtaatatgatttgttatagaacattgatattccttagcttttttatataaaaaataaaaagaatgcataattacacacc

SEQ ID NO: 79138 - DNA, 208 bp, Glycine max
  Clone ID: PAT_MRT3847_42478C.1
gtcttcagggggttcagctcaaatggaagggagcacatgctgatgccaatggaacagctgacccagaaactctggtggactcctctgagctcaggaggtagtgaagtcccttgggcgaagaacctctgagtgtttgcgcttaatctcgagagaggcattttttatcatggtgtggcgaagaagatgatgctcattcggagtatcggcc

SEQ ID NO: 79139 - DNA, 407 bp, Glycine max
  Clone ID: PAT_MRT3847_42479C.1
tccggctgcaagaagacgacagaaggggtaccttaattgggtcttggcttaaatatggttgttattatattctctagcacaattttcaacctacctacaattgcatccactatgtttcaactccctctaataaacccaataataactgtcatagaaaaatgtgataaggaaataatttgagccattatatcttaaatttaaactaaatttactaattgagtttccttttctcttagaagaaaataataaaattataaagcactaaattgaatgaatttcaactatcaaatcttccagacattatgcttccaattttccaaagcaaagaggaagccataagattagttaccacctaccaactagatatccttaaaatgcatagatatggaaaaataactgaagtactc

SEQ ID NO: 79140 - DNA, 396 bp, Glycine max
  Clone ID: PAT_MRT3847_4247C.1
acacatataagatatgaattcgatattacatcaagcctttaataattttaagattagatgctgccctaccattacacaataaaagactgcaggacatcttcattttataaaaagaaaaatttaaaaactctagttcctttagccgccattaactagaaaaccatggggctcgtaaggcagaagcccccattttttaccggagatgcagcatggcccgaatttaaccagaataggactagcgagattccaatataaccgagaacctatgactagattgggtacatatcaacccacaatacggacatgcaccgtgattctttgctattggaaaacttcaccgaagccccaagcacggacatagaacaggaaagtatgctgaaggccctgttctttatg

SEQ ID NO: 79141 - DNA, 286 bp, Glycine max
  Clone ID: PAT_MRT3847_42480C.1
ttacattagctctggcaggcttctactcctcttcgttctatcatctacaccaccactctttgacccatttgatcttttctagatttaatctcctctacaattttctactgctcgtgcatgtccagactttatgtggcaactccaatcatcaactacttttttccctccagtttttgttccactctgtttttaatttaattcaacttctccatcgtcatttccacttttttcctcgttttctcataaactttgctttcctggttcaccactcttgaaaccttcttat

SEQ ID NO: 79142 - DNA, 2313 bp, Glycine max
  Clone ID: PAT_MRT3847_42481C.1
agagaaaaatggggtggcaaagggacctccatcgtcgtgaatatccgctattctagttgctgcttctgtctgtaacacaatacaatcatcattcatcaaatcactgaaaccaaagccacaagctgcgacatcagaagaatggaagacggtattgaccacttggctttcgagaggaacaaggcgcagttcgatgttgaggacatgaaaatcatttgggccggttctcgtcaagactttgagctttcggatcggatttctcgccttgttgccagcgatccggccttcagaaaggatgacagaaccacgcttgataggaaggagttgtttaaaaacaccttgagaaaagcagcttatgcatggaaaaggatcaacgagctccgtcttaatgaacaggaagcttataagctcagatcctttgtggatcaacctgcttttacggatcttcattggggaatgtttgtgcctgctatccaaggacaaggcactgacgaacagcagcagaagtggttgcctctagcttataggatgcaaataatcggttgctatgcccaaactgaacttggtcatgggtccaatgttcaagagaaccccacaactgcaacatttgatcccaaaacagacgaatttgttatccatagccccacattgacttccagcaaatggtggcctggtggattgggtaaaatatccacccatgctgttgcttatgcccgtctaattattggtggtgaagaccatggagtgcatggtttcatcgtccagctgcggagcttggatgatcacttgcctcttccaggcataactattggtgatattgggatgaaatttggaaatgcagcttataacaccatggacaatggagttctaagatttgaccatgtacgaattccaaggaatcaaatgttaatgagggtttcacaggttaccagagaaggaaaatatgtaagctcaaatgttccaagacaattagtttatggtactatggtaaatgtgagacagaaaatcgtagctgatgcatcagttgctttgtctcgagcagtttgcattgctacaagatatagtgctgttagaagacagtttggatcacataatggaggtctagaaacacaggtgattgattacaaaacacagcaggctaggctcttcccattgctggcttctgcttatgctttcagatttgtgggtggatggctgaaatggctttatatggatgtgacggaaagattgcaagctaatgatttttcaacattgcctgaggctcatgcatgcactgctggattgaaatccttgactactacagcaactgctgatggaattgaagaatgccgtaaactatgtggtggtcatggttacctttgtagcagtggtctccctgagttatttgctgtttatgttcctgcctgcacgtatgaaggagacaatgttgtgcttctgttacaggtggcaaggcatctcatgaagactgtttctcagctgggctctggaaataagcccgttggtactacagcttatatggctcgagtggaacaactgatgcaatatcactctgatgttgaaaaggctgaggattggttgaagcctaatgtagtgttggaagcatttgaagctagggcttctaggatgtcagttgcttgtgctcaaaatcttagcaagtttgctaaccctgaagagggttttcaagaactagctgctgatttagttgatgccgcggttgctcattgccagttaattgttgtttccaaatttattgagaagttgcagcaagatatacctggaaagggagtgaaaaagcaattagaagttctttgcagcatttatgctttgtttctacttcataaacatctgggtgattttctttccactggctgcattaacccaaaacaaggatcacttgcaagtgagcagctgagaaacttatattcacaggtccgtcctaatgcaattgcgcttgttgatgcatttaactacactgatcactaccttggttcaattcttggacgttacgatggaaatgtgtatccgaagatgcacgaggaggcatggaaggatcctttgaatgattcagttgttcctgatggctttaaagagtatattcaaccgatgcttaagcagcaactacgtaatgctaggctgtagttaattttgtggcaatgatgcttttggcatctaagaaatttacccagactattctgatttacaactcttaataaagttgtgtttgccagctagtaattaccatcgcaattaggtgtatctggaactggaactggaacaaactcatttatttattacattaacgatacttgatgtcta

SEQ ID NO: 79143 - DNA, 939 bp, Glycine max
  unsure (1)..(939): unsure at all n locations
  Clone ID: PAT_MRT3847_42482C.1
ggctcgaggtggttgcctctagcttataggatgcaaataattggttgctatgcccaaactgaactgggtcatgggtccaatgttcaagggctagaaacaactgcaacgtttgatcccaaaacagacgaatttgttatccatagccccacattgacttccagcaaagtgagtgaaatgggttatcactcctgtgagcctttactggtcttttactatttttaaccgtttaagattctacatcttacaatgttaccaagtgctttaacaagtaacatttagggaaaagagttgtacctttcttatgcattcactgcttctacttgttataaaataattttggatttacatcatgcttctgacattgatttaaacagtggtggcctggtggattgggtaaaatatccacccatgctgttgcttatgcccgtctaattattggtggtgaagaccatggagtgcatggtttcatcgtccagctgcggagcttggatgatcacttgcctcttccaggcataactattggtgatattgggatgaaatttggaaatgcagcttataacaccatggacaatggagttctaagatttgaccatgtacgaattccaaggaatcaaatgttaatgaggtatttctattttacatattgtcccttctctagcctcaccataacggattttatggttctaataattcataatactcgaatgatctgtgggggtaaaatgacaaaaaattagagcacagggcagcacattaaaattgggtgaggtgaattcataggggtaaactcaatctaactctaataataataaaaactgaacaaaaaatctttagtatcattatcttcagtgaatntattagtgaatttttaaagttattttctccatgaattgagagcattttacttttaagcagaaacaaacttctaaatgctcaaaa

SEQ ID NO: 79144 - DNA, 997 bp, Glycine max
  unsure (1)..(997): unsure at all n locations
  Clone ID: PAT_MRT3847_42483C.1
tacgtaagctcggaattcggctcgagaaaaaattgtagctgatgcatcggttgctttgtctcgagcagtttgcattgctacaagatatagtgctgttagaagacagtttggatcacataatggaggtctagaaacacaggtgattgattacaaaacacagcaggctaggctcttcccattgctggcttctgcttatgctttcagatttgtgggcgagtggctgaaatggctttatatggatgtgacgaaaagattgcaagctaatgatttttcaacattacctgaggctcatgcatgcactgctgggttgaaatccttgactactacggcaactgctgatggaattgaagaatgccgtaaactatgtggcggtcatggttacctttgtagcagtggtctccctgagttatttgctgtttatgttcctgcctgcacgtatgaaggagacaatgttgtgcttctgttacaggtggcaaggcatctcatgaagactgtttctcagctgggctctggaaataagcccgttggtactacagcttatatggctcgagtggaacaactgatgcaatatcactctgatgttgaaaagggtatagtgaaattggagactatgccaactctaaccacataagtttcacgatatccaaatcaaatatggtgtcagttaatactgctagtactaaccatgcctgtgtcctttatgagttgtaatactatacttgtttttattccctgcagctgaggattggttgaagcctaatgtagtgttggaagcatttgaagctagggcttctaggatgtcagttgcttgtgctcaaaatcttagcaagtttgctaaccctgaagaggcaggttttcaagaactagctgctgatttagctgatgccgcggttgctcatagccagctaattgttgtttccaaatttattgagaagttgcagcaagatataccttgaaagggagtgaaaaagcanttagaagttctttgcagcattta

SEQ ID NO: 79145 - DNA, 541 bp, Glycine max
  Clone ID: PAT_MRT3847_42484C.1
tttatgctttgtttctacttcataaacatctgggtgattttctttccacgggctgcattaacccaaacaaaggatctctgcaaagtgagcagctgagaaacttatattcacaggtccgtcctaatgcaattgcgcttgttgatgcatttaactacactgatcactaccttggttcaattcttggacgttacgatggaaatgtgtatccgaagttgtacgaggaggcatggaagggaccactgaatcattcagatgttcctgatggctttaaagagtatattcaaccgatgcttaagcaacaactacgtaatgctaggctctagttcattttgtggctatgatgctctctttgcatccaagaaacttatccactattctaatgcaagtatgcaactgttaataaagttgtgtggaacgataaataaaattgcttgagtacatacgaatgggaatttgttacccagctaatttccatcgcaattaggtgtatctggaaccggaaaaactcatttatttattacattaacgatccttgatgtct

SEQ ID NO: 79146 - DNA, 706 bp, Glycine max
  Clone ID: PAT_MRT3847_42485C.1
attccatcttcccactttcagtggattcgttttcattctcctctcaattttctccttaaacatatcatcaatttgcaagaagattaggcatgccatatatctcttggatatgtgggtgggatccatccccagcaaagaactcgtggacaaccccattcagggtgatgctactgcatcctggatgatttagcagtcccctatgtttgatctggcttctcactctgaccacttggttccattctccagcagcagcataaatgcttgccaaatgaatataccggccactatgatcagggtctaattctatcaaaatttttccaatctctttaccaagctcaaaatgtttgtgcagttgacaagcattgagcagtgctccccatattgctgcatttggcttgacgggcatggactctatgaactcccttgcttctttcaacaaccctgcacgacccataagatccaccatgcatccataatgctccatagaaggtttaatattataaacagaactcatgctctcaaacagggactttccttcttcagttagtccggcatgactacatgcagtcagaattgctgtaaaagtgatcgagtttgggttaattcctgctttctgcatttgggtaaaccaatctagagcttctctaccctttccatggattgctaagccaccgattattgccgtccaagcacagacacatttctt

SEQ ID NO: 79147 - DNA, 185 bp, Glycine max
  Clone ID: PAT_MRT3847_42486C.1
gcaaacggcacatagctttaaattttattagatctgaaggtgcagataacattgccgcatatgaagaggtggatattgcaatgagtatcccccatacatgaactcgaacttcagaggtggatattgcgacattgattggattaagcaaacttgaacgcacgttccccttaatgtttgctcgagcc

SEQ ID NO: 79148 - DNA, 190 bp, Glycine max
  Clone ID: PAT_MRT3847_42487C.1
ggcttaaaagcgcatgctccaggagctcaaggactagcggaaagacccaccaacttcttgcagagctgctacagaaactaatgacatgctccattgccgcgcaacgatattgatacctgctggtagtacttatgctggaggcgaatgactagacacgtattcacttccctccggattatcctatcaagcc

SEQ ID NO: 79149 - DNA, 349 bp, Glycine max
  Clone ID: PAT_MRT3847_42488C.1
gaaagggagatgtcttgccaaagtattattacaaccaaaaacactaatagacggaaaacaatagctaaatttatccctacaaaacacccttacagaaacaaactatcacctcttaacagcacgagtccaatgtatgaccattacacaaacaaccaaaaccctaaattagatctaatgagatgcacaactcacacccaactgttgctggctagttttaacactttcatttgaaaagccccagggcgaaaaaacctatcgtaaagaagccccccaaacaactcaataagggcctgcccacagttttgcggcagacctgcccttccgtgggtgttaaagaaaacaagactgg

SEQ ID NO: 79150 - DNA, 302 bp, Glycine max
  Clone ID: PAT_MRT3847_42489C.1
ggctcgaggtacaagaactagggcttgatccttttcatcacttaacgacaatgaacgccgacgttaactaccgggacctccgagccttgctgagacagaagggaggctaccatggcaacaggataacagacgagcaacaaccaacagagaagacacccagtgcaaaggagatcacacccataacgaccgagtgatagcagctgtgccgaatgaagacgcagaatgaaaataagtggtcggtaccgtgtctggtgctaaagtaaaagcttaacgggtgcaagatgaagcatctgcagctgatg

SEQ ID NO: 79151 - DNA, 497 bp, Glycine max
  Clone ID: PAT_MRT3847_4248C.1
gaagaattagaattgaaattgttattctaaaacttaaactacaattcttatatccagagtctagtatttgaccgagatgaaatttggcatgtgcattatgtttacaacagtgggctgagtcctttcaagctctctggaaaactaatttcattattgtagattttctcatttatgtactatcttatgtctaatttgtactacaagaaacatatgttaactaagtttatgctcaattcttttctttctatgtctgtagcttgacttgcttttttgtttgtagtttgctgtactgtatgaggcacgggcaaatactggtgttgacaggatggaaatcatcgatgctgtggcaaagtcagttcctggaccccataaagttgatctaaaaaatcctgataaaactatagtagttgaaattgccagggtaagaaagccatgttgtgtctggaatttaagttaaactgtatgtcatgtttgcttatcttgtgtactcatcacgt

SEQ ID NO: 79152 - DNA, 721 bp, Glycine max
  Clone ID: PAT_MRT3847_42490C.1
ctcgaggccttcacagagagaaagagaaaacatttcaaaaaaaataaaaaaaaataagcctctttctctctctgaatttctaagcctctctcacaacaatggaggagccacaaccaggacccagcccgttacgcaaaatgattttggtgtcatcaatggcggccggtatccaattcgggtgggccctacagctctcccttctcaccccatatgttcaaaccctaggcgtcccgcacgcttgggcctcatttatttggctatgtggcccgatatctgggctgctggtgcagcccattgtgggctacagcagcgaccgatgccaatcccgtttcggtcgtcgccgtccctttatcctgccggggatgagaaaaagacaaaggcagccaacgccttcttctctttcttcatggccgtcggcaacatcctgggctatgctgcgggatcctacgacggcctccaccgcctcttccccttcacggaaaccgaggcatgcaacgtcttctgcgcaaacctcaagagttgcttcttcttcgctatcgtcctcctggtggtcctcaccaccttggtgctgattaccgtgaaaagaaactccctacacgccaaaggcagagaaggaaaccaaagatgcagagaagacacacttctcgtgcttctgcggagaactttgtcttgcattcaaggggctgaagaggccaatggggatgttgatgtttggggactg

SEQ ID NO: 79153 - DNA, 299 bp, Glycine max
  Clone ID: PAT_MRT3847_42491C.1
tccactcgtccgaacagctgcgagaggaccacagaaggagagagtgagtttgataattatggatatcccatgtatgacttgcgacatctcttggctagttgtccatccgatccccaataatatatttttgttgttattggagctacatatgggctccacaacgcaaaacctcagccctttgactttgttccttcaacaaaattcttctttattacttgcgccaccaaaatctagaattcctattatcgtggtagaatacctggtgtttttgttaccaaacataatcaggtgtctgcttt

SEQ ID NO: 79154 - DNA, 317 bp, Glycine max
  Clone ID: PAT_MRT3847_42492C.1
ccggggtcgagactcctatcttcggccgccttctctttgtttttgtgaaaaaacacacctttacacatgttacgacattaaaagagtgcggaaattttgaaataggcagtagatactcaacaagcagggacatgcctaatttccttttttgagttaaacaaccgaacttgcgagagaaaacacatattgcacatcatgcaaaggattccgcattttcagaagatctggcaaaagcctgtggaacagaaaaagctggcataaggaatttaccagccatatcaaaatcctgagagatttccaagagaatatcaaaaact

SEQ ID NO: 79155 - DNA, 566 bp, Glycine max
  Clone ID: PAT_MRT3847_42493C.1
acttccaggtggtggtggtggtccagatatgatgcctggcggcaactcttaccaacaacaacaatacatggctgcaatgatgaaccagcaaagggcaatggggaatgatagattccagccaatgatgtatgctaggcctcctatggctgtcaattacatgtaccctcctccttatagctaccctcctcctcctcatgaaccatattccaactatttcagtgatgagaatacttccagctgcagtgttatgtgaagagtaatgggtggtgatggtggttgcaagccttttctaatctgatgatgcaatattatacaatggaaatgagtttttaattttagtttggttttcttcaatttttctttgtctcttttttttttctccctaagttaaactagagcttcaggtcaccataggggagtaattttatagatttttataatatttatgatcttgggaactatatgagatcatgtatcggggggatgtggttatggtggtgggcttcctccatgtgagatgtttatatgtgtttatatgttgcaaacagaaataaattttcagaagc

SEQ ID NO: 79156 - DNA, 2625 bp, Glycine max
  Clone ID: PAT_MRT3847_42494C.1
ccacgcgtccggcaccgttctcttctctctgtgttagagcttctttttcctttcgctcatgcctctccagtctccaccctctctctctctctctctctcattcaccctgaaaaacaggattctgaggttttaatgactactctccatttttgaacctctctcttgctctctctccgagtctgagcctcgctgttcagactcgctttctctgctcactcagagactgagacacttttcttttctgtcattggctctgtgtttgcttccaaaagctctacacgataagccaaagatcgaaagaccctctctagcttattctctgttttttccctgtcccagtttctcagatctactatcacccctttctgcattttcccttctttgttcttacaatcttttgctccattgccttctaagaccatgagtaaagaagagtttttgaagatacagaaatgtgttctcaaagtgaacatacactgtgacgggtgcaggaacaaagttaagaaaatcttgcagaagattgatggggtgtttaccaccgagatagatgcagaacaagggaaggtgacagtttcagggaatgtggaccccaacgttctcatcaagaagcttgcgaaatcagggaaacatgcagaactctggggtgctcccaaaggaaacagcaacaacatccagaacaacatggcgaaccagttcaagaacatgcagattgacaataatggcaaaggtgggggaaacaacaagggtcaaaagggtggtggtgggaataaccagccaaagggtaataatcaacaagagcagaacccccaacagcagcttcagcagcatctgcaacagcttcagcatatgaaagggttccaagatctgaagctgcctcaattcaaggacatgaaactgcccaacccgaacccgaacccgaacccgaaagcggttaaattcagtttgcctgaggaggatgatttgtctgatgatgaattaaacgagtttgatgatgagttcgacgacgagttcgatgacgatgaaatggatgatcctcagcatcctctgaataagatgatgatgatgaagccccctatgggtggtaagcctcctgtgggtaatgtccctatgggtaatggggcttcgatgatgttgaatagtatgatgaatgctcagaaaggtggcaatggtggtggtggtaatgggaagaaaggaggaggtggtggtggtggaggacctgtgcctgttcaagtgcataacatgggtggtggaaatgagggtaaaaatggaaatggaggaaagaaaggtggcggcggaaataatcagaatcagggtggaggtaacaaaaacaacggtggcaaaaatggaggtgggatgccagagggtaagaatggaaccagcaaaaataatggtgggggtggaaccgaataccaaataacaatgggaatggaggtaaaaagggtaataatggaatggctgaaggtgttcaagctatgaacatgttcccaaacatgggtggtcataatcctagtttggttggggctaatgtgggtcctatgaataacatgagcatccctatgggcaacatgcccatgacccaaatgggcaacatcccagcagttcaaggccttccagctgctgcagcgatgaacggcggtgctggtgccggtggtggatgcttccaaggtggtgttggtggtggtggtgggccagatatgatgcctggcaacccttaccaacaacagcaatacatggctgcaatgatgaaccaacaaagggcaatggggaatgatagattccagccaatgatgtatgctaggcctccaatggctgtcaattacatgtaccctcctccttatagctaccctcctcctcctcctcatgaaccatattccaactatttcaatgatgagaatacttccagctgcagtgttatgtgaaagagtaatgggtgggggtggtggtggtggtgaatggtgatggtggttgcaagccttttctaatctgctgatgatgcaatattatacaatggaaatgagtttttaattttagtttggtttttcttcaatttttctttttatccctttttttctctctcttttaaactagagcttttggtcccggcgggggattctttttaggggtatttggttatttatgatctttgcctcgaggcaacttttaccaacggggacaatacatggctgcaatgatgaacctgcatatggcattggtgaatgtgtttttctattgcatgatggatgctagttttaagaagactgtcaattacatgtaccctcctccttatagctaccctcctcctcctcatgaaccatattccaactatttcagtgatgagaatacttccagctgcagtgttatgtgaagagtaatgggtggtgatggtggttgcaagccttttctaatctgatgatgcaatattatacaatggaaatgagtttttaattttagtttggttttcttctatttttctttgtctcttttttttttctccctaagttaaactagagcttcaggtcaccataggggagtaattttattgatttttataatatttatgatcttgggaactatatgagatcatgtatcggggggatgtggttatggtggtgggcttcctccatg

SEQ ID NO: 79157 - DNA, 236 bp, Glycine max
  Clone ID: PAT_MRT3847_42495C.1
aattcctgttcgacccacccgtccgtccacgcctccggtcgcaagagatacaggtttttcctacttttcccgtcactatctcctcaagtcgccttcgacccttacctatagccctttttctcattagactctctactatgaataccactacctcctttctctcatgatctataacgtcctaccacattacttctacatccttaatctcaagtccctattcaagaactacagaccca

SEQ ID NO: 79158 - DNA, 301 bp, Glycine max
  Clone ID: PAT_MRT3847_42496C.1
tacggctgcgagaagacgacagaagggcctcccatattggcacgcacccatcctatttggtacactaacagcattataatttcgttgtgttacataaattgttataattatgattcttttgtattacaaattcaccctggaacagaatcacaaatttcattgtatgttattctgctgtgacggtatacggataatactacaaggtcatagttctaggaaggatccattctaataacgttgtaaggcatcttacgcattcccatacctcgaagattatgaatgtaatgctgtatcgacaagt

SEQ ID NO: 79159 - DNA, 499 bp, Glycine max
  Clone ID: PAT_MRT3847_42497C.1
ggttcatcatctcataaacagtcaccaggtgcacaagttaatggcagtaatattttgacctctacaactatggaactgcagtcacaaaagcgacagacttcactgtctcatcttcgcaagcatgagactgagatgggtggagggaatgcaccttcagttgctaatcgaacatcttactcacagaagaacgtgcatggccaaaactttacaattccagtgcaaccagtgaacttttcttttaagccatctgcaacatcggatattgttggcaatggtggatgttttggtgacaaacaacagcagcaacaggctttaaagggaggagacaaaggtggcggaggaggatattgaattagtattagagaaagctatgtcatgtagaataaaggaaaaggacctgttggttgatatggaaccaaagtctagagttagacaactagtacttagttctttgttgaacttaaatgtagctttggagatgatactagatttcattctc

SEQ ID NO: 79160 - DNA, 324 bp, Glycine max
  Clone ID: PAT_MRT3847_42498C.1
gttgccgcacctaggagggttttttagcatctgtcttttttttccgaactctcattcctcctacttttttggacgattcttaagggacagaaatccctcttgtgctggccacagacttcggattcattttctttcccactttagttatttatgacactctcctatttgtttaggactccgcgtatatttaaactttcctgctttttttcattctctgttaatttaagttcaaactgggaaatcttggattctgctccatctcctattggttaggactccgggtagacctttctatttcttcctctcttcacttttctttcactg

SEQ ID NO: 79161 - DNA, 650 bp, Glycine max
  unsure (1)..(650): unsure at all n locations
  Clone ID: PAT_MRT3847_42499C.1
ttcccgtcatcactgtatgacgtcctccttctttgggggggggggggggcgaaaagggaagtagtcagagctctatggcaaggatcgggggaaacaggaggtgttgtgctaaagaggagctcattgataccttgatagccgaaagccaagggccaagcgtcgggtatacccgagtcaaccgtaagatttatcttacgagtcgatggacgttaccaaacccatgcggttcgtgggtcatgtgggctattggacngttcgaaacgagagatgttggcgacatatgcgtaacctctagtagctggtacngagatttaccacgcgggctaattacccccgaccaatagcggaccaaccaacagtgcatttcgtgagccgtgggggaattaacgctgccgagaatgttgtgcgtagagcgtagggcnacgaggcgtttgaatgcgtaaagttgaagcgcgtatacattagcgtaagaggcgcttacgccaagttcgtaattgggctaattagcccagtgcaaggtacaccaggcgaagtattacagcttgagcactagcttcacaccggcccggtcagttgtaaatattcaaaaaccgggatgggtaccaaggggtatactgccaggtgcaggctataccgacgggcgagaacaa

SEQ ID NO: 79162 - DNA, 383 bp, Glycine max
  unsure (1)..(383): unsure at all n locations
  Clone ID: PAT_MRT3847_4249C.1
atccctatttccttcacggtttgaacagttcctaaactaaaagccatggctaacccacccccagttcgtccatgggtccgcttagcctctattcgctctacccctgcccctgcaccttcccctgcccaagagtctcgcactactttgggtctgcccgcatttagaaccgcttcagcaccatcatcaccacagactcagccaactcaggttcaagaacattctcaacctaacagagtctacatctcttcttcttcttcactcccaacttcacttgtccacaatgcaaaatttgcaacatctcccccagagaagcacacccgtgtgcccgtgtcaagtnccactcactctncaaaataataaaacaatctgaccctagcccaatg

SEQ ID NO: 79163 - DNA, 1568 bp, Glycine max
  Clone ID: PAT_MRT3847_424C.1
agtaatgtagagagggagagtggtgaggtgagcgttgttgttgagcagaagagaagagaattgaatccattccagatgtcatattgttggcaaatacacactttggcgagcaaggctcttgttccaattccacagtcacagtttcagtcattgtttttccttattcacattcccatagcagtatccgtctgggtctgagtcggagggttctttgttcagggcttcaggaaatgtccgtcgtagagtcatcctcacaataccagtagcagcagcagcagcagcagcagagcaccaccaccgactactatcccagtgtcagagatgatgaagaaggtgaaggaatttctaaaatacatccctgtttccaagtcccaactcctagacgccatcatcctctctatccaagatgatattgatgcccatcactttcgtcttctcacctcatgcttagactctatacttcatgccgagcataaaactatcttagaggagatgcgttccgattatcaacttacagattcactccaacaacttgtgtccaatcccaatgtcaaggaggaagggaacctctatgactatcagcctgctttggacctcaccgctcttttacgatctctcgacatacctaccaagaaagattatgatacgggctcccagagttaccattgctacccggtttcaacgtgctttcatgcagcttctttcaaatgcacaatttgaagaactatcagctagggacctgatgttaacgtctgcattgaacacagactatctccttaccttgccaatatatgttgattggaagagagcatatgagtctaatgccataatatttaggcgtggttatgcaactgagaagcagaagggcctattaattgttgaaaaactggattacttacagtctaagtttcttcgaaggacccttctttgctatatcagaaccactaacaaaacttggcacctggataagcgagctttacgaaaatgcctgtcagaaacatgaagtacaaaattggactgaaagattgaggctttggctaaaggaattgtcattatttcagaaatcactactttataatgaccctgcttcagatgagcaaataggtgtggaccaagtaccaaatgcagaacttcctatttggctggctgctcaaagggcagtagctcgatatgaagggattttgtcaccagttggtcctcgtggaaggctcttgaggagattgctttcttggataggacttattccacctatgccagaaacaccttttgaggttcacaatgataataacgctcctgaaccatacctaaggcctacttttttatcaaggatatcactaagtgatatatggagacctgcatcaaggaaatactgcagaaatgatacttggaaaatgttgaaaacttccatttccatacttttctcacagtcagtcctgcaggagccagcatttgaagaattaattctactgtattaccaagaagttgaggaaacaaatgctaaagataaagcagaggttccatcattgcaattatagatctatgagagaattcctattccagatttaccc

SEQ ID NO: 79164 - DNA, 656 bp, Glycine max
  Clone ID: PAT_MRT3847_42500C.1
gtgattggagggagattcaagaaaaaagaaaatccttttattgaggaggcttatcaaagagttgccctggatcagcttctgaggatagcaggcatagaagacgacgatctcttgataatgtccgatgttgatgagattccaagcgcgcacacaattaacctcttgaggtggtgtgatgggatccctccagttcttcatcttcaactaaagaactatttatactctttcgagttctttttggacaacaaaagttggagggcgtcaatccatagataccagaccggcaagacttggtatgcacactatcgacaggctgatgtgctgctggccgatgctggctggcattgtagcttctgttttcgtcatatcaacgaattcatatttaagatgaaagcttacagccattacgatcgcgtgcggttccctcactacttgaaccctgacaggattcaggatgttatatgcaagggggctgacttattcgacatgcttccagaagagtatacattcaaggagatcattgggaaattgggacctattcctcattcttactcagcagtgcatcttccagcatatttattgaataatgcagagagattcaggcgtttggtaccgggtaactgcatacgagaaaggggctgactttgatatatgtg

SEQ ID NO: 79165 - DNA, 345 bp, Glycine max
  unsure (1)..(345): unsure at all n locations
  Clone ID: PAT_MRT3847_42501C.1
tacttttctttatcattttnaaancccacaagaacaacaaaaggacccggtgcatgaaaacaaccacgaccggggcagatagtgacatcatacatctaattcatactcatcattccgacaaggatggcataactagactgcaaacaccttgcatcaaattcacatgaaaacccaaaaggccaatgatgagggctaacaacataataatacatcatggagcggagcctcacgagacactaaaaagggggtgataacccaaaaaaaccgacacttagcgggaatcgacacctctaccgcaaaaagcctcagcttacctacagaggcatgcaaacccaaagtgaaccc

SEQ ID NO: 79166 - DNA, 258 bp, Glycine max
  Clone ID: PAT_MRT3847_42502C.1
taattcttatttaagaattttgttcttgttttttgttcccctctaatgttttcatgatcctttatgttaatttgtatgacttcttgtttgtctgcgaaaaaaaaaaaaaaaaaaaaaaaaaaaaaaaaaaaaaaaaaaaaaaaaaaaaaaccgggggctctataactaaatgaactccggaacccgtacctaaatttcgcactcgacaccgacaaaaatatctcctcttcctattgggagtagctttttaccttaata

SEQ ID NO: 79167 - DNA, 339 bp, Glycine max
  Clone ID: PAT_MRT3847_42503C.1
cgctcgtagctggattcggctcgaaaaaagctcaaatatctttaccaataggcgacataactttgtgtaacgataacaaaatagcaccgtttgtttgtgtttttgccatggttcccaaaactgtagcgaaaaccatcacaacctggtggtggattggttcgatctgcgtcttcctctgctaaactgcgtacttcataaccccccaaaagagaattttttaaaaaaaatttggagagaaaaaaacaaagaagtgaagatctgaaagctttgttgtacccgcttataacactgaaaaatgcaaggtagatccccagaccaggaatcaataaggtctgggac

SEQ ID NO: 79168 - DNA, 691 bp, Glycine max
  Clone ID: PAT_MRT3847_42504C.1
atgcaatacggattaggccattctattatgttccacacaaaagacatacatcatgacatttaaagattgtctatggtatttgtaatgcaaatctttcatacaaaacatccacctgagaacaccaagagagatatgaaaggttaaaaaaagggggaaatatccctatattgaattttgttgttgctgaatcatgaaacattctatactctaagtttcctcctaagagactataaaaaatatatgacaccagacacagtttccacaaaacaaaaaactgctgacatcccaaatgattatgatcatatacatctccttgttgacctttcagcttgaattttttttgcatacaaagctattccactctttgccagtttgcccagtttcaagtttttatggttggcatgactgtttcaaaagcttccaccagcagctccacttttcttttcctagcaggggttaatttggaaacaacctgtcgaagtgcataatcaagcatccattcttcggtaccttttctttcttccatgtcttgatgccttaagttaactttttcagcttctgaatcaggctctagaggtagatatctggtccctcttgggttgaatttccttactttttcaatgacttgatgaatctcctaagcaggatcacttttttaagattgctccagcttctagacattttctggttt

SEQ ID NO: 79169 - DNA, 408 bp, Glycine max
  Clone ID: PAT_MRT3847_42505C.1
aaggcgggcgcgcgttttggggtttttgtgtggtttttttttttaacagggggtttggagattcgaggacataaccatagacaatattaagtgaattgggaaaataccatttggaaaaagggattaagaaggaccatcgggtacctaagcacttggtcattggatcaaaagcggaaactagggcggtgggttcacatgggtgcgtatttttttacaacaaggtcctataacaaggaaaacagaggcctaaattgggcggggttggaaagcgtataattcgccgtgggggccgaagaagaaccataaaaagagtgaaatggggacgcggggaggtttttacttggggggagaggttcaacttgcggtttatgggggttggaagtttgaacccaaaaactctgggaacat

SEQ ID NO: 79170 - DNA, 427 bp, Glycine max
  Clone ID: PAT_MRT3847_42506C.1
tctttcgttattacttaattagggctcatgaatatgttaagccttactttagggggtctaaattgtaaagctttctaactggtcataatattaccattactgatggtattgacaaaactgggggaactttgcaatttagaaagttagcagattggggctgtctcaagagaaactctaagcatacgtctaatggcatgcggggggctccttgttacaaggcgagcctatggtcacaactctgttatgtttcgtgcaacaatctggcaatgcaagaagcttatcttgtcaatctcatcaatgtgctacgagaatcgcatttgcccagtgcagaggaagctcgacgattgagaaggaaagctctctctactattgcatggctccaaagagctagtgtgcctaccatagcacagatcgaaaagctccattc

SEQ ID NO: 79171 - DNA, 1091 bp, Glycine max
  unsure (1)..(1091): unsure at all n locations
  Clone ID: PAT_MRT3847_42507C.1
caacccagcacaaaaatggagacccacaaaaatggagaaccaacaaccggcacctatctccgtgacactgctacatctgctatccaaaacttcgctcccatcaacaaaatccaccaacatctctgcgcgtttcacttttactcatatgacatgagccggcaagtggaggcacaccatttttgcgcgcaccagaacgaggagatgaggcagtgccttatctacgacagccccgagaagaaagccaggctcatagggctggaatacatcatctccgaaaacctttacttgacactccccgaccaggagaagcgtctgtggcactctcacttgtacgaggtcaagagtggcctcttcttcatgcctaaggttcctgctctcattcagcgcccagacatggagactgtctgcaccacttatggcaaagtctttcatttctggcaggtcgataagggtcactctcttccatttgggatacctcagctcatgatggctctcactagagatggccagatctatgatcacctcctccaaagttctgcagagcgcatggggatagactatgaggaagaaagaaaagcgagagaatatatgacagggccagttcatggaattcatccattggcaaatggagggggtaagggccttgaacttcggctgagggaggttgaactcaagcacgatccatctccaccatccgtcaaagccaggattttattttgaacatattgtacgtgttttctatataatgaatgtatctgcatgtaccgattactatattccccagtttagtttgctaagaataatattatatccggtgtagcacaaaaaaaaaaaaaaaaaaaaaaaaaaaaaaaaaaaaaaaaaaaaaaaaaaaaaaaaaaaaaagaaaaaaaaaaaaaaaaaaaaaaaaaaaaaaaaaaaaaaaaaannggggnggccccccccaaaagggaccccccccccccgaaattaaatccgaaccgaacccttgagggcaaccaatttttccttttagggggccaaaaaaaaattggggaaaaaaagggaaaaaatttttccctggaaaaaatttttttccctcccaattcccc

SEQ ID NO: 79172 - DNA, 391 bp, Glycine max
  Clone ID: PAT_MRT3847_42508C.1
ctcgagccggttattatgatgcttgtgctaataacttcaattttttaaaaaaatatttttgagagcatgaggtgataatttgtacgtccatttgtcttactattcttttttcctttttgttctgtggccgtcgtgtgtattatctatggttttgattgcaccttcatctcaagtttgctgaaatgggagaaatattagtatccatctgttaaatgatatttgttggattggggacaaaataaaaggtatttgcatgcaattttctctttggtgagtcttacagtgttaggcactctaacaaacattggtcttatattctttctatgcttaacacacgtgaaagtagatcctaaatctctacattaaactgaaaattgaacgtgttattgct

SEQ ID NO: 79173 - DNA, 155 bp, Glycine max
  Clone ID: PAT_MRT3847_42509C.1
ctgttctcagcttcacctgtctttttatgtttcgaaaattttggcaaggaatctggaaattcactgttagcaacaaggcttataggtgacgttgcagaagatggactgaaaaaatgaaaaactatttcttagattctgaaacttaaaagtgtgtt

SEQ ID NO: 79174 - DNA, 613 bp, Glycine max
  Clone ID: PAT_MRT3847_4250C.1
caatggggttgggctcaatatgctcatccaataagggatatgggtttataactgtgaattcttctatatcagaccaacaatcccttcaattaagtttttggaccgggtggcaacacacctttcaaaggagaaagcatgggaccagccggttttcaatgaggaactgttttacccctcatttcctggttatgatgggcttcatgctgccagaagaactatggatatgtatctcttcatgaatagcaaggttctgttcaagacagtgaggaatgatgctaacctaagcaaattgaagccagtaattattcatgtgaattaccaacctgataagcttccccgaatgaaagcaattgttgaatactatgttaatgggaagcaagatgctctcaaacctttccctgatggctcagattggtaaccttgcttctgcagctgagggtatattttcttggttagaacagttttacagtagattggtaaccttgcttcttgttgaatactatgtcaattgtttagaacagttttacagtagattttattagttacaaagcatatgtgcaggtaaaaaaagatatcattttatgagcacattgatttacatttttaggccccc

SEQ ID NO: 79175 - DNA, 984 bp, Glycine max
  Clone ID: PAT_MRT3847_42510C.1
cctcgtgccgaattcggcacgaggcggcacgaggcctcgtgccggcgcgtcggcgaggtgtgtggcaagcctcgcagattcaagaaacccatctcttaatttctttatttccttttcaaatatatagtactactactcctttcattatttgctatattagtaatatctcttttcacatacttatataactatagtcataatcattattattattagtatttagtttgagaaatggaggtacattctcccgttgtggccaagagattatggaatgtgttgagggtaaccttcttcatgataaggaagggtttgatctcaaagagaaagatgatcatggatatgaatttgatgatgaagaaagggaaggtggtgagaaaatctcttagcaatctcatgtcttcacatcaccaccaccacaaccataagagcgtgacacatggcggcggcttaggggtgcattatgaattctcatgtaacaatagtccaaatctaaattttttcaacatgccaaagcgcaagcaccatttcaacttcccctgcatccatgccccagaggttctagaggaggaattagaagaacatgatttttcattcgaagttgaaagtgatgttgtgcctaataaggctgtggtcaccgtgcccaagaccccagaatacatgtacaacttttttgttgagaaaaagagtcctcttctctcaccattctctgtgagggtctccaattactctgcattggatgaaaatgaagacattggaaatggccatgtcgatgatcaggctgaggatttcatcaaaaggttctatgaacagcttaggacgcaaagccccgtgcaattcctccgtttccaagagatgtaaattaagacgaaacagaagcatgtagttaattatgataataataatgaccatgcagttgttgataaatgctctactagtgcagaatgcgatcagttacatgttgcaatattgcagagcatttttttt

SEQ ID NO: 79176 - DNA, 508 bp, Glycine max
  Clone ID: PAT_MRT3847_42511C.1
ttgtgggaatcattgattacaaaactgttatgagtccgtgccagtctaacatgagtgattaatgacaaagctaacaacataagtattttaagcaatcgagccatagagcatatcaaaacatgaaaacccactggggttgaccgtatctgagacgatatgctctgactgatttgtatgaccagtgacaacacacagggttgtcacagtttgcctccacttatcatgtgatgcgcaattaccgtagtacgcttctggtctttgattttgtgacagactcaataagccggtacatccatcggtcaagcattcctgtcattgcaaaggtaccgccaagaactgcacatagtcgggtgaggaaatgcaggaagttccttctttcttctttgattgtgactgtaattggtgagagatcatacaagaagtacacagctggccacgcggacctatcagtagcgcgtttaggaacaaaatactcggtgacagaaaactgatttgttggcaacacctg

SEQ ID NO: 79177 - DNA, 223 bp, Glycine max
  Clone ID: PAT_MRT3847_42512C.1
gaggaactcaacttctgcgcgagctactgcccgacagttgtggaataggcctcgagagaagggtgtcaatcttcatcaggcgtccaaacatccatagccaatgagatcacataaatcccggggaagtgaagagcacgtcaaaatcaagtcaagtcaaatactctatcgttgggaagggaacggaacgcccccaagttgcaagaagcggctcgtttatttatgg

SEQ ID NO: 79178 - DNA, 339 bp, Glycine max
  Clone ID: PAT_MRT3847_42513C.1
caaaaacctatcaacccaattaatctgccttatatttgcatcccttgaaattcccaaggaacacattaataaaactgggccctcacaagaacccaacgaaacttgtacaaatttacattccaatttttacccacgtctcccggacaccaatcgcaccatggatatcttcacccacacgagactacatgctttcacaatgcttcaacacatacacttctatccactacacattctcaatctacagcaaatctctgtgagatatcctcccttcccgagagacggagtatcttcggtaaccatcttgttcacatttcactaatacttttggaccctcactta

SEQ ID NO: 79179 - DNA, 1450 bp, Glycine max
  Clone ID: PAT_MRT3847_42514C.1
aaagtgcaaaaattctagtaagacttatcatacaattaaataatagagctataaaaacataaggtgtgtataattataagtatctctgttcctacagcttaatgctgacgtgtctttcacactcacacctatgtctttacaggtgtcgcagcttcaatgaaagaaaaagtgaaaagaaactcttgtctctgacgcaacgctacacaacaaagtgtcaatatttagatgaactaccactaatctatttcggtaaattacatgcagttagtaggtgaggaaggtaaccacaccacagtaccttctgaaagaccaatgaatccaccttacaataggtattttcatatttagaagtcaaataaggaaagcgagtacatatatagcagcaacacaagcgacaaataaaagggtgttagtcatcacaaaatctgagagaaaagagcactcagcaaattacttgtactcatggcagatcatcagagactgaggatccaccctatggagggggaagcaccaccaccacccccaacaactccattggtacctccaggctcgtcaaaatcagaaaagcgtatccctttacaccatcctccacaactacgtgctatgccagcagcataccctacagcacacaaaagaagctgctgctgcaagtgcatatgttggataataaccttgcttgttctcctcctcattatcttggctgcaagtgttggaatcctctacctagtcttcaaaccaaagcttcctgattactcagttgacaccctcaggataagtgatctgaggcttaactttgacatgagcctctatgcaaggtttgatgtgaagatcacagcaaccaacccaaacaagaagattggcatatactataaaaagggtggaaggttgagtgtgtggtacacaaacacaaggctttgtgaaggttcactgccacagttctaccaaggtcatgagaacaaaacaatgctcaatgtgtccttgagtggtcaagtgcagtctggaagcaccttaatgaatgcactgcagcagcaacagcagacagggcgcattccattggatctcaaggtgcatgcaccaatagccatcaaacttgggaggttgaagcttatgaaggtgagagtcttgggagaatgccttttggtggtggatagcttgtcatctaataatctcataagcatcaaggctagcaactgcaagttcagattgaaactttgattcccatgatgggaaaagtttgccttaattaattcatgtcatttgttatttctattccttggttttttggactggaagacttgattcttttatggatttctttggcactactattgcagcagttccatacaatatttttttgttttctatagttttatttttgtcattcttgatattgacagtagatccgattgtcggattttgattgagtgaataaatatctctagatttgttg

SEQ ID NO: 79180 - DNA, 349 bp, Glycine max
  Clone ID: PAT_MRT3847_42515C.1
atatattttcttgatcaataatttatccctaatcatatggctagaaagtatttttggggtacaagcgataatattactgatgtccatgttaaccaacactgtgtataaatccattgcagccgggcttcatattctgaggtttgcattagcaagggccatgaaattgacggtagaaagaggatgactttttcccctcacaaaatactttacccatcttatgtagccctgtgtttttgtggaggggggcctttgttatcaatgaaatcgcagctggatgcggcaggatactcccatgatgctcaaaaaaagcaggaggacttgcatttctggtccacccgctgccaaaaag

SEQ ID NO: 79181 - DNA, 338 bp, Glycine max
  unsure (1)..(338): unsure at all n locations
  Clone ID: PAT_MRT3847_42516C.1
gaagncgggtggagactagaccaatccaacaactctttttgtttaactttttaccaccatacaaacacatctctgagtgctgacttaaagtacctgggaccccattaaacacaacaatcattcatataactcagcctctctttctcaaccactgcaccacgaatcttttactcaaataacacgtcctacttattccaccagatgctcacttcaatctccaacaaatgctaagacgaactcttcttgcttctgtacaccctctaatcactcaccctttgtctcagcatttgcattccttctatcatcacaacaaatcaacagaacaacagtatttgctc

SEQ ID NO: 79182 - DNA, 370 bp, Glycine max
  Clone ID: PAT_MRT3847_42517C.1
cggccccgagtattccccgggtacccaccacgcctccgctgtctgctgcctgctatcgatggagcaattcacgagaagaagcaaggcattatggtaagactactactgttactctgcgtatccgaaggtaattggcaagcatttttgtaggcttatggtttgagaattttgatagatcaaagtatatggatacagtgcgtctgaacagtgaggctgctgctgttgcttctgctgtctgaattctattcgacagcctcgattatgtgtattacttatataattggtacgccaagtaacaggttattctcattcagtggtagctaatacctgtgaccgtaagaccaaagaatcgttaccctagctctaactc

SEQ ID NO: 79183 - DNA, 219 bp, Glycine max
  Clone ID: PAT_MRT3847_42518C.1
ccacgcgtccgcacaaataacacgtacgccaatctcattccttgaatttttcaactttcaacgtcaaattttgattcagtaaaatttcagttcctatcgcactcgcaggttcattacttggtcaggtaacaattacaaaacaaaaaatataaagacagagccagagacagaaaaatgttacgataacgagtagggcttgttgtgggtgtggaattggag

SEQ ID NO: 79184 - DNA, 416 bp, Glycine max
  Clone ID: PAT_MRT3847_42519C.1
cttttctactttgagtcttcttgatccttctttttctccttgaactcaaacatggcagatgaggtggttctgctagatttctggccaagtccatttgggatgagggtcaggattgcacttgctgaaaagggtatcaaatatgagtacaaagaagaggacttgaggaacaagagtcctcttctcctccaaatgaacccggttcacaagaagattccggttctcatccacaatggcaaacccatttgtgaatccctcattgctgttcaatacaatgtaggaaggttggaattgccagaaatccctggtggccttttgaccttaaccaaaaagttaagcttaaatcttggcctaatatggtgattagaagatatttgaacctggaaaggagaatttgaccttcaaaggagaagaaaaag

SEQ ID NO: 79185 - DNA, 434 bp, Glycine max
  Clone ID: PAT_MRT3847_4251C.1
aaaaaaaacgggggggggtttttttaaaaaagccaatttccataggagggttggccggcatgcttttttaaaaaaaaattaaaaagcttttttttaaaaaccccagtttatttgcaaaaaaaaaaatgggcgggaaagttcctcttttaataaccccaaggttttttaaaatggggggcgggttacccaacctttgggtttttttaaaaaagggggttttttgccacccaaaatttggggggggtttggccccaaaaccttggggtttttttttttccaaaaaaaagggtttgtattggtgataaacggtaattaaatagccccccccttttttgaacttcccccccctcaaattttttagcaggctaaagctttttgttgggccaagaatccttgggccattttgggaaaaaaaaagggttttttattttttt

SEQ ID NO: 79186 - DNA, 265 bp, Glycine max
  Clone ID: PAT_MRT3847_42520C.1
cttaaaagaggccataatagcctacacggggctcttccctgccaccttgtacacccttgtggccctgatcctagccctatactacgtattatctgtgctctccccctctttctaccaccgacacaacaccgccttgtgcgacttggagccccagaaggatcctgtgagaccccccgtgcagatcctcgaggacacagaagaccacctcaaggcctacaacggtaccgatcccgataaggctatccttatggccatcgatggccac

SEQ ID NO: 79187 - DNA, 588 bp, Glycine max
  Clone ID: PAT_MRT3847_42521C.1
gtttatgaaaaattcatgtcttgaacaaatatctaattatatttgtcttagaaaatataatattaaagtatattttctaagacagtgatcatctttgaattaatatatattttttaaggcgatggttgaaaaaacatcttataacactttctaagaaaattactttctaagagaattttatgaaaatcgtcttaaaatatattttttatgacggtttttaagaaaatattcttcaaatgctcaaatttttacatttttaaaataaataaaaattctaagataatttctatgcaaatcaatataaaaacctactatttgagacaatttaaaaatctttatagaaagtcaacactttttcatgaagatagattcaaatatagttcaaaatcatgttcgaaagtgtcaaaaatactaaatttaaaagctttttttagtagtacgtagttggaacttttagccaatacaatcgatttgctttcatgcgacaacaaatcctaaatcatataaaatagtctctgataccaaatgtaaaaaaataatgattgaagaaacatgttttataaatttaaacactaattaaaattactt

SEQ ID NO: 79188 - DNA, 449 bp, Glycine max
  Clone ID: PAT_MRT3847_42522C.1
cttgcatggcctgcaggtctactcctaagattgtaactttgggaccccaggagatccacctttgatttaataggatcgttcacatgctgattgtagcaggatggatacccgatacgcgcacagatccatcaaggacttgtcagcttctacgaagatccctgacgtcttgggcttcaaagaaacactcactcagtagctctttctaccaccgatgccgaatatattgccgtgggacattgttgggcgcaattactttggaggaaccaaaccctccgactctatggctactaaccgagcaacgaccctcatctatgtgataaagagagtgcaccccgcatggcggcttgtcccagtagaacacaggcgcactaatcacatagacattctgcatcactttctaagggatcaccaacaaggcggggatctcgagatcgcttatgctagctcca

SEQ ID NO: 79189 - DNA, 190 bp, Glycine max
  unsure (1)..(190): unsure at all n locations
  Clone ID: PAT_MRT3847_42523C.1
cttgagaaagcaagtaatctggatcctactcttatntatcctnacacgtacagggctgcctctttaatgagaactcagaatgctcaagctgcactagcagaaatcaatcggattcttgggttcaaactttcaccagaatgtttggangtacgantttttatcnacntttctctngaggactnaaaggccg

SEQ ID NO: 79190 - DNA, 307 bp, Glycine max
  Clone ID: PAT_MRT3847_42524C.1
ataaagcatcggcgtcaatttcgccgccaacttcgccacatcccttcgcatactcgctaacaggccctcaatcgggtcgtcaaactggcaggggagctgcattcgctgtcgaggtcgcagtgaaagttgcagtaacagttgcagcagccgacgcagtgtacgccggatcactcacgcaaaagctcaagtgtatcctgctgtgtttcatggcagtttcgatcgacgtactgggctaatcaaacgggctaacgaacggcgcgaagatctccgtcgatcgatctttcgtgaggcattctgccaggcatgc

SEQ ID NO: 79191 - DNA, 561 bp, Glycine max
  Clone ID: PAT_MRT3847_42525C.1
tgcttttgtgtgttgtattttttttgttggcaccgaaacaacatgcatatccatctgtattgtaatactccatggctgaaaaatattattccagagaaaatgtgaacttaaagagcccttacgggaaaaaaaaatactataattctaagtcggtggccaaacaaggaaaaaaggattttttgattatggatcatcctctacagccctggagagtcctttggcaatgtaaaagaggcgcactgcttggattggccataggcaccaccaattggtgcaacttgctgggactgctaattgtgctaaatttgattgctgcccatgtcatgatgggggagccagttgaggaggcagcaaaaactatcactgaggcataacttaagctgagtgctttcttaatggtgaccaccagcgaattggtcaaaagaaattggcctatataattgatggcgaattgaagttcaatgtattccttggttagtggaaaaggagcggaaccaatgcctggattggtgaccctcctttcgctgtaagcaccgataaattgaaatttgatgcagacat

SEQ ID NO: 79192 - DNA, 205 bp, Glycine max
  unsure (1)..(205): unsure at all n locations
  Clone ID: PAT_MRT3847_42526C.1
aggagagcaatttatctttcacatactcaancattccaccattttggcaaagccaatgtcattttaggcgccaccacatgatcatgatcatattatcaatccccttaattttttcttttttcttttcccttttctttactctgtattggatcaatacttaaaaatggggttcttccaaaaatttcatatatatttcgcctactaa

SEQ ID NO: 79193 - DNA, 185 bp, Glycine max
  unsure (1)..(185): unsure at all n locations
  Clone ID: PAT_MRT3847_42527C.1
tnangcacgcgtacgtaanctcggaattcggctcgagcaaaanagntganactcctcncctntangcngttnnaattgtcaaaactcanaaataananattcatgaacnagangtactgtgttcggaactgcatatagtttgnngaggtttctgtncctcnttcattcncttccnganancagan

SEQ ID NO: 79194 - DNA, 475 bp, Glycine max
  Clone ID: PAT_MRT3847_42528C.1
ctggacaacacattttttctacaccgagagattattcaggctggcgttatacatcaatcagggataacacttgaagacgatgtggagcttgtgggataatttaaaaatatgatcgagcctcatgcgagtcagagcctaccactccacagatcttttgatgaatcctcacacaatcccagactatttactacctatgcatatcacactaatatccgggtatacacatacactgaaaccttacttgtatatctggtggtaaaaatgctttctcctgttctgaaatccctggctcatacagatcctacatgatttcctccttacaaccacagattatttttaaaatacacatcaaaatgttctgcagcatatcatatcgcccctggactggctacatcataaccaaatacaattcacagaagatgataaactctctatcattttttgcctgaaaggctctttcacctatacagcaaaa

SEQ ID NO: 79195 - DNA, 205 bp, Glycine max
  Clone ID: PAT_MRT3847_42529C.1
tggaagagttatggactatgcatttgagtccatattcaacaatgcctcgttcgattctgatgacgattacccataccgagcaggagatggtaaaagccacgcatctaaggaacatgctaaagacacccctattgatgactacgaagatgttcctgcctatgatgaggtagccttgaaaaatgccgatgcaagtcaatccgtaagc

SEQ ID NO: 79196 - DNA, 234 bp, Glycine max
  Clone ID: PAT_MRT3847_4252C.1
ctcactcattcgctctgtcactctctctctacacgactggctatacaaaaggtgctggactagctaactcactggattactcgtcacaatatagcacatcatatacctctgccctactcgctactctttttactaaagtgactctccacatccataacaagctcgcacctattaactaaactctcccaattcagatcctaatccgctccggcaacttatgctggcctagaccca

SEQ ID NO: 79197 - DNA, 436 bp, Glycine max
  Clone ID: PAT_MRT3847_42530C.1
agggaaaaaaaactttataattgggggaaagcttaattcccaaatccttaatttggggaaacaagtccataagctagtaaatagattaaaagttagcttatttgacacgaaatcctttataataattaccaaatacttaagcccaagttgtttccaaggaatcccagaaccccaaacccttgtctttttaaacgctggaaggactaataatggcatagttaaccccagggggggcaaacccatgatcaatttaaaggccaatcccgcaaaggctaaggcaaattttttagcagcctcaaatcaatccccggggatagaataacggtcccattttttggggggatcatatatctcccattttgaagcaggaaatatatgctgggttttttaaaaccaaggcctttttacaaccttcccaggaggagaataattcttt

SEQ ID NO: 79198 - DNA, 588 bp, Glycine max
  unsure (1)..(588): unsure at all n locations
  Clone ID: PAT_MRT3847_42531C.1
cgactctccatatttctagggagcgacactgcaactccgactgactgcgaacagagtggatgaaggggagagaacatgctcaccactttagaatacctcagcatatggcagggcttatctgatgtccattgatttgtcaccgggatactgctgctagtatgagcctgctcttactcttcaagatgccacttccgtctatccttgaccacagaactggatcgaggggcttcttctggaatgcataaagaatcagagaacgcttaagcccatgccanacaacaggttgctccatgatgggagttacaataatccatttctacgcgtctcgttttacacatcagatagaggacgccacgcctctatattgctcgtaccagcagagcacagcccgcacttgctcatgattggtatattcgaactatgtgccgctctacaacatgacagcttgtgcttgggacatcatcggagcccttgatactcatgccttccccacacaaactatatgactctcgtctgatgcaactaataggaggaatagccattattgcgctaggttactacatgctaacataaagtgctagcttatgg

SEQ ID NO: 79199 - DNA, 822 bp, Glycine max
  Clone ID: PAT_MRT3847_42532C.1
agagtgcttgaattgtcgggagggaagcggatgggggccggcgatgtgtcccggtcggatgtggaacggtgagagccggtccgccatttctgcgtggcgtctccggtgagggaaaagtagtagaagagaagatgtcgaccgtaccaggacagctcatctgggagatcgtgaagaagaacaactcctttttggtgaaagagttcggaaggggcactcagagcgtgcagttcagcagagagcccaacaatctctacaacctcaacactttcaagtactccggtttggcgaaccagaaaactgtcactgttcaacctgctggtaaagaccagtccgtgttgctcgcaacaaccaagacaaagaagcaaaacaagcctgctgctttgcttcacaaatctgtcatgaaaaaggagttccgtaggatggcaaaggctgtgcaaaatcaggtagcagataactactacaggcctgatctctcaagggcagctctggcaagattgagcgctgtcaataggagcctcagagtagctaagtctggtgtgaagaagaggaacagacaggctgtgaaggtccccagcaggaagtgaatttagaagagttaaattgcattctaaatttcttccatcctttccccattttgtagtttgtgttccagaactcaattctagattttctagttttgtttggagaggcaatttattgtgttttcaatatacaacaaccggaactactatgttatagctttcaacaactggtttggttttttttttcaagagatgatttaagaaggacggaagttcatattaacataaaaaaaaaaaaaaa

SEQ ID NO: 79200 - DNA, 866 bp, Glycine max
  Clone ID: PAT_MRT3847_42533C.1
atcgtatgtttgcgagaagacgacagaaggggattcctgtgcattcattcagcggtcatctcaatctagatttgtgtgcggtgcgtctccggtgaagagaagaagatggcgaccgtaccaggacagctcatatgggaggtcgtaaagaagaacaactctttcttggtgaaagagttcggaaggggcactcagagcgtgcagttcagcagagagcccaacaatctctacaacctcaacactttcaagtactccggtttggcgaacaagaaaactgtcactgttcaacctgcgggtaaagaccagtctgtgttgctggcaacaaccaagacaaagaagcaaaacaagcctgctgctttgcttcacaaatctgtcatgaaaaaggagttccggaggatggcaaaggcagtgcaaaatcaggtagcagataactactacaggcctgatctcaaaaaggcagctctggcaaggttgagcgctgtcaataggagcctcagagttgctaagtctggtgtgaagaagaggaacagacaggctgtgaaggtccctagcaggaagtgaaattagaagagttaaattgcattctacattactaccatccttttcccccttttgtagtttgtgttccagaaccaaaatttagattttcgagttttgtttggagaggcaattattgtgagttttcaatatacaacaactggaactatgttatagctttcaactgggttggtattttttttttcaatagatgatttaagtaagaaggatggatgttcaaaaaaaaaaaaaaaaaaaaaaaaaaaaaaaaaaaaaaaaaaaaaaaaaaaaaaaaaaaaaaaaaaaaaaaaaaaaaaaaaaaaaaaaaaaaa

SEQ ID NO: 79201 - DNA, 307 bp, Glycine max
  Clone ID: PAT_MRT3847_42534C.1
cttttaataagctctcacggattatttcaaataaatatgaaaccattgaatgggaaccgcaccaccattcagttattttgtaactccagaagattgtaatgacgtaatcctattgcttaaatgctattgcaaattggggcattattatactgaatggtgattatttgtgttcataaaaacaattttcatttctaaatctgaaaacaaaaatcaccatatgaaaataatattttttgtgcatgaatattaacagctgcttgattcttgctttaaacgtcaagtagtagaaatttctattctctaagta

SEQ ID NO: 79202 - DNA, 426 bp, Glycine max
  Clone ID: PAT_MRT3847_42535C.1
ccacgcgtccggtgatcatcactatgttgggtttcacacaagctgatcattataatccttcatatgtgcaagttgagccaaacagtgagtctaacggaattagttgtaaaaccatatgtaaattagaatgtgcacctttagtaataattgctcagctgtatctaaaatgtgttaaagattgtagtgcaaaatgtcttacaaagtccattgttgcggccaacgattgcatgactagttgtggcttagtcaagtccattaacgtcaacaatgatgttcgtgatcgcacgacttatgtggtgaattcttgtatgcaagagtgtctaaacaagaaataatttgttgaaagaatcttcaaaaggttcttacatgaaatgatatgcatgcataaatgtaataggtaaattttaatcaataagtaacacctat

SEQ ID NO: 79203 - DNA, 388 bp, Glycine max
  Clone ID: PAT_MRT3847_42536C.1
actacttaaaaattactcattgaagaagaacacgaatcattactagtgtatccaacgactttctagcaacaatgtaagtatttgggggaaagatatgtcgtatggaatagtcagtatgattaatagaatatgaagatgttttgtgtctattagtgtgaatatccgtatttttaagagtaaatctacatatttaatattataatactcgatagagcttaaaatctttcaagagaaatataatatttttttaacacatctgcttacaaagttttcaattattcaatcaatgcaatgtataaactataggcctacttataaagatcagagtatgtaagatcatgatacaattgcaaattaaatagcaagatgtagggaatttttaaaaagt

SEQ ID NO: 79204 - DNA, 496 bp, Glycine max
  Clone ID: PAT_MRT3847_42537C.1
aagacgagtttcctttcagaaaaaaggccaacacaacatcacactggaacgcgacagcagccaagaggacacaacggtccaacctgatgcataacatagccacgtggatagtagcaccagatcatgctggtaggcatagacgagagaataaaggggctagaaaagaagccagaaaggctggagtacaagggggagaatgctggaatccacaacctcaacttaacggatgcaaatgacctgtgtgccaactgtgattacaccataagatgctacaataccaactcgagaatctgcatacactatgacactgtggaggagtcagagcgacataaggaccaaactctagccaccaatgctgcacagccattcacccagtcacataagaatgtgaccaggctggacgtgggcctgacgggacaatgcggggcccggtatgagtctgcgcctaaggaccttacgcgcgagagatcctatggagacattgagtacgatgtgt

SEQ ID NO: 79205 - DNA, 439 bp, Glycine max
  Clone ID: PAT_MRT3847_42538C.1
ggtcgcccttttcatttcatttagaatcttcgtatgaagcatatcatatagtggtgaaacttgggaataatgaggtcccatgatgcagaattaggcggcaatacatccgctcccagtccagagccaatgcaactaagtccaagcagccccttcctcaaaagagccaaacgaacatggaccacaaattgtcccttggagaaggaatcatgaaccatctccacgtgggatctatcaagaatgcgagagtcagtttaagaaacctcatgccatttgtcgacaacgcctaatagacttggactgaatgttcaactgaagccagaaatgaaattacatttactgtgcttcaggattgacatctttctacggattatgactcttgcacaaaacactctcgccgatagaccaatcataatgctagcagagttttccagacctccac

SEQ ID NO: 79206 - DNA, 1177 bp, Glycine max
  Clone ID: PAT_MRT3847_42539C.1
acatggggactaagagcagctgagaggcatgtggtggattctccatttctgatttcccatctggattgagagcattggttaaaacaggctatggtgcaagggtgactccttatgttgatgattctattgtaattgatgttaaccctgacaataaagacatgtccccagagtttcttcggtggttgcgagagagaaatctttcaagtgatgatcgactgatgcaattaaaagaagggtacatcaaagaaggtagcacagtcagcgtaatgggagttgttcaaagaaacgacaatgtgcttatgattgtccctcctcctgagcctttgactaccggatgccaatgggctaaatgtatatttccagctagccttgagggtattattttgagatgtgaggatacatcaaagattgatgtcattccagtgtagttgcactctccagacacctcttaggtattcttctttaaagaagtattttcttacctcatttaaaaaaatggtggttgatgtttgtattttgtaagtgttattggtaagcgtgatgagtctacaactgacatcagtgattttctttttcctactctcaacccctagtttgttgtatagctaatgagaattcttattcgtttattattcctaaggagtttattctttttaatggatgtggttttatgaaagtgagttgtttgtcggtaggactagctgcttttaattgtcataggtatatcatgcatgatatatatttcctgttcagtgaattttggaagagggttaccatgaagtaatacttttccttcttttgtcccctgttttgaagtctatgcctggcaggtagccaaatgatatgcattgtacaaacaataaattatatgcatgttttactatttcgcttttagtagggaggttctaagacgaaggctatgcctccaaagggcaaaggaggatcttcaaaggcctctgcctctgcaaaaaaagggaaacagagaactaaatgaaaatatgttaatacgggaagatcttcaaaggggttttgtcttattttcagtgccgaaattttgtttgttcattttttccggcttgttattgtgcaattgatattataaaatgatcgaatagagctgttttgttcttaagaggcaaatcttaattcaaatgaaatttgtcttaatcagcaaaaa

SEQ ID NO: 79207 - DNA, 358 bp, Glycine max
  Clone ID: PAT_MRT3847_4253C.1
tccatctttgccttctgcatgttgggtctctgtaaacagatactgcaaaagaagaataatattgaatatttggttggggtgaattcctggggtgaagcgttgcagacattacggctattctaagagtgtctcgctctcttattcatgttccaactggaccaccggggacaaggtgcgtaactggcaccaacccttcgccggacggtgggcgtggtgctttggcttctggaagggggaggccttcaaacttggtcttcttaacttgtggggggtctgctggcttctaacctcttcttaactcttttttctttttactacttttaaactaccttggtttcaaaataacaaaaacaaacac

SEQ ID NO: 79208 - DNA, 485 bp, Glycine max
  Clone ID: PAT_MRT3847_42540C.1
ccacgcgtccgtacggctgcgagaagacgacagaagggaattcgagcggcccctatgattcctgaggtcactttaatatttttgtctctaaccttctttcgggggggacaccttgctcttattttaatggcttctatgtgaaatcgaaaattgctgaagcggagttttggttttttcatgcgacaatctgattaaagggattaagggcatttagcaattaagaaaattaaactcgcttttcttgataatatggataaaattgctgaaaggcttgactttgcatgcatgtctgcatttgtttgatcttatggggcatggctcttgtagaattaaattcattatatttctaagctgcacaaaaattgaccatctgggtctttagaaatttgacacaaaacaccaattgaaactctatcaaatatattccttcccgaggcactgcatattttacttagctatttgcctaccttatttattactgagca

SEQ ID NO: 79209 - DNA, 396 bp, Glycine max
  Clone ID: PAT_MRT3847_42541C.1
tggccccccttctgagcctttgactaccggatgccaatgggctaaatgtatatttccagccacccttgagggtattattttcagatgtgaggattcatcaaagattgatgtcattccagtgtagttgctctctccggacccctcttaggtatttttctttaaaaaagtattttcttacctctgttaactaaatggtggttgatgtttgtattttgtaagggttattggtaagcgttatgagtctacatctgacaacagtgattttccttttcctactctcgacccctagtttgttggatagctaatgagaattcttattcgtttattattcctaaggagtttattccttttaatggatgtggttttattaaaattagttgtttgttggtaggcccc

SEQ ID NO: 79210 - DNA, 692 bp, Glycine max
  Clone ID: PAT_MRT3847_42542C.1
tggggttcttgcacttgctgtgtcctcttcaagcttttgaactggggtgttaggggttcgaccattcctcgagcctagtacaagttgtggttgggatttcaatgcattgtcaaggtcttgtaatgcttcattgaggttgtttgagagtgtttgaggggagaattgacgtttgttccttatgctgttggccagttcccttaatacttttgacacttcctctccaagtctgatgcaagaatctttgtacaccgcacgaattgactttggtgtcttaagaatcaaatgttaataaattaataaatcagtcaatggaatatataataaaatcatgataataagcatcaaataagaagctgcacttataggcttaactaatcctcctattattgttgttgaaattcgatttcggtcccctattttttttccctcaattttaatcccccaattattttaattatgcaacaaaggtctttatcaagctatgattgaaatatcaagtgactctgaaaacagtggaaaccgtcttgtgattgatgaaatcaagcaattttaagagaatgccgcatcaatatagatgtgccaatgtgactgtgcagtagcatgtctggttaatatttccattaaatattgaatgttaagttaatgaataaattaaaactgcataattaaaatagtaggaaccaaattcgtgc

SEQ ID NO: 79211 - DNA, 431 bp, Glycine max
  Clone ID: PAT_MRT3847_42543C.1
aaaaccacatccattataaagaatggactccttaggaataataaacgaatagctatacaacaaactaggagtagagagcaggaaaaaggaaatcactgatgtcagttgtagactcatcacgcttaccaataacacttacaaaatacaaacttcaaccaccattaatttaaaggtggtaagaaaatacttctttaaagaagaatacctaagaggtgtcaggagagcgcaactacactggaatgacatcaatctttgatggatcctcacatctcaaaataataccctcaaggctagctggaaatatacatttagcccattggcatccggtattcaaaggctcaggaagagggacaataataagacattggtgtttctttgaacaactcctatttaactgactgtgctaccctttttttgatgtaccctttttt

SEQ ID NO: 79212 - DNA, 497 bp, Glycine max
  Clone ID: PAT_MRT3847_42544C.1
tttttgttttttttttttttttttttttttttttttttttttttttttttttatttttttgttttttttcccccgggaacaggccccccagtacaaataaggagaaccggggaaaaaaaaaaaaaagcccttgccccatcctaaggatgagagttctctgggggatgtcccccgggaaaaaataaaaatctcgggggcccaaggcccccaaaaggacccttaattttcttcacccccgaaaaagggctcaaaggttctaaaccctcccaatcccgccgggcctaaaaactttctgggaaaaaaaaggattatgatctgtcacgatttgttttcccaacctttggcccctggccatgcaacttaccattaataaaatgggaaatgctttccagtgggcgcttactttgaccctgtttgcaggggtgggcccccaccttttaaaaaaacatagaggggccatttttttgaacaaattcagggggtacctttttccccta

SEQ ID NO: 79213 - DNA, 1010 bp, Glycine max
  Clone ID: PAT_MRT3847_42545C.1
cgttgaatcgagtaccctagcgtccccgattacattcttctacttccagccaccctccaccgttcttccctctcgtcttatctcaccttcaacgagtttcaatcattagctctagcatatcctggatttgagctttaccaatggctgatgactctgctaaaggaattgaaaatgcttctttgaactcaacacaactagagaaccctcagattgagcccataagactgccctcagtagaggaaatccgtggtcaagacatttggaacaattgtgcagtgcgcagtgttgtcagtggagtcatgggtggtgggcttggcatcttcatgggtttatttcttggagcactggacaacccattgatgcaggaggaaatgactggcagacaacaatttatatatcaagcaaagcagatggggcgaaggagttggagttcggctaaagcatttgctgttatgggtttcatattctcagctgccgagtgtgttgttgagaaggctcgagcaaaacatgacataacaaataccgttgttgctggatgtgcaactggaggtgcaatatcagcaaaaggtggcccaaaagcagcttgtgctggttgtgctggctttgcggcattctccgtcgtaattgagaagtttttggagagacatcagtaagggaattgatattagcctaacatattttttgagttcttggtgaagtccttttgcccatttgatacgggacgcgattggggagcacacatattgcggtagttatatcaataattttgttgtatacgatgtcattgacaaatgcagttctaatctggagaaagctgatgtaatgatttgatttagtactaagtaattgaaatatagttgttttctttatgtattcgtatgtctgaataattctatggtgtattcattattcaccgctgtcattatctattttggtgaaaaaaacataatttggctgttaggtaaaaattgaatgtggctatgcaagtggtatgcaataatttatcgttt

SEQ ID NO: 79214 - DNA, 890 bp, Glycine max
  Clone ID: PAT_MRT3847_42546C.1
ccacgcgtccgacggctgccaccccctgcagcggggtcccacctctcacgccgaacctctaccgttcttcaatctcgtcttactcaccctcaacgagcatcaagcattagctctgctttaccaatggctgatgactctgctaaaggaattgaaaatgcttctttgaactcaacacgactagagaaccctcagattgagcccataagactgccctcggtagaggaaatccgtggtcaagacatttggaacaattgtgcagtgcgcagtgttgtcagtggagtcatgggtggcgggcttggcatcttcatgggtttatttcttggagcactggacaacccattgatgcaggaggaaatgaccggcagacaacagcttatatatcaagcaaaacagatggggcgaaggagttggagttcagccaaagcatttgctgttatgggtttcatattctcagctgccgagtgtgttgttgagaaggctcgagcaaaacatgacataacaaataccgttgttgctggatgtgcaactggaggtgcaatatcagcaaaaggtggcccaaaagcagcgtgtgctggttgtgctggctttgcggcattctcagtcgtaatagagaagtttttggagagacatcaataagggaattgacgttagcctaacacattttgagttcttggttaagtcttttgcccatttgatgcgggacgtgattgggggagcacacatattgcagtatttattttacatcaatacgatgtcatttgcaaatgcatttctaatctggagaaaggtgatgtaatgatttgatttagtattaaataattaaaatggttgttttctttgtgcaaaaaaaaaaaaaaaaaaaaaaaaaaaaaagcggccgctctagagga

SEQ ID NO: 79215 - DNA, 245 bp, Glycine max
  Clone ID: PAT_MRT3847_42547C.1
aaaaaatgggctaacccaattggctgggaaccgataataggaggaaggatttggccatggactgcccggaaccttggaattcctgaagggggaacctgcggaacatttccaggacttcaatgctgaggcccaaggttgcctcacaatcccaaatttaaaagcaaaccttcctggggaacctcaaccaccatcatccaactcgccaatttgtgacgaggcagaagtccgctttttgcctggcgact

SEQ ID NO: 79216 - DNA, 542 bp, Glycine max
  Clone ID: PAT_MRT3847_42548C.1
aatatctatgtactctctatctgtacaaatactcctttctttcttctcttatctgctcactgtagccatggcttaacacaagtagcgaggagctggacggggaaatgcctcttgtggcatgggtgcggctgaacatagagtgaacaccttacgggcctagccaaggaaaaaagctcatccatatgtgattaatgaaattggtgacacatacaaagaggttatacggtgaaacacatactggcggccctgctgagagctatgatgaattcactgcatcctctgctctgaaaatgattgcctatccgctgtctttgactaacgattttctgacatatcacaactgtcaaaagagcaaaatgtaaactattgcatgggcttcttcagtggcccgcattcgcccgaacatgctatatgcaacatccaatgacaggttcatgaagggagctgcaaggcatccattatgagattcacgcaacagacccaacacagatggatcttgaactactcagagaacgtctaactgaacagacacctacacaaga

SEQ ID NO: 79217 - DNA, 2303 bp, Glycine max
  Clone ID: PAT_MRT3847_42549C.1
tacggctgcgagaagacgacagaaggggggttaacaataaatgaataagagagagagagagaataatgggtatgtgtatgtagcgtccgcggactcgtgggcagacgcgtgggctcaactcaaaactcaaattatttggtttctgctctgtaaattccctctgctgcttaacaacatccatcttctccaaaacaaaaacaaagaaatatctaaaatctggaacttacgctgatccataatttgttgcttttcttccttcgtacaatgtcagaactttagcatcacctttttgcctttccttcttactaactcagataactaccgccaccatgacttcaaaatctagacccaatctatctgaaaattccaacaaaggatcgatggcaactcctagagccagtaaagctagcaaagttgtatccaaatcagaatctgagtcaccatcaccactgcaaaattcgcgactttctgtggaacgatcaccacgatctgtgaattcaaagcccgctgttgagcggaaatcaccaagaccctctgccaccccacttgataaacaaccccctagagctgcaaagggttctgatttgcagaaccaattgaatcttgctcaagaagacctaaagaaagcaaaggagctgcttattcaggctgagaaggagaagctaaaagcaattgatgacttgaaagaagcacaaagagtggctgaggaagcaaatgagaaactccgggaagcattggttgctcaaaaactcgctgaggagaattctgagattgagaagttccgagctgtggaattggaacaggctggaattgaaactgtgaagacgaaggaagaagaatggcagaaagagattgaaagtgtgaggaaccaacatgctttggacatggctgctcttctctccaccactcaggagcttcagcaggttaaacaagaactcgccatgacttgtgatgcaaagaaccaggcattgaatcatgctgatgatgcaactaaaattgccgagattcatgcagagaaagcagagtttttatcagctgagtcgatgcgagtgaaggccttactggattcaaaactggaaacagaggccagagaagtcaagggctgaaatcaggggaaatcaggttatatttaaactgaaaacagagatagaagctctcaaggcagaacttgaaaaggcaaaggattacgatgataagttgtcagagaaagaaacttttattgaacagcttaatgtggagcttgaagcttcaatgatggctgaatcttattcacgtagcctgctagaggagtggcataagaaggttgaggaactagaaatgaggattgaagaagcaaacaagctggagagaatctgcatcagagtctttggaatctgtaatgaaacagcttgaaggaaacaatgatttgttgcaagaagcaaaaaatgattttggtccccttgaagccattggtttttttttaactttctttggacattttgtgagggtatcgctactccttgttaattggcccttctatgcgactaaatctgtcttgaaaagttaggagttgttgaggcacggaaatcaggactaatttttttcacaaaagagcaagcacatgctttgaacgatgaaaagcttgctgcttctagtgtgcacgccttattagaagagaaaaacaaacttatcagtgaattggagaattctcgggatgaagaagaaaaaagtaaaaaggcaatggaaagcttagcttctgcattacatgaagtatctgcagaagctagagaagccaaagaaaatctactaaacatccaagctgaacgtgaaagctatgatgcccagattgaagacttaaagttagtcttaaaagctactaatgaaaaatatgagtccatgcttaatgaggcacggcatgagattgatgttcttgtatgtagtattgaaaattctaagagtgcctttgagaactccaaggctgagtgggagcatagagagcttcaactagtcagctgcataaagaaaaatgaagaagagaaggtgtccctggaaaaagaaataaaaagattgctttatttgcttaaagaaactgaggaagaagctaatgccaacagggaggaagaagctcaattgaaggaaaatctgaaggaagttgaggctgaggcaatccaactgcaggaagctcttaaggaaacaacagcggagaacatgaaattgaggagaacttattggataaagaaaatgagttgcagtgtatgtttcaagaaaatgatgaactccgaattagggaagctgaatctatcaagaaggtggaggagttatct

SEQ ID NO: 79218 - DNA, 768 bp, Glycine max
  unsure (1)..(768): unsure at all n locations
  Clone ID: PAT_MRT3847_4254C.1
gctattcaacacaattgtagttttattttttctttctaagttaaattttttattgatcacaagcatgaaaatcgaggtattggagcttctgaaaaacaattatgcagcaagaaacattcccaaaggggtgttcctactaccattcacttttctggtggtggtgatactacttctgatcacaaacttaaacgaatcatattcttatctatatggaagcagcgtggaaagcacagaaaactttagctgcaacatattttcaggaaattgggtgcctcattccaaagggccatactacagtaatgaaagctgccctttcataacgtacaagcaaaactgcttcatgcatgggagacccgacagagagttcctaaaatggagatggaaacctgacgaatgtgagcttccactgtttgatgccaaacagtttctgaagcttgttcggggaaagtccatggcttttgttggagactcaaatgggagaaaccagatggagtcattgttgtgtctcctaaatagtgttgctcgtcctgaagacattacagccagatatacatcaaacgacgacaaatatttcaaatggtggtattatgctgattacaagttcactgttacaatattatggtccccctttctagtcaaatcaagtcaaacatacctcaacgacacttctttctncaacgccgagaacctatacgtggatgaagcagataaagcttgggccagccacattgaaaatntcgactacgttattttctcaggaagacaatg

SEQ ID NO: 79219 - DNA, 904 bp, Glycine max
  Clone ID: PAT_MRT3847_42550C.1
cttctctcaccactcaggagcttcagcgggttaaacaagaacttgccatgacttgtgatgcaaagaaccaggcattgaatcatgctgatgatgcaactaaaattgccgagattcatgcaaagaaagcagagtttttatcagctgaattggtgcgattgaaggccttactagattcaaaagtggaaacagaggccagagaaaatcaggttatattgaaacttaaaacagatatagaagctctcaaggaagaacttgaaaaagcaaagggttacgatgataagttgtcagagagagaatcttttattgaacagcttaatgtggagcttgaagcttcaaagatggctgaatcttatgcacgtagcctgctagaggagtggcataagaaggttgaggaactagaaatgaggattgaagaagcaaacaagctggagagatctgcatcagtgtctttggaatctgtaatgaaacagttagaaggaaacaatgatttgttgcatgaagcagaatctgaagttgctactcttaaagagaaggtgggattattagaaatgacaattgggagacagagagcagatcttgaggattcagaacgccaacttcgtatggctaaggaagaaagtcttgaaaagtcaaaggaagttgaggctctgaaatctgaacttgagacggtcaaggaagagaaagcacaggctttgaacgatgaaaagcttgctgcttctagtgtgcaggccttattagaagagaaagacaaacttatcaatgaattggagattttgagagatgaagaagaaaagactaaaacaatggaaagcttagcttctgcactacatgaagtatccgcagaagctagagattccaaagaaaatctactaaacaaccatgtggcacatgaaaactatgagac

SEQ ID NO: 79220 - DNA, 257 bp, Glycine max
  Clone ID: PAT_MRT3847_42551C.1
gttggaaagtggcatcatggatctcagcctcttccacagtcggacgagttactcaagggattgatacaactcgccctcacaggcatcgtcacaggagcaataagtggccttggtctggagatcatactcagacttgcatttcgcggtgtccatgttgttattgcagtaaggagtctggatagtggtatgaatgtcgtagtaacaatacttaacgaaatccctcggctaaaattgatgtcatggagttagatctaagc

SEQ ID NO: 79221 - DNA, 244 bp, Glycine max
  unsure (1)..(244): unsure at all n locations
  Clone ID: PAT_MRT3847_42552C.1
tcgcntctttttttactaagacgggatcgacagagagacagtttgttataaagtgagaaagcgccgctgccgctcctaaagcatgctggctacacagtgacaaaagagagagaaccgctcgtgcacggaccagagctagcgagagaacctaagggacgatagttaaatcgaacgcgcaatgtcgagactagggtgactaaaacgcacggctgatagatcaatcgatacaaaataatctgaaacc

SEQ ID NO: 79222 - DNA, 252 bp, Glycine max
  Clone ID: PAT_MRT3847_42553C.1
tccaacgacaccttcttcttagtctttcaccattcaaatttacaacctcaccacttttccctaggtaagttcctttaccccaccctgctctccaccaacctctttcatatccatcacaccatcttccccatcttctgcaaatacccccccaacatccaatgaacacattacattatcttctacatcttacaaccctatgataacaatgccgtcaatatcttctacttttagtgcttaaaaacattacatcat

SEQ ID NO: 79223 - DNA, 174 bp, Glycine max
  Clone ID: PAT_MRT3847_42554C.1
aaaaaaaataaactactcacagtgattgagagagtgacatgatctcaaaagggagaggcttgattcttttacaatccgtaacggaaactagcttgagtcactctcatgccaaaacatatatcaccacaatgcatgcacaactttcgtatgcttgaagcccaggacaacgaaaat

SEQ ID NO: 79224 - DNA, 410 bp, Glycine max
  Clone ID: PAT_MRT3847_42555C.1
cacaccaaaaggtacccgttcgaacaaacatacaaacacgcgggggggcggttagaaaaaaacgacagacggggccacaccaccaccaaaacacacccactaagagggcttctcttttgaatcctccctaaggctgcttcttacaacccttatcctaatccctcaaaggcttgctacttcctccaaaccaattaaaaagccaccagtgtacaagcctccagtgtacaaaccaccagggtacaaaccaccggtttataagccaaaaccacccgcttacaagccgaaaccaccggtttacaagccaccatataagaagccaccatacaagaaaccgccttatggaaagtaccctccagtagaagacaacacccatgcctaaagcaagcaatgacgtctattatctacttaat

SEQ ID NO: 79225 - DNA, 365 bp, Glycine max
  Clone ID: PAT_MRT3847_42556C.1
gctcgaggaaacatcctctcattgttatcacccagtttttttatggtctccaaacacatgctggggaggttaattttgaaacgagagacgcctattacttgacaaaaatctacaacttcaatcgtaacattatctggttccatctatctcaacatcgtatttcccaccaacacaccaacctctacagaatccaacacacagtcgctatcattcaattagtgctaaaacaattgaaagtgccagtatatgttcgaaccactcaaaagctttttcactacatcaatttcattgacacaaatctcaggagatttatctttccctttcctcgtcatgtacacactctccatccaaagattgcccaacat

SEQ ID NO: 79226 - DNA, 302 bp, Glycine max
  Clone ID: PAT_MRT3847_42557C.1
gctctccgtcaggttcatcgtcccactttcttctccttttaaggtttcctttttgtttcacctttccagatctgcatcttccattttttaggattaagcggtgagattcatgaatctgagaaatgtcagattcttctcgggatgagaatgtttacaatgcgaaattggcggatcacgtcgaccgttacgatgagatggttgagttcatggacaatgtaccagacactgtggaagttgaggagttgacggtagatgagacaaatcttctctctgtggcttacaacaacgtgattggtgctatg

SEQ ID NO: 79227 - DNA, 194 bp, Glycine max
  Clone ID: PAT_MRT3847_42558C.1
gggccggcgaaaattcaaaatgggtttttgctcaaaacgacaatcattgtcctcaaatttttttagcaggggttgaaattaattcattacggcgtaacaaacttttatgggggtctactggtgcttaacttcaactttttttttttgccacaagcggttttttgagccgaatcggtttgagctcgagccgaatt

SEQ ID NO: 79228 - DNA, 821 bp, Glycine max
  unsure (1)..(821): unsure at all n locations
  Clone ID: PAT_MRT3847_42559C.1
ccggaactgaatggccgggccgagccgtccncggcacgcgtgggttgccggggagaagctttggggggaagtggagagcggcaaagtgaagagctttgcgaaaattaaggtagaaaacgggtcggattcgtgtccgaattcggtgtcggtcgccgggacggagttccgggacaaaggggtgttggtgctgccgtgtgggctgacgctctggtcgcacgtgacggtggtggggacgccgcggtgggcccacgccgagagtgacccgaagatagcggtggtgagggacgggggagaggcggtgatggtgtcgcagttcatgatggagttgcaaggcttgaaggccgtggacaaggaggagccgccgaggattctgcatttcaatccgaggctgagaggtgattggagtgggaagccagtgattgagcagaacacttgttataggatgcagtggggttctgctctcaggtgtgaggggtggaagtctcgtgcggatgaagaaactgttgatggacatgtgaaatgtgaaaagtggattcgtgatgacaataatcgttctgaagagtggaaggcgacatggtggttaaacagattgatagggcgaaaaaagaaggtgacggtagactggccatatccttttgctgagggcaagttatttgttctcaccataagtgctggcttggaaggttaccatgttagtgtggatgggaggcatgtgacatcctttccctatcgcacgggatttgctcttgaggatgctactggactatctattaatggggatgttgatgtgcactctatattctttgcttccttacctacat

SEQ ID NO: 79229 - DNA, 249 bp, Glycine max
  Clone ID: PAT_MRT3847_4255C.1
tattcataacactatacactccttcacaatgattgagccatggttttattgaagctggacataaatctgatatcatcttcatcatcacattgctaaaatcatagattatagaaaatactatttcctgttaatataaataccataatgattctaatccaaataaaatttttgatgatttaacatgtaacttattaaacttaatgttcatttcccaattatatttctgataatatccttaacaacaaacac

SEQ ID NO: 79230 - DNA, 2055 bp, Glycine max
  Clone ID: PAT_MRT3847_42560C.1
atttcatgcgcacgccagctcggaattcggcccgagaaattctcctacaccgacaaaaaatggaactttcaccacaagaattcattttccgttccccactccccgatataaccaaactcgcgaaaattctcctcctacaccaacaaaaatggcaccttctccacaagaaatcatcttccgatccccactccccgatattcccatccccacacatctcccattgtactcttactgcttccaaaacttgtcaaagttccatgaccgtccatgcctcatcgacggcgacaccggcgagaccctcacctacgccgacgtcgacctcgctgctcgccgcatcgcctccggcctccacaaaatcggcatccgccagggtgacgtcatcatgctcgtcctacgcaactgcccgcagttcgccctcgccttcctcggcgccacccaccgtggcgccgtcgtcaccacagccaaccccttctacacgccggcggagcttgcgaagcaagcgacggccacgaaaaccaggctcgtcataacgcaatccgcgtacgttgagaaaatcaagagtttcgcggacagcagcagcgatgtcatggtgatgtgcattgatgatgatttttcttatgaaaacgacggcgttttgcatttctcaacgctcagtaacgccgacgaaacggaagcccctgccgttaagattaaccctgacgagctcgttgcgcttccgttttcttctggcacgtctgggctccccaagggcgttatgttatcgcataaaaacttggtcaccacgatagcgcagttagttgacggcgaaaacccgcaccaatacactcacagcgaggatgtgctactctgtgtgttgcctatgtttcatatctatgcgctcaattccattttgctctgcgggattcgttccggtgcggccgtgcttattttgcagaagtttgagatcactactctgttggagctcatcgagaagtacaaggtgacggttgcgtcgtttgtgccgcccatcgttttggcgttggttaagagcggagagactcatcgctacgacctgtcgtctattcgcgctgtggtcaccggcgcggcacccttaggaggggaacttcaagaagccgttaaggctaggctaccacacgctacttttggacagggatatgggatgacagaagcaggaccacttgccattagcatggcatttgcaaaagtaccctctaagattaaaccaggtgcatgcggaaccgttgtgagaaacgccgagatgaaaatcgtggatacagaaacgggtgattcacttccaagaaacaaacacggtgaaatttgcataagaggcacaaaggtcatgaaaggatatctaaatgacccagaggctacagagagaactgtagacaaagaaggatggttacacacaggagatattggtttcattgatgatgatgatgaactcttcattgttgatcggttaaaggaattgatcaaatacaaaggattccaagtggctcctgctgagcttgaagcattgttgattgcccacccaaacatttctgatgctgccgttgtaggcatgaaagatgaagctgcaggggaaattccagttgcatttgttgtaaggtcaaatggttctgagatcgccgaggatgaaatcaagaaatacatttcacaacaggtggttttttacaagagaataggtagagttttcttcacggactctattcctaaagcaccctcaggcaaaattctgcgaaaggtattaactgcaagacttaacgaaggtttggtggtggccaattaggtccataattgtgacagaggaaaatcgtggctgttttacttaccgtaccacaggcccttcctgttgtggtttttgttccaattttatatctcgttatcaatatatatatataatatgcaagtattgcatgaatttattcttgtgtaacttataatgttgtatatattggagaccagactctgaattacagcatgaacacattaaaattcagcaagttgttacgatctgtatactaaattagtactaaagtaaaaagaatttaattc

SEQ ID NO: 79231 - DNA, 562 bp, Glycine max
  Clone ID: PAT_MRT3847_42561C.1
tccgggaattcccggggtcgacccacgcgtccgcaaatcggcatgggcaacaacactcacatcttccgttatcattctacgccactccacgcgcgccatgctgcttcttcctccgctttcgttttcctttacttttacattctccccttccaatttccccgccaaatcttcttcgcgcctggccgtcatctccgttttttattccaccgccgagcacaaccaccccaactcctcctcctcctttaaaaacctggccgtccttctcgaaagtccagggggttcttagggacttcgacccgggtggaaaatcgcctcgccttcattaagcggttggaaaagctggaactcgatggcgccactgggacggaaccggctaattcggacctttaaaaaaaaagggcggaaaagagggaaagaagggggttccggaatttaaacggaatgggggggccttttcggtacccaacaaagaaccaggaccggttggaaaaagaggtttggcggaaaagggaaagggcttaaaagaagttgggaaggccaaaaagctacctttaccaaccgg

SEQ ID NO: 79232 - DNA, 333 bp, Glycine max
  Clone ID: PAT_MRT3847_42562C.1
gcgtccgccaggcctacgacagcttcatcaatggcgtacgtcaaggctcataaatcaaaatcctacggcaagatttatgaagtcatcatcactataagaagacaggtaaaaaccgattaccctgccaagattcggttgattaatcacgacaacaacacatataacactccgaaataccgatttgtggttcgctttaacaacaacgacattgatgcacaaataatatctgctagcattgccagcgatttagttcttgctacatcatattcacatgaactgccacgatattgtcttcaattaagacttacaaattatgcaacaacttattgcact

SEQ ID NO: 79233 - DNA, 542 bp, Glycine max
  Clone ID: PAT_MRT3847_42563C.1
actttgaaaagaacttattgaagtgcggttggtctcctgatggaagcaaggtaacagctggtagttctgatcgaatggtttacatctgggataccacttctcgccgcatcttgtataagcttcccggtcacaatggatctgttaacgagtgtgtttttcatcccaatgagcctattattggatcttgtagcagtgacaagcagatttatctaggggagatatgaagctcaacgtttaggaacttgccaaatgaaatgaccatgttggtgcttttgatgacaaccattagggagtggtaaactttagagatgctgaattccttcagttgttccctggtcgatcaattctgtataatgttcttgcaaaaatattatatcctaccctttgtttgtaatatgtgatttgacgttggtgagaatggcttcataatttcattgtgaacttcgagacattttgcttaggaaggtgtttcgaaatttttcccctgcagaattggattaaatttaaaaatgaaaaatgttagtgatacattcttgatgtac

SEQ ID NO: 79234 - DNA, 436 bp, Glycine max
  unsure (1)..(436): unsure at all n locations
  Clone ID: PAT_MRT3847_42564C.1
ctattattttctcttttttattttgtttgtgagcttagcaccacaccagacctcacctatggcaaatccaattctctcctttctcttgttggccctcctctgcatcctcgccttggctcacgccgattcccaattttctttttttttttggaaacccccaaanacgnaagaaccaaccccttcgaagaacttcttccctttccnaatcccccccctttttttttccgattcaaccggcccccttttttccgacccctttcttcccttttcccccccnaatccccaccccccccaacccttttttttttttaaaatttccccccaaattccccttttccctctcccccccctttttttttttttttttcaccccccccttctacaaattttctcaccnttctcctccctccttctctttcatccccccctccccccc

SEQ ID NO: 79235 - DNA, 1466 bp, Glycine max
  Clone ID: PAT_MRT3847_42565C.1
cgagcggccgcccttttttcggctcgagttccaaataaggatttatagtactttttaaatagttatttattattattattattattattattatttaggttgattcagtcagacacattcatgcagtcaatactcaatacttataaccgtataatgaagatctgatggctaatatcttaaacgtgtgcttctgatatgatccatcgtccatcgtccatcgtccatcgtcctccaacgggccaatggaatggtctactgttccatacaatgcccctgaagctccggggccaaatggaaagcagcggaaaacaagtttagaaacctaaatcatgggaggcgaaccgaacgagtgttttcaagctgcggcgtgtggtctttctctccgtgacacagcacaaacaaattctcagtgttggagacttgagctcatagagaaatcatagtttgtttaatttcaattctgagcaaaggtcaacatgcaagttttttccattgaaggcgaaagtgctttgtcagttgttggtccaaggccaatggaatggtctactgttccatacaatgcccctcaagctcctgggccaaatggaaagcagcggacctcaagtttggaatcaccgatcatgttgctgtcaggtcaccagagtgctatatataccatgaagttcaatccagcaggatcagtcattgcatctggatctcatgacagggaaattttcctctggaatgtgcatggggattgcaagaacttcatggttctgaaaggtcacaagaatgctgttttagatctccactggactactgatgggacacaaatagtctctgccagccccgacaaaacagtgagggcatgggatgtggaaacaggaaaacaaatcaaaaagatggtagaacatctctcttatgttaattcatgttgtccttctcgaaggggaccacctcttgttgttagtggctctgatgatggaactgctaaattatgggatgggcaccaacacaactttgaaaagaacttgttgaagtgtggttggtctcctgatggaagcaaggtaacagctggtagttctgatcgaatggtttacatctgggataccacttctcgccgcatcttgtataagcttcccggtcacaatggatctgttaatgagtgtgtttttcatcccaatgagcctattattggatcttgcagcagtgacaagcagatttatcttggggagatatgaagcacaacgtttaggaaaatgaaatgagcatgttggtgcttttgaccaccattagggagtggtaaactttagaaatgctgaattccttctgttgtttcctggtcgatcaattcagtgactatataatgttcttgcaaaaatattatataatgttggtgcttttgtgatttgacgttggcgagaatgcgaatggcttcatattctcaaaaaaaaaaaaaaaaaaaaaaaaactcgagactaattctc

SEQ ID NO: 79236 - DNA, 315 bp, Glycine max
  unsure (1)..(315): unsure at all n locations
  Clone ID: PAT_MRT3847_42566C.1
aattattattactacttgaatatctcagtctttcacattttcccatcatctgctaggtgaaagaaggaatcacttctaccttgtatggatcaagaaatcttattagttacttttttggtcctttattgtagaattaaattgatatattttttaggtgtaattataagaaatatagattcattttcaaatattaatggttattttttgtatattattaatttactatgaagtctattaataagatacctcactcattttatatatnnnnnnnnnnnnnnnnnnnnnnnnnnnnnnnnnnnnnnnnnnnnnnnnnnn

SEQ ID NO: 79237 - DNA, 403 bp, Glycine max
  Clone ID: PAT_MRT3847_42567C.1
gccacgcgtacttccacatgtaccgaagatgcagccatcactgatggtatcatgggtcctgcgattgtggggaactcgcagataattccaaccagtgatccgtcactcatactcgtgaccagcgccaaatgtgttatacacacccgcacaaacatgtttgggggatggccggactcctgttctgactggggctcctacagctcactaccttctgtaccgtggcacaacagctgatggacatcgctaacgatgattcgtcagaggttccaacccaagccgacaggtgaagctgctaagctcggaagttggcataaatcataccatgtctagtcgtacgacacagctacctaatcttgggcggcagcataatacgttaagaacctgatgcaattggacctctatc

SEQ ID NO: 79238 - DNA, 367 bp, Glycine max
  Clone ID: PAT_MRT3847_42568C.1
cggcaatcctggcctctacaagggctcgtgcttccagcgcgtgatcccgagtttgatgtgtcacggtggccacttcaccgccggaaacggaaccggcggcgagtcgatttatggcgccaagtccgtctactataactttctgaagaacctcaccggtcccggcatcctctccatggcgaacgccggtcccggaaccaacggatctcagttcttcatttgctctgagaagacacagtggctcgacggaaagcatggtgtgctccgacaggtcatcaaaggattgaacgtcggcaagtacatcgagacggtctgatccatctcctgctggacctccaagcacgttgtcattggcaactgcggtcaactt

SEQ ID NO: 79239 - DNA, 229 bp, Glycine max
  Clone ID: PAT_MRT3847_42569C.1
tccaccgttcaacgcctgttataccatctatttttactggattctactcactcggatttattctcttcagggaacactgatactatggataatcattaaaacataagtgaacttaatgtgggtggtaggagttgtttcctaacagcaaaacctggcaaaacttgtgcattatgttgtgtgtaaaattggtacaattaggcttaatattggacacttgtaggctttccaa

SEQ ID NO: 79240 - DNA, 185 bp, Glycine max
  Clone ID: PAT_MRT3847_4256C.1
gagagggagcgtgggtcaaaaaacccaaagccaatccatgctttatgtcacagccaggggatgtatggtcaacagctagtactggggttgatgggtatagatagagcattgtcattgttgatgtgtatactaagattgtattcacctgattgggagcttctctatacctgctggatcataaatgg

SEQ ID NO: 79241 - DNA, 292 bp, Glycine max
  Clone ID: PAT_MRT3847_42570C.1
tatgtctccgccgtccgattatttaacggtggcgcaactcgtaatcgtcgcttcaacgtaagggcgaccctgccatttccgcagcaaaacgcaaagcattacaaagagcttcaagccgctattgacgttgttcagagggcttgccgtctctgtcttaatgtcaaatcatccttgttctcaactgatggaaaggttcttgagaaaaatgaccagactcctgttactgtggcagattttggagttcaagcaccataagtttccgagttaaataagctgttcccttctatacctt

SEQ ID NO: 79242 - DNA, 390 bp, Glycine max
  unsure (1)..(390): unsure at all n locations
  Clone ID: PAT_MRT3847_42571C.1
ttaggccttagcagcagcaccggcaccgaagaaccaacgagaagcngaaacccgggaaaaacacacagccgaggaacgcgcaacgcanacagacggagcacgaaaagaggggacgcgacaaaaaagaaaccggaaggaagaacangagcagaaaacacaggaaggggcacacccaaaaaccaagcaagcagacaagacaaagggggagccggaggcaaagaaagcgaacaccgaacaggaacacgaaagacccgccgccgaaaacggggccccgccaaggacagggcacgaacgcgcaaacaagccaaccaaagcaagcgaagaaaaggcccacgccgaggccgaaaacgacgcacccaagggaaacacagaagcaggggaaaaggaaaa

SEQ ID NO: 79243 - DNA, 240 bp, Glycine max
  Clone ID: PAT_MRT3847_42572C.1
ggagttacaaccaataaagaagctgaaaggagaaagttctgaaccaagagataatatattataggcatgttccatacctgaagcctcgcctgggttcaccttctactgtcagcgaacgatctctagccagcaggaagacctggtaggctcccatagacacgatcctttacatgagtaatggcacctttacccaacaaaaaacatctggcttaaacctaaggttacgacccccccccaccc

SEQ ID NO: 79244 - DNA, 247 bp, Glycine max
  unsure (1)..(247): unsure at all n locations
  Clone ID: PAT_MRT3847_42573C.1
ccctgtaacgtcgcaacgcaaagcaaattgttgtccatttttgaaacagagaaacanannataaaaaaaaaaacttttcaaaagtaaaggcaaaaaatctgaaagctagggttgggaatgccaaaaaacaaggaaaaggaaggaaagaaccgaaaccccgtaagaaccaagccgaccaacaaaaaccggaacttgtattcaaggaagaacgacaggaatacccgcaagttcttcgaatgctcggaaa

SEQ ID NO: 79245 - DNA, 1332 bp, Glycine max
  unsure (1)..(1332): unsure at all n locations
  Clone ID: PAT_MRT3847_42574C.1
cgctcgtccgctaaagtgccctttatatctccccttttatatcctttatcttttgttttctttcccgtacattttccttccactcatttccctcatttctttgacgacttaaagatccacaaagcaccaagtatttcaatgatgaggacctgccactcacaaaggccatattaagctgcattgaagatgcatcttgttcatgctcaaaactatggagctgcatgtaatgcaattatcaactagtgtttcacttcttattcatcttggcattgcttcttccaggctgagggcactgtcttatgctgaacaagttgtgaagctgatggatagtttggtcatggcagggaaagccacagttgaaatgaataaggagctgaacaccagaaaatgggagcacccttgttgcacaaaactgttattttcacagatatgttactttgacacagcacagacctcattgatgcatggctttaagctcctcaaagatgatggtcatatatataatcaaattaatgcaccctctttgtcagggacaaggatcttgaaccatcaagtgacttgttgctgcttcctacaaaaatgtacttcagtgaggtcctgagttcttgtacactgctgaagagagttcccctttgatacttcaaaatttacactattttaagcaaatgctgttatggcataagtatgagatcctgagttattgtattactgaagagagttccccttggatacttcaaaatttcaccactattttgatcatttcctgttatagcgtataagatctgagttcttgtactgctgaagagagttccccttggcaacttcaaaaatttgacactattttaatcatttaatttactgattacagcttatgtctctttattgcattccatcaatgtaataatgccgatcgatgagttttagctttgcagaagaatgttataaattgaagtttatgtgcttgtaatgtgagagattattaagatgttgtgagaaagtttgatgaacgttgaaattcttgcttgtgttttagttatataatattatgagtcatgtaatttctgtattgttcacttcaaaaaaaaaataaaaaaaaaaaaaaaaaaaaaaaaaaaaaaaaaaaaaaaaaaaaaaaagattgtgaaaaaaaaaaaaaaatgtaaaaaaaaaaaaaaatatcaataaaaaaaaaaaaactcttttgaaatcttttcctgtataagggatgagatctgagttcttggactggctaagaaaagttcccttttgggcacttcaaaatttggacacttattntaatccatattaattgctgaataccagcttaaggtt

SEQ ID NO: 79246 - DNA, 1618 bp, Glycine max
  Clone ID: PAT_MRT3847_42575C.1
cctacgctttcgataaactcgagggcagttcaacaaactacatcctctttacttccatttcacgcttgcttcgcatctaagccaacaaaatcaaataccctttctacttcttattctgtacggctgcgagaagacgacagaaggggaggcccccctttttcttcttcttctctctcttcaacgctcgcttagtacagcggaataacgaagcctcctcgttcttcttcttccgccctttctctctctagaaccgtacggtcgtttctttctctctcctcaaccggagacagcgtcgccttcttttctgaatctcgcggtgttgttagttctgcggcggttgtagttccggcggcgatgggacagcaatcgttgatctacagcttcgtcgctcgcggcaccgtgatcctagcggagtacaccgagttcaccggaaacttcaccagcgtggcggcgcagtgcctccagaaactcccttcctccaacaacaagttcacttacaactgcgatggccacaccttcaactacctcgttgataacggattcacttactgtgtggttgccgttgagtctgctggacggcagattccaattgctttccttgaacgaatcaaggaggattttaccaagaaatatgctggaggaaaagcagcaacagcggctgctcagagcctcaacagagagtttggacctaagttgaaggagcagatgcagtactgtgttgatcacccagaggaaattagcaagcttgcaaaagtgaaggctcaggtttcagaagtcaaaggagttatgatggaaaatattgagaaggttcttgaccgtggggagaaaattgagcttttggtggataaaacagagaaccttcgctctcaggctcaagatttcaggcagcagggaaccaagattaggagaaagatgtggttccaaaacatgaagataaagctaatcgttctgggtatcataattgccttgattcttattattgttctttccgtttgtggtggcttcaactgtggtaaatgatgagtctttcccacgtcctggcttcaactgtggtatttgtctcctcacttgataagattgttgctagcagattgccattgcctcaactgtcgacgtagtgcttttgacttactttttgggatttacattcttccgtcttctccgatgatagatgttatatggcattgcttgtatagtgtgaattgtttagtctttatcatcttgtctcccatagcgtaatgctaatctgtcattctctatagtttaggtgggagtttcagcatatggtttgaggattatgttttttaagtatgcttacatattaagaaaccaaccattacgtagttgagctttttattacaatctctatagttaaggtgggagtttcagcatatggtttgaggattatgttttttaagtatgcttacatattaagaaaccaaccattacgtagttgagcttttttattaccaacttaccatattttttgttggacttgtgataatccgtgcgtttgtgtgtgaacgttttatccatcttcgaggccttgcttatgcgctaattctaaacgctagcggtttttgttttaacttgttaattattaaatcattcatttggt

SEQ ID NO: 79247 - DNA, 599 bp, Glycine max
  Clone ID: PAT_MRT3847_42576C.1
aggttttgggccggaattcccgctttctttctgctttgtccaataactcagaacatgcccacttggtggggtaaaaagtccagcaagagcaaggaccaacaaccgcaagaagaccaccaccacccccctcatggcggaggaggaggcgccgccaccagtgtccttaacttcaatttcaacaagctcaacaagcccaggcccgacaggccctccaagagcttcgacgacgtcgtcagaaactcccctcgctgcagccgcgatttcagttcctccgccgccgccgccgtcgaccaaggcctccccttgcctcgcccctctgtctcctccacgcaaagcttcggcatcgagcaaggccttgttttcggatctggctctgtttccggctccagcgtcagctccagcggctcctacgatgatcaccctacctgtcactctcagattaatgcctccagagggcaaggtgacacgaagttctatgcgaggtctaaaagccccggtcctgggtcaagagggcccaccagcccaacatcacctcttcatccgaagttgcatgttttgagtcttgactcccctacaggcaggcaagaaggtgaatgtca

SEQ ID NO: 79248 - DNA, 405 bp, Glycine max
  Clone ID: PAT_MRT3847_42577C.1
gttatcgcgtgtgcggacgcgtggtctccgacggctcctgcctccggcgctgggtcgacaccattcttcccgacgaggtgtacaacctcgtcgatcagttgtacgtagggcgctccttcgagatacccgactacaccgtcgatgtggtggccaccgtcgccgtccgcctccttgaggccgttcgttaccacatgggcgtctccggccgatcccacatccgttactaccaagccgattgctgcgagatgctcgggggcacccctccgtcggagtacgaaaccaccaattgttaaccacgttcgacatacgccgcctcctaatgcgccgaccactggtacaccgagaactaccgcgaggcttactccctgtttgactgcaacggcattctattcaaccacgagtccc

SEQ ID NO: 79249 - DNA, 578 bp, Glycine max
  Clone ID: PAT_MRT3847_42578C.1
gattccatcacaatagcaactagctagctagagtccctctgatctgataatacaaatttcttggagggatatggacaataacgaggaaataccctcaacacccgcaacaccaggcactcctggtgcacctctttttggtggcttcagtaatggtaggaacaataatagcaagaagtccctcctgaagagttgtaggtgcttcagtgtggaggagtggagcttagaagatggagggctaccggcagtgtcatgctcattgccactgccatcgcctccaccggtagtccctcttgcaagaaagattggagcggagttcatagggaccttcatcctcatgttcgcaggcactgccgctgccattgtcaaccaaaagacaaatggctctgagacccttattggatgtgctgccaccactggtctcgccgtcatgatcgtgatcctcgccaccggccacatctccggtgctcatctcaaccctgctgtcaccatttccttcgctgcattaaagcacttcccttggaagcatgtgcccatgtatattggtgcacaagttttggcatctatatgcgccggatttg

SEQ ID NO: 79250 - DNA, 102 bp, Glycine max
  Clone ID: PAT_MRT3847_42579C.1
gccagctggccttcgctggccccgttccggctttaccgtcgagcgtgaccccgtgtttgatagcaccgaggagattttgtgagcaatgtagtgctaatgatc

SEQ ID NO: 79251 - DNA, 401 bp, Glycine max
  Clone ID: PAT_MRT3847_4257C.1
ctttaagctttatgtctaatgttatgtgggtggctcctgacgacaaggccagtttatggtcacaacttcattatgtcacgagtaataatctgtagatgccagaaacttatcttgtcaatcctacaaatgtgttaccaaaatcgtattggcacaaaacagagtaagctcgccaattgcaaaggaaagctctctctcgcattgaatggctgagaaaagctgatgtgcactaccatagtacaaattgaagagttccattcgatgcagacgatgatgaatgctcctgaatcaaacgataatattgaactactgatgtgcattgatttgttggtattacaacgagctatgaatgctttttcagacaagatcgttttggcatgataagcttgtgttggctaacacac

SEQ ID NO: 79252 - DNA, 327 bp, Glycine max
  Clone ID: PAT_MRT3847_42580C.1
cttggctgtgtctatggatcgcgctttttttctgttgctgggtgtacccctcttgggggtctgctctgacctcttctcccttttcactcatcatccaccgccgtccccccaccaccaccaccaccaccactatcctcactccacgtaccaccaccaccacccaccgcaccaccattattcacccacccgaccaccaccataattatccgcctcaccatcatccccaaccactgacaatctattacccttccgagaaccccaccactactattctcatgggtgtccccgggaacacattacacatcaatccatgatctatctgctctt

SEQ ID NO: 79253 - DNA, 339 bp, Glycine max
  Clone ID: PAT_MRT3847_42581C.1
tccagctgtgagaacgaggtgcgagaggacaaccaaacggcgcattgctagatagtcaatatatgctaacggcaaccgtagataggcgcgaagaaccacgtgttggtgatcgagctgcgtcaccttgatagtcatcatgggacctagagtgttcgtgataactctgagccttccgagactctaacaaatctgctatctttacttcatgaacgccattggcatccgcactaccgtatatgctactgccagctgcaacatagactcgacagcactctccgctgtcaagcttaccatcgggagcaaggactaaggcttacaatacgacgacggactactcta

SEQ ID NO: 79254 - DNA, 400 bp, Glycine max
  Clone ID: PAT_MRT3847_42582C.1
cccatgccgcttcgacgctgccattgcgctcagtgagcgtggggtttgctatcaaattcaaaaaccttttgggatccataccagtaagaggagcatatgcggatggggattacattgataaaagctgccaccatatccccaccgtgggcgacactgctgctggtgcctatatagctcccaccggagctggttctagtcatcgccatccgctcagtgttgattactggaaatctgggctgtggaacagccacgcgacttcaatctggatgatagccgattccaaactgacgacatgtcaccattaccaccaacaagggagagaacattatcctgctggcgctcaacgctgacactcaatctaaccgcccgaaaagcctatcacaggatctctcatctacta

SEQ ID NO: 79255 - DNA, 484 bp, Glycine max
  unsure (1)..(484): unsure at all n locations
  Clone ID: PAT_MRT3847_42583C.1
cacgagggacaatacgggtgtatctgtggtctgtccaaaatatagnggttntagggggnggggcagnnttgatatttacattatccgatataaagattgggatttgatgaatactgcttgaacaccatcgatgactatgtcatttaatccaagcccgtgtccatattcaaggaacctgcaatttgtaaaaagtaccgtatttcattctgaaataagtagcgcccctgtacgaactgccacacttatgcacgatgtacaagttacagctgagaggaaaagttcctctcaggaatgtattcccaagacctgtagtgcattaaacccacgagatcattgtgtgtcaaagagggggaaggggatactgaacttcccccagagcacttcccgaaatgttagaagaatgactctttccaaccgcgtaacagcttgtgtcaacaacgctattcacgtgagtacgccaaaaagtggttcttaaatgtggaga

SEQ ID NO: 79256 - DNA, 340 bp, Glycine max
  unsure (1)..(340): unsure at all n locations
  Clone ID: PAT_MRT3847_42584C.1
cgtacgtaatgtctcgtgtaattcggcttcgaggctnntctttattcnncttttgtaatttnncattcattacttnnnatctttgtgttataatataatgttcatcagagaaaattttaagtggtgtgagtgtccnnntaatgtgannagtacacncgcagacctgggagattcagtnnccgtgtaccaatctaccgataatccatccgaatctttgttcatcgatgaacccaggaatnnggcacctaatcnnagtgtgattggtcataacccatatatctgtcgaaataccgatnatttaaaaccannacatccanntgttcctaaattaaaggggtaa

SEQ ID NO: 79257 - DNA, 369 bp, Glycine max
  Clone ID: PAT_MRT3847_42585C.1
agggcctaaatattcttatacaccaacaaaataaataatattatttaaaaaaacctacaactgaatcacccctatttcaaagagctaacaaaatcccaaaccaagcaaaaaaataaatctcccaatttcacgcacaaaataaacgattacccagacctaaaaaagaggcccctcccttggaattccaggttaagccactcaatccaaaaacccctttagcgcttgggcaaactgacctgccaaaaaaattgggccactgaaaccccaagaagggaccctacccggaaatttgcataaacgctacccactaaaaccttacccccctaaaaggcccaccctgaccgggtaacgctgaaccctacacttacc

SEQ ID NO: 79258 - DNA, 431 bp, Glycine max
  Clone ID: PAT_MRT3847_42586C.1
gtggggttttttttttctgaaaacatgtatgtattctttgagttgagcaaaaaagcaattagctgtccatttcaaggataggacagaggaaagctaaggcgtgagggatccgcacactgcgtgtttgggctcaacgaagctacaatgaacttctttttatggaggctggatagaaaacaagagcagcctgtgcaaccggtaggggaacgacgtacagggtgcatggaccatctgctaaggcctaccccaagccgtaggacaagaactcctcgagcttcattcagagacaatggctttgccttacagggaaccaataacacttccggccatgggactacatacgcccatcatagcgcccgctactaatggagacgcccaagtgacaggatttgaacccccctcactcctaagacaaaaattttagtgcaaaa

SEQ ID NO: 79259 - DNA, 358 bp, Glycine max
  unsure (1)..(358): unsure at all n locations
  Clone ID: PAT_MRT3847_42587C.1
gatttacaattcacaacaacacacaacaggttattgttacatatccccaaaccaaaccacttcacacanaacacatatccatnggngaattagtttcattgttgaacaatcaaggctactaaaaatcatacatgnacaaaggaaaaggttccgcatccggtattttaaaaccactcatccttatatactactcaaactaacgaatcatactgcaaataccaacataattaataactgctttaatcctctttggaatgaatagctgaatttcactctgacaaaaccattcagaatatctaactttcaacttatttataaacatctttttaatgcttattacaacattgcaaattctttc

SEQ ID NO: 79260 - DNA, 584 bp, Glycine max
  Clone ID: PAT_MRT3847_42588C.1
catgaatattctcttccttatcctccacatacttttgtatcgtatgttcagtttttttatcagtgtattggtgattgattgcaatttgcaaatatcatttctactctagccagtaattggtaagacatggcatgctgactcgagccgaatcggctcgagcaagggggagtctggagattctaatgctagtcagacacggtgatttggaagagttcatgcacttgtgtagctagtactagagaatggaagggtttgtagatattactgtgccatattttaaaatgggaaagataaaaatgaggcaatgcaatatatttttgagaaaagtctaaacaagggattgaactttattccattcttgaaggaaggaaaggtaattttcaagtattatgatgcttgatttcatttcatgcttacgtgttagaagcataattaggttggtaggtaatggatctgttcttactcttcttacttgcttaaacaactcaattgattttgtttataattcaaactaaatcttcatcccatcggctcagttcatttctggtgtgttataacttattcgacttattgtaagctttgta

SEQ ID NO: 79261 - DNA, 556 bp, Glycine max
  Clone ID: PAT_MRT3847_42589C.1
catgactatttccaccttattgacggggaccccatatttgtgaaaacctacgccagagccgcctttaatttgggcactaggattaaaaaaaatggttacaggacttaagtacaacaacaaactgggttcttttttgactgcccccgagagaaaggatttgatgacaccaacaaaaatgaataaaaggacgtaaaatgggggccctatttttttaaggtataataaccgaacgatacaaaggaaaacgaactgtttaactattggcgcatttcaaaaatctaaaggcaacactaaacaggggcagatagcttgcgggtacaccaaacttcaactgcaaaaaattagttggtatagactcaggtagaagaaacttaactagctgcctgtgtgcttggacttgcccttaggtcctcgcaaaacaaaggcaacaaacaaatccttaagagcgatcgtacctggagttataaagggccccataattgctccctccagatcagatgggaccaatgtctttcccccaatgatgctcaacccagcacgatatgcactattcccc

SEQ ID NO: 79262 - DNA, 523 bp, Glycine max
  Clone ID: PAT_MRT3847_4258C.1
ttccgttccaaggaaggtttcccgtcatcactgtatgacgtcctccttctttggggggggggggggggggggggggggccgacggtaatccagcaaccaggagaaggagctagaataacccgataactcgacgggcagagaagttactgaatgtagatgtacaagcaattacggaaaaatggagtaaacgagagcaaaacaatgccattaggggaaaaaaaaaaaaaataatgtgttgtattggtcgtaaagaaagcagtatgttaataccacaagaatagcaaaccagaataaacctgacaagtaaacccggataagtgctaacgtagcgtggttacataaagtagcaccagaccgacgtgggtttggtaagaatttgagtgagtcaaatacggggacaagtatgggtgcgcgtataaggcagccattacaggtcgtagaggtgcttggcgtaagttatagtgctgccaacgcgtgaacacagcttaacagacaattattcagttacatatgggaggggtgt

SEQ ID NO: 79263 - DNA, 577 bp, Glycine max
  Clone ID: PAT_MRT3847_42590C.1
gcaggtaccgtttccgggttccacggtcgacccacgcgtccgtacggctgcggaagacgacagaagggggaggaatcctgaaactttgcttgattaaatttttatggtggcacatggcagggtagttgtcggcttgagaatggataaaagcatatctgacaaggatcagggagctcttgtagaaggttttgatttttgtttgccagaggttttgattcatgggtggttcttctgagtttgagacagagttgtactttggacagatatataaaatactgatcttcactccttccttccaaggtcagttaagtcattcctgttaaatttaatgtggtgtatcattgttatgcattacatataaggattcatcacatcaatcaataattgattcttttattggattattgagctaacccagttggcatttctggttgaatattggtttactcattttgtgcaaataggaaatgcaagtgggtttatttaaattctacattatccttttctttaaggagaagattggattttttttacttctgatttagtgtttctggactggatctgattatatttaatt

SEQ ID NO: 79264 - DNA, 313 bp, Glycine max
  Clone ID: PAT_MRT3847_42591C.1
tctttttcgcttgggggactgcgggccagattgaaacttcttctggttctttttcagttctctgtttaatttcaagttcaagctggggaaatcatggattactgctcccactctcctatgtggtataggacttcgggaggagactattctactttctctcctttctttgactggctacatctgactgatccacattgccgtacaaagttgtcccatatgcctaacactggtgcaatgcagcaaatgcttgcttccctaatttgctctggagacaacaggttcactgcgacaacaatttctaattgcggagatg

SEQ ID NO: 79265 - DNA, 298 bp, Glycine max
  Clone ID: PAT_MRT3847_42592C.1
aatccatggggatatataattaattcaaatatgttaatatcccataataaattcgaaatgaatgtccatccaattctcctagtgcacaaaccatacatggaagatcactccccaaaacaacggggactaaaccgattcgtgttccatatgggatgacatctagatttatttgtcatccccagaattaatacgcgtggcacttagtagctggtttattgctatcatgaaccaatctttgcatgttgtcgaacatattgacgtaaaatggcgcctcctttctattattctacttcacctt

SEQ ID NO: 79266 - DNA, 325 bp, Glycine max
  Clone ID: PAT_MRT3847_42593C.1
ccttattacctcctacctcgaatccttgaaacatactttacacttacccaaaaccctaatctcttccatcttacatatcacctcacactttacaccctacaactaactcccaacttactaaaaactattttctccaaactccaaatgcttctcctacctcaacctcaaatccctaaccctaaccaaaacatactcatattcatcttaaccctcatccaccactaccactacactatcattatttactaatcccataccaatcctattccttctactattataatatcatatctcttcctcacttatacccacctacttcaacttt

SEQ ID NO: 79267 - DNA, 424 bp, Glycine max
  Clone ID: PAT_MRT3847_42594C.1
aatataacttgtgctttttgcatggtcttgtaaatggcttttttaacccaaaaaagcgttccatttatattatttttggaaaaaaaaaagtggagaaataaataggggggtcccattggggggttaagcaaataagaaccctggcatatcccaaccatggaggccacacagatggggccaatttttattgaaggcctcataaacaaaagggggtgttaacccaaacccgatgccaattaaagtactatggcgatcgggtcctcaatatgaataaatatgaacgcccgaagcacacataaaacacctgggtctgaaaaccctccctcaggctcgcgctttgaaaataaaaaacgcaaatccctatccggttccggggcgctcaaaaaagggttgggcccggtccaaacaggaggggtaggggttc

SEQ ID NO: 79268 - DNA, 1097 bp, Glycine max
  unsure (1)..(1097): unsure at all n locations
  Clone ID: PAT_MRT3847_42595C.1
gcacgaggaacagcggcccgagtacggctccgtgaggacgccagtggggcggaaatgtctagaacaaaatcccaatcttgtccgaaacccagttatgtgtggatatggagtgggtgctgccagtaaccagcctatggaaatcttgaactgtagccaaccaagcagactaaatatcccagtaaatcagtccctgcttcctggaaagaaaatgtttcaagcccaagttaaggaaaaaaactcagcaggatatactattgaaaccgttattgatggaaagcctcttcatggagttctgtttaaaaaccagcctaacactcttattccagttcctaatacttccagtaggaaaaggcctgtcagtgaaattttaagtcctgcttcaaatggtatacattcacaaaatgtaacggcttataaagtgctcgggcaggacagaatgcaagataaacgggaattacggggagagagttcagaatctcatgaatgccataaggatgctgatactattgttgtatcaagtaacccgacaactgttgctgagtcctttaaggtttctgtcaacccagaaccagaagctgtttcnnngaatcgaaatggtgatgaaaaaaatgacacaccaaaatccttaattgagagcttgaaaaacgatggatccaatgatgtgacaagttccaaaggtgaaattcaaattggtgttcaaataaatgtgccagtttccaactatgaaattccaactcaaatgagtgatgcaccaaactgtaatgctgatgtcctgaaacctgcagcagctgagattattgtgtgtctgccaaatgaaggtgtaacaggggattgcacaactccaaggacagaaggacacaatgaacaagcaaaattaacttgaattcaagcggttgtgcattcctcttctgaaggtgacaacagatgctcgtaaacagtttactacaaacaaaagtgctaactggtgggatatacgtatattgttacctagacaggcattgatcttaaatttgttgagaaaaaccattattaccttaggtgtaggggtagtattagaattttttgtctgaaagactgaaactaatgagtttttccga

SEQ ID NO: 79269 - DNA, 254 bp, Glycine max
  unsure (1)..(254): unsure at all n locations
  Clone ID: PAT_MRT3847_42596C.1
aacgccaaaggcagaanagncggncgggaaaaaagggngaggggagcagcgcccnccagcagcacccgnaganaaagacccnnnncccccccacngggaccaccggaagccngacgcgcgcgcacgcacaaacgcacacngaagncaaaaacaaccaaagagagaggcanggccgagcaaaccancaacaagancaagccaagaggcgnacaaagaggccncaaaggcgagaaaaanagcaagaaggagaggaa

SEQ ID NO: 79270 - DNA, 341 bp, Glycine max
  Clone ID: PAT_MRT3847_42597C.1
cggggcacaagtgagtttgttgatcgagataactagaaacagtgtgatgaacatgaaagtccgtgttttcatcgttgccatactttgggtaacatggcaatgctatgcgtcagatatgtaccctctcggaatgagcactggctatcagtgcccgtaccccggacgtgagatgcgcagtgtttgaggcatgctgttgaagcacacaacatctttggctttgagactattcgtgaagagtgcgttgaagcaacacaggaatacatctatggcgaacaagatcgatgacactcgactagacttatccaacaagctcacctttatgctacacacctcgaagtcca

SEQ ID NO: 79271 - DNA, 1830 bp, Glycine max
  Clone ID: PAT_MRT3847_42598C.1
ggctcgaggagagagagaaccaaaccaaaccaaaccaaaaccatggtgtgaaaaacttgacatggggggcatatagggagtagatggatcccaagggctcaaagcagcagcagccacaggaggtggtaccaaaattcctcagcctcccccaacaccactaccaacaactcaatcaatagaggacccatcatttcctttcccttattataattattattatgaatttttttttctttctttctttgggtgtgctgttgatggatcccaagggctcaaagcagcagccacagcaacacaggaggtggtaccaaacttcctcagcctcccccaacagcaacaagggaataccaacaacaacaacatgggagagaacaaacctgcagaggtgaaggatttccagatagtggtagctgagaacaaggaagagagcaagaaacagcagcaacagttggcaccaaagaggagttccaacaaggacaggcacaccaaggttgaaggcaggggaaggaggataaggatgcctgctctctgcgcagccagaatcttccagttgaccagggaattgggtcacaaatctgatggggaaaccatccagtggctcctccagcaggctgagccatccatcatagctgccactgggactggcacaataccagcatctgctcttgctgctgctggaaactcactctcaccacaagctgcttctctttcatcatccttacaccaacatcaacaaaagattgatgaattgggtgggtcaggggggagtagtagtagggccagctggcaaatggttggggggaatttggggagaccccatttgggtgtgggtgtggccacagcagcaggcctatggccccctcatgtcagtggatttggatttcaaacaccaccaacaacaacaacaccaacaacaacaacatcatcatctggtccatctaatgccaccttagccactgagagctccaattaccttcagaaaattgcattccctggctttgacttgcctacttctgccactaacatgatgggtcacatgagtcctgctaaggatgattctcaaggctcaggaggacagtagtagagttttattatggatttggatgaaaagaaacaggaaagaaagaagcatcattgtgcagatgctggctgaggtttctacaatggcttttgtattgtagtataattgggagactgtgaggaaaagaaaaaggtgatcagcatcatcagcagcaacaacaccatcagcaaactcctgctaaggatgattctcaaggctcaggaggacagtagtagagtgtttaattatggatttggatgaaagaaagaaaaagaaaaagaaagtagcatcattgtctagatgctggctgaggtttctagtttctacaatggcttttgtattgtataattgggagactgtgagggaaaaaaaaaataggtgtctcagagaattcaatagaaagctggatttggtttacccctttggtttaccccccccatattgtttcttctccccagtactcaagtctccatatacaggtggaattgcatggccagatggcttggctgctttggtctggccttaaaaaactattgtttaattcagaggtgtgttgattattttgttcttctctaggtcagggtggagtgctgatcggtttgttttgtgaatttgaagatatagtttcataatcatatttgttaaatttcatattggatatggtatttagtacttttatgtcatctgggaaattttaatctttgtgtggaacagcacttgcgagttacatctgtgaagccttcaactagtactttatcatctgtgattta

SEQ ID NO: 79272 - DNA, 318 bp, Glycine max
  Clone ID: PAT_MRT3847_42599C.1
tcttaaaaaaaacatttaattttatcaaaattatacttatatgtgggtgttatcttctaagtaaacacttaataaccataaacccttcaaccaacatattacattttattttatatatatgttacactgaaatgctatctttgtgaattcaaatacgtaacgctgacatctctcaactctcttttactgatgagcttgcataataattttataggatgtttgcatacttataaactttttatttgctaataataatattatcttgaaaaatcaatctcgctctacttatccttttaatatatttttgaaaaacatcat

SEQ ID NO: 79273 - DNA, 204 bp, Glycine max
  Clone ID: PAT_MRT3847_4259C.1
ggctcgagcactggcacgcatggggcatacatattgtctaggacggatctagatgtgggccctggggccatcaggctaatcgtgatgacgcaatgcattgcctatcattcggcctgtatggcaagctattgtcttgttcgggctattgtcttgttgcctggacttgccttgatctggagcgccgggttgaggtcgaccccaacc

SEQ ID NO: 79274 - DNA, 1620 bp, Glycine max
  unsure (1)..(1620): unsure at all n locations
  Clone ID: PAT_MRT3847_425C.1
gacgccgtttaaatttgaggtaaagctttgatacgattgtgctgttccaagtcccatagcagcgatgggaatcgatcttaaggctgggggtaagagcaaaaagaccaaaagaacagcaccaaaatccaatgacatctacctcaaattacttgtcaagctttatcggttccttgttcgaaggactggcagcaatttcaatgctgttatactcaagcgcttgttcatgagcaaggttaacaagcctccaatttctttgtcaacgttaattaagtatacaaaggggaaggaggataaaattgctgtaatagtggggactgtaactgatgatatcagagtatatgaagttccagcattgaaaattacagcactcaagtttactgagagagcacgtgcaagaatagaaaaggctggtggtgaatgcttgacatttgatgagcttgcccttagggctcctttgggacagaatacggtccttcttagaggccccaagaatgctcgggaagctgtgaaacactttggtcctgctcctggtgtgccacacagccataccaagccctatgtacgagcaaagggaagaaagttcgagagggctagaggaaggaggaacagcagaggatttagagtttaagaaatataatataactttgttctattttttttttacaattgttcacttctgaaattaaactgtttgctctaggcgtcggtgacagtttttatgatatttctgttctgataacatatcgtggctcccatgttttacattgacgtgtattacaaaaaactagcatttgattttttgattccaaaaaaaaaaaaaaaaaaaaaaaaaaaaaaaaaaaaaannaagggcggccgccctttttttttttttttttttggaataatggtgctttataacatgaaccacgctcaacatgcattcatattccgctactctgtctgctaccggcatctcatgagtttaattaactacactgtacggaccatttgccattgaagtctgttagattacagaggacatgaaaatataccttctgagaagaaactctaaacaaaatgcagttgccaattaacatattaattagtagtaaacagaaaacatatatggtacttggtgtgattaaaaattggtttcatggaattttttgggttccctttttccttgaaaagatggctccaatgaaaggaatgagcgacttcttgttcttcttcctgagagaagggtgcctttccaacttttcaaccccgtgttgcgggttcgcgaacgtcacgtacctttttttttggaactccatcttatcctcgtcgaatctcgaacttttcactccaaacgtcgttaagttatccacaaactttacatcttcgatttcagattcctctgggtgcttctgtgtttcccgttgcttcaattgtcggagctcttgcttcgtacgttctagctcttcctgcagagaagacagacaatgcgccattaccatgctttcttcctttgccctctgcaggttttcccgcgtctcatctaactcggcttcaacgctttcaattctcgaaaattcaacgccgttttcatttgctccactctgtatctttttgagcttgttagcacttgcataaact

SEQ ID NO: 79275 - DNA, 347 bp, Glycine max
  Clone ID: PAT_MRT3847_42600C.1
cggtgtttttgggggggtgattaaggcatagcggctggtggtgcaagggttcatatactacatcactttgtaagcacaagacggtgaaacacaaaaatgtgtatgaaacgaaagtgtgggtgacatcatggttaaactccaaggaggtcctcgaattcaagcccatcagtattaatcctatttcggtgacggtctagtctttataaggttacataaataaatggcaccacgctgacagttgtactaaaatttattttttataaataaatcgaacgtagcattaaatatgctatatgtatgtattgtgcggaataaatgcagccacgtactatatataatggcacata

SEQ ID NO: 79276 - DNA, 383 bp, Glycine max
  unsure (1)..(383): unsure at all n locations
  Clone ID: PAT_MRT3847_42601C.1
ccgctccgccgcnnacttnnctcgnaatccnncncgancncangcccatcnactccnnctctatccnacancctncctacccttnccagntcnnanngccntgtcctgccccccctcnctntcccccctnccaccacncccttccncnntctcctcccnccancccnnctncnccttctcngccgnccctcantccnncctgcctcccnctcctgntccnctanctnnttnccgttctncccntgtanncntcngctngcgtncnnncattngttntgcactnngctccncagtcntctngcngccntctcntgcctntagtcnttggtcgccgctntnnnaccgntnnnncctngtntntgtntganctnctcttanngnnn

SEQ ID NO: 79277 - DNA, 515 bp, Glycine max
  Clone ID: PAT_MRT3847_42602C.1
ccacgcgtccggcaagggtcctcacactcagtcactcgcactcttttccctttcttcttcttcccctctctctctcaccaacattttcatataacacgccgtcgttgaagatagggctttagtcgctcgccacctttttcggcctatctttttccctttcatcgtctttttccgattcatcaatggcggttcccgcgacggtcgccgccgttccggcatcgatttacgtcggagacctccacccagacgtccaggaacaccacctcttcgcggctttcgtggagttcgggagcatcgcttccgttcgcgtctgcagagaccgcgtgacgatgaactcgctctgttacggttacgtcaacttcaggtctcagcaagatgcaattcgtgcaatcaagttgagaaacaattcttatctaaatggaaaagtgataagggtcatgtgggtacatcgggatcctaatgcgaggaaaagtggcagaaggaatgtgtttggtaagaacttagctgagtccata

SEQ ID NO: 79278 - DNA, 487 bp, Glycine max
  Clone ID: PAT_MRT3847_42603C.1
gattggaagcctcatgtatcttttggccacaagacctgatcttactttttctgtttgtctcattgcaagatacatggatagacccactgaacttcacttagctgcagcaaaaagagttttgaggtatttgaagggcactatggagtttggagtgtggtacaagaaacagaatggaagagtaaatttgcaagggtggactgactcggattatgcaggtgatttagatgacagaaaatccacttctggatatgttttcacctttggatctggaccaatctcttggtcatctaagaagcaggccattgtgaccttatccaccactgaggcagaatttgtagcagcagcatcgtgtgcttgtcaagctgtttggctcaaaagaatccttgatcaacttggcaaacctcaagacagtggagttgtgatctggtgtgataatagttcttcagtcaagttgtctaaaaacccagtcatgcatgggagatgcaag

SEQ ID NO: 79279 - DNA, 293 bp, Glycine max
  Clone ID: PAT_MRT3847_42604C.1
gaacatcatcatcaacaacaagcagatcaatctctctctctctctcaaccataatagtcataggcttgaaggaggattttgagcagtatgctgagaaagcaaagactttgccaccgactcaatcaaaccaagacttgcttatcctttatgggttggaccaaccgggcacccgtggacctggcaacaccaacccgcctggaatggtcaacattggggaccaaacttaattggatgcattggaaggttgtgaaaggaaaatccaaggccaaaccatgggtgaataccttatttaa

SEQ ID NO: 79280 - DNA, 760 bp, Glycine max
  Clone ID: PAT_MRT3847_42605C.1
agcagagcatagtagcatcttcattcatctctacagcacaaaaaagaaagaaatccaacccgtgaagaaagcaaagcaaataataataataataaaaaaacgtttacccccttttgtctgcgcgtgcgtgtggatctggcaagaaaacaaggaagggagggttcattgcggatctgaattcgcagtgttagggctttgaagggtttttccattttcttcaatggccacgccctttcccattcccgtcaccgcagctcaggttggaacgtacttcgtaggacagtactatcaggtgcttcagagccaacccgagttcgtgcaccagttttactccgatgctagcaccatgctccgtatcgacggcaacgccagagaaactgcagcggcaatgcttcaaatccatgcactgattatgtcactcagttacgctagaattgaaatcaagactgcacagtctctagaatcttggagtggtggtgttcttgtgatggtttctggatctgtgcaagttaaggactacagccggaggaggaaatttatgcagacattcttccttgctccccaagagaaaggcttttttgtgctcaatgatatttttcactttgttgaagaggatccagttcaccaacaacaaccagtcttgttacctcagagcaatcttgattcaaaattgaatgcttcaagtgcaaccaataaacctgtgtccaactacctgctgggtggagatatccaagctagggactacgttgctacaaatgag

SEQ ID NO: 79281 - DNA, 289 bp, Glycine max
  unsure (1)..(289): unsure at all n locations
  Clone ID: PAT_MRT3847_42606C.1
gatcagataaatggttaaattaagtctagaataaggaatgtctatcttgaatgcgctaataaaaaatttacagtaagagaagttgatgcttcttatatgctcgaccaactatcgcttaagagctcttggggagagtgacgagggtgatgtaggcgtcggcaacaccctggcagacaaagtccttagggccgttaccgccagcgcggcagttgttgggatgagtggcggtagcgacatangtgatgtcgtcgctaaccttctgctttaggagcagaccgctgcggtccgc

SEQ ID NO: 79282 - DNA, 389 bp, Glycine max
  Clone ID: PAT_MRT3847_42607C.1
attaaatccaataaaaattctaaaagaaaagaaaaaaggaaaaacagccggcgacaaggcattgggggtctccactctgcagcttccactggctaaagtctaaagtcttccaaatcccaaaaccctagggaagatgatggcgtcttccaattcacgaaaatcagaaacttccccttctcccgccccgcaattcaccaccaccaacttcatccccatccccgccgccgcagcccctaaaaccgtcgatgacgtgtggcaggagatcgtgaccggcgaccgccgcgagtgcaaggaggaggccctcgacgacgacgacgacgacgacaacgagatgatgactctcgaggacttcctcgccaaggccgacgccgtggacgacgctgaccatg

SEQ ID NO: 79283 - DNA, 689 bp, Glycine max
  Clone ID: PAT_MRT3847_42608C.1
gaccgatttccttctttcattacttgattttgtccctgaaaagaggccaactgctgctcaatgcctgcagcatccttggttcagtgcaggtccccagactcttgagccctcattgactgctgtgaagcatgatgctattgaaggggaaatatctgaaaaaatgcagagggaaaaagctgagcaggaggctgtggaagttggcatggggaatatggccatagatggaaatccaaagccactcaaagagttccaatctatgaagccatcagaatagaagcatagtggcttatttgggttggggtataccacctgtttttgtttatatggcaatcatggatggtccttggagcgtgatattatatttaactgttatattaagcatagcatgcagcttaggtcatacatgaggttgtcatttgggaagccttttgtaaggaagctaattcacctattacagataatgtttaaaagatagcttccttcacattcagtagaaagcacactgttatataagcacgtttgttttcctctttttggagaatttgtttgaggcttccccctaggttagattttcatcttttcagaactgctatatttgaggggttcgaactgtacatttgaatgagttattttttcttatgtatcaatatcagattttgttgctgtaaaaaaaaaaaaaaaaaccccac

SEQ ID NO: 79284 - DNA, 496 bp, Glycine max
  Clone ID: PAT_MRT3847_42609C.1
cgccgagtaagcctggggggacgcgtgggcaaatatggacgcctatttgacaacagagagaccaccacacaattgggatcctagcaagcacagctttagtcaatgctctattgaccttctcggtggaggaagggtagtggacaagactggagatcggatcacacttatacaaaattctccaattagtaactcgttgagagttgctgctagaaagaaaggctgattaatggacaagattgtgatgtctgggaatgcaggagtcaaaaggagagattgggcctaattggaacaagtgttgttaacaaacagcaacagtgcagagcattttgatgcatgtaagtggacaaaatcggaaccacatttctgggaattgatcttgccaatagaggtgtgtggatctaacaaaggtcttgaaatgtggagttctgagtgggcaaattaaacttcatggcgcttgagttgccttattgacaatcccatgcagtctacaggtttt

SEQ ID NO: 79285 - DNA, 1105 bp, Glycine max
  Clone ID: PAT_MRT3847_4260C.1
gggaagttctagcaggtatgctatgcagaaaatatctgctgagcagaagaaaggagaggatgatgctgatatgcatcttgctcgcaagatcatgcatggcaagcgcttgagggcttctgcgctggctgtggatgcttaggtctgtgaggatggcccctgcagttactgtagcaggtggcacggtggcggtggtcgctcctgtcgccggaggcagacaaggcgattcctgacgcaccgagtccgctgccgatggtgtttggaagtgcctacccggccgatgctgctgcttgtgtcggtcccgaccttctcctatcttctgcccccgttggggatggaggagcaagttggagacttaagccctttacccgttcagcatgaatcagctccaaggactgtcgacgataatgcctggacagagattcgaaacttcaagaagtgcctaattatgatgtttgcgaagcaagagaaggaggtggtgctgcttgagactgtgatgggattggcacagcaacgaaggcattgtatggttgagtgcattcccttaccccaaagatattgccaaagaggctcctttgtactttaaaaaggctattgatgaagctgaagatgagtggagccagcacaatgcaaagaaacttattgatacaagtcaaaagggattgcgcaattcaattcctaagcactttccatattttcacgttgaatttggtctaaacaagggttttgtccatgttattgatgatgaaaagcagtttaacatcagccttggcttgaatgtcataagaggcatgctacatttggcagaggaggacatgtataggcgacgacgctacgaggctgtggaggtacaaaagcaagcagttgaaagcttttccaaagagtggaaacattttgactggacaaaacagcttcatgaaacttcgtaacaaacattttacagataagttaatgtacattaatattgctcatgtgccacggtacactgtaactttactgatagaaatgaattttgtactgaacacccccctttagaagaaaaaagtgaaataatgctcattcgttgttcatttaaccgtaaaagaatctatcatatactatgcaccac

SEQ ID NO: 79286 - DNA, 188 bp, Glycine max
  Clone ID: PAT_MRT3847_42610C.1
tccaaggaagcgtttcccgatcgatcacgtgtatgatcgtccgtcctgtctgttggggggcggggcgggtgggggaggcgggtggcggggcgggggtgggaggggtggcggggtgggccgcgggggagaactttctcccagaacgggtgaggggaaacctcatggcggcccatatttatctaatctgg

SEQ ID NO: 79287 - DNA, 233 bp, Glycine max
  Clone ID: PAT_MRT3847_42611C.1
aagacgacagaaggggtgccccacatgcatttgtcaacgttctgactaaaataatacttaaattaaattgggcatgtattcttatttaggagtggaggaaccatttttatttgaccctgcttaactactacaaaatcttaatcatgcctgataacatttatcatgagggacatgagttgacattttgtgtactctacatattatttggaaccgttaattaggagccagactaa

SEQ ID NO: 79288 - DNA, 314 bp, Glycine max
  Clone ID: PAT_MRT3847_42612C.1
tagtactacaggattaagctcttttagtttgatgtgtgatagcactaagttgataaaacatctcataaaagccaggatcgtagattactggtaagaagctaaggagtcaattttaagcgaacgacagtacatgtcacataatcgttgagattagagtttgctctgttctctgctgtatgcataccatatccataatgttacggactgtcaatgtggatcgtgcattcattatgcacgctgaaacaagatgcgattaattctgtgaaaataagtatcatctctctggagtgtaaaggagtacattgttatagggc

SEQ ID NO: 79289 - DNA, 422 bp, Glycine max
  unsure (1)..(422): unsure at all n locations
  Clone ID: PAT_MRT3847_42613C.1
cagcttaatttcttcctttattatcaagtcacttctcaatgcctctccaccactctccttccccttccatggcgccaagcctaaccgccaagcaagaagcggcgcttctcaacgctaatccacacttataactaccactccacccccccacgatctttccaccaaccccgccggtcctttcgtcagtctctccgcacacgaggcacgcagccggcacgtgatctccccgggcaaactctggggtatcagattcacgagcattttccgcttcaagctctggtggagctctggctgagcacccactggtccggcagcaacggagaaggaaacgcgaatgatgatccaatgatgatccgccaaaacgacgccgtcgtaggccgaccctacgtnctcctcctcccactcctcgaaggaacctttcg

SEQ ID NO: 79290 - DNA, 122 bp, Glycine max
  Clone ID: PAT_MRT3847_42614C.1
ggaagagtgaacatgacaatgacaatggggtccgggggaatactgaacacaacgcccactgcacagcttcaaaactaaatcgccatcgccatcaagactttccgtgcccaaatgatgagaaa

SEQ ID NO: 79291 - DNA, 230 bp, Glycine max
  Clone ID: PAT_MRT3847_42615C.1
aacacattcatctggcgggacaacctgttaaacacgtgccactactttgcgtgttaacccataggatagcacactgtattagtatttggggtcctatctcttgagccaacctaggttaatcaagccagtcaaaatcttccctcttatctggacgaggttccttttaaagccttcctcactctcactaaactgcggaagcgccgttatatcctgtggtatgaggaaaattt

SEQ ID NO: 79292 - DNA, 201 bp, Glycine max
  Clone ID: PAT_MRT3847_42616C.1
acggctgcgagaagacgacagaagggggagatagagagggtttgttttgttcttattggtggtgtgattgataagaagagagcgtcaaggttaacaagagagaggaatggttttaccgacatcaaggattgtgtttcgaattgtggtggtggtgctttagcttattcttttcttctacatagttcgaccctctgtattgga

SEQ ID NO: 79293 - DNA, 409 bp, Glycine max
  Clone ID: PAT_MRT3847_42617C.1
ccagtctttaggtgcctttgatattcttttctagttaaattaaagttttattttaataatcaacataataaaagttcattatcaaagtaaaactctagtttgcattcaagacaaacatacgttatcaaagttttgcattccgtttctacttagatgcatcatgtttgcaccaagttatgagaaattctctttcacgtattttaatactttttccattgaaatttgttttctatttctgaataaggagaggaactaactccgtataacttctttgccttttataatgtttccttcctcattttaattttaataaaatttcctcgtttctcttgtaggcttccattcattctatgcaccaaaatcatggtaacaaaattaaataaaaccaaagatcaatttatagatatga

SEQ ID NO: 79294 - DNA, 119 bp, Glycine max
  unsure (1)..(119): unsure at all n locations
  Clone ID: PAT_MRT3847_42618C.1
gtttgtactagttgtnctagttgcactactatagtgcttgatcctagaatgttattataacntataaataggtgtatcaggtgaatttttaaaacaacacatcagacaagtgttcaaat

SEQ ID NO: 79295 - DNA, 675 bp, Glycine max
  unsure (1)..(675): unsure at all n locations
  Clone ID: PAT_MRT3847_42619C.1
gcatttaataatctcaataataatcacattataaaaataataaaaattaaaatttttgaaattacccctaacaactatttgtgcactcctaaaaccataaattgcaccatataacattactatgatttttaacaagagaaaaaaataagaataggctaaaagaaaagaataaaaatttactagttaaactataataagaattgatcttcaaaagataacaaaatactatgccttaacaatacaaactcacaaaaaaagtatctttcatccatccaggaactttatctctgaaagaagctgatatactgctccaatgcaaccactaaactcatgttccccacctttagactcatgttgaatgttaaatcttcacccttaaacaaaacatgagttatgaattttaaaaatgcaaagttaacgagtgcaaagaaaataccggtgtaatcttatccggctgtttctttttccgtcaatcctcaaatttgaatttaaaagcataagtataatcaatgatttcaagaactgtaagttatattccaaagaacataaaacaagtgcgacaaactaaaattgaaccacatgccaagtttctagtcaagtgctatttggaacaaaaaagtatttgcaattgtcatgatatacctttaaaatggggccactatatanntatatgtt

SEQ ID NO: 79296 - DNA, 465 bp, Glycine max
  Clone ID: PAT_MRT3847_4261C.1
accacgcgtacgatttttctcctaacaacagcttcattcaccaccaccacccaaactactacttcaacagtgggaaaagaccaagttccacgcataatgtgcaatgagtgcgagcttccacctccacccccacaaccaaaagagtgttcaccgccaccgtcacctacggttattattaaatgtgcgacggcgccaaaaccactaccaccaccaccacccgtggttattgaatgtccaccaccggcaaaaccaccgcgtggaggaggtgctgactgcttgctccccactttgccggagacaccagaagaaccgcaatacctacaaccgccgtcgcatctttcgtcggcgccgggaacgatagatcttgacgatattatcagcggggctaacatgattaatccactgctacgctacttcacattgaactacttcacttttctccctcctctttggcttccctattac

SEQ ID NO: 79297 - DNA, 301 bp, Glycine max
  Clone ID: PAT_MRT3847_42620C.1
attacgaacaactgaggtgtcttccattatacaacaacagtgtgctccatcttttacttgtacttttgcaatccccaaataggtggcacaagaaacaagctaattattcggcggtcccccaagatacaaacggtatttacatatgcatacaggatcccagagcgacgtacattggcatatgtccacatgctatagaatacattgtgtatatgatgccccccacgcactatgacatactcttcatatcagcatgcccgggggcttgctcgaatatggtacatgcaaggatatctgggaacat

SEQ ID NO: 79298 - DNA, 514 bp, Glycine max
  Clone ID: PAT_MRT3847_42621C.1
gttttttttttttttttttagacgttgtattaaaaaaatatctatattaataatattaaccattgaaattattacattttaaattttacaaatattatcaatcagcatttttccctccttcaaaattttgcacgactcaccgtatattgactgtattcactagaggagttgaggagtttaagaaggtgagacttcaggactaaactctaacaaaaatcttaccaagtcccaaaaaaaaaccatcaggggttgttatggtacatgagtatgagtacccaaaagagatggatacctaagtgcaccatcatggttagccattcaatcccacactatacccgcaagctgcggttacttgaaggtggcatcaacttggaaactacctctgcctagtgtgtgtcttatggactcaaaaccttggaacggtgtctatgcaactttgtgctcttgttagcagcaagagttgctcttctgcttggactttagcagtgcaacaagtcgatgacaacgaagaatt

SEQ ID NO: 79299 - DNA, 395 bp, Glycine max
  Clone ID: PAT_MRT3847_42622C.1
accaccacctatgaccttttttattttataaaaccaacttaaaccccaactaattttccaaaatgggattaaagaatgcaaaacaatggtagaagaagcctataaaacccaattggggctttttatatcctttaaaggttccttttaaaccattttgaaattttccggaacttggtcaccagctgagcattttttggaatttaaaaggattcttcagcatttgataacattaccattttattatggttcaaaccttccacactccgatgggaggcattcttcaatcttgattgaattaattcaggaaaaaagggggcaggaaacctgtttggaaactttaacctttcaactacttgggtcaagggttggatatcaaacctcctgtgggctaattt

SEQ ID NO: 79300 - DNA, 434 bp, Glycine max
  Clone ID: PAT_MRT3847_42623C.1
gccatgcgaccggtactatgacggtttgcagaagggtctgggggagtgttaggcgctgtggtgcacgctgatgggcatcctgaccagcctccagaggaaccgatggaggccaacatgggatccgataggcgacacgtggggaggcatgaccatggacatgacggtggaggcaatagaggagcgctcagagggcattctcggttacgctctcaaggaggctttctaggagtttgtcttggtctcgggctataacttcgggataaaccttgtcctcattggctacaacaaggactatcccaaggatgttatgatccaggatacgcttattgaccaggactctaaagagggctccaaagctgtgcacaatgctttgaacaatgaggtgcacctcagggcgaacagagtggcgcctggattgatacctgagatgtatg

SEQ ID NO: 79301 - DNA, 1287 bp, Glycine max
  Clone ID: PAT_MRT3847_42624C.1
cgtgagtcgtgtcgggacagacgacttgttcaccgatcagagctgattttcgcggctgttaccggtcaccggagattctatccgaaatcgttttccgatgacgataaaaactgttaaagtcagtaacgtttccttgggagcaactgagcaagacattaaggagttcttttcattttctgctgcacggcacgacttgttcaccgaccagagctgattttcgcggcggttaccactcatcggagattctatccaaaatcgttttccgatgacgataaaaactgttaaagtcagtaacgtttccttgggagcaactgaacaagacattaaggagttcttttcattttctggtgatattgaatatgttgaactacagagccatgatgaacgatctcaaattgcttttattaccttcaaggattcacagggagctgagactgcagtactgctttcgggagcaacaatagtcgatatgccagttacaatatctctggatccagattaccagcttccacctgctgccttagcatcacctgtaagagaaactcgaactcctggtggcggtgctgactctgctttccggaaggcagaggatgtggtctccggcatgctagccaagggctttatcttagggaaagatgctgtcaacaaagcaaagacctttgacgagaagcaccagttatcctccacagcctcagcaaaagttgcgtctttcgatcagaaaattgggcttagcgagaaaataagtgctggtgctacagtagtgggtgatagagttcgagaagtggaccaaaagtttcaggtttcagagaagaccaaatcagcatttgcagctgcagaacagacagtgagtaatgctggttctgccataatgaagaatcgctatgtgcttaccggggcatcctgggtaacaggtgcttttagtaaggtttctaaggcggctggtgaagtaggacagaagacgaaagagaaagtggagagtgcagaagaacgacagaaacgaaaagtggaagatcaatatgcacaagtcctttctgagtccccaaaagcagcagaagcaagtgagcagaaatcttccaagcctgctcctgcccagggtttgatcctttgatttgcttcttgtattgataaatatacttcctcgtaccgacctttatttttatccagatcgaaagtgaatgtaggactgatttactgttggacgtgcttgcaattatttattttgcttctataatacccctattacataggcggccgccgaaataaaaaaaaggaagtttattatatata

SEQ ID NO: 79302 - DNA, 567 bp, Glycine max
  unsure (1)..(567): unsure at all n locations
  Clone ID: PAT_MRT3847_42625C.1
ggctcgaggctgtcaacaaagcaaagacctttgatgagaagcaccagttatcgtcgacagcctcagcaaaagttgcatctttcgatcagaaaattgggcttatcgagaaaataagtgctggtccacttctcgaactctatcactcactactgtagcaccagcacttgctgctgcagaacagacagtgagtaatgctggctctgccctaatgaagaatcgctatgtgcttactggggcatcctgggtaactggcgcttttagtaaggattctaaggcggctggggaagtaggacagaagacgaaagagaaagtggagggtgcagaagaacatccggaacgaaaaggggaagatcaatttgcacaagttctttctgagtccccaaaagcagcagaagcaagtgagcagaaatctttcaagcctgctcctgcccagggtttgatcctttgatttgcttcttgtattgataaatatacttcctcctgtaccgacctttattttatccagatcgaaagtgaatgtaggactgatttactgtcgaannanacaaacataatcataccataaaa

SEQ ID NO: 79303 - DNA, 1517 bp, Glycine max
  Clone ID: PAT_MRT3847_42626C.1
actaaccacaaaaatgtagaggacttgaggataaaaacaaaggtgggcacagtaatcatcttgaaaaactttgggagtttaagaggaagtatatatctatcaatacaacaagccaaccaaaggatcaaaccctgagcaggagcaggcttggaagattactgctcacttgcttctgctgctttcggggactcataaaggacttgtgcatattgatcttccacttttcgtttctgatgttcttctgcaccctctactttctcttttgtcttctgtcctacttccccagccgccttagaaaccttactaaaagcgccagttacccaggatgccccagtaagcacatagcgattcttcattagggcagagccagcattactcactgtctgttctgcagcagcaagtgctggtgctacagtagtgagtgatagagttcgagaagtggaccagcacttattttctcgagccgattcggctcgaggctccctgtgaatccttgaaggcaatataagcaatttgagatcgttcatcatggctccgtagttcaacatattcaatatcaccagaaaatgaaaagaactccttaatgtcttgctcagttgcaataactcaggatccagattaccagcttccacctgctgcgttagcgtcatctgtaagagaaactcaaactcctggcggtgctgactctgctttacggaaggcagaggatgtggtctccggcatgctagccaagggctttatcttaggaaaagatgctgtcaacacagcatagacctttgatgagaagcaccagttatcgtcgacagcctcagcaaaagttgcatctttcgatcagaaaattgggcttagcgagaaaataagtgctggagctacagtagtgagtgatagagttcgagaagtggaccaaaagttccaggtttcagaaaagaccatatcagcatttgctgctgcagaacagacagtgagtaatgctggctctgccctaatgaagaatcgctatgtgcttactggggcatcctgggtaactggcgcttttagtaaggtttctaaggcggctggggaagtaggacagaagacaaaagagaaagtagagggtgcagaagaacatcagaaacgaaaagtggaagatcaatatgcacaagtcctttttgagtccccaaaagcagcagaagcaagtgagcagaaatcttccaagcctgctcctgcccagggtttgatcctttgatttgcttcttgtattgatatatatatacttcctcttaaactcccaaagtttttcaagatgattactgtaccgacctttgtttttatcctcaagtcctctacatttttgtggttagtatattgagttttgacattttagtttattgcatttacaaccattgacaaatgttttttaaattgcttttacaatttacacgtttttttttcccgatcgaaagtgaatgtaggactgatttactgtcgaaaaaaaaaaaaaaaaaaaaaaaaaaaaaaaaaaaaaaaaaaaagaaaaa

SEQ ID NO: 79304 - DNA, 254 bp, Glycine max
  unsure (1)..(254): unsure at all n locations
  Clone ID: PAT_MRT3847_42627C.1
gttctgttaggaaaggtttatatttataattttttttttcttttcggatggatgactcttggttgttaggttatataaggagatatgtgaagcctccttaattttggatgtttagaagaagggatcactaatcctgcttgtaagttgtaattacgtgttttcaactatttaaatgcctacttatgatcattttagttcnnaaaaaaaaaaaaaaaaaaaaaaaaaaaaaaaaaaaaaaaaaaaaaaaaaaaaaa

SEQ ID NO: 79305 - DNA, 2136 bp, Glycine max
  Clone ID: PAT_MRT3847_42628C.1
ggaaaaaagcatcaccgtcttagccattgctgctccctcgtcttctccatttttcaacgctttttcccagaggtactccttgaagatctccttcaattttcttttcgggtttatttcaataaattaagattaatatttgtgtaaaagatttgtgatttcaattttgaaattgaagccatattataggataggattttcattattactggtgttattagttagagtatggtttatttttatttttttggtgggtgtgtgaagaactgaggattatgttatcttgttcataaattaggattttttttctaaggaaaagaagggtatggagggtttgatattgttgtggggattgatatgaatgatgactgtgtttataaggttgttgttttgtccaattgtttttgggatggcaacattgaaccgaccagaagcaaaactcatcaagctgatgaggtagttcaatccaatgggtggttcacttctcacgtgttgtttgtcgatggagaatcatcatccatccacactcttgtccatggattcaagtgctccttctcaccaggatctggatctgcatatgaatggcaaagtcacactctcatgtccacctgatatcaatttgcccctctccgcggagcgcagtccgcctccacagccatggaatcaagacccttctgataccgtgttggatgttggtcttggtggtactcaaggacttgacacccagagtttcgtccaactcccaaaagttggaaggaaatgcgccaagcgtcttgatagcatttggggtgcttggtttttcttcagattctactttaagccagcgttggttgagaagtctaaggccaaggttgttagggacagcaatggtgttttggggtttgataaatccgatatcaagcttgatgttttcttggttcaacatgacatggaaaacatgtacatgtgggttttcaaggagaagccggacaatgctttgggtaagatgcaactgaggagttacatgaatgggcattcccgccaaggggagcgcccatttccgtttagtgccctccggggttttgttcgatcccaccggatgcaacggaagcattacaggggactttcaaatcctcaatgtgtgcatggcatcgaggttgttccatcgcccaatcttatgagtcttgataaggatgagcggagaaagtggattgaactcactggacgagatttgaacttcacaatcccacctgaagcaagtgacttcagttcatggaggaatcttcccaacagagaatttgagctcgagagaccacttcccctgatcaagagcactctgaatccacacccaaagaagctgcttaatggatctgtgttgaatttatccacttatctgtctagcctcagtaatggtaacgggactgtcctgtcttctgttagcagcaagaaaaggaaggactttttcctttatgagaaagatgaagaatgttgcttggctattaatcctccacctgatcagattccagatttggtaatgcacccaagtgaatcacactggttgaatgacttcagaggggtgatgaagaatgtttgtggaccagttacagctgcaaaaactgtttatgaggatgaacgaggtttcttgatcattatcagtttgccatttgtggatcttcctactgtaaaagtttcttggaggaacactgtaactcatggtatcataaaggtttcttgtgttagtgtatctcgcaagccatttatcaagagaaacgataggacattcaagcttacagagccattgtcagagcactgccctcctggtgaattcgttcgtgaaatcccactttcaactcgaattcctgaagatgccaatatagaagcatactatgatgagccaggatctgtgcttgagataatggtgccaaaacttcttccaggagcagaagagcatgaagtttgtgtttgccttcgcccaaatgtggggaatgaactcatgttgaattgagatagacattagttaggcacttttgaaaaatatatgggtatgattgccagcatggtcggttaatcatttgttttagtgactttgtaccatactgtgttttctataatacaaatgtattgtcttgtcatttttctgcacttgcattgtgttaaaaa

SEQ ID NO: 79306 - DNA, 225 bp, Glycine max
  unsure (1)..(225): unsure at all n locations
  Clone ID: PAT_MRT3847_42629C.1
ctaacgttgacagccagctnctattttgcattttctccagatgatgcagcacaagtagccgaatataagtacaacaaagactcctgctatcacattaagccaggcccaccatatgcatttcatgtgatgcgcgtgcactattctatgagggatatacactgctgctagagtagtgaagatagtttgagttcgctaaccagcgtaggcacaaattgcaagattgtg

SEQ ID NO: 79307 - DNA, 256 bp, Glycine max
  Clone ID: PAT_MRT3847_4262C.1
ttttagtaaaagccccaatagcacaactctaaacatattcattaatggacccggctataaaaatttccggaataaaaatatcaacgaaagcgtaggcacccacaggagtaaacataatgtacagtttcttaataccctatccaacaaaaacaagtttaaataccccccaaaggaacccgttcctctgaacaaatctcactatatgttcgagcgtcttaataggagtgggaagatcccatatgggtacatgcgacaa

SEQ ID NO: 79308 - DNA, 176 bp, Glycine max
  Clone ID: PAT_MRT3847_42630C.1
ttcttttcttctttttttttttctacagttctcacttgatacacatcatattgtctctgtttaaatttaagaagatgccgatcataaacatctccatctaaattccttaatagactactcaccccaacacttttaatgcttctttggctgaattcatcttaacctttatcttcttc

SEQ ID NO: 79309 - DNA, 565 bp, Glycine max
  Clone ID: PAT_MRT3847_42631C.1
cactcatctaaataagctgctagaaaaattttccactatattttgtgtaattttttttatttttactttcttttctattgatcttttcactcatctaaataagctgatagaaaagttttccacttctttcttttctgtttatatctatccaataacacatattttctactttatttctcttatatttctatttgtttatattattcatttttatttgtttcatcactgatttgttatgcaagaaattaaggaaagaaggtgggaggatggaaagaaagtgaaaccatctttgtttcattcaaatatctttagctattgaggagcaaatattaaaagtgagtgggacctacaaatttatcaacctttccataccaaaaataaaaggagagagaaatattttttatacattaaatcggacgcgtgggatttttttttaaaatattttatgattttttttattccctaccttaaataaccctcttttttctctctggggtttctctttttcttttaaaagaaaaccttattaaaaaaattttcttttttcaccctttcccttttaaac

SEQ ID NO: 79310 - DNA, 218 bp, Glycine max
  Clone ID: PAT_MRT3847_42632C.1
aattcggctcgagcaatgagcaatgcactcatgcactaccatggatggttaccgcgacctcaaatgttagagtttcgaaggtgtgcgggcccggtttttgagatggccggctgaggatattcattcgacaaagaaaagtgtaagcctattctctttagaatgcgactgatatcgtatgaaagcgcccagtctttgcaaatgtccttttttttttttac

SEQ ID NO: 79311 - DNA, 439 bp, Glycine max
  Clone ID: PAT_MRT3847_42633C.1
ggctcgaggatgtagatagcatgtggtgtctgtatatagcgcagttattgtgtgagataacctgacaaccctggcccatacggctaggcacaacataaggccattagcgtacgcgagctgtgcagacatgcagatgacctcttgtagactgaaagcgttctatatcacgatgagtgtatacatattcactatcagatggatgtgggtatgaataacatcaatcagatttatcctcagcatatcatatacctttttgtagcctcttttctgtatgcctcatttataagcgatgggctcatttaggattattgttagcatatatagctgagtgtatataccataatgaaaggtgctctgtgccaacaactattagagcagatcttagtacaggccctggatcttgggcatcgtatgatactgaatcgattgacactatgac

SEQ ID NO: 79312 - DNA, 214 bp, Glycine max
  unsure (1)..(214): unsure at all n locations
  Clone ID: PAT_MRT3847_42634C.1
cccccacttgctctccacttgtttcctctacaaaaaatctctcagggacaatagaaacatcttcatatatagaagggacacaccagtgtagagcgaaaaatacaagcaagaacagatggaaatagacgaagccgaagaaaagaataagaacctgtctgcatggatggaaactgtaaagaacaaagaacaaaaanataatgataataaatccacg

SEQ ID NO: 79313 - DNA, 163 bp, Glycine max
  Clone ID: PAT_MRT3847_42635C.1
tgaggagctgaaaaagcttatcggtgctccagcttacatagaatgtagagcaaaaacgcaacagaatgtgaaggctggttgtgatgcagccatcaaggaagatctccagcccgcagaacagaagaggaagaagagaaaggggcagagggcctgtaccattatg

SEQ ID NO: 79314 - DNA, 471 bp, Glycine max
  Clone ID: PAT_MRT3847_42636C.1
taggtggataaagattccccctcctctaataccactggagtctgaaggaactcattcaggctgtcttcatcaattttgagcaggtgtcctcgtactctggcttgctttggggattggtcctctatggtgtataaattagcataaaaatccttcaccacagctacatctatgcttccatcttggagattggtgaggcatttgtgtagattccgcctctccaattccactttaaactcgtccaacttagtatgataattctgcacatttctctccggaaggatattccgctgagaatggtatcagtgtatctattccaagcgtccaaagaatggaatctcctcgtatcatactaagcctgaggtctgggagcagtgctcttcctcttcctgggtgccatctacaataaaaagaacccattagtttattagaccagatatgatcaaaattgaaacaaaaaataaatactgaatt

SEQ ID NO: 79315 - DNA, 778 bp, Glycine max
  Clone ID: PAT_MRT3847_42637C.1
ccagcgttcgcccatgaatcgggttgagcgaaatcgaagcatatagtcggagcatgaattggacaccggcatcacacggcggaagacgagaatgtctccaaagctcccttcacatctcttcccgtggctcatcctactaacattcgcatctttctatttcttctcttctttcctctctctcagcacattctcttcttcatcttcatcttcatcaccaacctcacaatctctctcaatctccaacacctgtaacctcttcagaggccactgggtctcggatcccaaccacacccctctctacgaccaaacttgccccttccaccgaaacgcatggaactgcctccggaatgagcggcagaacatgaccctcatcaactcgtggagatgggtcccacggaactgccacttgccccggatcgacccggttcggtttctgggtatgatgaagaatacaaatattgggtttgttggggattccctcaacgagaatttcttggcttcttttctctgcattctcagtgtcgctgataagggcgccaagaagtggaagaagaagggtgcttggaggggtgcctattttcccaaattcaatgtaaccgtcgcttaccaccgtgctgttttgctctctagataccagtggcagccaaaacaatctgaagctggggtgaaagatggatcagaaggcttttatcgagttgatgttgatgttcctgcagatgattaggctaaaattgctggtttctttgaaggttttgtgtttaatacatgtcactgttgg

SEQ ID NO: 79316 - DNA, 524 bp, Glycine max
  Clone ID: PAT_MRT3847_42638C.1
gtgccgcctgcttgggggggggggggggggggggggggggggggggggggggggaaggtaaaaggtggagaaacggtaggaaaatagcaataccaatacccgtgacgataacggtacgatagcgacacaacgaggactaggggtgatcaccacctgaacaaacacaacagcatataaaagttaaaataaactgttagggaacttagcttgttatgtcggctgcgttgcaggagtgccaacacactgaagttaacaaaccacaatatagaacgtaagccaatgacaaactaaccctgagcaaaagctaaagcccaacatagcgaaaggtaagggaatatatgttggagtacatagtattggactgtaactcatattaaggttgggtacccaggcgggaatttgccagtcaaggttatgaaactagatttgggttgatattaaccgtgaatgtgaagttgggatatatagcatatagctagatctagctatatataaatagataaaacgggggggcggagcaagct

SEQ ID NO: 79317 - DNA, 362 bp, Glycine max
  Clone ID: PAT_MRT3847_42639C.1
ccccaaaaccggttcaaaaaccggggccacatcctttttaagacccccctttctggaaaaaggaaaggccttttgggtgtttttcccaaaaaagggggccccccctctactttttggggggggggccccccccccctttttttaacagccccacaaaggagaaaaaaatttcccttgccccaagggggggaatcccttttgaaaatcccccccaggggggcgggctttttttcctgggggcgaagggggccccaaattttttttaacaaacttttatttgggggaggatcttctcttcctttatttgggaaagaaaggggggattttcttttttcaaccttaaacctaaaagtttcccccct

SEQ ID NO: 79318 - DNA, 692 bp, Glycine max
  Clone ID: PAT_MRT3847_4263C.1
cgttatcttgccttcagtttcattctttctggaacaaaccatttctagctaatttgttcttacctgtcaaatgctatcttctccttagtccgagttccttctccgatacacaattcaaaaacatggctcttaatttttctcttgtgttcaccttgtactccattatttttctcctaacaacagcttcatccaccaccaccacccaaactactacttcaacagtgggaaaagaccaagttccacgcataatgtgcaatgagtgcgagcttccacctccacccccacaaccaaaagagtgtccaccgccaccgtcacctccaccgccgataccaccatcacctccaccaccgttgcctgcatcacctccacctccggttattattaaatgtccgccgccgccaaaaccactaccaccaccaccacccgtggttattgaatgtccaccaccgccaaaaccaccgtgtggtggaggtgctgactgcttgctccccactttgccggagacaccagaggaaccccaatacctacaaccgccgccgcagctttcgtcgtcgccgggaacgatagatcttgacgatattatcagccggtgctaacatgattaatccactgctacgctacttcacattgaactccttcacttttctgctccttctttgccttccctattacttgttcatttgatacatgca

SEQ ID NO: 79319 - DNA, 950 bp, Glycine max
  Clone ID: PAT_MRT3847_42640C.1
ctcgagccgattcggctcgaggactacaatggctgtctccaaaatgttcctctcttggtcttgggcgttacaacgctcacagtcacaccctgttcaacttcccaaaacctcgtcacggtcttcagcggttgccgtcacagcatcagcatcagcatctgcgcgtgcaattggaatcgataacgatgtttcagttaagagtatattataccctgcactctccctttccaacattcttcacttcaagtcaacctacaacgtgcagatcgtggtgggcgaggacgagcctgaggacagaatcgtcaaccgctttaagaaggaggtcctcaaagccggtgtgcttcaggagtgcagacgcagaaggttctttgagaacaaacacgacaagatcaagaggaaggcccgcgaagcttctagaaggaaccgaaagaggaagccacaatcaagagcttgggcacagaataaacacggttctgaaaagaagaaaaaggatgctgatgatgatgatattgataattgggaacttccacatgtagatattccatatacttgaagttctgatacagaaacaaacacagaagaagagaaaatatcacactctctctcctaacttcaatgccttgtggtgtataatttttactccagtcaactacagttacatccttctaggaaagtggaaaacatttgttaattgtattttaatctgatgattgtacaggccttccttgtgtcttagctagttggataagaaggtgacttcagatgagtgttgtctgaaagctgatcatagctgttcatagttctcaaattttacttgtacctaatgtagctcaaagtgtttatataggactcttaatccatgaaaatgtaaaattttcaccttggtgtcagtcatatatgttgtttgacactggacacgttaatctttggaaaaaggactaattgattttaca

SEQ ID NO: 79320 - DNA, 763 bp, Glycine max
  Clone ID: PAT_MRT3847_42641C.1
acgaatatcagcctcggtacccggggatcctctagagtcgacctgcagtggtgaaagcctcgtatatggtttcccatgagtggtgttcatcatccattacgcgccttcgatcaacgaagattggcctcattggtgctgtaaccatttcaactttgaatgtcaacattgctacgatctctgacatggcaggcctcaaatccgcgtgtggctgaaggcataacaaggccacgtggaatgcttgcatgacatccttttcttctatgccttgctcttgcagctttggatctacaatttccatcaacattgacttctcataaagtttccatgcctgcaatcaagattcttttatacaagcattttaaagcatctgagggaaaatatgctataaataaataagttgagaagttacatattcagggaggtactgtttttctgatgctaaagtaagatctgtgtttttcctacaactgatgatttcaagcacaagaactccaaaactatatatgtctgccttttcagacaattctcctctaatggcatactcaggagctgtataacctctgaccaaataagacaagaaagatcattaatataaaatcttgactaaagataatatttatcttgaattcattgatctcaaataaaatcattagctaagtgtccatgataaaaatcttagagtctagatgttaatttatacaagagtcaagattcaaaaatgatagttttaatatgcggctaagagtgattggggttgatcata

SEQ ID NO: 79321 - DNA, 339 bp, Glycine max
  Clone ID: PAT_MRT3847_42642C.1
gggtgagtgcgaataaagtgagctggtgcgaccaacgagggttggggtgacccctctttcacgtctcgtacaagctctcatcttctctaagcctttctactctgttctcaagcttgctgctagaatggctttgataagtgcagctgataagaacaacataccgtcggggctattggcgaacgagattttagagtccgtagttgatagggagctggacatcattcaaaaccagtatttaccgtaccctgattattatcagaatccattccatgcatatgatgagggcgatctgacatggctggcggctgcatacgcagaggctgctacattgtcgatagc

SEQ ID NO: 79322 - DNA, 445 bp, Glycine max
  Clone ID: PAT_MRT3847_42643C.1
atatggtttactgacaaccgtccagaaatgacgaagatggcggctacatttggtatttctgagaatgcaagtggaggcttagaatgtgctatgaataggtccaaggaggggtgagacaaagatgatcattacgccaaaagatttgacaactgtgagaaccagaaatcagttggcacaaaagctgagactaagaaatctaaaacaaacccgggttcggaggtagggggaagggaaccaagggaggagcccgaatctaacagagggaaagtttgtgttactggacagacatgccgatggcaagcacggtggaggagctacaaatgatcaggttagtcacgctgggaaagtgtaaaaggatcaactgtgatttaaaggggcacaattttttgtgaaaattggaggaagaggaaactgtgtttcccccaaagaagttgcgacgtgaaaa

SEQ ID NO: 79323 - DNA, 487 bp, Glycine max
  Clone ID: PAT_MRT3847_42644C.1
cagattcgttgtggacgatgtagaagagcccagctcacgtactggtgcgtgcgaacctataaggcttctatctggcctcatacaaccactgcactggccgcggatctacaacactcggactgggacaaccctgcccctacccatctctatcgggtcgctaaacatccgattttctcaaggtgtctgatataacgcgcagtccgcacaccgatacgccctatgctaacacgttccgcactactgactggcgaatggaagcgctccctgattcttcgcaactacatgctgcggcattggcgattacccccaagatgaccgtctcgctgtgctcaatctctaatggaagctcttttcggttgctatcataggatgatgatcactttcgcctgctagcccagaatagatctactgacttagatgcctataacaatgcgaaatatagcttgactgaacctcgacccgctctagctcaaataggaggatggat

SEQ ID NO: 79324 - DNA, 600 bp, Glycine max
  Clone ID: PAT_MRT3847_42645C.1
atgttcactacaggtgctaattattgagcggctagctaaggagccagtaattaatggataaaatgagggcgatagaaattactgaattcctgatttatatgagcataattgcataacagttagaattgctctccttaccaaagatgaggcgtatgtgtctcctaagttaaaagaggtcatcgcaccttgcacttcacatgatggcagaaacatgcagcactactagtggtagtgaaagtgaagcatctactgcagaaccagggaggggtggctctttgcctattcaattcgatggagagatgcttgctataccatgctgtgccaaatttgatcgacaaacgatactaaccttctagatgaaccttctgaagtatttccaaggaataatactccacaaggaggacgtaagaccaatattacatgaccgtggagttcaacccttatcatatcaattaccaccatttcgattatcaccaatgtcacaactatgaccatcacgtccgatgataagaacgattccatcaccacccatagctcctcgagatctgtcacctcttgagactatacaattactgaactgtcttgagaacctgcactcat

SEQ ID NO: 79325 - DNA, 442 bp, Glycine max
  Clone ID: PAT_MRT3847_42646C.1
cccttcgatcgaaaccagaccaccgaagggggaggcggggggacatcaaaagacgcaacccaaccaaccaaggcagcaacagaccccgacaagaagacggacaaagccgacaaacaaacaagacccagacccacgaggcggagagcggaacgaaaaagcgcaaccgaacaacacagagcaggcagcacacgggacaagagaagccaaggaccacgaaaaagccaaaaaagcacaatgagaaagcccaccaaaggacaagaaaagcaaccaccaccacgggaagccgaccaaacacagggaaccccccagccgcacacgcaaaggaaccaacaaaacggcaagaaaccgcggacacccaaccaaaggcacacgaacaaaaaaccgagagggggagaccacaaccagcaaaaaaagcacaagcaacaggagcccaagccccgga

SEQ ID NO: 79326 - DNA, 521 bp, Glycine max
  Clone ID: PAT_MRT3847_42647C.1
caaaggcaaaaaaaaacccctggtaaaaatttcaagcaagggatttacccccaaccctttttaaaaaatatacccccctatccaacgatccaccccgaaaaacaaaaccctttaacccccaaataaaacccccccccaacccctaatttttaaccctggccctttttcggggaaaattcccccctttaaggtttctcaacaaccctttggggctttttaacggccttaaggggagtttttttcgaaggttaagggggaacctttttgggggcgccctaaggggcctggccctgggcctgggggccccaattttggccctgggcctggcaaacaccctttttttaagggccaaaactttgggcctggaaagcggcttgggggggggcctaacccgaattttggggggccttttgggaaccaccagcggtttaaaaagaaccaaacttagccggggcaacctgaaaaaattttttgaccttaaggagctggccagaaaaaaaaaatttttggaaagaaacaaa

SEQ ID NO: 79327 - DNA, 173 bp, Glycine max
  Clone ID: PAT_MRT3847_42648C.1
agcgcttgaattcaagccagagaatcaaaagctgttttgaaagccaaaaaagaaagtattcttaaaattaaaggtaagccaaagtacgaggggtaccaggtttagtcgtgttgtaccaacatgagaaagcggttgcataacaacctataaagaaaaaaaaaaaaaaaaaaaaa

SEQ ID NO: 79328 - DNA, 500 bp, Glycine max
  Clone ID: PAT_MRT3847_42649C.1
tttttttttttttttttttcgtcaagccggataaatccattaatttatataaacaacgtcaccgtttttattttgcaattaacattacacaaactttgaagccaaacacatgcggcatgcatggtctggtgcagaacaaaagaaactgaggaaatcattatcttacacgtaaagacatgccaaggaagtctacaagacctatgcaaattcttaattactaatttacataattaacgtagaactaagttgcacaaccgaaaaataacacaactaattaattgttgataatgcgcacaccttactaattaattcctcttgttttgacgaggatggccaacaccagggctgtgacctgggtctgtgggtttgaaatcgttttcaaatgatccttcggccacggaagttttaacatctggactatgaactaatgcccccatcactttcataactttatcttcttcaaattttttgtgaccaacaccaggactgtttcctggtgt

SEQ ID NO: 79329 - DNA, 373 bp, Glycine max
  Clone ID: PAT_MRT3847_4264C.1
attccgttccaaggaaggtttcccgtcatcactgtatgacgtcctccttctttggggggggggggggggggggggggggggggggggggggggggtgggagggagggggggggggggggggggggggcctttttttttgaaaggtaatgggtaggaaaaccagggtggttgagggggtttaacccccgaagggttaaaaggcacccccggggggtaaaaagtttaggttaaaaaagggcggttgcaaattgaggccaatacgcggttaacaaaaccgataaaacgggtggtacctaaaaagccgtcccccaaaccataggcccggggggttccctaattgccaaattcggggcgagtggtaactattttttgg

SEQ ID NO: 79330 - DNA, 323 bp, Glycine max
  Clone ID: PAT_MRT3847_42650C.1
ctctatccgctttccttttcatataaaataatcaacatctttcccaaagatctatttgtgaggtaggacagcccacctccttatttttctgccatttctattggtgactaactagacagctacatattatcttcaaccaaatcccgttcattcaagcatgagtcatttctctgcccctcacttatctattcactcccaactccaataccatcatcttttttatggcacaatcacactctctatttttctcctttcaatccctcacattcttaccttttttcctctccccattttttactacaacccggatttcttttctcctt

SEQ ID NO: 79331 - DNA, 340 bp, Glycine max
  Clone ID: PAT_MRT3847_42651C.1
tttatacttacgaacagcgagtgcagcgcaaagagctgtttgaggtgcgtaaattatagtatgcaaagctcactccatatcttgcgacgtttctggagggcttagacgcttggagggatatcaaagacaaaagccattatgatgaagaggtggctgaggcattccgttgggtgaatgaccctgttgacagatgacagccaacaagctattatgctatctcgaatgatccatacgatcatggatcggagattactgcgccaaggatgggggactcccgagaccaataagcagagacactgctccaacacgctgatgcactagcatacacagagtgtttaaa

SEQ ID NO: 79332 - DNA, 456 bp, Glycine max
  Clone ID: PAT_MRT3847_42652C.1
attctagtttctcataagatgacatttgatagaaattgttagaacttgcctatcatagaaccagtctagtaaaatgattacctctggtctttcatttaacctatcatcttcattcttcacagttaagaaggatctttattaacacaaatgactttttatttgaatttcagattcctataaatgctgctggtttgattgagtataggtgccaccccttttggtcgcaaaagtattgtccatctcatgagtatgataatacagctcgctgctgtagttgtgaaagattggaggtattaatttaagcactccagactatttaatgattcgtattttcagaacaggtatttatctgaatcttttttgctactggtgtgtttcgcttgaagcctctgaacataaaatactatagactataagatggacggagtttgtgtttagagtgcatggaatctgcta

SEQ ID NO: 79333 - DNA, 517 bp, Glycine max
  Clone ID: PAT_MRT3847_42653C.1
gaaaaaagacagctcaaagtaccaaactaaaatatattattgacagtatttaatgttgtgaagcataccttaatctaatactcctatttatattattaattaggttcattagtgattactagtactgaccatgccgcatgctagttaaaactttaagctgccggccctatatgtttcctttttgtccttgcaccctcttctgatgctaattgttgacctttaactgtctgagagataattttcaatacactcatctaagttctaatactattttttttccctaacactgtctgagagataatattatattttaggattaaatatgtttttattctctctctatatatatatataccgaaatttgttttttggtcactcattttttgcaaatgtgtcaagtccttgtatcacataaaacatcatctctttttggtcccttgtttatggaaatagagaccagttgatcacactgacacatttccataaatgaagggtaaaaaggctatgatttttttag

SEQ ID NO: 79334 - DNA, 458 bp, Glycine max
  Clone ID: PAT_MRT3847_42654C.1
aaaacccaatccatatggaatttgatagaatcctacgtgggaagaatggcctaatttgtgagagtgttcttacggaatttaaggagttaggatcaatgtgtggagggcccaatgagaaactgagagctgactggttaataaattgtctcagggttgttcctgatacttcctcagaacgcatgatgggcctcccatcaactaggaagctggcattgaaaaacaagggtgtctttggcactggtgaccattggcatgccccaactttaacggcaaatatggcatttgttagagctgtttcacagacgggaatgtccctttctaccatcgaacatagaccaagggccttaactggtgattagttacatacattcatgaaaacaagttgaggcattcaaaatcaggtactagaatgtagtcataaaaaatctattgcataaaaaaataagcaaatctgcttg

SEQ ID NO: 79335 - DNA, 287 bp, Glycine max
  Clone ID: PAT_MRT3847_42655C.1
ggcttaatattttttattttatatagaattgtgctagcttaatcaaaggcaaatactttgaggtccacttgctagagaaaatacatgcatccacccgcagagaaagggggggaattaattattcttttatacactaaaatttgataaaattctgcatcctgcttcgagcaaggtgtctccaaggcttccctgacctacaagtaggaactctccggtcaaacctctggattaacctgaactttgatgttgtggatatcatatctgatcctatgcctaactataatatt

SEQ ID NO: 79336 - DNA, 610 bp, Glycine max
  Clone ID: PAT_MRT3847_42656C.1
cccggctgttacaatgacacaaagcgttgtcgtagacttcaacaatctccccgaaggttgcatagcaaacattctctccttcacatctcctagggacgtgtgtagactctctttgctttcatccactttcagatccgccgctcaatccgacgctgtctggaacaagtttttgccttcagatttccacaccatactttcccaatcttcctctttatctcttccttctaagaaggacctctttctctatctctgccaaaaaccgctcctcatagacgatggtaaaaagagctttcaactggataaagtatacgggaagaaatgctacatgttatcagcgaggaatctcttcattgtatggggagacactcccaggtattggcgctggacttcgcttccagatgccaggttttctgaggtagctgagctaaggagtgtgtgctggttggaaatccggggctggatcaacacggggatgctgtccccggagacattgtatggggcgtaccttgtgttcaagccaaacccttctggattctacggcttcgattaccagttagtggaagtgtccatccgtgccgctggcggcgaccctggcaagcgacccgttttc

SEQ ID NO: 79337 - DNA, 214 bp, Glycine max
  Clone ID: PAT_MRT3847_42657C.1
cccttccgggttcttgggcccaaaggccatttgattttctttaaaggcctttgattgcgggggtttgggctccttgggttccaaaaggaagtcatctacacccttgatgatgacttgtttggtgccactgatccatcttgacacaagattaatgcactttaacaaggtatagaaaacctgctctgtgcatacacaccctttttttttaacaccc

SEQ ID NO: 79338 - DNA, 505 bp, Glycine max
  Clone ID: PAT_MRT3847_42658C.1
gaaggacctctttctctatctctgccaaaaaccgctcctcatagacgatggtaaaaaggactaattgttgggtcttattcattgttatctctgttgtcggttgtaataattgtttgtggtgaagcgattaattatacaacattgtattaatgtgggaaatggaatgatgatacagagctttcaactggataaagtatacggtaagaaatgctacatgttatcagcgaggaatctcttcattgtatggggagacactcccaggtattggcgctggacttcgcttccagatgccaggttttctgaggtagctgagctaaggagtgtgtgctggttggaaatccggggctggatcaacacggggatgctgtccccggagacattgtatggggcgtaccttgtgttcaagccaaacccttctggattctacggcttcgattaccagttagtggaagtgtccatcggaatcgctggcggcgagaatcgcaagcgaaacgttttcttggac

SEQ ID NO: 79339 - DNA, 257 bp, Glycine max
  Clone ID: PAT_MRT3847_42659C.1
ctgagacatgtctgcactcactctttaaaccctgtatacaggcttggtggattatgcaaatgatgcttgccatcttgctagatcatctgaacttcttattattcagtcatgacacctgtaaatttgatgctgatgagtgttatattttataccggcacatatagaaaagatattacgccgcgtactgggcctccataactgcggtattcagaactttgttctcactgcatatgggtctccttcacagtgagcatttc

SEQ ID NO: 79340 - DNA, 293 bp, Glycine max
  unsure (1)..(293): unsure at all n locations
  Clone ID: PAT_MRT3847_4265C.1
tcgcangcacacgtacgtnagctcggaattcggctcgagctgtgcttgcctggaaaagtggattaggcatcaatgcagttgtnactttatttccaaagaagaaaagtcctggaaaggaagcagagagttttgtgcttctcagaattccagtcttcttcagctccaaaccagaaatgaattgagttttatgagctccagtcaagcctttttctggattggaatccactataatgaagaaagaagtgcntggctatgggaggatggcacatttccctcaaaagatttatttccag

SEQ ID NO: 79341 - DNA, 255 bp, Glycine max
  Clone ID: PAT_MRT3847_42660C.1
tccgttaccttcgattttcctttctctcttgcaagtgtcatatctctctttctttctcagccaagcatatctccctttttcgtttccaatttccccttctcttaactcacctatttcgcctaccttgcgtgtccctttctcttcagattaaggctcggtatggttaggttaggataggtattcggtgatgcgatagatagagagagagtatcaggttgatggaagatgtatcgcgtatcaacgacgacgtttgtg

SEQ ID NO: 79342 - DNA, 183 bp, Glycine max
  Clone ID: PAT_MRT3847_42661C.1
gttgttgatacaacatggctaaaaaattgaaaattgttttgaaatgttgtgttttttaacaattttgaacctgaattgatcaatataattaaacattatctggacagccaccctgtctagggccactaactgctgccagagtgccatgctgtgtaagtgatttggtgttttgaccaactttac

SEQ ID NO: 79343 - DNA, 504 bp, Glycine max
  Clone ID: PAT_MRT3847_42662C.1
gtttttcttttttctttttcttttcttttttttttggtttcttttcttagaaaaaggattcattattaaaaagaggcggggggacgaaataaaggttcgggggggaaaaaaaaaccatcccgcccaaacaaaacgggcttggccccccaagaaaaaaaggggggggccccaatgaaaaaaaaacaaaaccgaattttaatggggggtaaaggaatggtaaagggaagccgcaaaaacgtaataaaaaaagcccaactaagggggtgaagaaaccaccctaggggggtttcaaaagcccccatgggggaacttcgccggtcccccaaaacaaaatttcttgagccgaagaaactatttttgtggcggggccgggcccagcaaccgcctttgcaggagcaaaagacgaaccaccagtgtgtttaaagaaaccgacctggcttttctgggggctgggaacgccacccctggggtatgaaacccccacccctgattttctaccccggg

SEQ ID NO: 79344 - DNA, 323 bp, Glycine max
  unsure (1)..(323): unsure at all n locations
  Clone ID: PAT_MRT3847_42663C.1
aaaataacacgactcttccacataattacnacaattaaaagagagtgtggaattttcaaattggcagagcctactcaagaagagggtcctgcctaattccctttattgaattcaacaaacaaactagcgaatgataacacaaatctcttatcatgcagaggagttcgcattttcagaaaatctggcccaagcctgtggaacataaaaagctggcctaaaagcattaccaacatttttaaaattttgagagattcccaagagaatatcaaaaactcgtttactggtcgggattgtcaataaagaaactcaaacgccctgaaatt

SEQ ID NO: 79345 - DNA, 224 bp, Glycine max
  Clone ID: PAT_MRT3847_42664C.1
cccacgcgtccaggcttctatttatgtctcgttccgaatcacccctcaccagtccatgctggggttgagggccaaccacatcgtgggctgacgcacgctcgatgactacaacatgccatccgactctacacagaacttatggctgcgtcatatctataccctgcagtttctcgtgcttacatttacaaatgatacttcaacggctcagacgtgcaacggtcaca

SEQ ID NO: 79346 - DNA, 299 bp, Glycine max
  Clone ID: PAT_MRT3847_42665C.1
actaattacgacgggacaagataacagatgtaggggctacccatcttttattatacagctttgtgaagaatgagggaacactgttgtatgacacttggactgcttgtatatcaggcgattccaaaaccaggtcgagaaataaagactgttgatatggtatagcttgactgaaggtaaatctgcgactgctactacgagatagataaatgtattggatgagcatattaagagcgtaacaacttcaacctagttttagatggtatggtcgcatatgaagcttttctaggaagctcctgggt

SEQ ID NO: 79347 - DNA, 151 bp, Glycine max
  unsure (1)..(151): unsure at all n locations
  Clone ID: PAT_MRT3847_42666C.1
tcgacacgcgtgcggacacacgtacgcacacgcgtgtgntntttatgaactaaattggaaaaccaatatccaaaattggcttttcggattgagaaggcgtcccaagaaggaggacaaaccctcaggccctttttattaaaaaaaactaaat

SEQ ID NO: 79348 - DNA, 627 bp, Glycine max
  Clone ID: PAT_MRT3847_42667C.1
ggctcgagacataataagatttattctttcttatcattcactttcttcacaacacgtagccgtgtccatggccttgcatgtccacagcttcttctatttttggttcgtcgtcatgatcttcgtcgtcgtatttttcacggcaccgtcggtgtctcagccgcaagccaccgggtcctgcaacgggatactcctgtcgtacgcgtataccggcggcttgcagctgcctccgaatgtctcggacccggcggagcagccgtaccggttctcctcgacattgacggtgctgaacaacgggctggaggagctgaggtcgtggagggtgttcgtggggtttcagcacggcgagtggctggtgtccgcctcgaacgcggtgctcgccgacggcacgagcctccccggttcggtggaaaacggcaccgttttgagtggtgaaaccgtgagggatctgaagactgcggtggcgaccgccggggacttgaatcagatgcaggtgagggtagacatggtggggaccttgcttgcagtggcgccaccctctgtgccaatgccttcttatgttaccttggctaacgaaggattccttgagtggtcaaccctctggccaagggagcaatgaaactcatgtgt

SEQ ID NO: 79349 - DNA, 1623 bp, Glycine max
  Clone ID: PAT_MRT3847_42668C.1
cggggaacagaaacaagaaaaaaaaactcccacaatagggatgaggagtgccgacaggattaattgaggtcagggactgaaagggggtgttctgttctgatcggatctgaaatcatcgggaaaatgtcgtcgtttctgcaccagagaagcagtctccagaacccattctcgaatccattcccggcatcaactccatcatcatcgaattcgaagaaatccctgtccatcatgggccccaccaccctcctagccctaatctccctcatagtcatactcggcgtcttctgcccctgggtgggctttccccagggcttccccttcactcccactcccacttccaaatgggctcactacactttagaacaagcgctctccttcgtcgccaaaaacggttcctccgtcatcgtctgcattgtgagccaaccctacttgcccttcctcaacaactggctcatcagcatttccatgcagaagcgccaagacatggtccttgtcatcgccgaggactacgcttctctcgacagggtcaatctgctttggcctggccacgccgtcctcatccctcccgtcctcgacgccgaagctgcccacaagtttggttctcagggtttcttcaactttacagcaaggcggccaagccatctgctgaagattttggagcttggatatagtgtgatgtacaatgatgttgatatggtttggttggcagatccatttccttatctgcaagggaaccatgatgtgtactttacagatgatatgactgcaattaaaccattgaaccattctcatgatttaccaccaccaggaaaaaagggccgtccttacatttgtagttgcatgattttcctccgccctaccaatggagcaaagctaattttgagaaagtggattgaggaacttcagattcaaccctggtctaaaactgtgaaatctaatgatcagcctgcttttaactgggctttaatgaagaatgctaaagaggtggatttgtacctgcttccacaggcagcattccctacaggcggattatatttcaagaacaaggcatgggttaaggaaactaaaggaatgcatgttatcattcataataactatatcgttggctttgagaagaaaataaagcggttccgtgactatggtctctggttggtggatgatcatgcacatgagtcccctctaggaggattatgatccttggtagatgaaagacactagtttatcgttagctttggttcaagcatttggattaagaacatgctttctctgccaatttgttcatcctaattgcttggtggctgatttctgaagagattacaaccgttgctgtcaacatgcaacatcgactaaatgatgggttggaaaaaaaatggtcttttgctttcaattttgtgaaggaaaaaggtgcttacaaaatgtagattttatttcaaggccctaggaagaggaggatatatttttagttggttgttggagttgtacgtgacaagtgataatgtatgattgtttagaaaaagaatatgcttccactgtaagaattatttaatttaattggcatatatatgaaatatattctactttttatcctctaaaaagaaaaaaaaaagagggggagggagaggg

SEQ ID NO: 79350 - DNA, 548 bp, Glycine max
  Clone ID: PAT_MRT3847_42669C.1
ccattgaggtgctctttttgggctccccaaacagaaaattagaaattcacacatataggtcaagacatagataaatactacatggtggggaatggaaataatagaaggaattaaaagaggaacatgaaaagggtctctgaatctaatctatttcttcttctcctttcccctttgtaatcgactttcatgctcagaagcgtttcgtttgtcctctaaaacccacataccatcaaccaaactcctaaagtgatatccagaagagtgagagaatggttactgggtggagaagagcgttctgcacatccatccccaaagacagagaacccaaagtgttaacagagaaacaacaacaacaaccacaacaacagcattgcgagaacaccaccaccaccaccaacaacaacaacaataatcacagttccaagtttggatttttctccaacccatcaagaccccggtgcgagtctcagccttcatcaacccctagccttcgatgtcaaaccacatgctcagtcccaaacagcccaaaacttcaatgcaaaacaaaa

SEQ ID NO: 79351 - DNA, 368 bp, Glycine max
  Clone ID: PAT_MRT3847_4266C.1
tggggtagctagaagactaaatcttggggaagtccttgctttgaggtcagacttgcagcatatcaataaaattgttctcatctttcacgcataaccttatctgaccttcgtcaatcctgtaagtagtagaagtatgaagatggtatagacattctgactcagatcaaagtcggtaaatgaaggacaagctgaagcgctctgcgaccagatctcaggagcagtcttcgagtcttgggtcgagcatgaaccagacagcatagttcactgcgagccattcatcaagacctacttgatcatgtgcatatgagaaatctcaatcagagccaatttctgaatgcatcaagatagtgcgtgacacatgcatgaac

SEQ ID NO: 79352 - DNA, 259 bp, Glycine max
  Clone ID: PAT_MRT3847_42670C.1
ggcaggagagcgaagctgatactgtgaaagacaaggacatttcaatctccaaacgaccggccttggtgggtgcatctacagaacttgctcgtatggagctctctgaggatattctgaaaggatggatgaataattaaaaaggaacgccccagaaaaagggatgagaggagataatcacaggtgtcgttcattcatccaaaaaaaatgaatagggggaaccaccttaaagggtgattcccggaatgcttcatttcgtgga

SEQ ID NO: 79353 - DNA, 301 bp, Glycine max
  Clone ID: PAT_MRT3847_42671C.1
aacccgggaaaaggaaaaaaaaaccccttggttctctttttttttttggggcccccgggcctgtttttttgctttttgaaaccaaaaaaaaaacgtcccccgaaacaatgaaggggctatcaattgtttcccccgctttgaaaaataaatttgggggccccccttttttaacaaactaaatttccgttcaaaaagccctgggtccctgtcaaatcacaggaacttgaattttttggggaacccccaaacaagaggcctttggccctaacactgaaattcccgaagggggcccttttggaaa

SEQ ID NO: 79354 - DNA, 648 bp, Glycine max
  Clone ID: PAT_MRT3847_42672C.1
acttccgcacccgggaacaacttcccctttctttcttcttcttctctcttgcctgaatcgaagtcgaaaaacacagattcaattccaccatcacttcttgttcttcttctgttcgtctttcgttttataaattctaaaaattccaaaacacagtttttccacgcgtgacacttcaccaacctctctcactctgcgtcttcgagctacatatgcctcctctcccaccctacgtattcttcctccttgctaacctcacctgcctctccgtcacggtccaatccaaaagagaccctgatccttaccgcgatcgcttgctcggttgttactctccacacgcccccgggtcgcgtcgccttcgctggaataatgcgtgtcaccattgatctagggttttggagcctggtccttgttgcggtggtcggcctctccgtgccagcggtcgccttcttcgtccggcacgggtgccggcgcacggcggccagggcggaggagatcaagaggcttctcgttctcgccaatgaggagtccgttagggcagagacagagacggaggctttgtactaccaccaataccgcgttgtttcgggggaactgccgagggacaaagtatgcgcggtgtgttactctcccaccaccacgcgctgcgca

SEQ ID NO: 79355 - DNA, 196 bp, Glycine max
  Clone ID: PAT_MRT3847_42673C.1
aatatttcgtatgtctacttgttcttggtggtgttcgtgtgttgtgctttcaaagaaagttgatttattttgtgaaacgatgaatcgcattaccagtaatgcattcacccttggatattttattaatccccaccttagggttgtactacaccaaatgtgggaccttaaggaacttttcaaaattttggtttcgggg

SEQ ID NO: 79356 - DNA, 356 bp, Glycine max
  Clone ID: PAT_MRT3847_42674C.1
ttctcttttcatttctttttttgcggccttccaactaaattcgtgggtgatactttttttataaaaacagggcccaaaactcccctctcttaccaggagcaaaaaccgccctcatgaaaaagggtactaatggaaagcatgacccctgcttttgtagacgaaggaccctttttttcctgaagcccctcctctaacttttgaagctgctcattcagaaagtctgaggatctgagaaccttgcccatctccttggcattttgtgttaaaccactgcctgcctgctcctcgattggaatagtgaatgtggcttatcacattgaccctgggaaacgaccacgaattctctctgcttggaa

SEQ ID NO: 79357 - DNA, 257 bp, Glycine max
  Clone ID: PAT_MRT3847_42675C.1
attttgttggcagttgggtttaacagggccaccattggcagttggtttgatgggccagggagggaggtaatattgggcacaatttggggtaaaatgctaataatggtgcattggatcacagacggggttggtttgggtggcacattgatgtttaaaaccattggaggacctaattaaccaaaaatcattaaggcttttgctttgggccagtggtaattattgacttttgccaaattaattatgaatggcatttttta

SEQ ID NO: 79358 - DNA, 345 bp, Glycine max
  Clone ID: PAT_MRT3847_42676C.1
gatgaaccctaacctaactcttttcacaaactctagttttattcacatttagaagtctcaattcctggtgtgcgcatgaattgaaatgaacttgatttcaggcttcagagaagatactttcgaaccctatgagggatataaatgagcacaagctcctactcaatatctctgttggcgacagtggatatcgtctcaccatagccgccaaggtcgatggaccaacttgactgaccacactccagagactgccacaacaaggtacactgatcattcatttgagattagaagaaatgagtagattgcatgctatagcactggcagaggtgacaaggcaatgcatctttt

SEQ ID NO: 79359 - DNA, 321 bp, Glycine max
  Clone ID: PAT_MRT3847_42677C.1
cctttgtgtgtacggaatcccactcaaaagccgttacagttcgtctaagcaaggggcatacaacaccatctccattggatatggggaggccccattagatagccatggacacaggtaaatggttgctaaggtagataagaaaggtaccagctatgacatagtgtattcaatacgcaatatgccagctgatgtataggcatatgagctagtaaggtagggatagtaggtcacgataattcaaccatggaagacagggatcagtgtggatccaacggttcacacggtgagcacaacatcaatgaagagaacggctagaagaag

SEQ ID NO: 79360 - DNA, 1076 bp, Glycine max
  Clone ID: PAT_MRT3847_42678C.1
ttttttttttttttttttttttttttttttttttataaataatttttttttattatttttgggtttatgacaatttgtcaattttcaacaacaaattaacatggaatgactccaccaaaacaataatttatgcatactataaattatcagtcaacatcacaacaaggtaaatgggaatttgaatttgtcaacacggtaagacagtacatgtatcgtggtaaatcacataattttaaccaagcaaacaatggagtgatatagacatatgaagctattttatcctatccaacagtctccatgtcggaacaggattcaagtgagcacgctgcataatgaaagacttggaagcttgattacaatatggtacaacactgattggttttcttggcctgtttgtagaacatctgcgaagcggcactcagatcagaactcttctcaactaaactatccagcttctcccctctagctagcacactatcaatagttttatgaaggatgattttggtttcatccaactctctctggattttcatcaacttgtctgcctctgcaggatcctggaattttgccagagcttcattcaaatagggccatggttgagtactgtcttcctgagcatttctccatgactcgccaaagtttttttgatattcatctattacctgattgagaagagaaaacgcactccgaatcgggtaatgatcatccataaatcccaacgcgcaaagaccattcctgttgtatgtgtgcaccttgtactcttcgtgttgtacggattggcgttggccctgaggagtgcgactggcgactgtacgaccaacgaaaacgatgaattccttaacgctggaacgctggaagtagccgaagtggctgacatcggaagcgtttgccagaatcaccggatcggatccctcgcccgtgcatttaagcaccaacaacgccgtgatcttcatcctttccctctctaaattctctccttctctcgaatttgatttgcctttttttattcgctctcccttcgcagtcggtgagaaatgctaaagaccacgacggtctagctggatggacgcgtccgt

SEQ ID NO: 79361 - DNA, 358 bp, Glycine max
  Clone ID: PAT_MRT3847_42679C.1
ttttttttttttttttgtttttttaatttatttttttgttttttttttttggacaacctatagaagggggccttttataaatttccttaaatttaaaccctttttttttacaggggttgcccatggaaattaaaactttccacctaaggaaacctaagtaatttgcccaacaagggggaaaaaaacttagggaattcggaaaaaaaaaacgtaatttaaagggggaaaaaaaaaaataaaaaaaaggtagggggtttttttatttaaccaggttactttacttgaaaccccttgtcaaaactttttgaacacttttgattttaaccccggggaaaattgaacatcttcccgggtaggg

SEQ ID NO: 79362 - DNA, 378 bp, Glycine max
  Clone ID: PAT_MRT3847_4267C.1
accactcgtacgtacggctgcgagaagaccacagaaggggagaccatcaaagtttcacttctgccttatacggattagggtttcggaccttgacctaacctatgacgtgtggaaaccttaagtcaatgatcatgactgagcaatctggttggtagaacctttggtctaagagagctaagttggatgtctgaattagactatcaaattcctactggcttgaatgcttgtgctgatgcaaattctgattactccggagctgggtcaaaggagtttgagcatattcgcgtacagcatggaaatggaaggaaaagcctgacaaccgctcacggattgaaaaaagaattcatctataacaagatacttaaagatgttaagaaa

SEQ ID NO: 79363 - DNA, 214 bp, Glycine max
  unsure (1)..(214): unsure at all n locations
  Clone ID: PAT_MRT3847_42680C.1
catagggaatttctcctttgattcccagaaaggtttggggactcatgatngagagtggctgtaggttatggattttccagtgaacaaaaggcaagctaaggccttgggtggcttattcattattataattattatttattgggggctggcactattgccaaaaagacaaaagtggggtgtaacatacaaaaagggctttaagccacagctcttt

SEQ ID NO: 79364 - DNA, 190 bp, Glycine max
  Clone ID: PAT_MRT3847_42681C.1
ggagtctcacgtgaagcacgcacttgttgtgaaagttatgggttgtactggatccagacgacaagtgacccaggttacagtgaagcttttggatgatcaaagcctgcacatcatgacgaatgtgaaaggacctgtgagagaaggagacattgttaccctactcgagtctgaaagggaagcaataagattg

SEQ ID NO: 79365 - DNA, 462 bp, Glycine max
  Clone ID: PAT_MRT3847_42682C.1
acgcctgcacgtacgggtgcgcagtgtcccggggggacgcacgccgtccccgaggaagacgacggagggggatgcatcttatctataatcttttcattgcttatgcagcactaaactcagctaccttggcttaaactcacaacaaaaactatttgcgtcaccaactactttctacgttaatatattcaaaaggggagaataggcaacaaggggcgggggggccgggacgggggggggggggggctaaggcagggttggggggacaggtgagagagcgcacacactggaaacataagggggcttggctaaccaagaggttattctaatcatgggatgggtcaccaatggagggagaagcgtacggcgaaaggcttagaccggatggcttgaggtgcgtgggtcccaactaaacacagaggcgatgggtttatgcgatgctggggttctttttttcttctcttc

SEQ ID NO: 79366 - DNA, 280 bp, Glycine max
  unsure (1)..(280): unsure at all n locations
  Clone ID: PAT_MRT3847_42683C.1
gaagaacccttgctgactataacatccagaaggaatctaccctgcacttggtgttgcggcttcgtggtggcatgcaaatctttgttaagactttgactggaaaaaccataactttggaggttgaaagttctgataccattgataatgtgaaggcaaagataagcctctgttcggatctggtgggatacctgntccttagtcctgaatcgttagctanttcacattgtctatggtgcatctgaactgctccacgctccaagggttatggggtctttccggt

SEQ ID NO: 79367 - DNA, 1190 bp, Glycine max
  Clone ID: PAT_MRT3847_42684C.1
tggcaagatgggaacgcacgcgtccgaacatttggtggcaaaaggttgcaaaaagatggtggttgtcaatagaactgaggagagagttgctgcaatacgtgaagaactgaaggatattgagattatctacaaacccctttcagaaatgctcacctgtgctggcgaagcagatttagttttcaccagtactgcatcagaaaacccattattcttgaaagaacatgtcaaggaccttcctcctgcaagtcaagaagttggaggccgtcgctttttcattgatatctctgttccccggaatgtgggttcatgtgtctcagaccttgagtctgtgcgagtttacaatgttgacgaccttaaagaggttgtggctgccaataaagaggatcgcctaagaaaagcaatggaagcacaggcaatcattgctgaagaatctaagcaattcgaagcttggagggactcactggaaactgttcctactattaagaaattgagggcttatgctgaaagaatcaggcttgctgagcttgagaagtgcttaggtaagatgggtgatgatataccaaagaaaacgcggagagctgtggatgaccttagtcggggtatagtgaataagttgcttcatggtccaatgcaacatttaaggtgtgatgggaacgacagccggactcttagtgagacactggagaacatgaatgctttgaataggatgttcaaccttgagacagaaatatctgttttggaggagaagattcgagcaaaggtcgaacaaaaccagaaatgaaatctaacaccaatcagactgatttattttctcctttagaataagaggaaacatcctcaccttttagtattaatcatcctgcaatatttagttgcatagttgaaacagctgaagtcctccatgctgcgtctgcttggcctaactcgtttgcgttttttgggtcatgcgttttcactgtgttcttccgcatccatttgtctttgtattatacaaaatgaagtgttttggtgagcttcgtatttacatcaaataatattgttataagattgtccccgtatcgggaaattaattgtatgtactgagtttctaatttctgcaatagagacaagatttgggagttatgtattttacatcgatgggacttcttggtacgggtatttggaatcaaactctagtttatctccaaaaa

SEQ ID NO: 79368 - DNA, 379 bp, Glycine max
  Clone ID: PAT_MRT3847_42685C.1
cacaacttattaatataatcgtggctaaaatggtgataactatatatattacttttatttatacatttaataatagaataagtatattgataaaaaataatatatatatatagatatatatatatatatatatatacatatatttataattatgtattaaataatataaacatattaaagtttagagaaatagacataatatttacaagttgaatttaattacaaaatattaacagtgtaaagaaactttacattcatctcattagtcatttttcgtgtactataatattcacatatgaaagacatgaatatagcataatattaagatattgtctaatccttttggctaattatgtgtgcgtcatttaaaatattttct

SEQ ID NO: 79369 - DNA, 382 bp, Glycine max
  Clone ID: PAT_MRT3847_42686C.1
ccgagcgaaacaaaaacatatccatgtttttagagcggcaaataatacaacaaaaatattttaatagtctgaattgtttctcttccaacacaaaaaaggactaataatccccaatcaaaatactacgcataccaccaactagattgaaacttataacctccctagaggtcatagacgacttcatatgtaatcggggtaactggctacaacgttgccccctcgacacatgaaaccaggtttggaaccctgacgctgtctccttatgctaatctattcacccttgtccttagcctctgccttgagcttatcattcttaatcttcctaagacggatcttcttagtgcacactgatcgcttaacatgctccaaacgcacgtgaatc

SEQ ID NO: 79370 - DNA, 740 bp, Glycine max
  unsure (1)..(740): unsure at all n locations
  Clone ID: PAT_MRT3847_42687C.1
gttaattaacggaagccctgctactttttccagttatggatatcgcggtatctatcgtattgtgtgttgttatgcttttcccacattttttttaaatcaaataatgtcattgtgtctcgctgtccctctccttccacagtctcgcaatcattaactgtcttttcccactctcataagtctaacataccacattttccccctaattatccaaagttaaattataccacatcaccctactacccatatagtaattttccctcttgagatattttccaactcccactcataaaataaatcttttgaattacataaataacaaatattaaccattatattaagttaagaaacttgaagtataattacgtaaaattatgttatttatgtttttataataaatattttttctttttgattacataataatcagtataacacattagttagcaagactcacagaaatgagccttatttcttctaataaaacccttctttttatacacacaatgcaggtttttatcttaccctaaatctacatgtttaacaccgtgagaggattcacattcactcatattatccaagagatgttntaaaccacatcttcctcctccaagattcacaccatgagttaaaaagacaagccaacaaaacatgaagatactcatgtcaattctagggatggctttgtttttttatatgcacaagtnatgnttanagagagagagagagagagagagagagag

SEQ ID NO: 79371 - DNA, 344 bp, Glycine max
  unsure (1)..(344): unsure at all n locations
  Clone ID: PAT_MRT3847_42688C.1
cccttcttccggaaatcgngtaaaccgcgagcacaggttgctgttccttaaaaccgggaacaaaagcactcgttacttgatttcaagaatcttccaagttctgcctactattggacgaacgatttctcaagggaaagaaaatcactctctgtgctggccacagacttggtgaatcatatgatctcccactcttagattatacgctgcacactctcatattgggtataccgacttgcggtcagatttaaacgtttaatgtttcgctcacagcactctgataaaaagcaagtgcaagcaggcgacatcttggattaaaggtacgactctactatctggcataggac

SEQ ID NO: 79372 - DNA, 517 bp, Glycine max
  Clone ID: PAT_MRT3847_42689C.1
ggggcccgaattgggggaccctttttttttgaacccataggaaaacaaaaaaaatttttatcaagaaaaggaataattttaaattggaccaagttatctcaggattttttttttaaaacaacttacaaacggaaaaggggtaaaaaccaggaaacccgtatactcggggaacaggtaaaaactaaatctttccagcggggggcaaaatttcccaaagggggctaatttgaagcaaaaaaggggttctcctgccataaaaaacccccttattttgggaaaaaaacatccccccatgggggggggaaaagggggttgtttaaacctttttggggcaaagggatgcccaatcaaaccaagggggggggccaaaacaaaaagcccattcaaaaagccaatctccacaatttcatcaacctcttggtgggggaacattccgctccccgcaagaaaatccaaaaaaaggggcccgatggccccatctacgttaaaaactaggttatttgccttgggggggggg

SEQ ID NO: 79373 - DNA, 2387 bp, Glycine max
  Clone ID: PAT_MRT3847_4268C.1
cggacgcgtgggcggacgcgtgggcggacgcgtgggcacgtctcgccggccactcacttggattcgccggagcgcaatcgtaccagcgaacggcggttcgcaagagtttttttatttattattttgtgcatgttgaaacggcggcgtttggttgtggtggtgaggaatcgggcgagagtggggtagggatgtagattggttgatcgggggtagatggggagagtggttgtgggggtggcggtgacggtggcggtggcgacgtgcgcgttggcggcggtggtggtggggcggagagtgaggagccggaggaagtggaagaaagtggcgaacgtggtgagggaactggaggaagggtgcgacactagggttgggaggttgaggcaagtggtggatgccatggccgtcgagatgcacgctgggttggcatcagaaggtggttctaagctcaaaatgcttataacatttgttcataatctccctaatgggactgagaaaggaacatattatgcactagatcttgggggtacaaattttagggttttgcgggttcatttgcatggtcaacaatcgtctgttttggaacatgaagtagagcgacagcccattcctcaacatctaatgaccagcacaagtgaggatctctttgatttcattgcttcttcattaaaggaattcattgagaaagaaggaaacgcttctgagctttcgctggacagaagaagggaacttggattcacattttctttccctgtgaaacaaatgtctgtttcttctggcattttattaaaatggacaaaagggttttccattgtagatatggtaggaatagatgttgctgcatgtttgcaggaagcattgacaaggaaaggcctggacgtgcgggtggctgcattggccaatgacactgttggaacattagctcttggacattataatgattcagatactgtttgcagccattataattggcactggtacaaatgcctgctatttggaacgggttgatgctattatcaagtgtcaaggtcttcttatgatcaggactagaatacatggttgtaaatatggaatggggaaacttttggtcatctcatttaccaagaacatcttatgatattgatttagactctgaaagccctaatccaaatgatcagggttttgagaaaatgatatcaggaatgtatcttggtgacatcgtgagaagagtcattctaaggatgtcgctagagtcagatatgtttggacctatttcttccaagctttcaatgccttttatgctgaggactcctatgatggctgccatgcacgaggatgattctcctgacttgagagaagtagcaagaatccttaaagacatacttgagattcctgatattcccttgaaggtaagaaaagttgtggtgaaggtgtgtgatgtggtgactcgcagagctgctcgattggcagctgctggtattgttggtatcttgaagaagattggtagggatgggagtggtggcatcacaggtggacgtagaagtgaaatgaaaatgaaaagaaaagttgtagcaattgaaggaggtttatattctagctatacattgtttagggagtacttgcatgaagctttgaacgatatattgggggaggatattgccaagcatgtaactcttaaggtcactgaagatggatcaagcgttggagcagcactgcttgctgcctcgcattcatcctatgatgtggatacagtatagctatatattttatatgcatacatgtaatcatgtaaatcagaaagaattttttcccctcttttttattaatctctgtataaaggaaggttctgtctattctttattgtagggacgggagttaatattattcttgtcaattttttattagtaggaaatctttaatgtaattcttgtcaagtttggatgtgacacaacattctaaatatccattgattagggagaattggcgtgaagctttaaatgaaatattgggagaagatattgccaagcacgtaattctaaaggtcaccgaagatggatccggcattggggctgcactgcttgctgcctcttattcatcctaaactgtggatagagggtacacctgctataaaaatatatataaattgtttgatattttatatatatatatatgtatatatttatatatatgtacatatatatatataggcacacacacacgtatagccatgtaaatcagaatttatctccatatttaatatctgtgtaaaggaaggttatgtctattctttgttaagatcattaatattaatattattttagtcgattttttattagtagggttttatggcctttatctgttgtcactttagaacctctggatgtaatatagtattaggacttggattacta

SEQ ID NO: 79374 - DNA, 211 bp, Glycine max
  Clone ID: PAT_MRT3847_42690C.1
acatacactaatgtacaacccccaatataaccactactgcaaacatcagattcaaatgccttgattcatgaattgataactcttctatgctaggtatgttctcgtgaaaaaaacccgctatatacaacaaaaagccgggccataatgcccttgtcgaccataccataatttcaaggccttcatactaatctgactggacactacaatataa

SEQ ID NO: 79375 - DNA, 486 bp, Glycine max
  Clone ID: PAT_MRT3847_42691C.1
gttgccgcacctttataccgtaaacaaaagcagggggggggggatttcaagaatctctcaatatcttcctacttctttgtgtacaatttcttaagggaaagaaaatcactctctgtgctggccacagacttcgtgaatcattttctttgccactcttagtttatctgctgaacactctcctatttgatataggacttcgtgtcaaatttaaactgcttctgtctctttctcagttctctgtttaatttcaagttcaagctggcgaaatcttggattagtactcccactctcctatctggcataggatatcgtgggtagactttactatgactgtcctttcttacactctcttgttctcactgatccgcattgtcgttcaaagaggtcttatttgaaaaacactcggtcgatggtgcaaatgtttgcttccttaattttctatggagacaccaggcttactgtgaaaacaatttttacttgcagaga

SEQ ID NO: 79376 - DNA, 385 bp, Glycine max
  Clone ID: PAT_MRT3847_42692C.1
gcgcggaaacgagttcaatacatctttttaaaacataataaacaggggcccttaaaccagaggtgcaaagcccaagttcgggggggaccctggacaaacgggtgggactttggggaacccttcttaaaaggggttccccttggcaccccccccgaaggggaagggcaagatgccaagggggttccctctgaattttggaatcggccaagggacaaccattttccaattggttcccaaaaaaaataaacccttgggggtcggggggggaaccctccttggccggaattttagctttcacatggggaatagggtcaaagctttccccccccaaaggaaggggcccccccggcaaagtcttcacaaatatttgggttcccccccaaaa

SEQ ID NO: 79377 - DNA, 304 bp, Glycine max
  Clone ID: PAT_MRT3847_42693C.1
cgatctgatgagaactactatactctgctcatcatgatctgtttttactggatatatggaagtgctagtttcgtacgtctgtgccgggcagaacacctgattgtatgtcttgctttcaatcaatgactatagagccaccctacgaaagatgcttatagacgaaagcatacatcattacctgccgccgcaagaccctacattggatgaatagcacattgggaaaagcaagtgtactgctttctattagaagtatcgtcaattggatcgcaggtgctggaacgactattatccacgggtgcatgct

SEQ ID NO: 79378 - DNA, 291 bp, Glycine max
  Clone ID: PAT_MRT3847_42694C.1
gatctgtgtccaacaattacattgagtcatacgtgattgattgaccctatgcgacgacttctatatttgctgcacagtattctccataacactacaagtaccttctttttgaccaaaccattttacaagaaagacccaagcagagaaccttctaaccctgcagctgcgatactgatgtgaaaccgaaatgtcagaacgaaaaagactaagtaacataaactaaccgttgggtggtgttgttggtgacgtggtatttgatgagatgtggctgtctacactagcgagaaacga

SEQ ID NO: 79379 - DNA, 388 bp, Glycine max
  Clone ID: PAT_MRT3847_42695C.1
atcctggtcatctcagtggcaacaatagccaatatggtagtggccttggcggtctgggccaccagaaccctgctggtcatcagcagcagagtggttatggcggctacggtggcttcggcggaggctacggtggtggcagctacaaccgtggctggggcggcaattacggccagcactagacgccgctgcctgaccctaatggactgtctggccttgttggtccgccctcacctgatcctgatgaaagctttctgcgttgatggacgataacctaagcagtgctccttcttgggttatgtgttctcgcatgtctgcctcaaagtctctgtattatgacaagtttttttatctttctggtcccttaacatcagttcgcatgtttatgctc

SEQ ID NO: 79380 - DNA, 212 bp, Glycine max
  unsure (1)..(212): unsure at all n locations
  Clone ID: PAT_MRT3847_42696C.1
tccttcacctaccattttnaggggtctctctccgattcatctcncaatctaccaaccccgatcgttctgttttctctcacattcaaatccattcgctctggataatatgnntcctctcgtgatntctcatacnatcatttnatannttccnatatannntnatngttgtggtantcgnaaagnannatnacgagcatgctganaggngggtc

SEQ ID NO: 79381 - DNA, 239 bp, Glycine max
  Clone ID: PAT_MRT3847_42697C.1
gtgccatgaagccctgataattgccagagcgacgagaaactatttgcagcaattagcatatgggtgaagaagcatctgactgaagtgtgaagtttgagtgtatatatattgtgccatgccgatcaatatacatccaagaaatgggtttttgaagcctgctgaggacatgggatttggtttggagttcagaaagagcagcacaaaacagcatagcagttcaaagacagtgaaagacagtt

SEQ ID NO: 79382 - DNA, 281 bp, Glycine max
  Clone ID: PAT_MRT3847_42698C.1
cgacccacgcgtccggtcatagttcacaaatatgacacacaaataataacaattttcctccttacttaaatccaaagcacataaccagagcatactaaggaggaaaattgttattatttgtgtgtcatatttgttggctatgaccgggcgcgtgggctcggcgcgtggatggttggctcgtacgcagcaggcgtctgtgcgagatcttactcgagtaaattctaattctgtaatcctatgcatattaatcttctatttggcacgtaaaaaaaaaaaaacag

SEQ ID NO: 79383 - DNA, 371 bp, Glycine max
  Clone ID: PAT_MRT3847_42699C.1
ccactcgagaccccaaattactttataatgaaaagtttccaaaagtgaaagggccttggaactatgtatgtgtagggaatctaacgccaagccaacaggaaggcggggttttagtggaaacaaaaaccttttttttttcctatgaagaggtccgtcccccccctcgtgaattgtgattgttgctttacgggtaaaagtttactttggcacccggtgggcgtttctttttcagtttcaaagaaaacccctttttaacggaccctattgacgtatcaaaagggggtattctcctgggccaccgtgaaaacagaaacatgcgccgttctttactggtgtatcaaaaaggatacaatcgatggggttcccacaaa

SEQ ID NO: 79384 - DNA, 102 bp, Glycine max
  Clone ID: PAT_MRT3847_4269C.1
gcctctctattattggtctcctaggttgaacatgtctgtggtctatggaacaatgttggcaagggaagtcggtataatgggatccgtttccttcgggaaaag

SEQ ID NO: 79385 - DNA, 496 bp, Glycine max
  Clone ID: PAT_MRT3847_426C.1
tgctagaatagatagatcctctgatgatgagtcgacggatgatgaaaatgaagctgttgtgagccaaggttacggggatatggatgtggatgatgttctcaggacaaatgaagacctggttgtgaagagtggctcaaaattgttgccaggacatcttgaatactcgagacttgtgaatgcaaatattcaggaccctgctaatggtcccataaattcagtccagttccatccgaatgcgcagttgtttcttgcagctggattggaccggaagcttagattttttcaaattgatggcaagcggaacaccaaaattcagagcgtcttccttgaagattgccccattcgaaaagcctcttttttgccggatggatctcaggttatagtatcaggaagaagaaagttcttttatagttttgatttagttaaggctagagttgataaaataggtcctctggttggtagggaagagaagagtttggaggcttttgaggtgtct

SEQ ID NO: 79386 - DNA, 1078 bp, Glycine max
  unsure (1)..(1078): unsure at all n locations
  Clone ID: PAT_MRT3847_42700C.1
tgaaccgtccgtgcggccgtggcttatctgtctatgtttcttcaaagtgcagagactcaaagagagcaccgcttgaagattcagctgcaggctgctaagtgtatgtctttggctgcaaatattgaagaaattcaagtccctcttctctcggaccttcaagtgaaagacacaaagtagttgtttgagtcatagctcagtcagagaatggagattcttgtgctgaaaacacatatatagtaggtgcttctcgggcgctgtgagcagtttcttttgtctgtgcttagaaattcaagatttggtggttgtcttccttctgtgtttgccactgcctgtgagcatcttcttctgtctgtgcttttagacaaaggatgtgtgggttgtcttccttctgtgttggccgctgcaaaaatgctgcatgttatagaccagattcaacacagtggtgggatagaatacaaaactcagcttctaagtgttctcaaaattagcaaggagaaagtagatgagtgttataatgcaattctccaactctcaaaggccaataaatatggtcataacaacatcaacaacactagcaagcgcaagtatgagcaaatcccaagcagcccaagtggccgtaattgatgctgcattttgctctgatggttccaacgattcgtgggcagtggggtcatcattgttatattcaccaccagagcctcttttcaagaagagcagaacccaaggacaacaaatgaatttgtcaccacttaaacggttcattatcggaattgttggcacctctccttaattaattaataccctttcgcatctcttaaaaaaaaaaaaaaaaaatcattcatttaacatttcttgaagaggcaaggtggtggtggttcaggaatgagtggtctatctctgagggaagaggaggacagagttggcaatgaagaattgaagacaatcatcagcactctataatatgtttcaggcactcttttttaattgttcaatgggtctcatatagaccataccaaatttggacatattttatatcatattttctataataaattgggaanaattttgtttcatttgt

SEQ ID NO: 79387 - DNA, 583 bp, Glycine max
  Clone ID: PAT_MRT3847_42701C.1
agcaagcgcaagtatgagcaaatcccaagcagcccaagtggcgttattgatgctgcattttgctctgatggttccaacgattcgtgggcagtggggtcatcattatattcaccaccagagcctctcttcaagaagagcagaacccaaggacaacaaatgaaattgtcaccacttaaccgggtcattgtcggaattgttggcacctctccttaattaaatacccctttcacaaaccaaaaaagaagtcttatattttatttactgtggtaattagtcttccatgcatgttgctgaacttcagagccttcccctctatatgtatctcttcatttccaacaatgtccctcattcatttaacatttcttaaaaaggcaaggtggtggtggttcaggaatgagtggtctatctctgagggaaaaggaggacagagttggcaatgaaaaattgaagacaatcatcagcactctataatatgtttcaggcactcttttttaattgttcaatgggtctcatatagaccataccaaatttggacatattttatatcatattttctataataaattgggaacaattttgttct

SEQ ID NO: 79388 - DNA, 685 bp, Glycine max
  Clone ID: PAT_MRT3847_42702C.1
tacggctgcgagaagacgacagaaggggaagcaagcagcagcaagtgttgttgttaaggttgtagtagagaaatccagtgcgtgtgtgttgtagcagcgagagaaggaaggaggaaagatgaacacagacatcactgcatcgacgaagccagagtaccctgtcattgatcgtaaccctcccttcaccaaagtcgtcggcaacttcaacaccctcgactatctccgattcgtcaccatcaccggcgtttctgtcaccgtcggctatctctccgggattaagcctggaattaggggtccgtcgatggttacagggggcttgatcggagtgatgggtgggttcatgtatgcttaccagaactccgctggtagactcatgggtttcttccccaacgatgatgaggtagctcgctacaacaaaaaataatccttttttttcgtctctcgtttcaaaaaaaaaaagaagaagaagaagaaaaacccacttttgtagcattttttgaacttcaataatcacatttcgcctctgctatttgttaagcttttatttgtaacgactttacttcattcgccttatagaggaatgttaaaccttgcttgtttgggattctacaatttctcttatgtggaggcaagaccaatgtaatgtcatatttgagactctgtgggtcaatttggtatgaagtag

SEQ ID NO: 79389 - DNA, 748 bp, Glycine max
  Clone ID: PAT_MRT3847_42703C.1
gagagagtgtagtgttgttgaggttttttgtagcagaattcagtgcggtgtgttgtagcagcgattagaaggaaggaggaaagatgaacacagacatcactgcatcgacgaagccagagtacccagtcattgatcgcaaccctcctttcaccaaagtcgtcggcaacttcaacaccctcgactatctccgattcgtcacaatcaccggcgtttccgtcaccgtcggctacctctccgggattaagcctggaattaggggtccttcgatggtgacagggggtttgatcggtgtgatgggtgggttcatgtatgcttaccagaactccgctgggagactcatgggtttcttccccaacgatgatgaggtagctcgctacaacaaaaaataattcctttttttgtgctcatcaaaaaacaaaaacaaaaaaaaaaccctcttttgtgccagtgtttgaacttcaataatcacatttcatttcagttatttgttaagcttttatttgtaacgactttacttcattcgccttttagaggaatgataaaccatgcttattttggatttctattatttatcttgtgttatgtggaggcaaggccaatgtaatgtcatatttgagactctgtgggtcaatttggtatggaagtttgtggattccggtgtagggctacaatgtagtggttaattgaatttttcgttctctttgaatctagtgcctagggatttaaaaaaaaaaaaaaaaaggcccct

SEQ ID NO: 79390 - DNA, 165 bp, Glycine max
  Clone ID: PAT_MRT3847_42704C.1
ctcgagccgagtcggctcgaggtcgcctatcactcacatagaaagtgggatcacgcgagaggtctgattaatagttttctctgtgaaattgcaaagaaacagcgacacttattatcatcgccaacgctggcattaccgttttcgaccatgctggcccttttcctt

SEQ ID NO: 79391 - DNA, 450 bp, Glycine max
  unsure (1)..(450): unsure at all n locations
  Clone ID: PAT_MRT3847_42705C.1
gacgaattnnacagacacgctgacatttatagtacatttttcccttcacattaccattgtctatttggtgaaaacaaattcaccgcggacacactgcaaacgctgacaaacaatctatgctacacttatgctaggtgcacacgatctgtttcaattgtgccgcctgcttattatgctcatctagctgctttccgtgcacggttttatttggaacctgatacatcttacagcgggtctatggctggaaccggacggggaggtcctcttggaggccgtaacactcgggccccaaataatactgctgttaggcctgtccctgcattgaaagaaaatgtgaagagggttatgttttacttctgagtctcactaattgaaataatgttttaacttatattaatatccgttgccgttcgtttgaagattcttgcaaacaaagttattttttttttt

SEQ ID NO: 79392 - DNA, 235 bp, Glycine max
  Clone ID: PAT_MRT3847_42706C.1
gcgggccgcccttttctctgtttttttacaaaaataaatagtggcactccatgttcctttcttttgaaaaaaacctttgcattatacaattcttcttgccctaatttcccttttttttcccatcaatttaagattatacaggtttggtgagtggcaatttgaaagaacaaggcaatcaccatctctacctcacgatttcaacagttacaaatttagcaaaggaaactcaaaacct

SEQ ID NO: 79393 - DNA, 1040 bp, Glycine max
  Clone ID: PAT_MRT3847_42707C.1
gtcttctgttcaaacttcaaaatccatgtcgcagttgcgaaaccgcaacacaaactgagatagcgccgccccgcagcagttgcgaaaccgcaacacaagactgcgatagcgccgtcccgcaccggggcgatagtggacgcgacggccgctccttcaatcctccccgcagcagaggtcattgtcgcggcaaggggccgctccgctccggcgcgatacttagatttgcattagcatcaaatgaatgcgtacaggagtgatttacatattgcatatttaacctacttttctgtgtattcaattaataattcattgttacattccattgcaggaattttgggtcatcattggtatacgcatcatgacttttttcagtattgtaggttctcctactacttttcttgctactgttattttcttgttttggacatatgttccagaatcatggttacaatctaatgtcatctcttactatcctagcagatattgggctctagcagtaccaacttatgtaatggtgaccattgtattgatgctgggattctacattggccttaatttcatttcaacaccttcccctgcatctttaaacacagtttttgatgaattcagtagggatcctttgagtctcgagtgtaccctagaagatgagaaacccatcgagcccatttcagatattggtattgacagaatcaatgatattatgttcaaaaataatgcagcctaacaattaaacacatctccagtgattggtgggagtcgctgccaaacaagtgctgctaatttgggttcttgtacgagaggttatagctattggacgtgaaattgatttagttgattttgtgaaagaatgatttgattccatcttactgtataatttctttttaatgtcaatttttcgctccggctttttagtgcttatgtctgcttatttcagtaaactttgaaccttgcttagtattcacataaggataaattttccttttatatacttccggatgaatgaattgtcaggccacggtcataattatttattgaaaaaa

SEQ ID NO: 79394 - DNA, 626 bp, Glycine max
  Clone ID: PAT_MRT3847_42708C.1
gtgtttacactgttcctctgggaccttcccttcacgctattattagtgtaacgcttctctttctcttgtgatagtacaagtacacgctgtaagcataactaaaataagggttttttttttctgtgcttgttctttttctcaagtgctgagaagatatcaaaatggaagatttcaagttcctccaaaactagaaatggctagctagtgtgaatacatataaactcgagtggagtaactgcacagcaagcgcaaatagaaaaataacatgctgcgagtacccttaaaaaattgtacactgtttatgagcatctacgcaaggaccataaaggaagaaaaaagaaacctcacgtttcatgcaccgcgtggaatggaagatacaatatgaagtgatcatcgtaaagcttccaaaaacgatagaagaaacataaataacaccaacaatgatatctatacattttttttttttacctggaagagacggggtttaaggctctagcaaagccactcatggcaccataacctttgaaactaaatcccaagcacccaaacaagccctgcctataaagcaaaaaaattttccttctcaactcctccccttgcgctctgttaactttataatacaactc

SEQ ID NO: 79395 - DNA, 1151 bp, Glycine max
  unsure (1)..(1151): unsure at all n locations
  Clone ID: PAT_MRT3847_42709C.1
gcgagggacccaataatccgaagcttgaaaatggtagaaaaccatccacgacaaatgtgaactgaactcactcattctccttatattcttgactttgccctctctccaactccgctgcgtttaaccttcctttttattagctttactaccctccgaaacgtgtttgaaccctcatacatactccaattataagccaccaacaccaactcattcatttcaatattctctcccctcttctggtttccaaaaacgaaccatgaaattcaagtcaagaagaccacaaccacgagcactagtagcattctttctcattctgtccatcttctctctaccggcttcatcatcatcatcttcttcttcttcttcttcttccattaatgacgtgaaatcaagcaccatcattcatcaattcaaggaagcccccgaattctacaactccccagaatgcgcctccctcaccgacaacgaggaagacagtagccacaggtacatatgttcggaggaagcggtacacgtggcaatgacgctggacactacatacatccgaggatccatggcggcgatcctctcggtcatccaacactcgtcgtgcccgcagaacacattcttccacttcgtctgctcctcgagcgcgtccctcctacgcgccgcgatctcccactccttcccttacctgaacttccagctatacaccttcgacgactcccaggtctcgggactcatctcaagctcaatccgctccgcactggattgccccttaaactacgcgcgctcctacttggccaacctcttgcccatctgcgtgaggcgcgtggtgtacttggactccgatctcatcctcgtcgacgacattgccaagctggcagcaacaccactgggcgaaaacaaggtcctggctgcccccgaatactgcaacgccaatttcacctcgtacttcaccccaacgttctggtccaacccttcgctgtctctcacgttcgcggataggaggccgtgctacttcaacacgggggtcatggtcatcgatttggagcggtggcgggagggggattacacgacaaaaattgaagagtggatggagctgcagaagaggatgaggatctatganctgggttccttgccgccgtttttgcttgtctttgctgggaaca

SEQ ID NO: 79396 - DNA, 200 bp, Glycine max
  Clone ID: PAT_MRT3847_4270C.1
aaaaggggacaatggggtgtcgctgcaggttggtttgagtgcgtagagcatacgtcattgcgctcacgatcttttgtgcgaacaggaccgtttggacgtcctttcaggcatcggtgagttcgtgctcgagagcgtctgtagcattctgtgagctggtgagatctacgagctcttgtcagagatgtgatcacttggtggag

SEQ ID NO: 79397 - DNA, 406 bp, Glycine max
  Clone ID: PAT_MRT3847_42710C.1
ccaagccttcggatcatcaacagtgctgattcccctaactaccctcgattttcccttctgtacaactctttgggacatctcgatgtcccttgtaccatatgtgtcttcataatccagatactgtctacgatctacggactctggctgaattaaccatcagatgtttaatggataatttctatgacgattcgcaaccctatgcgacgaatccggctgcttcactccttctacgtcatgtttctatactgggtctacgtcttctcatgaactaacttcctgtcaatcccctaccctaattccttcaatttcaccattttttttctaattaatgcgctttgcaaaatcctaatttctgtatcctaacaaaaccccctaattcctacaaatcccatggctttgattccgc

SEQ ID NO: 79398 - DNA, 540 bp, Glycine max
  Clone ID: PAT_MRT3847_42711C.1
aaagagatactgacatgtatataaagaaaaaaacacaagaactcgcttgtgtttggttggctcagcagtcacagtggacttcatgttcgttcaagtgcagtaaaatataaaacattggcatctttttgtctttttgataaagatagagcaatgatatttgctcatttttttcagccgatcgacttccttgggatcataattcatatataagaattgaatggctgtgaacttagaaacaaaagtgctcttccatttttctaaaatataagtcacatgtcacatgcccaaagctcaaaagctagggtgactttttttcttgctgtgcagtataaaccgaagaatatgatcgccggtcgtagggaatctgagttctgaggaccacattatggctagaagctacaagttaggtaaagggcatgttcatgaaaagaaaatggaaaagtggatttagagtaatcaaaatgtgcatatggtagtttcattttacaagaaaaaatgatttttttattctttgattgaattgaactttggaatgagagg

SEQ ID NO: 79399 - DNA, 365 bp, Glycine max
  Clone ID: PAT_MRT3847_42712C.1
gattactgttgattatttttccattggaaaggaaacaagcggaaggcttttaatgggagcggggaggttccctttatcatcatttcttgtccaaaacaaggatgcttctatttcatctcttccatttgatgagttgattgataattcttatggatttgcatgattatttcctgaacacaaatattaaattgttaaaaggctgtaagagatgaaacatatattttgaattacaggagattttgtaaactataccccttcattaaagaaatcatatattggtattttctgtttccgttgcttacatatactattttaaactctttttatattttccttacttaacctttttcttaatgttattatta

SEQ ID NO: 79400 - DNA, 123 bp, Glycine max
  Clone ID: PAT_MRT3847_42713C.1
atggaggtctcagacatggaacttaatgagactagtgttgaaatcatttggatattcatggatgccacccctcctatgttcgccgcacaatcatgtggtgactttgtgataccagacaaatag

SEQ ID NO: 79401 - DNA, 269 bp, Glycine max
  unsure (1)..(269): unsure at all n locations
  Clone ID: PAT_MRT3847_42714C.1
tttatttnatgtgctaggctcccaaatttcatttgtccaacattttttggcagttgtagcattatttcctttttgatgcatgtatcatgaagcattatctgcgtcntgtctttntcctgtggattttntntttttttgaatgccattaggggcccggggggccagaaatnagntcaanngtcntnngggcatgngtnaatnatngntncccaagatcgcgaagnngcgngnntcnagttgtgtcgcncacaatgttgnatggngtgttt

SEQ ID NO: 79402 - DNA, 393 bp, Glycine max
  Clone ID: PAT_MRT3847_42715C.1
ctccgattgagaggataaagtctgtgattcaaaaaccaaaccagttgttagagctgggtcggataggcaatcaacatgattggtcccgacccagtttaagtagttggatgtgagtgcgcttcttcaatctaggtaagcgaaagcaagcagtagatcgagaaaagaaagaatacggattgcaacctacagatgaagaatagaattaaataagaagaggaatcaatcgttcagtgatcgctacgcttgattggggcaggctacccacactgttttggctaaaaagccatctccttgcctcacagtttacctactccaaagtgaagacaaaaaaatctgtctaaatagctccggcaggggagagatccttaccaatacattttagatccggcttaa

SEQ ID NO: 79403 - DNA, 189 bp, Glycine max
  Clone ID: PAT_MRT3847_42716C.1
cccacgcgtttttggacgtttttgcggacgcgtgggcggacgcgtgggctggcggtggcggatgcggcatttggacgaggcggcgtaggtggtgcatgagccggaggtggcggtggaagtggcggcggccgaggtgccgttgctggtggatctcatggtggtggatatggtagtggcggaggatcatgc

SEQ ID NO: 79404 - DNA, 509 bp, Glycine max
  Clone ID: PAT_MRT3847_42717C.1
ggctcgagctttttactctttcaccataattctctgtttcttactagggtatctagctccatagaagtaggatctgctacaaagctaggggatgactgtcccaacatcacgagaccattgatttcgattgtgtgggagcatagcagcagattgggcttctgcatatctctgcaatgtctcttgacatcatctgaccatgcgtcgatttcaaccgcttcacttgttctgagttgagcggctttactgtctctacgttctatcatgaactcaatcttatataccggaccggccacacccatttccttcgttattcactgcatgttccaatccttaatcagacttgtgcttaactcactggcttagatccaacaacagggtgtgagatcagatcaaagtgaagcccacccttctaggctatgggatcatcgacacagccacaactacgactgtctacataaccgtttggatctgatggaggacatccccatctaatccatgatatgcaacgg

SEQ ID NO: 79405 - DNA, 203 bp, Glycine max
  Clone ID: PAT_MRT3847_42718C.1
acgcctagggtttgtgttattttttttacccaacgagcacgaggcatccaattagttattcattatcgaaccagacatccttcacagggaaacgaaggccacttacagtgtcatgctcactccagcatgacggactcgagctaatcatgagccgcttgcatctttttcacagctgactggaaaatggtaaactaaaaccccgg

SEQ ID NO: 79406 - DNA, 219 bp, Glycine max
  Clone ID: PAT_MRT3847_42719C.1
aaggaaggtataacttggatttcaatagctttagagtccctatcaaaacaagtaaatcctttcaaaaaacaaaaaaaggggtaaaaaaaaggaggatattattatattgggtataaccacctaccaattaatcacccttcaccacccttcatgaacaacttggggcgttattgtgttcttgatccacctcaaactcttcctgagtgagcccttcatttt

SEQ ID NO: 79407 - DNA, 324 bp, Glycine max
  Clone ID: PAT_MRT3847_4271C.1
agacgccaaaacgacagacaggttaatctacaataattataagaactataaagtgtagaagatattggatagctatacgatggccgattaaaaaataaatattcactaaagaccaaaatccaaaattccttatgaggcgatgcaaatacaaatggacagagatttgtgcaccatactgaagggcaagcgcatagaaatgggcattgcttgtctaaagggtttacttgactaaaagactggaacacttcggtcatcggcgttgtcagtgttaggtctcgatttcttaatatgttccacagtctatttctcacgctatcaaacttt

SEQ ID NO: 79408 - DNA, 198 bp, Glycine max
  Clone ID: PAT_MRT3847_42720C.1
caattctctctctcttctctttctctcttcaacattctctctcaccaaagcaccaccccacacactgagagcgaggggaattcactttttgcaagggcggttcttcttcttggcacaaatggtcggtctctgctctgcgctgtatcaaagagcttggtcacacagaccgactagattgagtaagacagtgcactgcac

SEQ ID NO: 79409 - DNA, 369 bp, Glycine max
  Clone ID: PAT_MRT3847_42721C.1
ggcacgctatttatgccatgattttcttacttgatttacagtatcttttaacttatttaatacattataccaacccaaccaggagcaagtgccacaacccaaggacacttatcgacaaactccgaagcaggacaaggaaggaaaaaaccaggggcgatacaaaaatgcaatttatgccacaactggataagacgcacaagttgcaagaccacacatgaatcagcggaacgccagaaggaaggagacattctcaccccaacaaaaaccccatgaatttatttatgagccacccggggagggggggaaaaaaaagacaccccccagggagggcagaaagagacacatccggagaagggccagcgcaaaagg

SEQ ID NO: 79410 - DNA, 153 bp, Glycine max
  Clone ID: PAT_MRT3847_42722C.1
taatttaaaaaaaaccaaacccccccaattcatattttcacacttaattaaaaactttcatcccttgttacaaatgcttaatttgctaataccttccctattcataaaaacaacttcctaactatacacacttaaaattcttaaaccacacct

SEQ ID NO: 79411 - DNA, 326 bp, Glycine max
  unsure (1)..(326): unsure at all n locations
  Clone ID: PAT_MRT3847_42723C.1
gagagaactagtctcgagtttttttttttttccctgccgttgttgaaaaaatcaaagggataaagttgctaaagatgaggttggggatgatgaatctgtgttctgttcaatgaagatgaagagtgattgacgaatttcttaaattccacctattttgctggacttcaaattctgtatctaacaaaggatgataaaattgaagaattcttcaaatcctcatgttaaacatccaaacagaaaataccctcaaaatattacctgtgtaaatgcttcatccaaaacacaggtaaatgttgcctatgttttctctattctgcaaaaannaa

SEQ ID NO: 79412 - DNA, 457 bp, Glycine max
  Clone ID: PAT_MRT3847_42724C.1
gacacgggtatggcaacctcttcttaaaataactatgtcacactatcaatacagagcaccatgtagctccagaaaggaccattgactctaaacaggaatgcaccctacaacatataatctttgacagaaacacacccttaagatgagaaaagcttccctttaacatattccaaaccctatgaacaaccaatggcatactatatatataaaatgctcacataacacaacttccatcaaatggcaacagctcacatgacttaaactcttggttcactgccttcaatgatcaggaacctatcggtccttaggatcttgatcctgtggaacaatctatgtccagctaccactacatactggatgcgagactgatttccgccctcaggaattgtcccctcactaattaccctgaggattggatcagtgctcagaatccatcgatcacactcctcacaacgcc

SEQ ID NO: 79413 - DNA, 314 bp, Glycine max
  Clone ID: PAT_MRT3847_42725C.1
aaaaggagggggccaaaagcgccaaaaattaaaaaaggggggggccccccagggggagaaaccccccaaatatgggcgcaaagatttcccctaccccccaaggggggggtggggaaccattgaggggcccccaaccagggggttctcttccccccgagaaaaaaaaaaggcccccacgcatatacccacttcggaaaaaaaaagccccttgagaaaaaagggcccaaaaaaaaaggatttcgggacaagaggcctaacgcccggacaccccctgcggagagaggggggcgggggggccaagggaaaaacccttg

SEQ ID NO: 79414 - DNA, 455 bp, Glycine max
  Clone ID: PAT_MRT3847_42726C.1
ttttcgggggtcgacgacgctcacttgtcggggggcgcccttttttttttttttttgtttctttttttaataagcacgcattcattaatttccattgaagtccgaaaacagaaaccaaaaatacaggatgaggaaatctgtataaagctaaaacaaatgggaatgtcgtttaagtccaacaaacaaagtgggggggctacagatgctttgcaaatttttcaatgacttacaaccctgggggcttgtaagcgatgaagatgatgcactgtacttggcgaacgtagggaaatacaatgatacggatgaagccattggggtatgcatgattagcctctcgaagcttcttcaacacctgagaagcatttgtgcggcctagcatttgcagggtccacatgggccacaagcgtgcatcatagaatccatgagacctgtcgcgctcactgaacacaaaaccg

SEQ ID NO: 79415 - DNA, 355 bp, Glycine max
  Clone ID: PAT_MRT3847_42727C.1
acatgataaaaccaaacgattctttatgacataactttccaaagacacggattccaacagcggaaaaatacactgtggcctaactggaccagaccccttgcaagaacaataaacaatagcgggaactctccacaaacacatgttgaaaatcataatctttaaagaacctaactacaattgttcacctaatcgctcaattactctctccactccaaacccacatgaggtcaagacaagatcagaaactataactgaaatcagccccaaactttagctggctcactgagagtcactctccatttgttggaacacgaaatggaagacagacctttgcctgaagataggaggtggatcc

SEQ ID NO: 79416 - DNA, 251 bp, Glycine max
  Clone ID: PAT_MRT3847_42728C.1
caagagaatggctcgcgcgggcttaatcttttttgctgtgttattcctttaacacacccacttctgcaatttgcattgttcatagtatgaattgttatgaacttctacaaggaatcatgccctcaggctgaagacatcatcaaagaacaagttaagcttctctacaaacgccacaagaacactgctttctcctgactcaaacacatcttccataaatgtactagccaaacacaaggctcaccactattgct

SEQ ID NO: 79417 - DNA, 1815 bp, Glycine max
  Clone ID: PAT_MRT3847_42729C.1
ctctctctctctctgtatatatatatgcacgcaaatatatatgtgtatgaatctgcacttcatttcaaatcccaacaaaaaaccaaagtaatctaacaaagtaagcacaatgagggagatattgcacgtgcaaggtgggcaatgcgggaaccaaatcggttccaagttctgggaagtgatatgcgacgagcatggcatcgaccccaccggaaagtacaccggcgacgaggcctccgatctccaactggagaggatcaacgtctactacaatgaagcctccggcggaaggtacgttccccgggccgtcctcatggatctcgagcccggcaccatggacagcatcagatccggcccatacggcaagatcttccgccccgacaacttcgtcttcggccagtccggcgccggcaacaattgggccaagggccactacaccgaaggcgccgagttgatcgactctgtcctcgacgtcgttcgcaaagaagccgagaattgtgactgcttacaaggttttcaagtgtgtcactcacttggaggaggcacgggttctggcatgggaacactgttgatatcgaagatcagggaggagtacccggacagaatgatgctcacattctctgttttcccatccccaaaggtctctgacacggttgtggagccttacaatgctactttgtccgttcaccaactagtggagaatgcagatgagtgcatggttcttgacaatgaagcactctatgacatttgcttcaggaccttaaaactcaccactcctagttttggtgatctgaaccacctgatttctgcgacaatgagtggagtgacatgttgcttgaggttccccggacaactgaactccgacctgaggaagctagcagtgaacctgatcccattcccacgtctccacttcttcatggtggggtttgcacctctcacctcacgcgggtctcagcagtacgtgtccctcactgtccccgaactcacccagcaaatgtgggacgccaagaacatgatgtgtgccgccgatcctcgccacggccgatacctgacagcatcagccatgttcaggggaaagatgagcaccaaggaagtggatgagcaaatgatcaacgtgcaaaacaagaactcatcctacttcgttgagtggattcccaacaacgttaagtcaagtgtgtgtgacatccctcccaagaacttgaagatgtcgtgcactttcattggaaactccacctcaattcaggagatgttcagaagggtgagtgagcaattcactgcaatgtacaggcgcaaggccttcttgcactggtacaccggggaaggaatggacgaaatggagttcactgaggcagagagcaacatgaacgatttggtagcagagtaccagcaatatcaggatgctactgctgatgaggatgagtacgatgatgaggatgagtacgatgatgaggatgaggatggggagcatgctttcgaggacccgtaaattgttcatcactaccttgttttaattactaaatttgctgctagtagtcacgtatccaaggttttaaaacctgttgatatcacaaacaaatcctgttgatatggtcccaattgcgatcacaactgcggaaagtattttaaaaccttaatgtatctatgcctgtctctgtactttttttccattctacctatttctcctatattttagttttaattgagtattaattacttttgaaattgtttgatatgttccccgcagaccatattgttggttgttgttctataatgtaagtgtatgaataagaaagggttgacttatctagaattcaaaaa

SEQ ID NO: 79418 - DNA, 212 bp, Glycine max
  Clone ID: PAT_MRT3847_4272C.1
cggatattgtgttatagaccttgattctcatataaagaggatcgtctaaccactagtattactgcatatcatatgagtcacagtgcactatatcttgttgcatccctcatcgggagtaataacgacattctggcgctgtacgaatgattctttgtcaatgcaagcgacaccaaaacgctagatgccgagcaagtatcagatattgagggata

SEQ ID NO: 79419 - DNA, 335 bp, Glycine max
  Clone ID: PAT_MRT3847_42730C.1
cctcactgataccagagcagaagaaatatgtagggaagaagttgaaaacggactgtctatgttccatacattggagaaatggagcccaagccttagaggcatgactttaggttggtttggattctttgctggggaatcccattacacgcatgagatttggagaacattaagaagattgtgaggggggttggtgaaatgttggatattgatgatggatgtggaagaccttcaacgcttggatagagcacgagtgcccgacaaaacgtcatgacaccccaaaatcaatcacactataaagcagcagggggagcctgatagggtcctcagaggaaata

SEQ ID NO: 79420 - DNA, 401 bp, Glycine max
  Clone ID: PAT_MRT3847_42731C.1
ataatatcatttatattttttgttgaacttattgtgctatttgcttaatggactcactcacgtgcagattctggagtttaaactttacattttaccaaactatcctttatcatgtgctcagaaagatcactggtaaaaccagaaaactttccatacacatggggcactgatagacaattggaataaaccagattagtttaatgtcaatagctcttgattacttctttactgtaatctaatcttttaccataggtaaacaacttattttgggatctttgtaacatcagaaaaatcagcataacatacacttggttaaacaattgtcacaaatacctcttttttgccaccaagctgaaatatatttcaattaaaacaaagggggttccgtgttttcaataaaa

SEQ ID NO: 79421 - DNA, 764 bp, Glycine max
  Clone ID: PAT_MRT3847_42732C.1
tttttttttttttctgcaagctacgcgagcaatcttatttaattatattttgtaaattaaaataattttttctcctatatatctataacatctgctagttaattaacacaggatttttggggaaagaaaatacaattgcaagcaagtgactttctatcaaagctcatattaatatatacgtgaattgtacagcaattggatcaccatatctatgaagagagaaacacatatagccatgaaattaactttataaagttgttgagatcaagccttgaagcaggtggcaacgaggtgatggtggtggtggagggacctctctgtatgaatcaagtgttgaacgttcttaaattccgccacttggcaagggatagttatggttcctttctgtgaaaaaccatactcttcctctgcctccttcagaagctgaacaaagagagggtgcttcaggtaattcacgggcaccgttactttctgctgctcttcgccttgacccaccttgattttcaagcaaccttttcgtatctgtatgtcttctttgctcaccgcttgccttccctcgtgctgaccttcatcgtatgtctgcggaacttgtttgaaatttaagcccaacatattaattaatttgaagcaaagatcaaaatggttcaagggagaaaaaacccaagaagccgaagctgcgagtgctatctcgatgcatgaaggaatggatatgatgagggttttatagtatattgaaggaatggataggaaccatctgggaacgc

SEQ ID NO: 79422 - DNA, 684 bp, Glycine max
  Clone ID: PAT_MRT3847_42733C.1
ctgcataaaaatcaaatttgtgggtcctgtcctgcgccggtctctactagaaagtcgatacaaatggttttgcaattttcctccgaacaaaagcgtcttcttggcttgggtcgtgtgccttcgcttcgccgtgggcttcttccacgaacctccctctccgatcagctttaccactgtctcaaaacgtttctgactgatcctgattctggatggtttttggtccatggattggtaggaactggcaaatccgaactcgtgaccaaagttttatgggaacgacccgagctatgtttcgcactcgtcgaccgaatcctttggatcaccgaccgacgctttcatccggctgaattgagtcaattggcggccgacactcttttgctggcggtttcactaaactctacgacgaacttttcgcaaatggacgagtgcgatgcttttttcggatgctcgcaatcggctggcaaaagcagggaactttcgtacgtcgcccattctctgcactctctgctcaacgataactttgcaaaaacccttctgatcgtagacggagtgcaaatggccgatagtgtcaaattcttcgatcaaatcaaaggacacatgtgcaaaattttggccaccagcaccagcagaacacttttaatgggttggaaatatacaacatttagaaaccgtcgacatagctcg

SEQ ID NO: 79423 - DNA, 296 bp, Glycine max
  Clone ID: PAT_MRT3847_42734C.1
ctcaatcattaaaaacaaggagccaaagtgccaaacaaactatttcctactatagtaatccaaatatatttaagagtttttaggaatgaaatgtcaaaccctagatccaataggtatattaatccataataaaggcccaaataattacacttgaagtttaaaataatagaaaaccatatcttaattcccacattaccagatgcaaaaaaaaaaagagtaaagtcccacccttcaggaaatctagagtcatatgcaacaacaattttgtactaactttaccatcccaatttaatgca

SEQ ID NO: 79424 - DNA, 194 bp, Glycine max
  Clone ID: PAT_MRT3847_42735C.1
aatggctcccattggtaaaatctactcttactctaacaaccccagaatttctaaggggctggttgctttcctctacaacagcctcctaatatacgtccccactgacttcaccattgtatctttcaagaacccccaatacctcaagaaatttcccacccgtaaagtcccccctttctaaggtgctgtttgttttt

SEQ ID NO: 79425 - DNA, 1005 bp, Glycine max
  unsure (1)..(1005): unsure at all n locations
  Clone ID: PAT_MRT3847_42736C.1
ccaaaaaagacattgttgcttttcattttggcatcacagagtatcagagagaaagagagagagagcggttttgcagaaaaaatccaagtaaatttaaggagccaccactgttccaatcagcccctttcattttgcagtgcccgtttattttttcgtgtttgcattcaccgttccacagaaggaaaaaagagtgctttgttccatctctttctgtggtgtgtctcaagataaaaagctcactcactcacagcagcaacaacccttttaccttaactcttgaaactttgttcagagtttggattttgagagagcatgatctgatgaaggagtgtggaggctctcttgggggagagggcaaggaagaagaggactacacaaaacaagtgttgtctttttgaaccccaaaaaaaaacgtttttttttgttttgttgttatggcactttgtatgcagagtcagcagagagattcagcatcaaacaagctgctcatggattgtggcaagtatgtgaggtacacacctgaacaggtggaggctttggagagggtttatattgaatgtccaaagcctagttcttccagaaggcaacaaatcattagggagtgtccactccttgctaacattgaaacaaagcagatcaaagtgtggttccagaatcgcagatgtcgtgaaaagcagcggaaggaagcctctcgtctgcagacagtgaatagaaagctgtctgcaatgaacaagttgttgatggaagagaacgaccgactgcagaagcaggtctcacagttggtttatgataatggattcatgaaacaacaaatacatactgcatctgctactactactactgacaatagctgtgaatctgtggtagtgagtggtcaacgccaacatcaaaaccccaaaattcagcatccccagtgggatgccaacaacccagctggtcttcttgcaattgctcaggagaccctggcggctntcctttcaaaagctactggaactgctgtcaact

SEQ ID NO: 79426 - DNA, 721 bp, Glycine max
  unsure (1)..(721): unsure at all n locations
  Clone ID: PAT_MRT3847_42737C.1
ctacttacctttttttttttaattaaataaataaatttattatttcatatatttaatcgttgcatctttctcattccatttccacaccctttgctattaattaatcctccttcttcgatctgcttctttctcagtttcagagctcctcgtcactccaaaccaaaccttacttttctctcttgataatctctttctttcattttttcttctgaaccctaaactaaaccattatttagctcgtgtccttttcaaatgcactttctcttccaatgaagaggtgaaatagtagtaagacataagagagagagagagagagaaaggtctgaaaatgcgagtgaaggaaatgcacccgttgtgctgcatctcgcttgagagtccggggatcgggagcgactcgccggagccggaggcggcggcgctgtcgaggacgaggagtcttccggcgggcggatctgacggcattgcgcggcggggatcggaggccacggtggccggagttctctataagtggaccaattacggcaagggatggagatccccgctggttcctcctccgcaatggcgtcctctcctacgccaagatccgctggccggaaaacctcaacctcctctctccggtcgacgacgtccgcctcatcggtgagaagtcaccggcaaccgtctcgccagagaagccgcatccgncaccgtgcgcccatctcgtcgttcagaagagagcagt

SEQ ID NO: 79427 - DNA, 165 bp, Glycine max
  Clone ID: PAT_MRT3847_42738C.1
gcaacacatcgcacacaatctctggactgtcttaacacaaaaaccctaacgttcttctcgggtgtgtagattttcgcgagggcgaaaggcaaatccgacaccaaagccggctatagcgctgatgaagcgcaagggcgcaggtgctggaaggaagcaatcgaagaa

SEQ ID NO: 79428 - DNA, 539 bp, Glycine max
  Clone ID: PAT_MRT3847_42739C.1
caaattttggtttatcccaaaaacaatcaaaaaaaaaaaacaaaaaagagaaagaaaaaaacaaaaaggaagaaccagcaaagaacatggaaagaacagaaaaaaacaaaaacaaagggccggccgccccaaaggacccagcctaaagaacccgacccgccaagagcaaacgcctttgatgcggggcaccaaaccagaatacacgggccgagaatagacagcccccagaccgggaaaccccgggggaccccaaattaaaaagccccgcacagacccccctattgaccagtggggcaacaaaacagagggccgggaccaggcgcccttccaaaccataccccaccacggaagggcaaaggggaccccccctgactggctccataaagcccgccggggggggggggaccccacaaggttaccggtccattaccaagcgccctagcgcccgcccctataaatttcaacccttccttcccccccagaggcccggattttccccttgaagccctaaatgggggccccccttgaggtacccaaat

SEQ ID NO: 79429 - DNA, 874 bp, Glycine max
  Clone ID: PAT_MRT3847_4273C.1
gtcagattcgagcaccctcgatgtagacttgattctgcaattccttgcatgcctgcagattagggtgagtgcctatacccgcgggagtcgctgtatttgctagagcaaggttgttcgctagctcgagccaggtgtgtggttcttgaacattacaattagaaaaggtaaaataatgggacagaatttccgaacatttatagagtaatgtttgcggggagtccgtaggatccggattttgaatcctctttcttcccaatagagttgcagattcggctcaaactgctcaatgcgggcaatctttctacctatttgtttggttaagttgatcttcgggaaggccgagccccccttcggtccttcttgtaggttaggttgttacgggaaagggcttcggttgagttctgtttcgacggctttagtttggaggatctgaaagacttctgccggtgcaagcgatctcatagatggatcacagggaataactcaagataggaaagcattaatcgccggccggcaaacaagccttcccgtagtctttccgcctatgtcccttaggctctctgtcctgctccccgaaagaggaaagcaaacaagccaccagcacttcaatcagtaaagctagccactcaactcgctctcttcaaattcccttttacattttatttcagatcctccacctagccaagtaggtctcaaaaggtttaccccgcatatgcttagtcgccgcaagctccatataggttactttgcgggctactgaatagaatcttcggtgaaaggcgtctaccatatcggcgcaactattgatcgagtgcgtgtataccacgtgaatgcgacacccgaaagactagcagaaaagtgcttcagcacaaac

SEQ ID NO: 79430 - DNA, 873 bp, Glycine max
  Clone ID: PAT_MRT3847_42740C.1
tttttgcaccataactacaaacatcaatatactacttttccatatgaaaaattgaatttaaacattacaacttcatccgtgtggcacactggcacgtgctaacacacaacataccccaacagcatgaagcatacagctgcagtgcatattacaactcaatagcccgtggaaggaatgtgcttccgtgtacagctcctagttagcaatatatgtacaaagaacagcatccaagtcatagatgatatgacttaaactagcactcttatctgaactatctgtcaatgagagaatgaactggcctcaatgctatacatcgagttattatcacttaagctaaagtttggtctctcttcgttccacttcaaaatctcctttgcatattgaagtgcttcaacaacactatcaggttccagccccttcaccagggacacgtacaagtttcgccctgtaagagacgaataaagcctcttaaacttcactcctatgtaataggaagccagctgagaaagggaggggctgttgttaatgctgttgctgttgatgccacagcggtgtcgactaataactggacaaaaatcagatagccagtcacacttggtcagcggaattcgtttgattttctcctcaaactcgtctaatttgtttaatatcaacaggaagtccatttgctcgaaagtaggatgaataacaatggcttcgaaaagctttctgctcgatatcatcttgtttgtgcgacaaccatttccatcaacagaaaactgatcgtagttgctcaaggaaacacagaaaatggccaattcaacatcctcaaacatttctagccacttgcaattttctgctagccctctagcatgtattgtaattagttgatac

SEQ ID NO: 79431 - DNA, 367 bp, Glycine max
  Clone ID: PAT_MRT3847_42741C.1
gacgataccccctttgtgcagggaatagaaaaagaaggccctctaatcgaaaaaggaggagagaaccacctgaatcttcgtctaaggtccaccttactactatgcatgaaccctccaggttggatcaaacaccgtcatctacttcttacgtcaaatcacctgggacgatgtcattaacatggctgaacaagtctcaaattaagaatatgggatggagatagctcggcaacaaatggtggcaaaaccaaaactgattggagctatgcaccattcacagcaagtttacaaggctcagatgtgactggtagccaagctacaacctcaagtattaaccaaaattgcaattctgataagtactggtggaata

SEQ ID NO: 79432 - DNA, 288 bp, Glycine max
  unsure (1)..(288): unsure at all n locations
  Clone ID: PAT_MRT3847_42742C.1
ctcnagccactttagccgaaaaaaaaaaccctaaaaagtcgtcaaaattttcaaatatcatgaaaccaaaaaaccttcaaacaaacaaactcaagcggcatccaaaccactagtaatcttgtcaccccttcaattaattcatactatgtacctgcatgccaaccatattaacatatangatatcctttaaatcttggacaaaataccaacatatatgttacctatgcgaaatatttttcctatcaaatttctcaacaacatacacacctaagatataaattttaaaac

SEQ ID NO: 79433 - DNA, 223 bp, Glycine max
  unsure (1)..(223): unsure at all n locations
  Clone ID: PAT_MRT3847_42743C.1
cttggagaaaggccagtccctgtgacggggcagccctctctgtccctcggtcagctcgtgtgaatcctgggacctcttccggtcggctctgcccgctgttctggggtcgactgccacgacttttgattcatcaagcttcctccaggncggagcggctatttttcctaaatgagaattgttacattgcaaattgttgaataaaatattttgcgctccttcaagc

SEQ ID NO: 79434 - DNA, 416 bp, Glycine max
  Clone ID: PAT_MRT3847_42744C.1
ccattttccaaatcgccaaaataacgatttcccccaaaccctgtgcttttgggactgtgtaaagattgcagcttgtttctgctattgattcaaattcgaaactttgatttggagccctcatccagcactacaaggatcttaaagtcactttgcagaacttcaaatatgattttagaatgtcatacaacgtgaaaacaaattcctctatatgttttactaaagtaggttctttgtgttgaatgtacaagtataaccatttctgggttttgtgtagaacttatgtaagaaactcaaagatgtggaaataagcattcccattagattatgggaacgtagcattttggcttggcaaaaaggctagcgatcgcacaaatggacagtatatgttcgtggagctaccaatgaggatcttggga

SEQ ID NO: 79435 - DNA, 343 bp, Glycine max
  Clone ID: PAT_MRT3847_42745C.1
gtaaacccagatagtggcactgtttgggttaggttcgtccccagatcccagaaatggcgctgctttccaggataacaacatcctcattactactatccctatcctccaaacccatttgcaacgcctttctgctttctcgttcaaccgccacaacctgcacaaaacatcagaacaagaagaaaaaggaaaacgccaaagcagcgttggcgaaggagaagcgcagaacccgttccgacaaacagttcaaccacgacgcaataatcgagcgttgcaacataaacgacactgacaccgacaccaagttctctcacgttcctgtgatgctgggcgaagtcttggacgt

SEQ ID NO: 79436 - DNA, 1176 bp, Glycine max
  Clone ID: PAT_MRT3847_42746C.1
cttaaccaacaccgagaacactgattagcatttgctaatatattttagtttaaaattcatttgacctatccatatgaaattatgactactaaaaacaaacacattttattaaacgaaacaaaagaaaaacgctaaaatcagagactccactccagaccaagatcacataagcgaagtaacttgaaactcaaaaaacacaactcactacctgactaaagcaaaggggaataaacacacaaaaacaaaaatcagcaaatgactatcattggtttaacagctcttggaagaatctccaagtgttggggtcgatccattcgcttctaccagcccttgctgcattcattcttccctctgctgcatttgcagtagcagcttcattcatcaaggttgcatcaagagactttggaaatgtagactgtcccaaatgtgaaatcactgggcttgctgacctgttttggtaactgctgttccttggactttttctcctgagacgcatctccacgagcccatgacactcaaaatcatccgcgatgcattttgtgcaatattggtcgttcctcattttgaactcttagcaatgggtttttcaaattcaaaagggccaaggcatttgtttggtgatattcgagtggatttttatggagatgtagatctagaacttgttttagacaaatcagatcacatgtgcctattctttcttaaacgacatgacatcattgcagatttccatctcaagcacagatatcttggcagatgggtttcgagatatgatggagtgttgaaagagtcatatgcggaggtgaagaaatacggatatcgctgggtatataaaggggatatagaacaaaggaagcgcaaatttggggaaattgaagaaaagtgagcagaagggagaaaagatgatgcaagctgctcccaggcaaagacaaaatagttgaatcttaggctgtagaatcatcatttcttctctcattttatccatttgagtcgtccttcactcatcccaacaattcacaagtgtcataaagggaactcatgcaaatttttaataagcttggtggcgtaaaatcaggtttttggttgttatgggatgcttgtgtagctgtctttgttggttaagaatattgcttttttttccttttttggtttgagtaatgtttaacagagagtgatgca

SEQ ID NO: 79437 - DNA, 167 bp, Glycine max
  Clone ID: PAT_MRT3847_42747C.1
cccacgcgtccgggaagaatcactccctcattcatagccacaccacaccatggcctcaaccggcgctttggctatatccttaattctacgctctcccaaccgccagactctgacccgaatagcgaaccataaattaagagtgacttaccggctaccgtataaccggt

SEQ ID NO: 79438 - DNA, 548 bp, Glycine max
  Clone ID: PAT_MRT3847_42748C.1
gaaacagggggggggggggagggggtccaaacaacaactactatggcaccatctgttggacataactagcaacactaatgtctacctttggaattgcatgattatagctttcccgcgatcccgaagattctgcaacgcaatctttttgtttataaccataactgggggggggcggaaatcactgatggtcacacctttgcttgtgttatacagtgcctgtgctaacaactacgatttaggaatgctgagacttttgcatggagtgccctgaggctggagggttaggaagggaccctgttagttgcaatgaacttgtggttgcatattcaaaactaggtgttgttcatgaatctcgtagaatatttgaaggaatcgctgaacctgacttagctattgagaattttgttgtctatggatattatggatttggaatgggggatgaggggattgtgattgtcacatgacgagactgtctgggatgaatcctgttggatatgactctagcctatgataatcatgggtattgtggattgtgtaatgatgtatat

SEQ ID NO: 79439 - DNA, 315 bp, Glycine max
  unsure (1)..(315): unsure at all n locations
  Clone ID: PAT_MRT3847_42749C.1
gggcgcgagcncncaanaaactgatttatatcagcattttgggttttacnccttatacagatcaggtaacaaggccatttcccaattccatggatctacttttcccaaaagtaatctcaaccttaacttataaacttttgccacaattaacacacttttttacttctgttcaacaatatttaaccttatgaacaacatttcatttacaataactttttatacttaatataacttaacgccttactcctatttttttacaatatccacaaaattttatattcaacttttcttcatcaatactatatctattttaaa

SEQ ID NO: 79440 - DNA, 352 bp, Glycine max
  Clone ID: PAT_MRT3847_4274C.1
aataaaactaaaggaaatttttaaccctcccctcaaaggcatagctacagtccaagtccattttcatgcaacaaaaaaaatttttttttttaaaaaaaaaagagggggggaagaaaaaggggctccaagggttcgttttcctccgacttgtgaaaaacttgggggaatcgggcccaaacgggtaaacgacccacgtgacgtttccgcgtgccggtttgggattccctacccccctacggaatctaatctaaaagggttcctttgcttaaccggcgccgggggtgaattgcacactttttgatttggcctgggacacggacttaaccacggggttttttgattctcgggatgg

SEQ ID NO: 79441 - DNA, 176 bp, Glycine max
  Clone ID: PAT_MRT3847_42750C.1
caaaagggtcctttccaatccccatcccatgtgtaatttcttttgcatccccctaagtgaactttttgttttaacccacccccatttcatgttttcttaaaaaaaaaaaaaaaaaagaaaggatatggaaggcatcaccgccagcgtgtgcagggccgtaaaggagtattgaagga

SEQ ID NO: 79442 - DNA, 362 bp, Glycine max
  Clone ID: PAT_MRT3847_42751C.1
tcgcatgatcggactaagctcgatcgccagtgtaagactaagatggtcccggttggtgaacgtttcaaagcttgtgtttccatcttagtactcctccggttggtagcacagtttgcttgggtggatggttgtaaacttggctcacgtgctcatgtgaattcttataacctcaagcatggcctatatcccacgtagaatcatccagtacctgataatgtcgttggtctgtattacagcctttcactcaacccggtactgcatgattctgagtcgtcagtcccaaatgattggcacaataggaacatgtgtattctcactggtgctccagtgctcaattctaagcttaacattacatcgctttc

SEQ ID NO: 79443 - DNA, 361 bp, Glycine max
  Clone ID: PAT_MRT3847_42752C.1
cggccggccttaacatttaagttcttttggctaaaaccctacaatcgaacgttggacaaagtgtatcctgattactttcccacctattacatatcggaccctaggtctctccttcaaaaaacaaacacaaactttatggtctgtatacacttgttttccactccaatgggtgcactgaacttgactctcatggagacttcaaagtaccaccctgtcatcgttgacaacatgggaggaagacaccgtattctttgggatatacatagctaattccgctgggccatagggaaaacgctcttcgttttttgcttgtaccgcctctggagccttattctcggacttgggccactagaacggccat

SEQ ID NO: 79444 - DNA, 766 bp, Glycine max
  Clone ID: PAT_MRT3847_42753C.1
tgcttagtacacttaagctgttgaaattttttatcttcccttttcttgttagtggtagttggattttttcattcctgattttttaagtgtaatttggtctgttttcatatttattctgcatcatgtgttgtagtcattgttagtgatttcaatcatgtcatgtttaattagttgttactctgtagtagatataagtagtttgtccattctttaataaatatctacaacattcatcgttgtcacgatcaattctcattgaatgaaacctttcctggagtggagtaccctttagtaatcaagtgtggaagagtatgtattgttttgattttcttaaaatgggtttcttttatccctgttaagttggggtaattgagtttatatggaaagagtcgaatctgcaatgagaaccttacctttagtaccagtcatgattatctctttttgtcaatataatagttaattactcaagcgacagatgatgtgaaaatgatactaattcttctgttcattacctgctcttgctgtacaattttataagcagcaatctaggataaactgtttcattttcccttttgttaaattgtttcctttttttttaatattctaattacaaaagcaagaaaaagtgtaattgcatactattgtcatagatgctttttctctttcaatcttttcatatacaagtacatgaataaacatgttcctaactctaatatattactcaactatagttcaaggtaaacctcagtaatgtttagttgtcaat

SEQ ID NO: 79445 - DNA, 618 bp, Glycine max
  Clone ID: PAT_MRT3847_42754C.1
ggctcgaggctctttcgatcactagctagaatggcaaacaacggtgatgttgttaagatcaatattgaggagatgctggagatgctggagggggcaaaggcacccctaattactgagtgttgcatttacaaagtgccgtttagtatccgaagacacaacgaaaaagcctacaccccagaggttgtttctattggcccttttcaccacggccatcctcgcctccaagacatggagaaacacaaactcttttactccaaggcttttctcaaacgaactcaaacaactttggacactttgatcggcaacattcaagagatggagcccgagtttcgtcgctcttattcacacactcttgagttcagcatggagcaactggtcaaaataatctttatggattgtgcttttatactagagctcttttgcagataccactatcgagaatggaaagaggacgacatgtgtcttccaaaaccttggttgacgagtaacatagtgtatgatttgttgttacttgagaaccaggttcctttttttgttcttgagagcctttttaatcttccttctctttccggggtggtcacttcctcttgttttttgagctttcgtttgacttttttg

SEQ ID NO: 79446 - DNA, 240 bp, Glycine max
  unsure (1)..(240): unsure at all n locations
  Clone ID: PAT_MRT3847_42755C.1
attatggaacggacactattctgattttccaactatcattgcctatgcaaattcttcacttataggatatacaactgcaacgtgagaaatcaaacggggagatgctanccttaattctatccacacaccctaacatgaatatagatatataaaggcctactaaaatactatggatcataactcccagtagacatttcaccatggttcaagctaatggtgcagaagaagttatatattaac

SEQ ID NO: 79447 - DNA, 809 bp, Glycine max
  Clone ID: PAT_MRT3847_42756C.1
gacccactctcccgcgctcgcccacagttagtacaaaaaagggttacttcagcttccacatatcttgaagaattgatcaatgggcaagtctgtagttgagaagctactttggatggcaattgtgtgcttggtgctgggtgtaatttccattactcccaaggcccaagcagcagtgacatgcaaccaggtggtgagcaacctcaccccatgcatttcttatgtgctcaatggtggcaaaaccgtgcctggcccttgctgcaatgggatcaagaccctctttaacctcgctcactccacaccagaccgccaaaccgtttgcaagtgcataaagaacgctgttagtgcgttccattatggcaagtccaatgtggaccgtgctgctgctcttcctaagcagtgtggggttaacattccttaccagatcagcccttccaccgactgtaccagagtgcagtgaggttaatgatatatggagcggtaactcgagaagagaaggatatacaatatatagctagtgtgtgaataagtggctggctatacgtaggccacacattacattaatgactggtggctgcttattattacatccatcaactagtcttgttattgagttattgtattttttttatttgtaagaatcaaaaataatattaaaagatttataataatttatgtattttattcaaccaattccattaaacacccttttaagtcatgtatccatacatgttgcctgttggtgtttcttttgtcagcttgttatgaattggaagggaaggattaaaatgctaaataagcggttatacaag

SEQ ID NO: 79448 - DNA, 951 bp, Glycine max
  Clone ID: PAT_MRT3847_42757C.1
ctcattttaatctcacactcacaagttttgactccttacacagtcacccgatcgaaacttattcatatttaaactccttgtcctccccaatgtttcagctagtctatataaaatataagtatacgtgtcacatgtgttagtgagtggattggagttaagcaaccactcctggactcgtacgttgtagacatatcctgtttcagttggcttaaggttttctttttattatataggaagaaacgaaatgaaacttgcttctttgatttctggtttcactgattacactcacctcctctctattaaggacaatgtgatgagggaagagaagacaattcctacaaggaagaatgaagtgaagtttttcaagagcttggctcctcctcttgtggctgcttttctagtcttatctccaatttgcagcactccagtttcaagtgctcaaaccgtagatattcagagaggaaccacattgtttcgtcaagcttgtattggatgccacgatgcaggtggaaacataatacaaccgggggcaactctatttgcaaaggatttacagagaaatggagttgatacagaagaagcaatctatggtgtcacctattatggcaaaggacgaatgccaggctttggtaaagagtgcatgccacggggtcagtgcacatttggagctcgtttggaagatgaagatatccagatattggccgagtttgtcaagttacaggctgatcaagggtggccaagtatagagactaaagaagaatgatttaatacatatttggttcaatttaatgaatttatttaagaaaaaaaacaattgcttatttgtttcaattttttagggaacttttggaaaataaatgattatttatgtagaatttagctgaaccaaacatgctattaactttcgtttcattaatatataaatgtttgatttgcagttcacttcgccag

SEQ ID NO: 79449 - DNA, 412 bp, Glycine max
  Clone ID: PAT_MRT3847_42758C.1
agaatacccactgtttggctgcagcagaggagttgtaaatgctcagcatggctgcacaagcgcttgtgtgatgatattctgttaccttctcatcggaggctgtctgacaaagtcttggaccaagatcactgcaatatccatgtggcttctccagaatagcctcctttcttgttaaagcagctgctaacgcccctgtcaagcgtaggatcatacagacctttgtggtttgcatcaaagcaaagactgtcatactcggatggcacgcttccgggtgactatggatttgaccctctgggactttcagaccctgaaggaacatgagggttcattgagccgaaatggctagcatatggggagatcatcaatgggcgctatgcaatgttgggtgcaaatggtgcaatagcacctgaaa

SEQ ID NO: 79450 - DNA, 345 bp, Glycine max
  Clone ID: PAT_MRT3847_42759C.1
cctctgcagaaatgtcagctgccgagctagcccccgccccagcccctgccaaggtgaccaagcgctaaggcgccaaagaagacctccgctccaaagaagcctgcagcccatcctccctacatcgagatgatcagcgaggcgatttccacgctgaaagagcgtggtgggtcgagccagtatgcaatctccaagtttattgaagacaagcataaggctcacctcaccggaaacttcaagaagctccttctcgtccagctcaggaagtccacagctgccggcaagctgactaaggttaaaaactcttacaaagtggctgtgaaaccagctgctgcaaagaagcctact

SEQ ID NO: 79451 - DNA, 386 bp, Glycine max
  unsure (1)..(386): unsure at all n locations
  Clone ID: PAT_MRT3847_4275C.1
aattcggctcgagtttttctccgttttctagagaggatttttcctagattttattgccatttgaagtatgattctatgagaattgttcacaaaaaaaaaaaaaagaataagagaatagactaaatttctgtgtacgtcgtaagaggcaaaatgagagtatattatttgaggaatatgttgaaactatcttgtcaaacctttgggtcattatcatctaacaagatttccataaaaaagatgtttcaactatttaaatatatcaggtttggtggatgatggcgtgtacaaaaggaaattgtcttctcaagctggctcattgtataatatatgcatgtattgaagtttcaacgtgtaaacctaatttcccttggaaaaaaaaaaaanaa

SEQ ID NO: 79452 - DNA, 633 bp, Glycine max
  Clone ID: PAT_MRT3847_42760C.1
gttgcatgcaagcaaacagaaggtcactgctattgaaagcatgcttaggggtttggatttgtttgataagcatggttcatctgctctccggtcatcgagcttggatctagtgcaggagttgaccctccctcatctcgtgatccaccattccctgctgctgtcacagcatctaatcatctaactagctctttaacgacagaatcaactgcatctggtgccaataaagctagtaaccgaaatggtggtttgggtatgtctgacataatcacccaaattcaagcttccaaagattctggcaggttatcgcataatactaatgttggtattgagcctttatcaacgttctcatcatactcaagtaaaagggttactgaaaagttgcaagagagaggttctattgatgaaaacagtgacatgagggagactagatgctatatgaatcccaacatagataggcagtgtatggatacccattatagagatggcaactatagggattcgcagcatagttatgtgcctaatttccagaggccactattgagaaagaatgtagctggacgtgtgactactggcagcaggaggagttttgatgatagccaattatctcttggagagaagtcaaactatgtagat

SEQ ID NO: 79453 - DNA, 259 bp, Glycine max
  Clone ID: PAT_MRT3847_42761C.1
ctctacttcttactgcagtgtggaattgagttgttcataccttcttgcactaattaatataggcagcatttcaacagtttaccagtgttatttagtgcaagaaggtatgaacaactctacttcttactgcagtgtggaattgagaaggagaacaacttcaagcagcccggagagagataccggtctgggcacctgacaggttcctgttctaaaatatgatatgatcaatgtgaaatgtgtttggtgatgtctaatgttg

SEQ ID NO: 79454 - DNA, 662 bp, Glycine max
  unsure (1)..(662): unsure at all n locations
  Clone ID: PAT_MRT3847_42762C.1
ccacgcgtccggctttctccctccacttcctctctatctcaaatggaactcgaatctggagtttcagcttctcagaagaatccctctcagttgtcatgggtaaatttatctaaagatttattgttagcatatcaaagctttggtgtagtgtatggagatctaagcacatcacctctctatgtttatacaagcacattatcaggaaagttacagagccaccttaatgaagaagttatctttgggattttttcgttgattttctggaccctcacattaataccgttgcttaaatatgtagtcatcatattaaacgctgatgataatggtgaaggtgggacattcgctctttattcgctgctctgtaggcatgcaaatattagcttactccctaatcaacaagcagctgatgaggagatgtcatgctacaaaaatggtctctcaccagaggctgcggaatcatcttcattgaagaggtttttggagaatcatagaagtttaaaaacagccctgctggttgtggtgttgctaggtgcttgcatggtcataggtgatggtgtgttttctccagcaatttcaattctagcagcagtatcaggagttcgagttaccaaaacanaattcactgatggtgagtcaaatttttgtttgtttaaaatattaca

SEQ ID NO: 79455 - DNA, 316 bp, Glycine max
  Clone ID: PAT_MRT3847_42763C.1
aattcccgtcgacccacctccggacctcgcacctcgagttatttatatatctgtaaatagtcttaatcaatccccatccaactatgcatgactctaagtcaatacattgtgaaaatttgatgaccttacgtattcactatcaacaccctgacttaagcttatagctcatctgcacatatcttggcattgactattcatcttttcccttttgatggattgcagttaagaataagcgttatgctaaactagtatatgatcattaactctttttatacttattttaatatctgatatgtgttacgatattattgtgagg

SEQ ID NO: 79456 - DNA, 1329 bp, Glycine max
  Clone ID: PAT_MRT3847_42764C.1
aaaagaaagggggaatcggtgggtggaggcttctttggatcatcggagagaggcttctttccattttcaccacagcaatggagaagatctacctcggtggaaaggagcatcatattcgaactggctgtggtattgtgtctgtcatagtctatggcgatcccgacaaaccagctctgatcacttatccagatttggctctaaattatatgtcatgttttcaaggactatttttctgtccagaagcagcttctttactgcttcacaacttttgcatatatcatatcagtcctcctcgacaagagttcttgcagttgggagcagctgcaatttgtgtcaaggatcctgttccttctgctgaagacttagcagatcaaataattgaggtcctcaactattttgggcttggtgcagtgatgtgtatgggagtgacagctggtgcttatatccttactctttttgctatgaaatatagggagcgtgttcttggtttaatacttgtatctcccttatgcaaagcaccttcttggacggaatggttttataacaaggtgatgtcaaatttgttatatttctatggtatgtgtggcttgctgaaagagtgtttgcttcagcgatatttcagcaaggaagttcgtggtaacgttgaagttgcagaatcagagatagttcaagcttgcagaaaactgctggatgagagaaagagaacaaatgtcttacggtttcttgaagcaattaatcagaggcttgacatttcagatggattgaaaagattaaaatgtcgtacacttatttttgttggggacagttctcctttccattcagaggctctatacatgacttcaaaactggataggagatatagtgccttggttgaggtccaggcttgtggatcaatggttacagaggaacaaccacatgcaatgctgatacctatggagtactttttcatggggtatgggttgtatagaccaacccagttcagtgacagcccaagaagcccactaagcccatcttgcatctctccagagctcctttctccagaaagcatgggattgaagctgaagcctataaagacccgtgtttcactgcaagtttgaaaataataagcccttgatttttgtaattgaaagcagtttttttcttcaaaatttttttattgttaaagaggggagggagggatagacaaagaagttgtaagaggggttgtagatagaaaagaagaaaagggcatggacagaatacgtgaaatataatataaaaactatagggaggaaaagttgccttgattcatttgtaagtctatcttcaataaaggaatcattgagctgt

SEQ ID NO: 79457 - DNA, 528 bp, Glycine max
  Clone ID: PAT_MRT3847_42765C.1
ggacaaaaaaaaaaaaggggccaacccccacgggaagctaaaacccataaaggaaattttggggcaaaattaggaggcccaaaaaatttcccatttttggggcagtaaaaaacaaatccccccttcctacagaaacaaaaactacccaaccaaaaacccctattttttttttttttaaacacccaaaaggggtaaaaaaaagaggggggggggcaacaaaacggggccaaaaacaaaagctttggattgggtgcccaaccccggaaatcaacaaaagagggttcagagtttggattaaaccaaaaaaacggggggggccaaaaaaaaaacccacccgctgctggggggggcaggccaattagggcatttgcatgggcaaaaaaaacaaaaaaccctggtgggccagcgtggggggggggaaaagggggaaaaagggggggaagaaaaaaggcggggggggaacaaaagggaatccccacggggaaaaaaacaatgggctgagaaagggagaaaaaatgtgggcgggcc

SEQ ID NO: 79458 - DNA, 585 bp, Glycine max
  Clone ID: PAT_MRT3847_42766C.1
gcaaaaacgaacagtgtgattcttcttgccgtagatctattccattttgccattcatccatggccgacgaattcaaattcgccgacaaagtccctccttccttcgatcacgtggctacattaattttggattgccatttcaagagcatcatattcaaactggttgtggtattatgtctatcatagtctatgacgatcctgacaaactagctctgatcacttatccagatttggctctaaattatatatcatgttttcaaggactattttatgtccagaagcagcttctttactgcttcacaacttttgcatatatcatatcagtcctcctggacatgagttttccctctgaaacttccacaagagttcttgaagttgggagcaactgcaaattgtgccgaggatcctattccttctgctgaagatttagcagatcaaataattgaggtcctcaactattttggctgctggatgagagaaaaagaacaaatgtcttgcggtttcttgaagcaattaatcattgaacctgaatgggtctggagctggagtttcaactccagttcaaccttcttttggagcagcttga

SEQ ID NO: 79459 - DNA, 1621 bp, Glycine max
  Clone ID: PAT_MRT3847_42767C.1
ggcttctttgaagtgagttgatcatttcatcagagcgaggcttccatgttcaccacagccatgccagaatccaatgattccgtttccgttgacatggagaagatctacctcggtggaaaggagcatcatattcgaactggctgtggtactgtgtctgtcatagtctatggcgatcctgacaagccagctctgatcacttatccagatttggctctaaactatatgtcatgcttccaaggactatttttctgtccagaagcagcttctttactgcttcacaacttttgcatatatcatatcagtcctcctggacatgagagttcttgcagttgggagcagctgcaatttgtgtcaaggatcctgttccttctgctgaagacttagcagatcaaataattgaggcttggtgcagtgatgtgtatgggagtgacagctggtgcttatatccttactctttttgctatgaaatatagggagcgtgttcttggtttaatacttgtatctcccttatgcaaagcaccttcttggacggaatggttttataacaaggtgatgtcaaatttgttatatttctatggtatgtgtggcttgctgaaagagtgtttgcttcagcgatatttcagcaaggaagttcgtggtaacgttgaagttgcagaatcgttctttgtcatgtttcttttccaactgctggatgagagaaagagaacaaatgtcttacggtttcttgaagcaattaatcagaggcttgacatttcagatggattgaaaagattaaaatgtcgtacacttatttttgttggggacagttctcctttccattcagaggctctatacatgacttcaaaactggatagaagatatagtgccttggttgaggtatgtgtaatgtgtaagggtgtagatgtgtagcatgcatgtatatatgacaagaaagcatagcaaatagggatatggataaacgttcaggtgaacatttgcaaaattgatttaattcaatacaaaagttacataaaattgctttttaattcaattaattttagattcagaatcaatttttcaacgtgagaccaaacatgcattgtttacctaaaattatgttataacatgattttagataattcaaggcaaatccaaacatgcattgaaacgggttttcattttgcaggtccaggcttgtggatcaatggttacagaggaacaaccacatgcaatgctgatacctatggagtactttttcatggggtatgggttgtatagaccaacccagttcagtgacagcccaagaagcccactaagcccatcttgcatctctccagagctcctttctccagaaagcatgggattgaagctgaagcctataaagacccgtgtttcactgcaagtttgaaaataataagcccttgatttttgtaattgaaagcagtttttttcttcaaaatttttttattgttaaagaggggagggagggatagacaaagaagttgtaagaggggttgtagatagaaaagaagaaaagggcatggccagaatacgtgaaatataatataaaacctatagggaggaaaagttgccttgcttcatttgtccgtctatcttcaataaaggaatcattgagctgtaa

SEQ ID NO: 79460 - DNA, 572 bp, Glycine max
  Clone ID: PAT_MRT3847_42768C.1
ggctcgagtagttctagatcgcgagcggccgctcgcgatctagaactggggattagggattttcctgttcaattatggttgtctaaactgtttaccagttgattgattggttttgggtgcaagtgtcctgaaattgaagtttgaatttctcttcccggcaatcaaagttctgacttttcttgagtatttgtttgtttgcggtatacattcatggcatagctcattttacttttattagttttttgtttgaatgtctaaatatttgtcctgaatatcagcttaaaaatcgccccaaatttgtcgtttcctatgttttttttttctgtaattcacttgagtgttgtaggttctccaagttgctaaaccatcgaaccagatcccacttgttgggcctttgttgacacctcctgtcagtgttactgcggtggcaaaagttgctgttacagctgctactgctactgatcctgtatttcccccggggatcattgatgcctatggaatacgacgtttactgtcagaataaatcaaactagaattatctttcttttgtttctgggtaaatctaatttggg

SEQ ID NO: 79461 - DNA, 357 bp, Glycine max
  Clone ID: PAT_MRT3847_42769C.1
aaacaagctgaaatagaaattatacttaagcttaaaagcacaagttataaacattcaaagacatcgctgtaaaccaagttttacggtgggtgggatcatagatcagtatcaacctcaaacaattcaaagataaatgttacgaggagacaaaaatttaggttcctgttactcctccccacacctgtcagttcaatcatcaatcaccacccacttgcctcttccaggagtcttccacaatcagttcatcaactccccctccaactcgaccatgacaggtgcattcatactgatttgaagagcacgggtgcccaaaattctagcacgctcatacttaatcatatatttcgatgtctttcg

SEQ ID NO: 79462 - DNA, 305 bp, Glycine max
  Clone ID: PAT_MRT3847_4276C.1
tctcaatccagactttctggaatgctcaaacattctttcatgaaggtgatacaacgtcatgaatccaattattgccactcataacattgctacagctaaaaagatttccactgaagaacctgaagtgttagggttttcctcacaagcaggttccattcatacagattttgggaaaatttgttttgaaattttcccatgatgagtttcttacatcttgggctactcaagtgctgtcttcaacaactctattggcttatgggtgcccctatttctatgccacggcgcatgatttttcatctcctaca

SEQ ID NO: 79463 - DNA, 212 bp, Glycine max
  unsure (1)..(212): unsure at all n locations
  Clone ID: PAT_MRT3847_42770C.1
aagaaatggcnagataagggtcagcagtatgaatgattggtgntccttgtggtgaaagattaaanagagcttananaaaactgaancaaganactgtagagatgggnannncaaattggnantgtgggaacannaactaatncnattcaaaggtgaaggggaaattcaanatgactnngganntgcataccancaattatttggtgnaccag

SEQ ID NO: 79464 - DNA, 404 bp, Glycine max
  Clone ID: PAT_MRT3847_42771C.1
gggaaagagataattggaatcccatattttcacttctatttctacacactttcttttaatatctatgctacataactaattttattacatttttctctctttttttcccctcttttgggtaaattttgttgtaaaaaatttggtgtggagataacatcactataagacggacagggggagatttttcatttcatgtttcaaccaatctagagtttgcacgtggtccatatgcaattcaacttctaactgactagtgctagatttgatgtagttactgccattgattgaagctcaactaaaatgaaatgcattttccacacaaatgcacaggatcacagtgatatcacacaattcaaatgaatatgatgatcccttttacatatgttatcactcgtgccgaattc

SEQ ID NO: 79465 - DNA, 890 bp, Glycine max
  Clone ID: PAT_MRT3847_42772C.1
cccacccggcccgaagggttctggtacatcattgtctttggctctcggtgagggttttagggcacacaccgcagggagacggtttctttcactctctgcaattcgcgatggctgacgaggactatgaagatattgacatggggtacgaagatgaaccgccagagcccgagattgaggaaggtgcagaggaagatgtggagaacaaaaacgatgaaataactggagagcctattgacaccgaggataaggaagaggaacaaccagtgaagcggcctcgaaagacatcgaaatatatgactaagtatgagcgtgctagaattttgggcacccgtgctcttcaaatcagtatgaatgcacctgtcatggtcgagttggagggggaaactgacccactcgagattgctatgaaggagcttcgagagcggaaaataccctttacaattcggcgctacttgcctgatggaagctatgaagattggggagttgatgaactgattgtggaagactcctggaagaggcaagtgggtggtgattgatgattgaactgacaggtgtggggaggagtaacaggccctaaatttttgtctcctcgtaacatttatctttgaattgtttgaggttgatactgatctatgatcccacccaccgtaaaacttggtttacagcgatgtctttgaatgtttataacttgtgcttttaagcttagtataatttctatttcagcttgtttatatatctctgggcttgcaatagtgtttgttgttgtttgtgaaatcaactatcaggacaccctcagctctacgaagattggagtgatactttatactgtacattggttgtctagtgagcctgtgtctcttcttttactatgtttcatggaaatattctgg

SEQ ID NO: 79466 - DNA, 758 bp, Glycine max
  unsure (1)..(758): unsure at all n locations
  Clone ID: PAT_MRT3847_42773C.1
attcccggngtcgacccacgcgtcccctttattctagtacatcattgtctttgttctcggtgagggttttagggcacacaccgcagctttaagctcagggaaacgttttatttcacactctgcgattcgcgatggccgacgatgactatgaggatatcgacatggggtacgaggatgagccaccagagcccgagattgaggaaggtgcagaggaagatttggagaacaaaaacgatgagttaactggagagcctattgacactgaggataaggaagaggaacaaccagtggagcggcctcgaaagacatcaaaatatatgactaagtatgagcgtgctaggattttaggtacccgtgctcttcaaatcagtatgaatgcacctgtcatggttgagttggagggggaaactgacccacttgagattgctatgaaggagctccgagagcggaaaataccctttacaattcggcgctacttgcctgatggaagttatgaagattggggagtcgatgaactgattgtggaagactcctggaagaggcaagtgggtggtgattgatgattgaactgacaggtgtggggagaggagtaacaggccctaaatttttgtctcgtaacttttatctttgaattgtttgaggttgatactgatctatgatcccacccaccttaaaacttggtttacagtgatgtctttgaatgcttgtaacttgtacttttaagctttagtataatttatatttcaacttgtttatgg

SEQ ID NO: 79467 - DNA, 340 bp, Glycine max
  Clone ID: PAT_MRT3847_42774C.1
gcacatcttctttatgaccctcaccggcaagaccatcatccttgaagtggaaagctctgacacctttgacaacgtcaaggccaagatccatgtcatggaaggaatcccccctgaccatgaacatctcattttcgccggacagcaacttgatgactgccgtacccttgctgactacaacattcagaaggagagtactcttcacctcgtcctccctctccggagtggcatgcacatcttgatcaagacgctctcctgctcgaccataaccctagaggtttaatgctcccacaccatcttttacgtctaggccgtgatccaggacaaggaggtgtttccctct

SEQ ID NO: 79468 - DNA, 398 bp, Glycine max
  Clone ID: PAT_MRT3847_42775C.1
cttcattctatgtttgacttaaaacttaaaaagtagataacattcattctgggagtgactcgaatctattttgaggttgtacccgcattttcattatatataagtctatttatttatataaaaaaaaaaaaaaaaaaaaaaaaaaaaaaaaaaaaaaaaaaaaaaaaaaaaaaaaaaaaaaaaaaaaaaaaaaaaaaaaaaaaaaaaaaaaaaaaaaaaaaaaaaaaaaaaaaaaaaaaaggggcgccctttttaaaggctccaagttaacttacccgtccttccaacctcaaacctttttaatagggcccctaaatttaaattaatggcccgttttttaaaaacttcgatacctggaaaacccttggcttacccaaattaaatcggccttttttttt

SEQ ID NO: 79469 - DNA, 181 bp, Glycine max
  unsure (1)..(181): unsure at all n locations
  Clone ID: PAT_MRT3847_42776C.1
gagacagaantctctaatctacacattcgtatgacggaaaacagtaattctcgcgaagtacaccgaattcagcaaaaacttcgactccatcaccttccagtaccttcagaagctccctaccaccaacgacgagttcacctacaattacaacacacacaccttgaattacctcgtcgacaat

SEQ ID NO: 79470 - DNA, 343 bp, Glycine max
  Clone ID: PAT_MRT3847_42777C.1
acggattgagtttccggttatctctggaatatggagtttgtgtaggtcgagagagcttttgttgaatctcgaacgggacatatacggaacttgaatcatcgaggcaaaagaaagctcattgtggatgatcagttctgctgcttaatttaacatggattgttggctttctatggacttcctctaaaacactcactgggtcacggatctaagcaaccccttgcatccttgcctgagggattttagttgtaaatggacaccttgcctgttgacgcttatgcagtagcatatggatacactatagctgtgtatgtgagtacatcattcgccatggaatcagcatctg

SEQ ID NO: 79471 - DNA, 430 bp, Glycine max
  Clone ID: PAT_MRT3847_42778C.1
ggttaactcaatgatcttttatccaactcttaccactgcataccgagccctcgcctgcatggtggctccatttgctggccatcccttcatgggtgtcttccccaccaaagagaccatcaatgacgttacctgcattgctcgctacagcggcagagtgcgatgcatgctggtgtggtcaccagctgatcataacagaattgagactctctcctacatgcggtaccttgtggatgctcaattggatcatgaagacaaataccatcttatgatgggatggataccttgcttgcaacactagtagcagcacgggtgcctgctctgggagcactacgtgtcaccgggatactactatggactctactgcaccatgtgaaaactgcctatgttcgtgagcactgatgctagtgatgtgttgaacgagcttgcgcag

SEQ ID NO: 79472 - DNA, 693 bp, Glycine max
  Clone ID: PAT_MRT3847_42779C.1
aaaatcaaaaaagaaaaaataggcattatattgacatacaaaatatttacttctcatcatcatcatcaaagaaatgcagaatttgtcttatcaaagtcacaaaaaataaaagcaaaatccaatttcagtggttactctttctgccattcttgccaacatggtgcaaccacccaatgcctttgagggccttggaaaatttgagaaggttaggcctccccattcctaaattcatcttccctgtggagaatttcaaggcctgtaagcagcacaacttagcctccatgtcctcttcttcctcttcctcatcctcctcactattctcaacctcacccttcttcttccctttcttggtgttgctcttcttcagaaccttgttgttggactctgtctcatatgtctcccaaagcatgtccattccttcactcccatctgcattgtgcctctcctcaaaaagcttacaagccaaggtcctcctccactctttctccactctcattgaaccaaaactaccaagtgcgggattattattccccatgcctttgccactgtacacccagttgctttctgggctcccaaaatttgcttctagtctttgtgataaggacttcaccctcccggatgcagcaaaagcaaattccccatcactgttagtgctcactttattgcctctataacccatcaccactttggatc

SEQ ID NO: 79473 - DNA, 348 bp, Glycine max
  Clone ID: PAT_MRT3847_4277C.1
gatagtcactcagttttgaatatataaatattcctagtttgacacttcactttcttacatgcacatgaccatgtcttatcagactggagatctaaaagttgctaatgtactgtcaaaggcgtgctggagcaccgtacatggaagtgataaaaatggaactgtgaaagtcatataacattgatatggatgaacacaaagtgacacagaacggaaatgtggagactgatgaaggtgtggaagccgtttgaaaatgtgtgaagaaaactgtattcataatggatgaagctgcactatctataaacaagcctatagaaagtggcactctgacgtctcagaggacaaaccttc

SEQ ID NO: 79474 - DNA, 233 bp, Glycine max
  Clone ID: PAT_MRT3847_42780C.1
ggatggaatctattaggaaatactatataacatccccttaatgcatctcattataaggagtctgcttacttgatgaaacctgctcttgcgtgaagaacattgatttataaaaattgcttttatctgatgaggcatgtacatcatatattcaggctgcttgataggatgcatgaaggaggtggattattgtattttcctagcaaaatcacttgcttatagataaaaccgggggg

SEQ ID NO: 79475 - DNA, 104 bp, Glycine max
  Clone ID: PAT_MRT3847_42781C.1
actctagccgaatcggctcgatgaaagaattcccttcaatgaagaacgtgataatttgtccaccctttccaagacaatatctcaaactgataagtctcctaaca

SEQ ID NO: 79476 - DNA, 252 bp, Glycine max
  Clone ID: PAT_MRT3847_42782C.1
caaaatatcatcactcttacaactcatatttctttatttcttcctattacatcatatcacatatcctacctatatttctctctcttttctttctctttcactaggtgtatactagcaatatttgggtgtcaaaatatttttttccttttgcaaattccttgcttcttttgtactcactgaggggtatttctatgcaggagttgtggctcgctagctacaattccaaaatcgaagagaaattttagcatttga

SEQ ID NO: 79477 - DNA, 803 bp, Glycine max
  unsure (1)..(803): unsure at all n locations
  Clone ID: PAT_MRT3847_42783C.1
cgccttnagcaccatggaagccaccaagcaagtggttaactttgggcccgggcctgccaagctgccacactcggtattgttggagatccagaagcagctactagactacagaggactcggcatcagtgtgctcgaaatgagtcacaggtcatcagattttgccaagattattggcaatacagagaatcttgtgagggaattgctagctgttcccaacaactacaaggtgatctttgtacaaggaggtgggtctggccagttcagtgctgtccccttaaatctgattggcctgaaagctggaaggagtgctgactacgtggtgaccggagcttggtcagctaaggctgcggaagaagccaagaagtttggaacggtgaacattgtccaccctaaacttggaagttacacaaaaattccagacccaagcacctggaacctcaacccggacgcctcctatgtatacttctgtgcaaacgagactgtgcacggggtggagtttgacttcgtacctgacgtcaagggagcggtgctggtctgtgacatgtcctcaaacttcttatccaggccggtggatgtttccaagtttggtgtgattttcgctggtgctcagaagaatgttggctctgccggggtgacggtggtgattgtccgggatgacctgcntgggttctcgctcagagagtgcccatcagtccttgactacaaagtgcaggctgggaacaactctttgtatacacacctccgtgcttcagcatctacgtcatgggcatggtcctggaatggatcaagaacaacggcggggc

SEQ ID NO: 79478 - DNA, 146 bp, Glycine max
  Clone ID: PAT_MRT3847_42784C.1
gtttcttgaaatcatgaaatgtaaccgagtcagaagcaggatgctgatgttaccatggaatcattgtatcattgacatgtgtggttttgatcaaattgattggatgcttcgttggtttgtctgcagagtgtttgataaaaaaaaaa

SEQ ID NO: 79479 - DNA, 294 bp, Glycine max
  Clone ID: PAT_MRT3847_42785C.1
cacgagaaacattgattccatgaacaccttgtagattatgcactcattttcaatttcaattatattagtattacattttggtggttattgactttcacgtcattggtttgttcatgttgtttccaaataaatgcactacaaagaaccaatgccccatttttcattttattgaaataaatcagtttgatgcatattggacaaaaaaaaaaaaagaaaaaaaagaggagaaaagaaagagaaagaaaaaaaaaaaaaaaaaaaaaaaaaaaaaaaaaaaaaaaaaaaaaaaaaaaa

SEQ ID NO: 79480 - DNA, 274 bp, Glycine max
  unsure (1)..(274): unsure at all n locations
  Clone ID: PAT_MRT3847_42786C.1
acgttctctcaacatccacaataacaatgagctccgatgatgatannnttggagagtgatgaggagttcattgaagagcttgtagctattgctccagtattaggtagcactagtgtaatgttacaacaaagcaaggacagatagagattaaagaaaagaagangggaatagtgaaagctaaatggaagtgtaggtgggtgatgataataaaaggttcaattcatatattcaagaactttgagaaaatgagccttatagtactatccactggtgg

SEQ ID NO: 79481 - DNA, 312 bp, Glycine max
  Clone ID: PAT_MRT3847_42787C.1
tttacacgttttttcacccgctctttgagtctgtgcgttaactgctggattttggatactggattaaggtgccgaaatgagctctcgggaaggcaaggtctctgaagtcagaagttatcggtggccaactacagcacttgacctaggccaataacgggtcccatttcgcgaaaaatgtgagcacaacggtcctctgacttagacggagccttgggaagttcacggggcacatcacttccaggcttcgtaaactaccatgatggacgtgagtgcgccttataatgaggtccctgaacgaaccactacggcttt

SEQ ID NO: 79482 - DNA, 1007 bp, Glycine max
  unsure (1)..(1007): unsure at all n locations
  Clone ID: PAT_MRT3847_42788C.1
acgagattaaacccaaactggacacaagaaaggagcgagatagcgaggaaatttggttcttacttcttacccgcagacagaggaaggaagggaaatagatggaagctgtgtgtggaagtggaagcagtgtttgggtcacatcctcccttacacgctcacccaagatcacactccctctattccgcgccagttaccagcacctaacagcatttccttcacaatcccttcttttctcctatcacccttctcgctatgctaatgctagaaccctccgcgccagaacctcctccaaacccattttccttccccacttaattgcttctctggaacaagttgaccagacttacattatggtgaagcccgacggcgtccaacgtggcctcgtgggagaaattatttctaggtttgagaagaaggggtttaagttaactggcttgaagctcttccagtgctcaaaggaattggccgaggagcattacaaggacctaaaacaaaagtcatttttccctaagctgattgactatattacttcaggtcctgttgtgtgtatggcttgggagggtgttggagtagtggcatcggcacgcaagcttataggggctacagatcctcttcaagctgaaccaggcacaataagaggagaccttgctgttcaaacaggaaggaatgttgttcatggcagtgacagccctgagaatggcaagcgtgaaatagctctatggttcaaggaaggcgaagtatgcgattggaccccagtccaatcaccatggctgagagaataataaaccacagatgcccaattagaatgattcttgccgtttctaggttcaataactgcattaatcgagtttaaacagtaactcaaattttgtaaaattttgctttttgactcggattctccaagcctattcctggcattacattttctgtttctatcagatttgaatgggtcatgcgatgttttgtttttttttttaaaaaaaaaaaaaaaannagggggcggccgc

SEQ ID NO: 79483 - DNA, 947 bp, Glycine max
  Clone ID: PAT_MRT3847_42789C.1
gcctatccattcctattaattccggctgcgagaagacgacagaaggggggttcttcttagccgtagttttctctcacagccgcagacagagatggaagctgtgtgtggaagtgtttgggtcacatcctctcttccacgctcacccaagtccactctctctctattccgctctactcatcaacacctaacagcatttccttcacaatcccatcttttcttatatcaccctcctccctatgctaatgctaaaaccctccgcgccagaacctcctccaaacccgccattttccttccccacttaattgcttctctggaacaagttgaccagacttacataatggtcaagcccgacggcgtgcaacgtggcctcgtgggagaaattatttctaggtttgagaagaaagggtttaagttaactggcttgaagctcttccagtgctcaaaggaattggctgaggagcattacaaggacctaaaacaaaagtcattcttccccaagctgattgactatattacttcaggtcctgttgtgtgtatggcttgggagggtgttggggtagtcgcatcggcccgtaagcttataggggctacagatcctcttcaagctgaaccaggcacaataagaggagaccttgctgttcagacaggaaggaatgttgttcatggcagtgacagtcctgagaatggcaagcgtgaaatagctctatggttcaaggaaggcgaagtatgcgaatggaccccagtccaagcaccatggctgagagaataataaaccacagatgcccaattacaatgattcttgctgtttctaggttcaataacctgatcaattgttttcagtggcaaatgtagcacttcattaaaccttcgagtttaaacagttactcaaattttgtaaaattttgcattttgactattcttcaagcatattcctggcattccatttc

SEQ ID NO: 79484 - DNA, 244 bp, Glycine max
  Clone ID: PAT_MRT3847_4278C.1
ctttaccctatccacctatgacatcttttatgaccctgctcaatatattatcaaagcggtgcaggctctactctagtgacgtacaattaaatccgtcttatatattcctacaaactagtacctagtgtatgctgcttttctatgacactttgcaatgttatctagaaccttttttcttctgttccactcttttagccgtcttatgactgtccttcttaaaattcgtgtgctcctcgtaagatat

SEQ ID NO: 79485 - DNA, 341 bp, Glycine max
  Clone ID: PAT_MRT3847_42790C.1
tcgcccattacctattggggcttgaatccacaaaatacttttgtgttaaataggggggtgggaaaactgacttttccccagggcacttccggaggtggttaaagaatgcctatttctatagggggaggagctggtgcaaagaatgctatgtctatgaatttgccgaatgctgctctttgaatgtggcgatattttgttggagagctcgtctttgaagtttcttagaggacttctccctacattaaatgtacagtcagtttgttcatagcatcttgaaaattggctgattacaccatcaattttggggacttttcccacattactgtgcatgaatggagaga

SEQ ID NO: 79486 - DNA, 869 bp, Glycine max
  unsure (1)..(869): unsure at all n locations
  Clone ID: PAT_MRT3847_42791C.1
tgcttactcacaagagcctctttaatttccccatcccctctagattttctctctaaatggttttccaaagatctctcacaatggcctttaatctcgtgcttttgttctgtttggttgcggtgatcaacaatgttgtcattccaactagtgctagacaactcatgatgactgcatcaccaaatgagaaagaagtgatgaatattggcactgaaaatagaggacatgatgaacatgatcatcaagcacaagtactagacgatccaacaagcaagaataacgtggaaaagaaagaagaaagatttgacaagaaccaactcttccctccctttttcccacttccgccatttactcttccatttccacgtgctgcttttccatttccacgttttccacttccagggcttccatggccaataggcccagctggggcttctttatttacatatcctactgtagacatgcctgcttctccttaccttcctaaacctactccacttaactaaacatgttcccatgtggtgcatggggtgatccattggcatactatgttagggtttctacttaaagttgtgtggtgtatgtgtttaagtatgttatcataagtgtgttcaaataaaacaactatgataaataaaaataagtttgtatggtttaggtaagttgttagtaagctagctttaggattaccttcctttaattgcttactagcttttatggctcttgtactttatttttagtatgtctaataaaatgattttatagtttatttagctatcatggttcttgtacttcttctttttagtatgtctaataaaatgatgttatagnttattactaaaaaaaaaaaaaaannnnnnnnnnnnnnnnaa

SEQ ID NO: 79487 - DNA, 691 bp, Glycine max
  Clone ID: PAT_MRT3847_42792C.1
ctgacaaggtagtgtcctcctcctcaactaacaatgggacaaactcggtggttttaatgcgaatatgccaatgaaacagcgaggggaaaataaacctgctgcacagcctcatgcatccaggactgttcttgaagagaatatagtactaggtgttgcattggagggatcacagaggacacttcccattgatgaagagattgacaatgtgacatctcgagaggcaaaggaaatggctgcattgcagagtggaaatggatctccaaaggctccagatggaaatgacaactagttattataagcagcgagttcgactagttagctcgtgtttgcattgcagttacgtccaatgtaaccccaatccaacaccactcttgtttgtacttttgtacattggaaagtgggaaatgtttgttcaacgggattacaacggttttccaaacacatccttagttgtttgaaagctatgttccaagtccaacagtacactgctttgaaccagtttcccccccctaggaagttgtatgtattatcacttccatgtgtcacaccccttttacaaaggactcgagctgtattgtcatatctcttcattttttgctgtttcagcaatatatggaaaatggctttcatccattaaaaaaaaaggagagcggcgtccgctctccaggctgccgtacgtgggcatcaggcg

SEQ ID NO: 79488 - DNA, 164 bp, Glycine max
  Clone ID: PAT_MRT3847_42793C.1
gcgaagacgacagaggggggcgctgttagatgggggacacggacctttctttgaccaggcacagcgaggagacaacaatgtggcggcgcggtttgaaggagtcagcgcttccccgtcacgagccgcctccggacgtcgtgacatggatccacgggcatctgtaa

SEQ ID NO: 79489 - DNA, 868 bp, Glycine max
  unsure (1)..(868): unsure at all n locations
  Clone ID: PAT_MRT3847_42794C.1
tctttggggttgtaattggaaaactttaatcagactaggtatgcatcaggacatcatcatctcacaaatatcaaaagcaacacaagacaaaagcaacataacacaaatatcaaatagctataaacttaaactaggtaaatatcaggacatcatcatctcacaaatatcaaaagcaacagaacacaaatttcaaatagttataaaattaaactaggtatgtatcaggacatcatcatctcacaaatctgaagctgggtaagctactttagatcatattttgcaccatagacacagacttcaagaggcaacactgaataacttgatgcatacccatagtaattttgggaaggactaataaattaatctgtttcaacacctgcaggtctttgggagagggcctggagacatattctattgacgtattacttgcaagatagaacaaactgtttgaacaaaagagagaatgagaagaataattgcagcaatggaagcagcagtttgccaaggacctctacaataatctcgctctcaggaggccggacttcaagcttacgccaanggatttttatgaaaagcattcaacttttcactgacatcaaggtattgagaactggtattatttggtgtcgtaatatttttcataaggccattaatcatcgtagccacagaatcagtgtcccctagccaattaataaagactctctcttgaactagtatatccacatctctgttggtgtttacaaggaagtctaaaaaaccaacgtagtccgtaatgtaagattggaaaagatagtgacactgctccaatgccaccatattgcgaaacaaagtttcagtcaaatcatccactaccaactgcgggatttcc

SEQ ID NO: 79490 - DNA, 411 bp, Glycine max
  Clone ID: PAT_MRT3847_42795C.1
gtgcagagtgcgaagattcggaagctacaattggaaactgaaggtgcaataagagaagcagaagagacgaggagaaaagttcaagagctgaagcaagaagttgaaaaatcaagggctgtggctgaagaagcagaggaaaaacttgagctcgttctggtggaggctaaagaggcaaaagcagcagaacaaagagccgttaaagagatgaagattttgtctgaagtgggtagagtcccgtactcaaaattcaatggcaagatcaagatgtcaaatgaagagtttgaggcactgagagcaaaggccaaggagtgtgaggatttggttgaaaagaaagaggcaattgtgatggcagagctgcaggaaatctatgcaagaaagaatgaagtggacagaaaggtggaaactaatctg

SEQ ID NO: 79491 - DNA, 377 bp, Glycine max
  Clone ID: PAT_MRT3847_42796C.1
attatgaaaatttcaataactaaaatgtaaacaaaacatctccacctattacatttcactgggataaattttaattttcataattattaaaacatttttaaaacaatagtattgcatttcatttgacgaagtcctccaccgaaggaaaagaaggataccgtgcgcaccgtttggacagaaatactctgcagtcgtctttggggcaaatggtgggcacgtaaacgatatcatcacagccgtcggattcgtccctcttgaaatcgatcaacgtcgtgaacaaggcgatgaaaagaacaagatgattaaatgcgtacctttgaccaacacactgatggggcccagccccgaacgccagaaagtttcttttaaaatttttg

SEQ ID NO: 79492 - DNA, 372 bp, Glycine max
  Clone ID: PAT_MRT3847_42798C.1
aaccctacaaaaataaaaccccgcgttaattaaccaaagggacccaaccccacaaaattcttaaaattccttcccttaacaaaaattttatttatgcgttaccaccaaactcttccctttttaaacccacatacataaagctatttttaccacccttatcacaaacccaattactgaaacaccacctgccaaatgatcgctgacactttaaactttgacctaaaaaccagcttcctagaaaatatcacacaagagctcagaaaagaaaccacacatttattgtaaccaacatcccctgatgaaccagcccccacgattcacttcttattctggacaatcttaatgaccttgtctcccgtaggatccttattc

SEQ ID NO: 79493 - DNA, 581 bp, Glycine max
  Clone ID: PAT_MRT3847_42799C.1
ggctcgagctcgagccgaatcggctcgagctcactgattgtttcccgagaaaatgggttttcttttttcgttttcgttttcgttttcgtggaatagacgatgaagtcttatcgcttttaatttgtgaattttttaatttggttatgaaattcaccagactcatggtttcggacttgtggttataaatggaattggcgttgttggatgtactcaaacgttgatcgagcgacttcaggattgccttgcatacttttggtgtttgaagagctaatctgtctaccaaaatgaagggacgtgtaaggtgggatgaggctaatattggagaaattgaggcaaacaaacctgtgaggcagaaaattactgagcctaagactccatatcatcctatgattgatgatgacagcactctatctcatgtacgctgaagttttgatgcatgtattgataatgaaaatcctgctgaagcaatatggagtgctctgaatgatgtagccgtcacaaacagtgtgggcactggaatttctaggggttggacatcatctgaggatgagccagacgcaatggagcaagatgatgatgat

SEQ ID NO: 79494 - DNA, 150 bp, Glycine max
  Clone ID: PAT_MRT3847_4279C.1
gccacgcttcgccacgcgtcaacatattattatagtactattgagaggttgaaatgcaatctgatcctggcctgtgccagtctttggctctagagtggctccacaattcaagagggacaaggatgaagagccaatatctggggaggcttg

SEQ ID NO: 79495 - DNA, 301 bp, Glycine max
  Clone ID: PAT_MRT3847_427C.1
acgcgtcaaattcacctcactcaaactcgggattacagaaaccaacaacagttcctgccacgaaggttcacggaagttgccggaaactgcacttgggttgtttgggttaaccttggttctgcaacttccttctcacaccaagtgcaaaatcaaaagcaattcgccacctcccaacacctccaagcccaaagccccgtcgtcccttcattggccaacttcacctcttaaaagataaacttctccactaagcaatcatcgatccccccaaagagcatggccccctacttcccgcccctccttc

SEQ ID NO: 79496 - DNA, 1345 bp, Glycine max
  Clone ID: PAT_MRT3847_42800C.1
cttttttgtggtttatgatatacatatatgccatctgcacctggtgcaatctttgcgtggcgggcctggtttgcacctcattttgtcggccgccatctgtattgggcttagctgttctcgcatgggggcggctgctcaccacttggcaactcttggttcgtgtccctcgttttgccgtgaatgagcctttgatgatcgttttgcctagtccctccgggcgttggggctccatttcgcctcttttcgtgtcataagtacttgtgctttgggaacaaattttggtctgaaaatcgttgctttgcagagtataagatcttgctcccacgtctctgattacttgcaagcttcatctgcactcatggatcccaaccagcctgtgggtgaaaactacgccaatcccaggacttgcttctttcatgtcctcttcaaggctgcagccttggcattttacattctctcggccctctttattgataactttgtcatcattttcgtggtgactgtccttcttgccgcccttgatttttgggtagtgaagaatgtgagtgggcgaattttagttggattgaggtggtggaatgaaattaatgatctgggtgagagtgtttggaaatttgaatgtcttgacccacgaagtcattggctcggatgaacaagaaggactcatggcttttctggtggaccctgtatcttacagcggttctgtggatagtgctggctatattctcactcataaggcttcaagctgattatctccttgttgtaggagtttgtctgacccttagcattgcaaatattgttggttttaccaaatgcaaaaaagatgccaagaagcagattcaacaatttgcctctcagacaattgcctctcggttctcatctaccttacagtcagcattcagtgttgtctgatcgtcaaagatggaaatgcaagttgaactgttcaattattgagatgcagtggaagtttgtacatgattatttcggccagcatcgaattggatttatcaaacttgcatagttactgatacagcaaatgcaaaattttgtactttttacatgaaatggcttgaatgagactttgatgatcgaattacttagtaaaacagttctttgtaggtgtaaatcatgttttttcttgtattctttttacatcgatggattcggatttatattctgtatgtcaacaaatctttatggcatataatcagaggatattgactcatggaaattgaaggataattataaattacgaagttgcaaaaaaaaaaaaaaaaaaaaaaaaaaaaaaaaagggcgccgccgtgagtgagctgtcgacacagaataatccggaccggtccgc

SEQ ID NO: 79497 - DNA, 405 bp, Glycine max
  Clone ID: PAT_MRT3847_42801C.1
ctctcttttttttattctttttttatttttttaaaaagaaactggctattttggtactgaatccggtgtgactggaagatttactccgaaccacctactgaggttctaccatctgaactccgaagagaatgtcatggccgaattgcaaaagggaaacaacactcgcgctacttcgtgttggctaaatacctttctgtactaatttaatttcattaacgcgtttatgttgcatcaaaaaaaaagtgttccattgatggatcgccttctcaaatctggctctatcattctataggatgattcaagcactttagagtttgattccattaaggctataatcaaaggttgggaaaatcacacgcttgatttagaatctaaccttggttatttggagaggggggcttccct

SEQ ID NO: 79498 - DNA, 277 bp, Glycine max
  Clone ID: PAT_MRT3847_42802C.1
cggcgcgcccacctctctgctcccccccctcccttttttttttttttttatcccaccacaaaaccatgtacaacggggggggggtgtggtttacaccacgatcccattcaatattgttgatcctaacttataacctatcaactccgccccggacgctccatcccatcccacccctcaatgtttcttttcctacaagagggcccttctgtttttcctctccggattttttttgtcagaccacgcccttgtctttcctgaggagtaagttctttccctt

SEQ ID NO: 79499 - DNA, 265 bp, Glycine max
  unsure (1)..(265): unsure at all n locations
  Clone ID: PAT_MRT3847_42803C.1
aaacccgggtgcagttttaaaaaattttaaacttacaattaaaatcggcctcgaatgagccnnaataagttcatttttggtgtagtaaaatcccgatattctacgataccacagccatttggtgctgcgcttgaaattgaatacaaatactgatccagaccaatgaattaaacgtagtacatacaagtgcggagtgccgttttgtgaactcctaggtatcagaaaatatactaggtggaaatgctcaatnnnaannnnccttgca

SEQ ID NO: 79500 - DNA, 251 bp, Glycine max
  Clone ID: PAT_MRT3847_42804C.1
aatacgcatagcgcactggacgccatttcgaatacaggttgatggattgaagtgccatagttggccgaagaggatggcttgtaggtgatgctctgaatgccttttgaagctagtgaactcaatatcgaccattgctgatctgcccacggtcgactatgggactgatcagtttgatgaatacactacaactgcgaataacactctcactgtcagtgatgatcagactgtagagcaactaggccgacccatgc

SEQ ID NO: 79501 - DNA, 331 bp, Glycine max
  unsure (1)..(331): unsure at all n locations
  Clone ID: PAT_MRT3847_42805C.1
cattgatagattctcatgtccagattgcaacatanttggtgcaatgcttttggttgatacttatgataccaatccttaaaatgcaggtcgtagtattttcgttgcgcctttcataggcagaatgcccattcaggtggtgacatttccgaataccatagtgcagattgaaccagacatgaattcaaggtttcagcttttgagtaccactaccaatggtgatgtttttcaaagtgaagatcttccaatggttaaaggtaatagagcatgtgctgctgttggcttgacattcaattacactccaacttctttgttggaaatctgtttgcaaaaa

SEQ ID NO: 79502 - DNA, 656 bp, Glycine max
  Clone ID: PAT_MRT3847_42806C.1
aaacactatcacacaacatatgagcttggacttgtggaacacaacgagtgctttggcttgccggtttgacaagtggggggatgaccagaagagacgggcctggcatgggagagagccgcagccattgtatgcaggcggcctcagaactcacaaagttagacggtgggaagaaaaccaccgggccgtaattacgtggagagtggtatactacttctccagagcacctttgggaaagctcgtacgaagattgtaagctttgacaccgacttcttcttttaacatctcatcggactctagtactccaagagatggtctagccttgttcattgcacacatattgacactaaagaacctctccaaactctggcagggagcaaccttcgtctcttaccatcagacaacagcagctgctgctgagttagacacctaccctacagggtgatataggcgcgatctcatattcatagacacaatgaggatcagatgtgctcgtctcatcgtgttcaaggctatcatgtataggtggagagatggcagaatgtgactatagccactgtacagagaacctgtaactgtgcctctaagagactcactgacgctgtattctatgctggcactcagacagtgacactctcccatgagattgagctcaacaa

SEQ ID NO: 79503 - DNA, 234 bp, Glycine max
  Clone ID: PAT_MRT3847_42807C.1
gggcttgaaaattctcttacttttacgaagaagaagcatagctggccttataacatgaatggtaactttaagcataagtatggttgagttatataaggggacattatacactatctatacataaaccatagaaagcaagggacaagacatttggaacaagcacctagttaatgcaagaattcttgataaaatggaaaggctcttagctgattaaaaaaaaagcactacggatcg

SEQ ID NO: 79504 - DNA, 352 bp, Glycine max
  Clone ID: PAT_MRT3847_42808C.1
tgcactctgcccgcagccgtgagctcggatttcgcttcgagagcaataacaatatgagacatactcattccttgaacctgaaacctagctccatatccctgcacttaccatggcatggcatcagaagcaaatgccggcagcacctacgacacgtggaatggatcaccactggctacactgggacgatggaccgccagtcctgtgttgcagccgtaaggctatgactgtgagacacctagtcactgccttcctggagctataggtgtgcggggagcgaagaattcgcgctgggcatgaataccactaccatattgataggggtgatgatcgctgaccactaccaaaacgggaa

SEQ ID NO: 79505 - DNA, 323 bp, Glycine max
  Clone ID: PAT_MRT3847_42809C.1
tggttacgtacggacaaaccggagctatccaccacggttacattagcagccgcagccatactgaggaagaagcgcccgcgcgcggtaacccagactagaccctttatgaaggacaaggagtgcgtggtcatcaaagtcggcgcgcccccaggtgacaactgaagagggaaggctcgcggtcggaagataaggcgctctgtgcgagcacaataagcaactcaactctgtcggatacgacacaataatggcgaccaccggcaccaacaagatgatacggacacgacttccctaccagaaaatgatcaacaggaccatgatcaccc

SEQ ID NO: 79506 - DNA, 340 bp, Glycine max
  Clone ID: PAT_MRT3847_4280C.1
gccgacatttggtgaccttaaccacctgatatctgccaccatgagtggagttacttgttgtctacgtttccctgggcaattgaactctgatcttcgcaagcttgctgtcaatcttatcccattcccttcggtccattattttatagggtgggtttgcccccttaacataaaaggatcccacaattccctgcctttactggtccttaattgactaacaaatttgggtagccagaaaataaatttgctcttaaccctgctaccggcttatttgactctttcactttttcccagtaaaatatccccaatagttgattaacaattaatcattcccaacaaaaat

SEQ ID NO: 79507 - DNA, 787 bp, Glycine max
  Clone ID: PAT_MRT3847_42810C.1
agaggactgccgttgtatatattacaagaactggtacaaatcaaagaagaaggctttcaccaagacttccaagaagtggcaggatgaattgggccgcaagtctattgagaggaacttcaagaaacttgttcgctactgcactgtcatcagggtcatctgccacacacagatgaaactgttgaggcatcgccagaagaaggctcacatcatggagatccagctcaacggaggttccattgaagacaaggttaagtgggcgcgtgagcacctggagaagcccatccctgtgtccaacgtcttctctgctgacgagatgattgactgcattggtgtcactaagggtcacggaatgaagggtgtcacctcccgttggcacaccaagaaacttcccaggaaaacacacaagggtctgcggaaggtcgcgtgtattggtgcgtggcatcctagcagagtatctttcactgttgccagggctggtcagaagggttaccaccacagaactgagatgaacaagaagatctaccgcattggacagggcatccacatcaaggatggcaaggttgtcaagaacaatgcctcaactgaatacgacttgactgagaagaccatcactctcatgggtggcttcccccactacggtgaggtcaacaatgactacctcatgatcaacggttgtgttgttggtcccaagaagcgtgctatcaccctcagaaagttcctgatcactcacaccaagagggtcgctcttgagaagatcaatctcaagttcatcgacacatcatccaaa

SEQ ID NO: 79508 - DNA, 455 bp, Glycine max
  unsure (1)..(455): unsure at all n locations
  Clone ID: PAT_MRT3847_42811C.1
gcacgagctctaacctaacaaaacccccaaaattcaaagcaaaagctagaaatccagcgagttcgggaacgttcatctcaacgattgtgttctcctgttggtgatgttggagtaggtggtgaatcacatttggggatgttggagttgctagaatagtttttgaactcgttggagctgccggtgatgttggtgtcgtaggtgtggaagctctcgtcggcgacattggcatcgtcgcgatagccggtgaagctctcatcgtcgccctcgcagtggtgaagttctggcccttgctatggaagccgagaacgacatcctcagagcacagagagcacccaaatccttccctccccctatatttgtatcccacttttatttcatttctattttctctccaaaaacctctctctcttttccctttanacgccgaccaacgacacgacaccatttcgatggtg

SEQ ID NO: 79509 - DNA, 232 bp, Glycine max
  Clone ID: PAT_MRT3847_42812C.1
aataccacacaacgggaactaaacatatgaagaatatggcgtccttaagctcctcattagtgctgctccgtgctgctccaagtgcaacccgccaagttccggctgactatgagatgcccataatttacaagccacctgcatacacacggccggtttataagcgcccagttgaagaactaccagtgtggctacctccagtgtagaagcctcgagttgacaaaccacctgttta

SEQ ID NO: 79510 - DNA, 263 bp, Glycine max
  unsure (1)..(263): unsure at all n locations
  Clone ID: PAT_MRT3847_42813C.1
gagcatgtgaatgaagncttagatcttttttaatataatttgaatttaaaattatatgtttacctntnttttncggnatatggattgaatgtcttnttatcaantccttcttcattttctgttttgatctnnttgtgagggaccccaaaattgacaatcttnanccagcttctcattaggnaaaattgactgnnngatggncctngattgtgctgggaaggcagnatatactgctgtatgggttgctgctgtgtnatgtncnt

SEQ ID NO: 79511 - DNA, 105 bp, Glycine max
  Clone ID: PAT_MRT3847_42814C.1
cggaacattttgcgacacctatggcggcagctggggaacacgagccattgaaggatttacgaagagcgcttatgagatgtacaatgacactggcatgtatcggtg

SEQ ID NO: 79512 - DNA, 245 bp, Glycine max
  Clone ID: PAT_MRT3847_42815C.1
cactctcacatattattagcttttagctctctctctctctctctcagtccttcttcttcgcgcagccaatatgagctcaatcgttcagggtttcaccaagtcgctggccattaccattctctctgatatcggcgtcaaagctttttcttcagctgagatacttgctatgcgtcatgcaatacgcctactcctatcaagttgcttatcggctttgattgtgataaccattctctctgttcttgttg

SEQ ID NO: 79513 - DNA, 123 bp, Glycine max
  Clone ID: PAT_MRT3847_42816C.1
attatttatttttctttatcatactcatttaaatataagggctcagggaagggaaggaaatttaaattaatggagttgattgtgaataccctgttaccatatcaacccgtattactccagtta

SEQ ID NO: 79514 - DNA, 228 bp, Glycine max
  Clone ID: PAT_MRT3847_42817C.1
tatcctgtgacggaattggcaccttatcatactaggctcttgtctaaggcgcttttccacaaataaattgtggcggtaatttctactttcttcagtctgtcaatgttaccgtctgttgctaatcatggaccttgacgagttaccttacatcggtctaaaaataggcttaatatgccattacgtcggtataagtatgtcaattttttgtgagcccttgttaaatttttg

SEQ ID NO: 79515 - DNA, 297 bp, Glycine max
  Clone ID: PAT_MRT3847_42818C.1
tctgacttttatgataaagacaaaaggattcgcacagctcttgggaaaggtaagaaaattgtttctcttactagagttgatccttttccagtagctttactggctgttctttatggtgttaagaatgaaattctgagttctaacgccactaaccctatgctgacgcgacttattgagaactgtaagagtctcaaatatgtggatgatgagtgccctttggcatttgtgaactagtatgcgatattttattcacttaaataaagcgcattactatgtgcattgagcgtgttgtaatat

SEQ ID NO: 79516 - DNA, 153 bp, Glycine max
  unsure (1)..(153): unsure at all n locations
  Clone ID: PAT_MRT3847_42819C.1
tcgacgctcattagcgtcgttctatatgtgatcatccgtaagatatcacattgcactagtgccgtgcgtattctacagacgatcagtggactgggcagaaacaccatggtcgcttcaccacacactttagatgcgcgctatgcagtcacatng

SEQ ID NO: 79517 - DNA, 385 bp, Glycine max
  Clone ID: PAT_MRT3847_4281C.1
gagtttggtttattttttttttttttgaaaaaaggcggagcaagaagattaccttataaatgatggactaaaaaacaaaaaaacaatggggcgcaaaaaccatgacaaccaaaattaaaaggacaagaagcaaggaacgacaagcagcatcatcacaaaagaacgactgaggcatgaaaactaacgcgtaagatcgccaacaaccaccaaaagcaaccaaaaacggagaaaaagcggaaagaaccccaaactgagcatccgcatgaccgtacgtttaggagatgtctacaatggaaaacaagaacggatacgtttgaaaagggaacacgcaatcccggtcacattgaacacaccaaacggaaacgaaagctaaaaaacccacacc

SEQ ID NO: 79518 - DNA, 157 bp, Glycine max
  Clone ID: PAT_MRT3847_42820C.1
ggaccaatatattgctctgaaaggattggacacagatagggcaatccaagctatagaaggtgttgaaatgaaactgaaggacattatgctgcctttgatgagggagggcagcaacggaattaatccttatgaagagatactggacgcagaaagggct

SEQ ID NO: 79519 - DNA, 395 bp, Glycine max
  Clone ID: PAT_MRT3847_42821C.1
cgagcgggactagacagctcccgctgacgtaggtggacccgctccggtggaagaatactacaccttccatgggcgtggcggcaccaagaacaagtgtgaaaacggaactgcaacatttgcacgcagaccgtccttccttggaaccctccaccattacgactggaaagacaaacgcctttatgaccattgcgtacacgttgctgcaccggctggctccatcatgatcgatcaagaaagctgcccaacacgcactgcgtgctagcaactgggaaacggcttaagaatgctacactcacaaacgacatcggcggttccttccttcccgagcttatatccgcttaccttttgtgctacaaccgatccatgataggcgtagcaccctaccggtcctattg

SEQ ID NO: 79520 - DNA, 162 bp, Glycine max
  Clone ID: PAT_MRT3847_42822C.1
cacaagcctacaaacactcattttccacattctcaacaaacactccaaacaacggcaaactgttatttttaaaacaaccaccaccatacatactatctactcacatcaagctctaacactaactatcacacgcttctactctatcaatgataacatataaca

SEQ ID NO: 79521 - DNA, 456 bp, Glycine max
  Clone ID: PAT_MRT3847_42823C.1
aaaaaggaaaccggatttaaacccccttaaggcaaacttggggccccaaaagggggggggggcctttaaccccgggtttaacccaaaaaagaaaatggcccgaccaatggccccaaaaaaagttgggggggaaggcaggcaaaacgggcccccacccaaaaaaggcccgggctgggtaacccaaaaagtttggaacagtcaagaaaaaaaagggggggcccacaattatttataccacggaagcaaaaggccggggggaaataaccaactggcccttaaaagggcctggaaacaaacccaaaaaactcggggggggaaaaacttttaactttaaaacctttccaaaaaaaaaagagggaggcgggaacccttttaattaaacatccaaaaccctggagaaaatggaaaaaggggctggcgggaggcagtttattggggcccctgggaaggggggca

SEQ ID NO: 79522 - DNA, 1715 bp, Glycine max
  Clone ID: PAT_MRT3847_42824C.1
aattcggcgaattaagcaacattttactgggtatataagtggagagtgtaactgaaattatgtggaggtgcatcaatggaagaattgccagaagatttttatccacttcttctgccagtgcccgtggttggtgggaccatgtaaggccagcaccgaaggaccccattgttcgtgtgaacgaggcatttctagctgacccttttccccataagatcaatcttggaataggtacttataagggtgatgatggcaaagctttcattcctcaaagcgttcgtgaggcagaaacaaagattcagagatgtaaattggaggagtcaaacgcttccgcagtcagatcaaaatttgttcaggagtgtgtgagattagcatatgggaatgattcaaatgttgtaagagaaggattgtttgcaggagttccaactctgtctggaaccggtgcatgtcggctttttgctgaatttcaacggcatttctatcccgattctcaaatgtatctaccagatcctacttggtcaaatcaccacaatatatggagacaggctgaaattccagtcaaaaccttccactactaccatccagatacaaagggtttagattttgctgcactcctcaatgatgtcaagaatgcaccagattgttctttcttcttgcttcatccgtgtgcccacaacccaactggtgttgaccccactgaggagcaatggagagaaatatcataccagttccaggtaaaaaatcatttcccattctttgacatggcttatcaaggattttcaagtggggatcttgacaaggatgcaatagcacttcgaattttccttgaagatgggcatttgattggttgtgctcaatcttttgcaaagaacatgggattatcagaacataaagctggttgtcttagtgttttgtgccagagtataaagcaagtagctgcactaaaaagccaactgcagctgatgtcccatgcaatgtatagcagcattccttttcagggtatttcactagttactatgatattaagcgagccagatacagaagcactttggagaaaagagataaaggtcatggctaaacggattcaaactatgcgaactaccttgcggcattgtcttgagaacttgcattcatctttcaattgggagcacataactgatcaggttggcatgttctgtttttctggattaacccctgatcaggttcaacagatggagaagctgttccatatatacatgacccctgatggaagaatgagcatgtcaggtgtgacctctagcaatgtggattacttggcaaatgcaatacatcaggtgaccagaatcgatgaggaagccctaagatcatgttacgtatagcattattagtccttttctaccttattctgatcatagggtacataaccattttttctcttttgtaattatctatgtacctgatatacatcataccaatttagtgaaaatattgaagtcaatatttttggaccatcgtggatattactctaaaaaaattatttgtaaacacagccacatattaagtgatgaatgaaataacagatttacgtatgcctcttgaaaaaatagttatgcatcttgacttgcaacagctatgaataagcttttcttgtccaagttggtctagttttctttctttgtctccaataaaatcttcagttggtgaggccaagataatatataaaacttaagttgtaagtg

SEQ ID NO: 79523 - DNA, 353 bp, Glycine max
  Clone ID: PAT_MRT3847_42825C.1
ggcccttgagacgatgactgctacccaccaattgaaaattcgcagttatgtcagtggcatttgttgggcgttcactattttatacatctgtatcagtttcctccatgaaaccaattgatcctcggtggtggtgatgaagcattcattgatcttgtgggggtttcattatccaatgcattacttggcatggatgctaatgaccctccaaaaaccttggctaccatgcaattaattggttccatattttcaaatttggctttattggatgataaaattgattacctatcatttatcccgattattcgcttttcacagtggcttgattagttcttatgccccctatatttcttact

SEQ ID NO: 79524 - DNA, 1707 bp, Glycine max
  Clone ID: PAT_MRT3847_42826C.1
tcggacgcttgggtttgcaatgcatatacagtttttcaatatctgcaaaaagtttgtatgctgtagtcaccacaatatatggagacaggctgaaattccagtcaaaaccttccactactaccatccagatacaaagggtttagattttgctgcactcctcaatgatgtcaagaatgcaccagattgttctttcttcttgcttcatccgtgtgcccacaacccaactggtgttgaccccactgaggagcaatggagagaaatatcataccacttccaggtaaaaaatcatttcccattctttgacatggcttatcaaggattttcaagtggggatcttgacaaggatgcaatagcacttcgaattttccttgaagatgggcatttgattggttgtgctcaatcttttgcaaagaacatgggattatcagaacataaagctggttgtcttaggtaagaatagtcctatatcctagtgagtagagattcagaggcagagcatattctatgacacgtataatagaagttagatgtcaaacatgttccataacgcatttttgaggcaaggttcaagtacatgatattatgattgttataacatgaagctcaactttgtaataatattgccattatgtttaactattttgcttcttatgttcttttcagctttactaatctacaataaaatctataacagtgttttgtgccagagtataaagcaagtagctgcactaaaaagccaactgcagctgatgtcccatgcaatgtatagcagcattccttttcagggtatttcactagttactatgatattaagcgagccagatacagaagcactttggagaaaagagataaaggtaatattcaactttttaacactccttttttgacctttacctttctaaattgattgaggatctaatcgcatctgatggcaatgctgtgtttgaaggtcatggctaaacggattcaaactatgcgaactaccttgcggcattgtcttgagaacttgcattcatctttcaattgggagcacataactgatcaggtttgggatgtttgatttgtaatatttatatgaagttacaatattcttgaggaatcgtattatatatcgagcacacagttttacactttgatgcatattcaaatgcaggttggcatgttctgtttttctggattaacccctgatcaggttcaacagatggagaagctgttccatatatacatgacccctgatggaagaatgaggtattctttaaaggaaatactaatacttcaaccatggttaccatggttaaaatctcaattttttttctcttcctttgttaatttgatagttataactgcactagagaatattctaattcttcctatataactccttggtgatacttgcagcatgtcaggtgtgacctctagcaatgtggattacttggcaaatgcaatacatcaggtgaccagaatcgatgaggaagccctaagatcatgttacgtatagcattattagtccttttctaccttattctgatcatagggtacataaccattttttctcttttgtaattatctatgtacctgatatacatcataccaatttagtgaaaatattgaagtcaatatttttggaccatcgtggatattactctaaaaaaattatttgtaaacacagccacatattaagtgatgaatgaaataacagatttacgt

SEQ ID NO: 79525 - DNA, 3015 bp, Glycine max
  Clone ID: PAT_MRT3847_42827C.1
caattctctcacactcaaacaccttctttgtcactcgacgccatgatttccaacccccgtaaacctctccgctcctgcgatccaattcttgcaccctttgacattcactggcataactgacgcactgcacacaccaccacttcgttagtcccaatgctattattttttagaagcagacaactccccaccgctcccttactctatttcacaccctttgtataatctgacattagtagcgaaggttgttaaagccagcatcatataggttcatttcccattctactcactcacacacacacacactctctttccatgggtccgtttcgtaaacccttccttgcatttctctcggttgttctatttctgggtctctatgaggcagcagcagaacagactcagactcacaagagtacttacattgtacacgtggcgaaatcggagatgcccgagagcttcgagcaccacgctgtgtggtatgagtcgtcactgaagaccgtgtctgactcggcggagatgatttacacctacgacaacgccatccacggctacgcgacgagattaaccgctgaggaagcgcgtttgctccagcgccaaacggggattctggctgttttgccggagacgaggtacgagcttttcacgacgcgaacgcctttgtttctcggacttgacaagagcgccgacttgttccccgagtcgagttcgggaagtgacgtcatcgtcggagtcctcgacaccggcgtctggccggagagcaagagcttcgacgacaccggactcggacccgttccgagcacgtggaaaggcgcgtgcgagacgggaacgaatttcaccgcgtcgaactgcaacagaaagttgatcggagcaagattctttgctaaaggtgtagaagccatgcttggtccaattaacgaaaccgaggagtccagatccgcgcgcgacgacgacggccacggcacccacacgtccagcaccgccgctggatcagttgtttccggcgcgagcctcctcggttacgcctccggaacagcgcgtgggatggccacgcgcgctagagttgctgcatacaaggtatgctggaaaggagggtgtttcagctctgacattcttgccgcaattgaaagggcaatattggacaacgtgaatgttctttctttatctctcggtggtggcatttctgattattacagagacagtgtcgctattggagctttttcagcgatggagaaagggattttggtttcatgctccgctgggaactcgggtccgggtccctacagtctctccaatgtggctccatggatcactaccgtaggcgctggtacactggatcgtgacttccccgcatacgtggcgctcggaaatggactcaacttctccggcgtttcgctttaccgcggtaacgctttgccggattcttctttgcctttggtttatgcagggaatgtgagtaatggtgctatgaatgggaacttgtgtatcacgggaacgttgtctcctgagaaagttgctgggaagatcgtgttgtgtgaccgtgggttgaccgctagggttcagaaaggctccgtggtgaaatccgccggagcgttggggatggtgctgtccaacaccgccgctaacggcgaggagctagtggcggatgctcatttattaccggccaccgcagttgggcagaaagccggtgacgctattaagaagtatttggtttccgatgcgaaaccgacggtgaagattttttttgagggaaccaaggtggggattcagccatcgccggtggtggctgcgtttagctcaagaggtcccaactcgatcacgccacagatcctgaagccagatctcatcgcgccaggtgtcaacatcctagcggggtggtctaaagccgtggggcccaccgggttgcccgttgataacaggcgcgtggatttcaacatcatctctggcacctccatgtcgtgccctcacgtgagcggcttagccgcgctgatcaaatcggctcaccctgattggagcccagccgcggtgagatcggctctgatgacaacggcttacacagtttacaaaactggtgagaagttgcaagacagcgcaacgggaaaaccatccacgccgttcgatcacggttcgggacacgtggacccagtcgctgccctcaatccaggactggtctacgatctaacggtggatgattacttaggttttctctgcgcgttaaactactcagctgcggaaatcagcactttagccaagagaaaattccagtgcgacgcgggcaagcagtacagtgtgaccgacctcaactacccttcgtttgcggtgttgtttgaatcatcagggagcgtggttaagcacacgaggactctcactaacgtggggcccgcgggaacttacaaagcttccgtgacgtcagacactgcgtccgttaaaatctcggtagaaccgcaagtgttgagtttcaaggagaacgagaagaaaacgttcaccgtcacgttttcgtcatcgggttcgccacagcatacagaaaacgcttttggaagggtagaatggtccgatgggaagcacctggttggatccccaatttcggttaattggggttgaaacttgaaaaaggttgatgcaaattgcaaggttcatcactcactcgaagaggggtgtgtcttgattggctagtgattatagtatttaatatgttactattattactactattaataaatttaacttttgttgcattgatgatagcggggacctcgtgcttgattggtgttggttctgtttgttccctgggagaaatgttgcaaaggggaaaaaatgtttggctcatgtgtttcttttcttcccggtgtacagcgttctaatcattgatgaatatttttcgtcgaccatcttgacattaaagtttatgttcaactactttaaagtgaattcatttaactttccattttaatttaatgtttgcatcaaagccactagtagttgtaaccattctcgtacgctatatagatctacattaatggt

SEQ ID NO: 79526 - DNA, 903 bp, Glycine max
  unsure (1)..(903): unsure at all n locations
  Clone ID: PAT_MRT3847_42828C.1
aatcagcactttagccaaganaaattccagtgcgacgcgggcaagcagtacagtgtgaccgacctcaactacccttcgtttgcggtgttgtttgaatcatcagggagcgtggttaagcacacgaggactctcactaacgtggggcccgcgggaacttacaaagcttccgtgacgtcagacactgcgtccgttaaaatctcggtagaaccgcaagtgttgagtttcaaggagaacgagaagaaaacgttcaccgtcacgttttcgtcatcgggttcgccacagcatacagaaaacgcttttggaagggtagaatggtccgatgggaagcacctggttggatccccaatttcggttaattggggttgaaacttgaaaaaggttgatgcaaattgcaaggttcatcactcactcgaagaggggtgtgtcttgattggctagtgattatagtatttaatatgttactattattactactattaataaatttaacttttgttgcaaacaaaaatgttgggtttatttatttatccagctggaaattgatgatagctggggccttatgcttggttggtgttggtctgtttgttccctgggagaaatgttgcaaaggggaaagaaattttaaatggttgggctcatgtgtttcttcttcccagtgtacagcgttctaatcattgatgaatattatttttcttagaccgaccatcttgacattaaagttctgttcaactattttgattggattacctactttaaagtgaattcaaactttccattttaatttaatgtttgcttgcttcgcagctagtagttgtaaccgttcttgtacgcaatagatctatatacattaatagtattttcgggggggggggggggggggggggggggggggggggggggggg

SEQ ID NO: 79527 - DNA, 1648 bp, Glycine max
  Clone ID: PAT_MRT3847_42829C.1
ccacgcgtccgggaagagctcacatggcgtttgcatcttgaaaaaaaatgagggtttctaatgaagaggctaagaaagtagagatttccaaacttcaaaagatgttagaagctctgaatcttgaattggatgcagctaaattggcaaaaattaatgagtgcaacaagaatgctgttctgcaaaatcaatttgaattgtcagtaaaggaaaagtctgctttaaaaagagagctagttgcagtggatgaattacgaaaggaaaatgctcaattaaaggttccattggatgcatttgaaaagaagtgcacaaccttagagcttgagcttatgaatgctcaaaaaggccgggatgaaaccatggagaaactgagagagtctgaacagaagtgctctcaacttgagcaaaatgagaaaaggcttgaggaaaagctattgaatttagaggatgaaaatcatgttcttcgtcagaaagccttaagtacccctcttaagagtaaccgtccatgttttgccaagtcaatatcagaaaaatactcaagtgcaatcgcctcccgtactgaacgaaagaccatatttgagtcacccacacccacaaaacttattgccccttttacactaggcttgtcagactctcggcgatctaagttaacagcagagaggcagcaggataactatgaatttctctctaaatgcataaaagaaaatttgggattcaaaaatggtaaacctattgcagctcgtattatatacaaatgtctacttcattggcattcatttgaatctgagcgcacaaccatttttgattccataatcgaaggcataaatgaggttctaaaggttagggaggatgacatcatcctaccatattggctgtccaatacctccgcgcttctatgccttttacagaggaacttacgttcaaatggctttttaactaccactgctcaacgttatcctggatcatctggtttgaccagccgggctgggcatggaccaaaatctccattaaagtttattggatatgatgatggtgtattgcatgtggaggcaagatatcctgctatactttttaagcaacaactaactgcttgtgtagagaagatttttggtcttttacgtgacaatttgaaaaaggagctttctccacttctgggatcatgtattcaggctcccaaaacaggacgaggactgcatgggggaaaatcatctagatttcctggtgggattccccaacaatcatcaagtggtcagtggagtaacattgtcaaatttttggattcactcatgagcaaacttcggcaaaatcatgtatgcaattgtaactaggcccgggccgaaataatatttcattcattgatgtaaaactgtaaatatttgtttcattgaatgtttgcccacccgagttacaaattaatttcaccttgagcaatttgttgtattccgtgctataaatgccactaataaaagcactccttgtaaatatccgattttttagtaaaaggagtggtgggagtgggagttgggagcccctaaaaaaccatttaaaagggggggattggcagagtagtttcccctgtttgttccgttaaagctttggtgtgacataatttgcccttggtgtaaaaaaatttattttccttccggtgggg

SEQ ID NO: 79528 - DNA, 356 bp, Glycine max
  Clone ID: PAT_MRT3847_4282C.1
agaaaaaagaatgactctatatgaatgatgggagcataatcgcgaaccgggtcatgatcatggggagcatccaaacatagacggcataattctaaagcctgagtgcctaattgtgaattgagctaactttgtactatacattggatgagggatcactctgagaggaggcagtagccataatgtgcccacgatgagcctgcaccggaggcgaaagatgcagcctatcggcctgaaggggcaaaccatgagcgtgcacagttatcaggattagaaggtcaatgcccagctgagcttggcttactatcgataagtgagggccagatccagaggctcaagctacctggattattggaagg

SEQ ID NO: 79529 - DNA, 409 bp, Glycine max
  Clone ID: PAT_MRT3847_42830C.1
gaactataattcatctaagttttgaaagatgcgcgcttggttccatttgaagtttctgtggcagcaggttagctgggtgaagcaactcttcatcagacgtgtcaaatcacaactaaacaaacaaatcaaatacaccaccaagtatcagatcattggggttgtatgccctgcattactctcttttttattgcggttataacttattcttttgtgcattgggaatgtgtgggttttaagattctcctctcacaattgggcagggtttaattttttttttggaataatcatgtaccattttgaatttatattgatgctactattgcttaccctgtgcatggcaataccatctattcatgctcttatttggatctattgcaggctaaaagacgacgtggtcgaaccccaacgc

SEQ ID NO: 79530 - DNA, 1206 bp, Glycine max
  Clone ID: PAT_MRT3847_42831C.1
ggctcgagctcgagccgtttgaaaagaagtgcacaaccttagagcttgagcttatgaatgctcaaaaaggccgggatgaaaccatggagaaactgagagagtctgaacagaagtgctctcaacttgagcaaaatgtgaaacggcttgaggaaaagctattgagtttagaggatgaaaatcatgttcttcgtcagaaagccttaagtacccctcttcttaagagtaaccgtccaagttttgccaagtcaatatcagaaaaatactcaagtgcaatcgccttccgtactgaacgaaagaccatatttgagtcacccacacccacaaaacttattgccccttttacactatgctattttaaggacaactttttttaatgccaccaatattgttggctgaatgatatatttatgctcaatctggaagaaatgaagagaaataaaaatatcttcttcatgatagaaaaataggaggtacaagcagctgaatggatgaaattatgcttaatgttagccactattttctttctggaacttaccacaatcgtgagcttgcatgagagttgtaagaagaacttgtggaatacagaggatgtgaagagggtcataagtatttcttgggtaggatcagtttagtataggcctaaaatggaagtccgagaaatttctacaagcaaaggccatgtgtagttgttgcaattgtagggaagcaaaattggactatgatatggagagtggagaccaattccagaaattccattgagaaatatctacccccatggttgttaaaatcgcgctttaactcatgaaatcgtatgattttacgattccaccaagggtcggcgagttgaatcggaagtagaatcgaaaccggagtagactcgtccgatttagcgcagactcgggcgagtttaggtagactcgcgagtctgcgacgagtccgcaagttcatgaaattttcaaaacgacatcgttttgaagcagagctactcccttactcatcatgagtcgtgactccgtggccgtgctgtgctgaagctgctactcaccgctgttcactcgcaatcgtcatcgctggccctcaatcgcggtcctccatcgtcatcggccgtcgctgcctcgctggtccttcactgcgctccaagctttgcttcacgtcaaaacgctaagataactataatttctcttttaaatgcttaaaagaaatttg

SEQ ID NO: 79531 - DNA, 630 bp, Glycine max
  Clone ID: PAT_MRT3847_42832C.1
ggctcgagctcgagccgtttgaaaagaagtgcacaaccttagagcttgagcttatgaatgctcaaaaaggccgggatgaaaccatggagaaactgagagagtctgaacagaagtgctctcaacttgagcaaaatgtgaaacggcttgaggaaaagctattgagtttagaggatgaaaatcatgttcttcgtcagaaagccttaagtacccctcttcttaagagtaaccgtccaagttttgccaagtcaatatcagaaaaatactcaagtgcaatcgcctcccgtactgaacgaaagaccatatttgagtcacccacacccacaaaacttattgccccttttacactaggcttgtcagactctcggcgatctaagttaacagcagagaggcagcagagcggtatatttatgctcaatctggaagaaatgaagagaaatgaaaatatcttcctcatgatagaaaaataggaggataactatgaatttctctctaaatgcataaaagaaaatttgggattcaaaaatggtaaacctattgcagctcgtattatatacaaatgtctacttcattggcattcatttgaatctgagcgcacaaccatttttgattccataattcgaggcataaatg

SEQ ID NO: 79532 - DNA, 228 bp, Glycine max
  Clone ID: PAT_MRT3847_42833C.1
aaaagtacctggtgctctataataacatgccataagacacccaatcccacgcgaaaccacgaagccacatgacggaataaaaaaaccacatgatactatgtatcaagcaaaacagcccaggcacaatataaaagtggacaaggcaagctctgttacctaaaaaaagggacccacggtatgctaggctacgcaccttcccaaaccatgaatttaacacacagccccaag

SEQ ID NO: 79533 - DNA, 392 bp, Glycine max
  Clone ID: PAT_MRT3847_42834C.1
gaggctatctaaataattttctctagtaattcgggtttttggttttaggggtagttattttttgtggcggagttgagaagttaatattgattttgtcgttgaatctcacttgatgattgtctatcatacaaaaaaaaaaaaaaaaaaaaaaaaaaaaaaaaaaaaaaaaaaaaaaaaaaagaagaacaatctaaaaaaaaccaaaacaaaaaaacacaaacaaaaaaaaaaaaaaaatctcctatgggggggggccgttttaaaggaacaagctttccttccccggccttgcaacctaaaaatttttttatggggcccccaaaattaaattcaggggccggggtttaaaaccgtgggggggggaaaaacctgggggtccccaaatttaatcc

SEQ ID NO: 79534 - DNA, 545 bp, Glycine max
  Clone ID: PAT_MRT3847_42835C.1
ggctcgagcgtgatataaagtcagcaaatatattaatagacaaaaacttccggggcaaggttgctgattttggtttgaccaaactgacagaagttggaagctcatcgcttcccactggtcgtcttgttggaacatttggatacatgccaccggagtatggataacttaatgttcttttaattaagagtgttgctattcatattgaatatttaatcaaatttattttccaagttcacagtcagtttttttaatgctagaatgaatgctactactgcagctggcaacttattggcattcccgaaaaatgaaagcatgattccctgtggctaattttaccacaaatcctaaagatgtagcttttgttctggaaactttcactggataatgtacctgaactccgttcaaaataatctttaataaggttaactgatgtctatatgtttctagctgtccatctgtcttgaaattgatgagtgcattttgagccaaaaacaagcacatatgaccaagatgaccctctttttaagtatgctcaatatggagat

SEQ ID NO: 79535 - DNA, 176 bp, Glycine max
  Clone ID: PAT_MRT3847_42836C.1
cccacacgtccgccttataatacattatcatgttttttaaccattcatacaataccgagcgctcaaattttaacaagggcgtagttaatttatacatccttttataaacaactattactcattatcctattaccattcttccaaacccacaattataaattacaattcttttcaaa

SEQ ID NO: 79536 - DNA, 298 bp, Glycine max
  unsure (1)..(298): unsure at all n locations
  Clone ID: PAT_MRT3847_42837C.1
ggagangagagnagaatcnganggaataanntncggtcaaatancaagnnataganngnaangnnnncantanagtnatgggnaaggaaaagatgcggaannnnacgganntngaagaataggncgaagngntgncagangcnnngngggaaagagacgatgtggaggtcgntggcagtnaaaagancctgtncatacaccanngattaacatgacanagcatgtntaaatacgagagngtnnagggannnnggnaggannacgangncancgnnaaggncgagaaaganccttctnn

SEQ ID NO: 79537 - DNA, 283 bp, Glycine max
  unsure (1)..(283): unsure at all n locations
  Clone ID: PAT_MRT3847_42838C.1
ccncncaaaagcagaaaggggatttttttaagatgtgacaatgaaagtgaccataatcatggtctacaatggatcaagcaccagcacaaatctgaggaagctctcacgatgatcaacttccatgaaacaagaagttatctaacggcagtgatggcaggggacaattaagccgggtactttcaacgcacggcataatagggttaaccaagggtgttggcctatgatttacaaggaaaagagcgtctgggtcatcagggccaaggtgagtcactgccaacacgag

SEQ ID NO: 79538 - DNA, 401 bp, Glycine max
  Clone ID: PAT_MRT3847_42839C.1
aggtgttgggatatttttcagaaattttgaacgagcaccacaaggaagtgaagacaataatgattcgggactcaaattttggaagggatcatatgaatagagatctgtaattatgcactggcatgagcaacttcattttcaagcttcacaggataacccacagtgtttgagtgtcatatctacaccagctagacatcctaaccctagcaacgcattcaagtggtcaatatgtccaattctgaaaaccttgccagcaaatttggtcattccacgatctaacctcagattgaatctcttacatgcgcttctaactattaaggactatcaatgaaggcaggaacagaaacaaaaattacagcgtcaccgtaccactcttctttttgggtgcaacacttcaaaac

SEQ ID NO: 79539 - DNA, 433 bp, Glycine max
  Clone ID: PAT_MRT3847_4283C.1
tgggcggacgagcgtcgcttttttttttttttttttttttttttttttttaatttttccttaataattaaatggggttggggacattccttctcgggagcaaaggaaatttactaaaaccctatatctgcttgttaattataaaattttacccttttaccataaatacataacaactcttctcatttattacaaactgccacgattattttatctcttttcaagaacccactttctaaggctactcttacttaaaattctttgacacttttaaaatatttcttttaatctctaacacctaataatctttcaaactaaaacctcctttttataacctttttttctttttccccttttttatccacttttactatcttaattcccaaattgcatttatttttacctttccaatactttttacacctttacttcct

SEQ ID NO: 79540 - DNA, 2065 bp, Glycine max
  Clone ID: PAT_MRT3847_42840C.1
attccgggtcgaccacgcgtccgggctctttggagctgaccctatgcacgctctctctctcttcacactactactcttcttcttgggggttacaatttctcttcaattttacttctttagccgtctcatgacttcatcagttagacgctgactccactcttctttcagtgtgtactgcaacaacagataatcaggtagaaccaccttcaagtttggatttttatcgtttctcatattggacatacaaggacagctctaattactgttccagctagtgttttgtgatggccatggatgtaaaaggcataacttgggttggaaacatattccagacgtttgaggatatttatgtggacgtggaagacacaatgttggaggaaaccgttaagtacatagggaatcaaatgcagactgttggggaaagcgttaaaaagatctattcagatgtcatgcaagatttacttcctccgtcttcatatgatttggatgaaacatcagcctctgagttgccaatagatcaatatgttgatgctggattctctaataagtcatttcaaggttccaaaaaaataactgtaaaggatgataccaaccaaacaactgaggattcaaggatcaaacatgatgttgataatgatgtaatccatgctaaattcggtgattctgatgctttgttcacatcagcttcttgcaactctgtcaaagggaatagttttattgcacatgcaagacaatacgttggtagcacagatattagatcaaacctcggtggtgatgaaaatcgacaaaataaaagcatacctgcttccaagacagtcagtgaaatcactttgtcaaaagcagatacatgcagtacatcacaatcatgtgaactctcccgggtaaatcaaaatcatgcagccactgtttcaaaggcagcttttgctgaagtaactaccattacctctgtggctgactgctgcaatgaaattgaaaatgcaagtactgaagaaatccccgatgtgctggtattggcagctgaatcagccgaagagaaagagatgcatattatttcatattcttccagtgttctattaggagatccatatggggtcactatggtcagaacatttgagcctgacaattattcttaccactcaatcattgcatctcatccagaaatcacagaaacatgggatttgaatgtaccaatgattggtactattatagtagagcaaggccataaaaccatgcatcaagatgatgaactgaagcttgaggaaacttgtgttatggtggctagagatgaacttcaatcagttcccaatgcaaggggtaatctaataactagcaagaacaagaagaggcaacccttttctttgtccaagaaagctacaaggaggcaagagtatgaggagcttgcaatattgcaccggaacaatgaaaaagaaaaggttgattttgcagagaatttatgttcaactttacaggatgatcataagaaactactgcttcctgatatctatgaacctgagtgggagcttctctaaataccggaatgattaacttgtgtagctacacaaccaaccctactgattttacatccacttcttattccttgtgaaggagattgagatgtcccattgcaacaaagattcaatgcccccacaatacctattatgttaccacaactactttcctatgatatctaatttcccattcccaaaatgtcctcccctaccccctctttttttcagcttgaaaaaaataaaatgatgaaaagggaagccttagctgatcattcaaatgaaaacctccaaatagagtagttaaactaggttggaccaattatatatggagcactgaatgcggcatatttttattttctccattgacattgtccttttgtttcattcctaactttagatacagcatttctgtatatccttttagaggatttgaaatgctttatcattaatgataaatatcgtggatataccttctgttattttttcatttttcaagatcttggagtatgtctataacatagtattgtatgatttatagataatcatgccttttaagt

SEQ ID NO: 79541 - DNA, 461 bp, Glycine max
  unsure (1)..(461): unsure at all n locations
  Clone ID: PAT_MRT3847_42841C.1
cagcancagcacgtatacctnnttgctctgtctctcttatcttccaaaagtagcaccctcctctgcgcggctnnntcgtctgttcacgcacgcgtgaccaattnnntttctcgctagctttcaacagcataccctcganntcgagcatatatcccaagcattcatctttccgctagcagtcttgtcacttcatacaaatttgagtggaaataagtggatacgtcttcagtgataacttcccacaaccaagaagcccgaaagtttccaaagtgaaatatggaccggtaccgtttggacgatgaatgctgaatccggcccgttaccatatccgcgagtaccctggaggaaagttgaggatacgggaacctggaagcttgatttaagttttggaggggtggatgatggcaagggagtgttccctatagcaaagcgttatatgaaataggcaggcaaattttctc

SEQ ID NO: 79542 - DNA, 1225 bp, Glycine max
  unsure (1)..(1225): unsure at all n locations
  Clone ID: PAT_MRT3847_42842C.1
cggacgcgtgtgcggacgcgtgggttcctatctctcttctctgcttcaaaagtttcttttttttttcttgaaaaaattttccctttagattttcttctctagttctctgtagggtccaagagaattgaaattcccttgcctttgagttttgagattggggataagaattgaaggactcaaactgcatgtgggttttccagaattctaatttaggtgtaaggtttcaaatccaagaaggaaaagaaacactttgagaagaaggtcaattagagggtttttttataagatatggcagcacctttttctgcagcatctctttttgcaatcagagaagaggatcagaatcagatgaagcagcagcagcattcctcaacaccatcatcatcaaccactccagctgcaccaccccagaagaaaagaagaaaccaaccaggaacaccatatccagatgcggaggtgatagcactatctcccaagaccctaatggcaacaaacaggtttttatgtgaagtgtgcaataaagggttccaaagagagcaaaacctacagctgcacagaagaggacacaacttgccttggaagctaaagcaanagaccaacaaagagccaaagagaaaggtttatctgtgtcccgagcccacatgtgttcaccatgaccctttcagagctttgggagacctcactgggattaagaaacactactatcgcaaacacggtgaaaagaaggggaagtgtgaaaagtgctcaaagaaatatgctgttcaatctgattggaaagcacattcaaagacttgtggcactagagaatacagatgtgactgtggcactctcttctctaggcgtgacagtttcatcactcatagggcgttttgtgatgcgctagcacaagagagtgcaagattccccggtggcttaaaccctttggggactcatttgtttggcacaaaccacactactagtttaagcctatcccaagtgggtaaccaactttcccaagttcaaaagcagaaccaaaccgccactaattataacagcattttgcgccttggcaacaataatgttggtgcagcagcaacaaagtttgagcacttgattccacctctaaaccattcttcatttggacactcaccacaatcaatgccttcctcagctttcttcatgaatgacaacacaaatcaagcattatttgaagaacaccaatcacaactacaaggcctaatgcaac

SEQ ID NO: 79543 - DNA, 721 bp, Glycine max
  Clone ID: PAT_MRT3847_42843C.1
ccacgcgtccgaagaaaagaaattaaaaaatgttgacaagtcctatttggaaatcgagattgttgtatttaggaaattaaatatcttctgctttcgattgcatgctggattctcttgcattgatcaattccacacatacacaaatacaaagagagagaaaagagagagatctgtctgatatagttgtgcagagtttctcagacaagcaatccatggcttagatagatagcgacttggaaaataacacaccaccaccatcatcatcatatatcctctcttcacgagattaattttagctttctttttaccacaaaagagaatctctacttatgcctttctctttcaacttgttttgcttaattatcgtcttcttggtatatccgttccgaactgcaaagtaaagtggctacttgtggaaccaaaatagcatatagaatataacatcgtgtctcgctttttcttctttttttcattcgcatcctgttggagtttttcttcaaaggcaatatgttccccactgctatttccaattcaacttctttgtctgaggatgccagtgtttcttctgggacaaaagttcaggacttgggaggactcaatcccggggtctcaaacatttctcctcagcaacacagcctcaaaagatcaagataaagaggagcctacctggaaatccagacccagatgctgaagtgatagccttatctccgaagacccttat

SEQ ID NO: 79544 - DNA, 487 bp, Glycine max
  Clone ID: PAT_MRT3847_42844C.1
gcttcaagcggcattcaaatcacccactttcctcaaggttgaaagagttctgtcaacgttgatatcatgttttgggcatacaaaaatcctccacctgcacacctcttcctgatatcgagtgatataggttttgctggcttattacaccggataagcttgaataattacaatatcttgctcgctgtctcaacgaatgctcctgttctctccacggaagcaactataacgtggcaatggtataaattgcttaagggagaaaatcttattggaaaacatttcaaccatcctccggatgatccatatggttcttggtatggaaactttagggtgccccttgaaaacccattcccagccaaaactaaaccagattccttaaaaatgagttctaaaggctcatctgatgatgacattgttgggtctgaggatgcgagtcgtaaaagtcaggaaagatacacaacttcaatgaatcgctctgctggaaatgatc

SEQ ID NO: 79545 - DNA, 449 bp, Glycine max
  Clone ID: PAT_MRT3847_42845C.1
attcttgggagataacagtgaggaatatactcctagtctaccaaagattatttttgctcaggctactggagggatcattgctggtgctactgcatcctgcattacaaacccattggatactatcaagacacgattacaggtgctgggacttgaaaagaaaatccctgtaaaacaagttgttaaagatttgatcgctgaggatggttggaaaggtgtatatagaggattcggtccaagacttttcagcacgtcagcatggggtacttcaatgatattggcttatgaatatctgaagcgcttgtgtgcaaaagatggaggaagcaattgatctgtacacttgcagtctttttcaaaattggaaagaatattctcattaaatacaatggcaattgaaccctagatattgtgctggacataatcagatttgctgcttaaaaagtttgaaactt

SEQ ID NO: 79546 - DNA, 154 bp, Glycine max
  unsure (1)..(154): unsure at all n locations
  Clone ID: PAT_MRT3847_42846C.1
accngtanagnncgcantangtnnnanctcgnnattcnnctcgagngagnaagnnatnttgacttcgaaggngttatnnntnaangaatngatggacgcngcactacgttggacgtctgntcnagactacctcaaancgggctttgcaattcct

SEQ ID NO: 79547 - DNA, 881 bp, Glycine max
  Clone ID: PAT_MRT3847_42847C.1
aattgcctaaagagtcctccccaattgcttcaggcaattactgcatacactttgcggctgaaaagtctaatctccagagaaatagagaaaattgatgttagagccgatgcagagaccttgaggtacaaatatgaaaataacattgttatggatgtttcgtcatctgatgggagctctcctctacagtatcaactttatggcaatggaaagattggggttgatgtgcctccaggagggagtcaaaatcagcttcttgatagacagaaagctcatgttcaacaatttttggctactgaagatgcactaaacaaggctgcagaagcaagggatatgtgtgaaaaacttatgaaacgtttgcatggaggcactgatgtttcatcacgctcacttggtattggaagtaactcccaaaatgttggaagtctcaggcaacttgagctagatgtttgggccaaggaaagagaagttgctggtttaaaggcaagcttaaataccttaatgtctgaaatacaacgcttgaataaattgtgtgccgagaggaaagaagctgaagattctctaaagaaaaaatggaaaaagattgaagagtttgatgctcgtagatcagaacttgagactatatatatggcactccttaaagcaaatatggatgctgcttcattttggagtcagcaaccattaactgcaagggagtatgctttgagcactataattccagcatgtgctgctgttgccaaggcttcaaataatgcaaaggatctcattgagaaagaagtgtctacattttatcgaagtccagataatagtctctacatgcttccttcttccccacaggcactgcttgaggccatgggtgctagtggaccacctggccaggaagt

SEQ ID NO: 79548 - DNA, 299 bp, Glycine max
  unsure (1)..(299): unsure at all n locations
  Clone ID: PAT_MRT3847_42848C.1
gtccggnaattncccgggntnncgacccacgcgtccggacgaacaacacgtagaccctgccccagctgtttttgggctgcaatttcgctgactccattatgcgatatctctctctaatatgccacgacctagttagggaacaatattcttaattggatcggaggatgaaagctttctctgttagactctccctgtttgaaaaacattcgatcgaccttctgacattaagaagaaaaataataatgtgctctgtgcagactagcgccgggtggcgcttagaaatacaaaagcgcccttcc

SEQ ID NO: 79549 - DNA, 139 bp, Glycine max
  Clone ID: PAT_MRT3847_42849C.1
aaccattttgtttttttaagaaaatgctggaaattttgctcatcgtcttgaaatggttcgtatattgttgcagcagttacatatgattgttttcatgctttctttccgatgatatggatctagtgacgattatccttct

SEQ ID NO: 79550 - DNA, 734 bp, Glycine max
  Clone ID: PAT_MRT3847_4284C.1
cgccttgtgggccctctccagacagttgttcaaattagtaaaattaaactgggaaagttgtatgctgcttctataatgtagggatacttctcaaacgaattgatgacgggtttcaacttgaaaggtcaatggggaaccctccccaaggattttggaaaagctaaaagttttgatgaaccatcaccaggcatcaagctttgggatcctgattccttaatcatagtacacgattatgacaatgacagtgatcacatggatactgatgaaggcagatctttcagactaagagcttatgtgatgcagttggacgcagagacacttcagagacttgctactgtacgatcgaaggaagctatatcattgattgaaaagcaaactcaggccctgtttggaaggccagatattcgtgtctccgaggatggttcaattgaaacatccaatgatgaattgctttcactcactttctcgggcttgactatgctagttttggaggcacttgcttttggatcattcctatgggacaaagaaaattatgttgaatccaagtacccttttcttgatatagactagatgattgtacaccgagactatttccttttactgcacctttcagaatgtaaatgtaatgcatggaacttggtaacgtaaaaatctgttaggcggcgttttagtcgtcgaagaattgcttgctatcctaatctggagtattttcaaactattatagaaccttagac

SEQ ID NO: 79551 - DNA, 360 bp, Glycine max
  Clone ID: PAT_MRT3847_42850C.1
ggggcgggaatgaataaaatttcacaggagatgttttctcggcacactaatttgttgcttatagctaaaattgccccaaccaaaaaaaaaagaatttgaattgcaaagcaggcttaaatatctacaatgggttgtccccagaagctgaatgcaggaccgaaaacattttttacattattcccacaataaaaaaacaatgtggttcgtttatgttttttatcggggggggggaaatgtttccacaactgcaggccgatgggtgaaatctcaaacatgacgtctaaattgcttttgaaaaggccatcaattctacattaaatgggggccttgatactatcagcttcaccagcgggaagcaaa

SEQ ID NO: 79552 - DNA, 336 bp, Glycine max
  Clone ID: PAT_MRT3847_42851C.1
ggtgtgtatttttctacaaattctactaatttttgaaaaaatttttaaaggttggtgagggttggaaaaaggggaaagaaaacctatgatgatataaaacaataaagagaggcgcaaccaatgatgggaaacccacacaaaaagccggagacaaaaaaaacgcccaagcaaaaaacgccccacagagggagagcgccacatgaaagagctcagagatcccaatgatcaagaacccccccccccaaagagggcaccccatgggagcagcccaaacatatttggcgactctgaggacacgctggcgcacaccggcccaggcgcatatccaaaatcatc

SEQ ID NO: 79553 - DNA, 273 bp, Glycine max
  unsure (1)..(273): unsure at all n locations
  Clone ID: PAT_MRT3847_42852C.1
cgctcgatagacactccatactagagctgagctccttctactagataatccgccatccaacatggctcgccaacccatctccgcgcaggcgtggttcagactcgcttcatcaacctgncgaacctcaacgtctcccgtttctcccttcgtacaagcccgattcgcgccactgctgagcagaacacttcgcaactcactcgcaccactagctccttacgtgactcgacctgaacaactncagantcttgaccattcccgacctttcctcgctcc

SEQ ID NO: 79554 - DNA, 361 bp, Glycine max
  Clone ID: PAT_MRT3847_42853C.1
acaatcaaaagcaaagatgtgaagagagagagaaagagatcattctagagacagagagaaaaattagcttcagtagatattagtggtgggttagggtaagaagagaggagacatgcctaacttgaacccaacacttcaggatcttgcatgttcataccctgaccggagcccaacaggatacatgaagccataagtttgtaaaggagtatacaacaccgggctccaatgatcacaagtagaatgtagtcactgagtggctcatgcttatgatccctaccgcgagccaacaattggttatggaccacacgctcttagagacacccaaatgatacccccgatgctgggactagcatccaccaga

SEQ ID NO: 79555 - DNA, 163 bp, Glycine max
  unsure (1)..(163): unsure at all n locations
  Clone ID: PAT_MRT3847_42854C.1
agtcgtatattagagctattatttggcaaggataatccccgattttcctagagattactgcttactcaaacccatcggggtggacttttacacaccgagggagtgtcnttaatacctttaatcgtatttcagacttatgcccaccatccaacctttcattaac

SEQ ID NO: 79556 - DNA, 446 bp, Glycine max
  Clone ID: PAT_MRT3847_42855C.1
catggaagaatatcaatcacttatattgcatctttcaataactttaccctttgaagccaatacaattaattttttatgccaagtatgaagcgatttttgaattttgtataagctgtccaattttcaaatgaatgaataatactttccccaagggcagcaaatggtgttgaaatcttcacttcttcagctgttaacagtgttatgagggcgtgttttgacaatgccagtctcaactttcctcctctaagcacttcctcactgattccaaaaacatgcgatctccacttcattctccccaatctctttgtatttgaagcatgaatacattaagtctttcaagtgattaaaagtagtcacctcgagttacagaatgctatccactcatcatatgccaagtagataaattggagtaccggcccacccagcctccttaatgatatgggggg

SEQ ID NO: 79557 - DNA, 409 bp, Glycine max
  Clone ID: PAT_MRT3847_42856C.1
aaaaaaaccatggggggggggtttattggaaaaagacccttttataaaaggcccttcaggaaaaccaaaacgcttggcggggggggaaaaaatttaaaggggggcaaggggttggatttgggcccaaaagggccaaaattttttttccaaaaaaaaaccttaaaccccccggggccccagcaattcccaaccttaactttgggttcgggcccttaaaattttaacccgacccccaggggtttttcccaaaaaaaaagggggggccaaccttgggcccccctggggcccctgggaaaaccccccgggcccccataaaactgggggccaaccgggaaataccctggctaaaacgggttaaaccccccgtttgcccccccggggtaacaagggcccccagggggcaaaaagg

SEQ ID NO: 79558 - DNA, 782 bp, Glycine max
  Clone ID: PAT_MRT3847_42857C.1
caagcacaactctgaggcttgacatggaaggtgtgccgaaggacaagcccaccatagtaacttagctcagcatacctactggaacttagctggtcacaactcagggaatatacttgaccattcaattcagctatgggctaatcatatcactcctgtcgacgagaatacagtgccaaccggtaaaatcatgccagtgaagggtaccccttttgattttacgtctgagaatagaataggcaacaccattagtcaggttggactgggatatgaccacaattatgtgcttgattgtggggaagagaaagagggtttgagacacgctgcaaaagtgagggatccatcaagttcaagagtacttaacttgtggacaaatgctcctggtgtccaattttacactgcaaactatgttaatggtgttcaaggaaaaggaggtgctatatatggaaagcatgccgggttatgtctggagacacaaggattccctaatgccataaaccagccaaattttccatctgttgtggttcgtccgggtgagaagtatcaacataccatgttgtttgagttttcccttgagtgatgtttgttggagtggcataacaatggggtagacatcttgttgtgcatattatgtttgcgttcaaataattgaatgaccatttcattgtccaagtcgtgttgttttatcactcctgaatgttgacattatattgcaaaatgaatccatctttctaagaaaaactaaaacaaaaatacaaactaaataaaaaaacccaaactgaatg

SEQ ID NO: 79559 - DNA, 2502 bp, Glycine max
  Clone ID: PAT_MRT3847_42858C.1
ctggctgcgagaagacgacagaagggacaggcgggaggtgagggactgatgactgagatagcggtgattcaattgcatcatcacaatcacaacattgcttattgacattcatatcctctcattctctctctttttctttctcttcaattccaaacctatggcggatcagagccccaaaccagagaccttcgaactcaacaatggcagcatgcaagtcctcctcagcaatctcggctgcaccatcatctccttatccgtacccggaaaagatggattgttatccgacatcgttcttggcctagaatctgttgaatcctatcagaaaggtctcgctccttattttggttgcattgtgggcagggttgcaaaccgaattaaggatggcaagtttacacttgacgggattcaatactctttgccaatcaacaaacccccaaacagtctccatggtggaaatgttgggtttgataagaaggtatgggaggtaaattgaaatataaaaaacaaaaataccccctcaatcacttattaggtgccacagtcatgatggagaggggtaggttatcctggggtagtgtacaccgttactatcaactttcattcgctcacttcaagcacaaagtctgatgcttgacatggtaaaagtgtgccccgaaggacaagcccaccatagttaacttagctcagcatacctactgaaaatttgcttgtcaccactcccgccataccctgcacagtgcctctgaccttctgggccttgcctggccgcatctctcggggtcttcgctaccacccgattaactcatgccctcaacaggtaccgcctgtgggcttacatccggtgacagcctatgcaatcctgttagtgaaggtgagccccgactgaaacacaatttgatgtgacattggggggatgtatgcgagggtttgagacacggggcaaaaggagggatccatagttcaacagtacttaactgtcgacaactgctcctggtttcaatttacactgctaacttgtttcgggcgttccaggacatgcagtcgccttttttgcaaagcatgccgggttatgtctggagacacaacgattccctaatgccataaaccagccaaattttcaatctgtggtggtccgtccgggtcacaactaccaacatagcatgttgtttcagttcccccatgttagttctcctgttgttgttgtagcgctgattgaggtagcgctgattcgatcgcatcagaacattcattcacattcatatcctctctctccgatcccaatggcggatgagagccccaaaccagagaccttcgaactcaacaatggaagcatgcaggtcctcctcaccaatctcggctgcaccatcatctccttatccgtacctggaaaagatggtgtgttatctgacgttgttcttggccttgaatctgttgaatcctatcagaaaggtcttgctccttattttggctgcattgtgggtcgagttgctaaccgaattaaggatggcaagtttacacttgatgggattcattactctttgcctatcaacaatccaccaaacagtctccatggtggaaatgttgggtttgataagaaggtatgggaggtagttgaacataagaaaggcgaaaccccctcaatcacttttaagtgccacagtcatgatggagaggaaggttatcctggggatatcactgttactgccacttacacactcacctcaagcacaactctgaggcttgacatggaaggagtgccaaagggcaagcccaccatagttaacttagctcagcatacctactggaacttagctggccacaactcagggaatatacttgaccattcaattcagttatgggctaatcatatcacacctgtgaacgagaataccgtgccaaccggtgaaatcatgccagtgaagggtaccccttttgattttacatcttttaatagaataggcagcaccattagtcaggttggactgggatatgatcacaattatgtgcttgattgtggggaagagaaagagggtttgagacatgctgcaaaagtgagggatccatcaagttcaagagtacttaacttgtggacaaatgcccctggtgtgcaattttacactgcaaactatgtgaatggtgttcaaggaaaaggaggtgctatatatggaaagcatgctgggttatgtctcgagacacagggattccctaatgccataaaccagccaaattttccttctgttgtggttcgtccgggcgagaagtatcaacataccatgttgtttgagttttcacttgagtgatgtttgttggagtggcatagcaatcaggtagacatcttgatctgcatattatgatttagaacctgaacttagtaggcttctcctgaaataaacacttgtttgtgttcaaataattgaatgatcatttcattgtctcaatttgtgctgttttatcaattctaaaagttgacattatattgcaaaatgaatccatctttttaag

SEQ ID NO: 79560 - DNA, 726 bp, Glycine max
  Clone ID: PAT_MRT3847_42859C.1
cccacgcgtccgctttcacgcaacctctctgaagtgaagagaggcggagtctgagctgccaccgcagacttaactcttttcatgagatgggtcagtgaaagttggcaactgtcggtgacgcaattctgacaagaatggggagagggaaagcagatgggaaaccgagaaagcggttgttcacaacggtgttacttttagcgattgttggtgctttatttttcctgtattctaggaaaagtggttcatcttctattgagtatggtagcaaatctttaaaatttggaggagatgatagtgctataccaaagaccattccagtctgtgatgatcgtctctcggagctaattccatgtctagacagaaatttcatataccaaacaagattgaagcttgatctgacgttgatggagcactatgagcgacattgcccgatgcctgagaggcgctataattgtttgattccccctcctccagggtacaagattccaatcaagtggcccaaaagcatagatcaggtatggagggcaaatatacctcatacccatcttgcaactgagaaatctgaccagagatggatggttgtaaaaggtgaaaagatagtttttcctggtggaggaacccacttccattatggtgctgacaaatatattgcatcaattgccaatatgctcaactttccaaacaatgtcataaacaatgaaagaagactttcgcatggttttgatg

SEQ ID NO: 79561 - DNA, 1925 bp, Glycine max
  Clone ID: PAT_MRT3847_4285C.1
cccacgcgtccgcccacgcgtccgcttttgcaagctcaatttcggaactgaataattgccccatatataggaatttactgtcttttttcttactttttttaatacttccaattccatatgtattatgctcggaatttctggaaaaaaaaaagctttgaaattgagctgatttttctttctttccttcaagaatcacatgtattttatatttatatttattcaaactgttttaacgacgtgctaactcttctgaaacccttgccgtgttcttctctccatcccaaaatttcggcggtgttcgtgtgccatcatcttctccgacaatcccaaactcccaaaccaacaacaatttggactcctcacctgagtttctcaattttaaacttttaattgagcagccttaatcgcaggaacaggacaattctgaagaaaaaaaatgcttgtttcgggtgctatcagcgacgttttggtggtgcttccgccttcgacatctcttagactcccggaatttcgccatttgcatgtttttgcggtttctgacgccaagggttttgtttctggtggatttcttaaaagctgtccttcatcttacaatcccaagcactatcatgaactctacaatttccgagctagaggcttagttgcaagggcatcagctgattcgagggataatttggtgccatttgctcctctccaattggagtcaccagttggtcaacttctggaaaaaatctcaaatacccatccacatctactaacagcagtcattgatcaacaactagagaatcttcaggatgctagagatgcttcccttgactctgggctagcgcaagacacccattacgagaagcgagcggaagtcaaagataaagaaaagcgtataacattggaagagataatatactgctcaattgtacataaatttttagagaacaacatttctatgatcccaaaaatatcagcaacatcagatcctactggtcgagtggatttatggccaaatcaagagctgaaactagaagcggttcattctccagaggcattggagatgattcagagtcacttatctctggtactaggagatcgccttgtgggaacattaaactcagaagttcaaattagtaaaatttaactgggaaagttttcctcaaacgcaataatgaatggatacaacttgaaaggtcaatgggaaccctccccaaggattttggaaaagctaaaagttttgatgaaccaggaaaagctaaaagttacgatgaaccatcaccgggtatcaagctttgggatcctgattccttgatcacagtacaagattatgacgatgagggttataatgacagtgattacatggatactgatgaagacaaatctttcagactaagagcttatgtgatgcagttggacgcagagacacttcagagacttgctactgtacgatcgaaggaggctatatcattgattgaaaagcaaactcaggccctgtttggaaggccagatattcgtgtctccgacgatggttcaattgaaacatccaatgatgaattgctttcactcactttctcgggcctgactatgctagttttggaggcaattgcttttggatcattcctatgggacaaagaaaactatgttgaatccaagtacccttttcttaatgagtagactagatgacagtacacagattctttcctttcactgcatggaacttggtaacttagtaatatgttaggcggcgtttgggtggtcttgctatcttaactggtgtgctttcaaactattatagaacctgaaacaaatcatgggcgtggagttatataggaaaatgtacatatttagcatgtagacatgataataatctatgcaagcctggactttgtaaatgatacagaatctcaacctagtaaatattttcatttttggtcttt

SEQ ID NO: 79562 - DNA, 1586 bp, Glycine max
  Clone ID: PAT_MRT3847_42860C.1
tggaggaacccacttccattatggcgctggcaagtatattgcatcaattgccaatatgctcaactttccaaacaatgtgattaacaatgaaggaagacttcgcaatgtttttgatgttggctgtggtgttgcaagctttggaggatatcttctttcttctgatgtaatagcaatgtcattagcaccaaatgatgttcatgaaaaccaaatacagtttgctttagaaagaggaattccggcatatcttggtgtcttggggacactaagactcccttaccctagtagatcttttgaacttgcccattgttctcgctgtagaattgattggcttcagagagatggcatacttcttcttgagctagataggatactcaggccaggaggctactttgcctactcatctcctgaagcctatgctcaggatgaagaggatcggagaatatggaaagaaatgagtgctcttgtagggcggatgtgttggaaaatagcttctaagaggaaccagactgtcatatgggtcaagcctcttacaaatgactgttacttgaaaagagagcctgatactcaccctccactctgcagtcctagtgatgatcctgatgctgtttggggagttaaaatgaaagcttgtatcacacgctattctgatcagatgcacagagcaaaaggagctgatttggctccttggccagctcgattgactactccacctcctcgtctggctgactttaactattcaactgaaatgtttgaaaagaacatggaatattggcaacaagaagttgctaattactggaaaatgctagacaataaaattaagcctggcacaattcggaatgtgatggacatgaaagcaaatttgggttcatttgcagctgctttgaaggacaaagatgtttgggttatgaatgtggtgccagaaaatggaccaaacactctcaagatcatatatgacagagggctgttaggaacagttcacaactggtgtgaagcattttcgacctaccctcgtacttatgatttgctccatgcatggactatattttctgatattattgagaaagagtgcagtccagaggatttattgattgagatggatagaatcctgaggccaaaaggtttcatcattgtctacgataagcgatcagtggtgttgtctataaagaagttcttgccagcattgcactgggttgcggtggccacatctaatttagagcaagattcaaaccaaggcaaagatgatgcagtgttgataattcagaagaagatgtggctgacaagtgagagcatccaggtttcagaataacgacatgctccctctatggatgccattaaaatctcagcaatacacccttgtggaaaattgatcttgtagcttttgtcacttgctgtaggtgctcttttatattttagtcatattctctacactattaggtagaccagtgaaagatcatcccaaatcatcttggttgaatttatttaattttggacacaagtaatcgtcctgttattgtgattaagatattttagatgaatttgaggaaatattttcttctctaaattaattttgaacatattccgggttt

SEQ ID NO: 79563 - DNA, 641 bp, Glycine max
  Clone ID: PAT_MRT3847_42861C.1
gggtcttattacccccgtgacctaacgctgggtgcttctcttctctgcagcctctttgatctgttggtgctcacttcgatcccgttgtgccctcttcagtttaggtgttttcattttagtgatattgttgaactgaacatactctgcccagttctcagcttaaagcatggatccggaggctgcacgaactgcacgagaatctctagacctggcattccatatgtccaatatacttgatactggtctagaccgtcacacactttctgttcttatagcactttgtgatcttggagtcaatcctgaagcgcttgctgctgttgtcaaggaactaagaaaagagaaaccctcactatcatcatcacttcccgtagctccttctttgccataaataaatggatttttctattagatgccattttgtttatgcttgctaaagttctttgtaatccatcctatttatctgttcttgatctggttcattgaatttctgtgtgctttgattgttcttctgcatgttcttcatttgatgtatagtgagattgttttagcacaaaactgatatgttgcaattaggaactctatttgaaggcttattatctttgagtaaaatttcgcattttgtgctgctaaaaaaaaaaaaa

SEQ ID NO: 79564 - DNA, 2611 bp, Glycine max
  unsure (1)..(2611): unsure at all n locations
  Clone ID: PAT_MRT3847_42862C.1
cctcctcagatccatacccattttctgaattgcgcctgacattatcaaaatgctaactttttcatctctctgcatctgccaccgcagaatttactcttttcatgagatgggtcagtgaaagttggcaactaccggtgacgacgccaattcacatgcatatacccatatctagtttattgtttcgtggctataagttgcatcagctaggtgctttgtggaactgaatttatgcccttgaatcattgagtgtgtgacaagaatggggagagggaaagcagatgggaaaccgagaaagcggttggtcacaactgtgttacttttagcgattgttggtgctttattttacctgtattctaggaaaaatggttcatcttctattgagcatggtagcaaatctgtaaaatttggagatgacagtgctataccaaagaccattccagtctgtgatgatcgtctattcggagctgattccatgtctagacagaaatttcatataccaaacaagattgaagcttgatctgactttaatggagcactacgaacggcacttgcccaatgcctgagcggcgctttaattgtttgattccccctcctccaggtacaaggtgtctctcttttctctaggcattgcttctcttagatggaactatgaaagttaaataattgggagttttctgtgcttacacttttgagtgtcttatgcctgtcttgatgantaattgattatagattccaatcaagtggcccaaagccagagatcaggtatggagggcaaatatacctcatacccatcttgcaactgagaaatctgaccagagatggatggttgtaaaaggtgaaaagataggttttcctggtggaggaacccacttccattatggcgctggcaagtatattgcatcaattgccaatgtaagctagttactcctatccggtatggcactaaaataatcaccaaaacatgaaactcttatatgactggaaaaagttataagtttgtagtttatattcatgattggtatttcagatgctcaactttccaaacaatgtgattaacaatgaaggaagacttcgcaatgtttttgatgttggctgtggtgttgcaagctttggaggatatcttctttcttctgatgtaatagcaatgtcattagcaccaaatgatgttcatgaaaaccaaatacagtttgctttagaaagaggaattccggcatatcttggtgtcttggggacactaagactcccttaccctagtagatcttttgagcttgcccattgttctcgctgtagaattgattggcttcagagagatggcatacttcttcttgagctagataggatactcaggccgggaggctactttgcctactcatctcctgaagcctatgctcaggatgaagaggatcagagaatatggaaagaaatgagtgctcttgtagggaggatgtgttggaaaatagcttctaagaggaaccagactgtcatatgggtcaagcctcttacaaatgactgttacttgaaaagagagcctgatactcgccctccgctctgcagtcctaatgatgatcctgatgctgtttggggagttaaaatgaaagcttgcatctcacgctactctgatcagatgcacagagcaaaaggagctggtttggctccttggccagctcgattgaccactccacctcctcgtcttgctgactttaactattccactgaaatgtttgaaaaggacacggaatattggcaacaagaagttactaattactggaaaatgctaggcaataaaattaagcctgacacaattcggaatgtgatggacatgaaagcaaacttgggttcatttgcagctgctttgaaggacaaagatgtttgggttatgaatgtggtgccagaaaatggggcaaacactctcaagatcatatatgacagagggctgttaggaacagttcacaacaggtgtgaagcattttcgacctaccctcgtacttatgatctgctccatgcatggactatattttctgatattattgagaaggagtgcagtccagaggatttattgattgagatggatagaatcctgaggccgaaaggtttcatcattgtccatgataagcgatcggtggtgttgtctataaagaagttcatgtcagcattgcactgggttgcagtggtcacatctaatgtagagcaagattcaaaccaaggcaaagatgatgcagtgttgataattcagaagaagatgtggctgacaagtgagagcatccgcatttcagaataacagcatgctccctctaatggatgccaccattctttccattcacttgcaagttcaaaatctcagcaatacacccttgtggaaaattgatcttgtagcttttatctcgtgctgtaggtgctcttttatattttagtcatattctctacactatatataggtagaagtgctagtgaaagatcatcccaaatcatcttggttgaatttatttaattttggacacaagtagtcaccctgctattgtgatcaagatattttagatgattttgagtctaaattaatttgaacatattacaggatactgaggttttgtttatttatttattttcccctttt

SEQ ID NO: 79565 - DNA, 315 bp, Glycine max
  unsure (1)..(315): unsure at all n locations
  Clone ID: PAT_MRT3847_42863C.1
aagtaattcgagtttcagcaatggtgtacgtcaaaggctcagaaattcaaaaggctacttcaagggatattaagtcaagtttcaaagagnaggaagagcggggaaaaacggattaccgtggcaaggattcnggttggattaatcnaggnccaangaacaaatattagcacttccggnaataccggttttgtngggttcggctttagcaaacaagggcanttgnttgcaccaattaatatctgnctagcattgcnggcggnttagttccttggctaaagcatntttcacatgggctggccacgnttnggtcnttga

SEQ ID NO: 79566 - DNA, 439 bp, Glycine max
  Clone ID: PAT_MRT3847_42864C.1
aggaaaaccataaaagttttttatttattgtaagggggagtacaaaagcaccattttctcttttataattgtgatttacattcacaaagaaataagtttgttgctcatgatgacttggccacataattaatgctaccaaggattgaagtgcatgcaagactcaagaatatgctttgctacgaagttgtaaatcacaatgttagaaaacacaaagcagatcctcttatttattaagtagataatacacctcattgcttgctttatgcatgggtagttgtcctctactgaagggtactttccataaggcggtttcttgtatggaggcttcttatatggcggctcagaaaccggaagattcagcttgcaaaccggtggttttggcttataaaccgggggttcgtacactggtggcttgtacactggaggcttgaacactggt

SEQ ID NO: 79567 - DNA, 747 bp, Glycine max
  Clone ID: PAT_MRT3847_42865C.1
catccgcatttgctctcggtgtcacccccgacaaaggagatctgatttttgttgttcgtctcacgggcctcggcaacggcaacagcaacaacaacaacaacggcagtgagtcaccggattcaggtgttttcattttagtgatactggtgagttgagcatactctgcccagttctcagctttaaagcatggatccggaggctgcacgaactgctcgagaatctcttgacctggcgttccatatgtccaatatacttgatactggtctagaccgtcacacactttctgttcttatagcactttgtgatcttggagtcaatcctgaagcacttgctgctgttgtcaaggaactaagaaaagagaaaccctctctatcatcatcacttcctgcagctccttcttctttgccataaataaatggatttttttttttattatatgccattctgtttatgctggctgaagtttttttataatccatcctgtttatctgttcttgatctggttcattgaatttctgtgtgctttgattgttcttttgcatgttcttcattagatgtatagtggcattgttatagcacaaaactgatatgttgcaattaggaactctatttgaaggcttatctttgagtaaattttctcatggctaaaatagttgagttacattcttgcccagagctctaaccccattttgtgctgctagtctgcaacttgatcttttcccaagccaattctttttcatttccttt

SEQ ID NO: 79568 - DNA, 142 bp, Glycine max
  Clone ID: PAT_MRT3847_42866C.1
atgaaatcgagtaggtttgacatgccgttcttttcaggaagatgttaagtatcaggggacggtgatattctagatataaaaggtgcccacaaaattgaacatgaacattttggatatgattcttggtcaatcaggacctata

SEQ ID NO: 79569 - DNA, 377 bp, Glycine max
  Clone ID: PAT_MRT3847_42867C.1
aaaatggcaacaaggtacatgactctgagaacctccgccaaaacccttttccatcatcttcaaccccccgttcaagattctcgctgcgcatttcatttgatcagaaccctccattccttcgttgcccgagactcagaccctcgcaaatttcgtaactcttttttttctggaaccttccgaggcatggtctctgccccaaaccccaatttcgacgaagctgcttcgctcgccctcgataatcgcgttcctgccaccgtcataacgggttttcttggctctggaaagactactctccttaatcatattctcacatctcagcatggaaagcggatagcggtcattgaaaatgagtttggtgaggttgatattgatggctt

SEQ ID NO: 79570 - DNA, 244 bp, Glycine max
  Clone ID: PAT_MRT3847_42868C.1
ggtgcaccgttttagttattcaagcgctacctgcctcccaaaattaaccagaggaatttaatgccgcttggtcaaattaggtgcgtcctgcatcaactctgtcggctgatgggtgggcatatttgtatgatatggtacatgacaattcagtgtatacaatatcccgggactttgttattggagctatgacgacaaccttaaactacctgggtgcatatgtgctcaatcttggaattttaggttc

SEQ ID NO: 79571 - DNA, 831 bp, Glycine max
  Clone ID: PAT_MRT3847_42869C.1
ggctcgagaaaaagctcatgctgaggctgaaattgatcttctcaagggtaacattgaatcatgcgaaagagaaatcaattcactcaaatatgagcttcatgttatttccaaagagcttgagattcgcaatgaagaaaagaatatgagtatgaggtctgcagaagctgctaacaagcagcacatggagggtgttaaaaaaattgctaaattagaggcagaatgccaaagattacgtggtctagtgcggaaaaagttgcctggtcctgctgcacttgcacaaatgaagctagaagttgaaagtcttggtcgagaatatggagaaacacgattaaggaagtctcctgtgaagcctgctactcctcacatgtctacattacctgatttctcccttgataatgtacagaaattccacaaggataatgaatttcttacagagcgtttattggcaatggaagaagagacgaagatgctgaaagaagctttgaggctaaacgtaacagtgagttgcaggcctcaaggagtttgtgtgctaaaacactgagcaaacttcaaagtttggaagcacaatctcagaaccagctgaaaggatctccaaaatccatcgtccagttaactcacgaacgtatttataatcaaaattcaagcagtgcaccaagtttgatctccatgtctgaagatggaaatgacgatgcagaaagttgtgctgaatcttgggcaacagcaatagtctctgggctatcccaatttcctagagaaaagtgcaatgaggaatcaaataaatctgaagtcactaacaagttggaactaatggatgactttctggaggtggag

SEQ ID NO: 79572 - DNA, 249 bp, Glycine max
  unsure (1)..(249): unsure at all n locations
  Clone ID: PAT_MRT3847_4286C.1
gtcgctgtgaagccgcagctcctcgtggaagctcccaaagccaacgacgccatntcaataggccaataccaggaaggggaaggggtcaagcaccaggtactcaatncttttntcaaagctgatcaccagctccctctcatactttacgcacaacttaaaaatattgtcttctggaatggacattttaaacatccctaaaaagaatttcttcggcagcgaaaacggggggaaacggtgtcggttttgtgc

SEQ ID NO: 79573 - DNA, 369 bp, Glycine max
  Clone ID: PAT_MRT3847_42870C.1
ccggctcgacccaagcgtcagtccagccgtcagtacagcagcgaaagggacaccgcaggtgaaaacctcaatatcctaaatcggatgaagacaaaacctacattttccggccttaccgtacactagattcacacggatgaatgtaggtcgcatcaagttcagactcagtcacgtccaattcaacaggtgctccagctgtggcattagcagttccactgacatagtcatcaaggcgttccaggatgagtacattgttaatcaggctccagtcggagatgtgcaggcaccttgtgtcaatcaacactatactcatcgcaaacgctcagtacatatgcaatcctgtgtttcttgtactaacgacgctcatgt

SEQ ID NO: 79574 - DNA, 257 bp, Glycine max
  Clone ID: PAT_MRT3847_42871C.1
gaggaagtggtgtatgaaactgaaaagaattttgctgatgagaagcctgcaggcgaggaagatgcacctgaaggtgtgactttgtgacatttttgtctttaattactttgtattaagctccatgaataaccaatttcttctcctaacgtgtgaaaaaaacctgcctccaatatttataatttgtaaggttattagttgcttctattctaaccttttaccattttggtggcctaacaaacagaaatttaatttagtaa

SEQ ID NO: 79575 - DNA, 828 bp, Glycine max
  unsure (1)..(828): unsure at all n locations
  Clone ID: PAT_MRT3847_42872C.1
cgccgcccttttttttttttttaaagtacccttaaataatagtcaaataactcatttctcaggtcaattttttaaagatgtcttaacatttctccataaaataagcaagaacaacctgcttgtaactgttcaataaaacgcaggggtgatactttcaactgcataggacataaccaccagaagggtaaataccctacgcaatagctcagtagtacggatcatttgatgaactgcaattaaaaaaagaccagaatgagcttgtttcaaccataaatgatgagggcgcatattggatcaacaccccaaatacatgagcacaagctcataaattggtgctttggtgagagaactttccattacagcagtccttttgacaggccaatattagctcataaattggttggcccttcatccttatgtcaaaatagcaatttgacatgctcaagcatcctcgggagaagaatctcttgctccctggtcatcttcatcctcttcgtcatcttcgtcatagtcaatcgatgcaggctgcccattaagatccgcattagcacccttcaactttctgacaaactgacccctcacacgaggccgcctttccgcaagtcgtttccggttaacatacctaattttcttatcaaagcagcgctctttccttttctgtctgaacttcatcaatgctgcttctctcctatcaactttacttaattttgcttcagatgaacttgagtttccaaatgattgccatgaatgaggattaggaatctgaccaggttgtaagcatatgctcattgggtaatatgggaaggatgtcatccccgnacgcgtggg

SEQ ID NO: 79576 - DNA, 524 bp, Glycine max
  Clone ID: PAT_MRT3847_42873C.1
ataaaggaaatactattttttccaacaagccacgcatcaagttcaaattataattgacataatttttccaagcggggaataatttataagggtccaagataaaatgaaaaaagccttaaagttttgcccattatacggggaacaaagatgaaacttgaagggtacgcgccccacaattatatgggacaaaaattcttttttttcaagttgtagctcaagggtgggtttcaaaggctgtgaccgccttcttttaaccaatgaaaacgtcttcgtaaattaaggccgccaaacctccttgagactatgggcccacccaatagaaccatttagcgagaaagtttccattgaccaaaactgggccgcatgtcccaaccgggtttattaaacccccggttaaagggccatactcttaaattttgggccccccaaccaacccaattacaagggggggcaaaatacccaaggcccccttttcttgggcggtttcaagagctttcacaggggtaacccaccccacaggggtt

SEQ ID NO: 79577 - DNA, 376 bp, Glycine max
  Clone ID: PAT_MRT3847_42874C.1
gttgtgtgttattgacagagagagagagaggggagcggaactacggataaatatcgcgaaagccacacaccaccaaaaaccgaactgaaacgagacctgaatctcactctttcaacaatggaaatgcaaaaccctaccgacaccacactgaatccaaacagatcattctctgcatcagctatggggcagaagtgtactgagactactcgctcgaggggcggcgaacagagattctcgcggagcacaccggatacagcggaaactgaaactacatcgcctgccaacgccttcagaagctagatggcaccaacaacaagttcacctacaattgcgacgcacacacctttaattacctggtgcacacagactacacata

SEQ ID NO: 79578 - DNA, 443 bp, Glycine max
  Clone ID: PAT_MRT3847_42875C.1
ggcaggctgggggcgcctgcaggggccggcccggattgaccgacgcgacccacgcttgcgaatttttgacaaaccggattgacaggaaggctaagcttgagttggctaacacacaagaattctctggaggaaaagaatcagtgaattcttggctaccaatttgtgtgcgatgtcttaaggcagtgagaaacactctttgagatgctcacagagttaatgaatcatgtggttgcgcactctgaggttatccgatgaacgctctgctatgtgatgtaggactcagtggctgatcaaaccttatcctgtctatttctacagtacttgtgaaaggtcagaaacaagctggtgatacttgggatgagctctcccactctcctatctggctgaggatttcgggggtagactgaatatttgtgttcttcgtccactctcttatttgactg

SEQ ID NO: 79579 - DNA, 789 bp, Glycine max
  unsure (1)..(789): unsure at all n locations
  Clone ID: PAT_MRT3847_42876C.1
gaattcgagctcggtacccggggatcctctagagtcgacctgcagctaccatatagattaaaaacaatatagcagaaatgttgtgttttgcacaccttagatatttagaccttgtccactctatcttattaactaaatcatgtataggataaagtgcttgcacatcatgtttctcactgagcttagattagaaacaaacacacggcaatcaatcatcttccataagatcaagggcaaatttgtaggtgtttgaacgcattattttggtgaaatttaaaaagtataaagctgtatataggatgattaatctataaattatgaaattaaaatgattatagcatgctgtagtccaatatatagtcaaatatgcagtcccaaaaataggataaaaataaattctagagagagaagagatgtactttgcatggtgaccacggtggtgggccgaggctatgccgttagagtgtgtcgcgtgactgcgtgagtgagtcgtgttttgttttccttgtaagggaaatagtcgtatgacttgcacgcgtgctgactccgtggtggagaaaaaccccgtgagtgaaaaagtgtcttaatatgctacaatggtaacgactaaatatgatggtgagttaattttttataataaaaagtatattnngaaatatctttaanaatatnttatttaaacaattattttttagctttaaatgataaagaattngatattttattatttaatgactntgcagatttgaaaatagattaaaagaaaaaaagatcgagaaaatatcaaaa

SEQ ID NO: 79580 - DNA, 602 bp, Glycine max
  Clone ID: PAT_MRT3847_42877C.1
ccacgcgtccgcagaggaaaagcttcttcaaaaggttgttttcacctggatggaagggggaagtagtgctaacacagttgaaaattgtttagatcattctcaggtgcgatgtagtcttaatcctttaacccatcagaatgggaaaataaaatgtgcatgtgagtccacagcaacagggaaaaggaaatattctggatctattatagatgtttctgataccatgagaacacatcctatagatgaaatattgctctggcataatgcaataaaaaaagagttaaatgagatagcagcacagactagaaagatacaactctctggagattttactaacctgtcagctttcaatgaaaggttgcaattcattgctgaagtttgcatatttcacagtattgctgaggacaaggttatttttccagcagtagatggaaagttttctttctttcaagaacatgctgaagaagaaagccaatttaatgagttccggtctttgattgaaagtattcaaagtgaaggagcaacatctagttcagaaactgaattttattcaacatttgtgttcacatgcctgatcatatatttggaaacaatacagagacatt

SEQ ID NO: 79581 - DNA, 373 bp, Glycine max
  Clone ID: PAT_MRT3847_42878C.1
cgcccttgtcaacactccgtctcgaaccgactacgttgaagccgtcagaaaaaccggcctcctatccaattgtctctcagaaacaatcctcatccccaccgttcccttgctcgactccttgacccgggactgaactccaaatatataccacactggggattaactctccttggcgatcactgatcagaaaaaggtgtgtgattaaagtctcgatctcacacctttcaaaggccgatttcttgatccaacgaggttgcggtggctaaaaagatgtaactgtatccactctaatgcgggtgcatactctccaaaatgacatgttacaattagctcgaaatgtaccgttttcccatatcaggttgatgctagaagc

SEQ ID NO: 79582 - DNA, 509 bp, Glycine max
  Clone ID: PAT_MRT3847_42879C.1
aacagaatgccggaggcgtggataaccttgataacacaaatgtattggtgagtcaaatacagacatactaaagaaaacacacacttaaggttctctaaacatttttgtaaagtatatttaaacccgtacagctaaataccgagcagagatttccttactggagtttcacactcttcgtataacgattaccagtcccttagctattgaagctcattagtgcatccatgttttagatttgtggagatgcccatccgaagtcctttctgcgatgggcatgcatgcacattactctccggatgagaggggatgcttggcgtgcaggataacgcttacacgtgattgctggaagcaccttatatctaactagtcagcagcatccatcagatcctggcttgagtcctttttgaatgacctagtgctgaagaattgatgattgttacactcggtatacatcctgttgctggtggtggcaatgccatttcaaaggctttaactctaagtgccccttt

SEQ ID NO: 79583 - DNA, 391 bp, Glycine max
  Clone ID: PAT_MRT3847_4287C.1
actatgcgaaaccgcgagcacaggcgggcgcaccttaagaccggcaacaaaagcggtcgcaactggattcgaagaatgattcaatgactccctacttctttgcgtacgatttcgtaagggaaagaaaatggctctgtgagctggccacagacttggcgactgacttcgtgtaccactcttagtttatctgctgaacactctgctgtacgatataggacttggtgtcagacttaaactcatactgacactttctcagtcctctgctcaattccaagttcaagctggagaaatcgcggatgagaactcgcactctcacatccgctataggatctggtggagggactcgtggattgacttccttactttcactctctccttcacactgatccgc

SEQ ID NO: 79584 - DNA, 418 bp, Glycine max
  Clone ID: PAT_MRT3847_42880C.1
ggcctcatgctaattttgtgaaattcgttttcctgtaactgaagagggtctggatcggggctaacaaatctgttaaaatgtcgtctctggacgttaaggtagctaaaaattcaggagtttcattcgttttctcaccttccctgattcgtgtgaaagttaaaaatgttttgtttggaagggtatttttgtcatttagctacccgatggtgttgttggcatgatctgttgcgtgtgtccttccctttctatccggcttgcggagtgctcaaatgacagaattgaccctctaccattctgtctttgactcttgtgtctactttactttggattgaattatctatagcttaccattaatactgcagcctttcctgaaaggtatttgtgaaatctcactttctcttaaacaaggaaacagaaa

SEQ ID NO: 79585 - DNA, 383 bp, Glycine max
  Clone ID: PAT_MRT3847_42881C.1
tctagctatctcgatcgaactgtccaaggtcctgtcaccactacgctgaccagctgtcccatgtgcattcgagcttgcgtcaacaagcacttcctcatgtagagctaaacatggccggaacccaaattatgccacattcgaatcaaacgtcacgcggtataccctaagacgttatgctggagccgatttcaattgcctcgagtgagttagcactacgagcaacgtgcacacaaatgaacctcacagttcaattcatgcactggcaacaagtagccgagcacgcgccacgaccccacaaaagcttatgtcaatttacagtgagtgccggtgtttctaaacatcggcacctctactacggcatgacatagcgactccgaactatg

SEQ ID NO: 79586 - DNA, 290 bp, Glycine max
  Clone ID: PAT_MRT3847_42882C.1
aacgctcttaaaagcttttgctttactttatgcgcgctgttttcaatgaagctaagctcgggtttgtaaaaccaaggtatgtggacattttgagggttaaggtagtgagtactatcttggagaccacacacactgagattgagatgcgcgtacaagtatgaaatctttgaacttgctgaccagaacaatattggctcttctccgaggggtgtgaagcgcagaactggaagaatagaatgtaggacaaacgcatatatccctaaactaggtgttatactatgaacgttact

SEQ ID NO: 79587 - DNA, 305 bp, Glycine max
  Clone ID: PAT_MRT3847_42883C.1
gggagttcatagttgttacaggctggacggtgtaagagtcttgtgtgttcagtttaacaaaccgatcaagctgtcgtgtggtgtacccactgatctgtaaccgtggtctcgacaacaacaacaacaacaacactattgttcagaacataaaagatcccaaataacaagaccacacaccatgagtgtcatcgacattctcaccagagttgattccatttgcaaaaagtacgacaaatacgacgtcgaaaagcaaagggactccaatctctccgccgacgatgcattcgccaaactctaagcctccg

SEQ ID NO: 79588 - DNA, 529 bp, Glycine max
  unsure (1)..(529): unsure at all n locations
  Clone ID: PAT_MRT3847_42884C.1
taaaccttcaccaacgtgaggggttgagtgcgaccctgggctctaaattaacctgagaatgaggggttcatgagcgtttagactttantagctagcgtggggtggtctaaccggggtgtgagagtataaaaaaaaaaaaagggcggcgtttatagagagggggattttataatcttatatttaatgctggggagttacctgcgtagaccaacagcgttgtgcaaattctccaagcgcagagataacataaggttttncgtgcgtaaggtgtgagtgcgttcttctgagcgagagacgcttcttcttntgcgcgacaactgtgatttaaaaaacttgcgggcgattacaacactaaccggtcacagtgtnagcagagagagtgggtaatctatgtgaaattgtgaatcattaatattagagtcttaaggttagtgagctttatcaaaacaccattcaatanaggagaatgcggggggtgancgctaantaataactaataaaaggggaaagggggcagaattttcaattt

SEQ ID NO: 79589 - DNA, 258 bp, Glycine max
  Clone ID: PAT_MRT3847_42885C.1
cccacgcgtccggctagttctagatcgcgagcggccccctttttttttttgttggtatttttcaacgggcgaaaggcacataacattccagcaaagaataaccccgcattccaaagtaaatcgaccgaggatagacaaggctccaactgagaataagccaaaggccagaaagaaactaccaaaggagggaggcgccaactgataatggaagaagaagaatagaaacatgaataacgtggcgacatacaagatctacat

SEQ ID NO: 79590 - DNA, 488 bp, Glycine max
  Clone ID: PAT_MRT3847_42886C.1
actgagtcatcgtctagctatctcgatcgaactgtccaaggtcctgtcacctgggagggaccgcataaaatgatgtatacacaaacatatgtccacattggctaacatggtagtaagcctgcgtaaacgggagaggcgcgatgatgttagcgagcccatagcggcacaaatgactacaacaaagaaaccaaccccatggttgtgcgccaaccgcggcaccttaaaggagcataccgattgcacatctgctacagcaccagctgtccgaacagcagcgtattatttaccactcagcgattacgtaggattttcaagcaatgagttcacatgcaccgtgggcgaggtcatggtttaataccggccaagcaccatgctgtagggaacgtggggtgagacgtgatgccacatggagccacactataatactggctacctaacttgctgcctagtggtgatctatgccggtataacgtcctccatacacatga

SEQ ID NO: 79591 - DNA, 870 bp, Glycine max
  Clone ID: PAT_MRT3847_42887C.1
acatttgagctgttgtaggacaaggacttcatcaaaaatgccaggaagctgcttagtatttggctttttttttttttttttttttttaatctcactaatgcttcgtactctaagcaaagaattctgctgttttatacacctgttttaatgttacaacatttggatcatgtttgcctctgaacataaacactaacaacaaattcatcgcaggcttgcagccacaacataacaatatgtacaaagtagccttttactaacctaacatttgctaatcacacaacagctgccagctgctgtctgctgatgtgtttactgccaataattgtttgatcaatctgtgttgtctcttccccttttccaatccatcgctactacttttccaacctgcttctgaccatcatgagccttatctaaatcccttgcaggtgggggcatcatataatgttgcttcaagatgctggcatttgtacgtttgttttccacaaaagagtctctaatttgtttactgggaaatgatctacttgattttgaaataggccacacaatgtgccctttcttagcaatattggagtgaccactgttcttattctcgactatggaaagtcttggcttctttgagggcattatctgctccacacttctggccaccatgtcagatccgatcattgaaattggtcttgaagacgtctcctcaagtttctcatctgatttatagtggcaagatttcatggccttcagtgaagttttcctttgccattttaaaattccatctgaactctgcctcattaagtgagttgcaatttcaccgagagtttgtgcagcagttaatattattgcctcgtgccgaattcggcacgaggcggcacgagg

SEQ ID NO: 79592 - DNA, 593 bp, Glycine max
  unsure (1)..(593): unsure at all n locations
  Clone ID: PAT_MRT3847_42888C.1
tcgatctgtcgctaggaatgtgccagagtaccgtacatgcanccagtcgtaatcggacgctgggagggaccgcataaaatgatgtatacacaaacatatgtccacattggctaacatggtagtaagcctgcgtaaacgggagaggcgcgatgatgttagcgagccctagcggcacaaatgactacaacaaagaaacaaacccctggttgtgcgccaaccgcggcaccttaaaggagcctaccgattgcacatctgctaccagcaccgctgtccgaacagcacgctattatttaacagtcagcgattacgtaggattttcaagcaatgagttcacctgcagcctgggcgaggtcctggtttaataccgggccaagcagcctgctgtacgggaaactggggtgacagctgatgccacctggagccacactataatactggctaactaacttgctgcctagtggtgatactatgccggtataacctcctccataacacatgatactctgtatgctgagtatgtaatgcctgtagtagcccagcagaggtaggtctagtccggatatcgngccgcatgctagcggtcacagccacaa

SEQ ID NO: 79593 - DNA, 1383 bp, Glycine max
  unsure (1)..(1383): unsure at all n locations
  Clone ID: PAT_MRT3847_42889C.1
tttggtccggaaaaaacccctcgacccacgcgtccggattgatttctctgtgtgtcttcctttgagcaaagctttctgagttgagctaagttgtcgtgttctttttgggcaaaagggttggcattactctctttcggtgtttggtgtacccacaagctgatcaatctacggttcaaggggggtgtgtgatctgccccttttttcggcacttttaatttttgggtgttttgggttttgtggttatgaagggttttgactggtacagttgtgatttttacgtctactttgggaattggtcatctgggttgatggtggatttggtggtgggggtgtttgggcattgtttgtanggggtgctacggatttggcggtgggttggttttgatgatttgtgcttttgattctttagggcttgctgctatagatggggttgggtggtgctgagaatggaaaagtagtggtggagtctttggatgtgtgtaaatcaaaggggaggaagaagaagaagaaagaggatggggaagttgaagaggaagaagagactgggtgttggtttaggttgaggttcattgggagctgcatttcttcaagatccaaagttgatagctcagttagtggcaccagcactaattatgctgaaagtaaatcaactattgatacaagtagagatcaaccaacactccgagtagtctcttcgacaaccactagtaatgccgaaagcaattcatccacttccaaacttgaagaggagcttaaagttgcatccaggctgcgaaaatttgcattcaatgatcttaaattagcaacaagaaattttcggcctgaagggcggacgcgtgggcggacgcgtgggcggacgcgtgggtgtgtgtaaatcaaaggggaggaagaagaagaagaaagaggatggggaagttgaagagaaggaagagactgggtgttggttcacgctgaggttcattgggagctgcatttcttcaagatccaaggttgatagctcagttagtggcaccagcactaattatgctgaaagtaaatcaactattgatacaagtagagatcaaccaacagtcccagtagtctcttcaacaaccactagtaatgctgaaagcaattcatccacttccaaacttgaagaggagtttaaagtttcttccaggctgcgaaaattcacgttcaatgatcttaaattagcaacgagaaattttcggcctgaaagtcttcttggtgaaggtggctctggttgtgtgttcaagggatggattgaaaaaaatggaactgctccagtgaaacctggcacggtgcttactgttgctgttaaaaccctcaccatgatgggctccagggtcataaagaatggctggctgaggtaaattttcttgg

SEQ ID NO: 79594 - DNA, 366 bp, Glycine max
  unsure (1)..(366): unsure at all n locations
  Clone ID: PAT_MRT3847_4288C.1
gaactagtnggaatccccccgggccctgcagggaattnncggcaccgaggggttngtgtnggtggggggcaccgatnnggcggagggctccaacgcgnctnnctaatatctctggggcaatcgacgcctctcgcacaacaaattnctcctgtccaaagcgangancttccttgtgggggagcgacctnccttctcacttacctccacacccntaatcacgccgtttggcccccctttcgcacctccgcacatttccacccgccaccaacctaccatttcgacgagggaagggtttttctcgcgacgacctccaccgaagaagagaaaacgcgcaagggaatggaatttaagttcagcttggcagag

SEQ ID NO: 79595 - DNA, 409 bp, Glycine max
  Clone ID: PAT_MRT3847_42890C.1
cccactcgttcgattgtcattgcaactcggtattcctgatgcttccatcgctcaacagactgggatcatctaacctatggcgctggtttctcggaatacgactaccgccatgcgcaaatggccaaaatgaagcgctgacacgacatgatacgtgtatacaaccactttcaaaccaaactcgatgctcgctgctccgaatatgaacacttctggatacataatcaacttatgaagcactctactgtgtataggacacatgaacaggttgtggcattacacgctgcatcacctatactctccaaactattgatgcgaatgagaaaagtccttatgaaatctatgtatcactgaaaccattggatgattgcaacgaactactagcatgaatgcctgatattgagataccatc

SEQ ID NO: 79596 - DNA, 629 bp, Glycine max
  Clone ID: PAT_MRT3847_42891C.1
ttataatcaaacttacggtgctattccgactggtgatatgcggaattacaacagctctgttgtgcgtggcccatataggccaaacattgtagagaacaatatgatattccgtgatgcttttcctgatgcctacaggagagtgcagaatgaatatcttttgattttaggacttgtaacgatgcttatccattatactacaggagtggcatgaatgaatcctctccagtagcaagggctagggcaatgttcttcgattatcctagagaggtttccagccatttctacagaggtatccagcctgacctgcatactcgctccccaacaacatttgattcactttccccatatgggacaccgactacaagacctacatatggaagttcacctattaacacgccgtattcaggaagatatgcctctcagcgtccaagataattctaactgctatgtagattctgcttgcccacctgattgtctatatattaatgttgtgaaggggaacaaggcttcacttccactgactgcaaaaatttgtatatatgtatatctgttcatgtatctgatatttattattttattcaattatgtacgtgaatggaaagtaataaagtgaggtttgttttataggc

SEQ ID NO: 79597 - DNA, 501 bp, Glycine max
  unsure (1)..(501): unsure at all n locations
  Clone ID: PAT_MRT3847_42892C.1
ccgggccggacctcccggggcgacggagagcgcgcgcccacgcgnacgaaaggcagaggccagggcancagaggccgccaaacggagactacggcccccaagcgagagcggcgtcccttatcggcacacccgggcggagctgcaccaacacccacaaactaancannctccgccctttcctnaanggcggggtannannagagatgaaggggtaggggataaaaaaacaccangnggggggggagggggggggccacgccgacgacgggaagaacatgatcaccggcgccgcccagatggacggagccatgcttgtcgtgtccggagccgacggcgccatgccccaaaccaaagaacacaccgctgggagccaagcaagtcggaggccccaacataggggggcgtgcgcaacaagcaagaccaagacgacgacgaagagcccgggcaacgaggggaacgagaaggaagagaccgggggaactgggacgaatggcccgggga

SEQ ID NO: 79598 - DNA, 238 bp, Glycine max
  Clone ID: PAT_MRT3847_42893C.1
acaaaatgtatggaagtggcatgggttgtgctttgctagtttctagcctcatttcttgttccttttgtttggtgtcttgtgttgttgtattcaccattatggaataaatatccatacccctagctaactctatttttactaatacgtacaattttctattttggtgctttttttccctttgatttgtgtttcattaaatccttcgaagtctaaagaaaaacatatatgttaaataaca

SEQ ID NO: 79599 - DNA, 157 bp, Glycine max
  unsure (1)..(157): unsure at all n locations
  Clone ID: PAT_MRT3847_42894C.1
ngttgcacgcncgcgtncgtnagctcgganttcggctgcggagnntngntagnnngncngatcggcacggatnntactcggncggactntgnngacncggtgaccgnnggtgangacagtgnngaacgcttacttccacaacaancancancgnnan

SEQ ID NO: 79600 - DNA, 163 bp, Glycine max
  Clone ID: PAT_MRT3847_42895C.1
ggctccgttcagcggcgatgagacggaaccgcttttcggctttcttggagccgcagctgccctcgacttctactgtctgggagctgcctatggcacaccgaagagcggcgccgccgtgccttcactggtcgtgatgagaccagaggtgctcatgaaccgcatt

SEQ ID NO: 79601 - DNA, 482 bp, Glycine max
  Clone ID: PAT_MRT3847_42896C.1
gtggatgggaccgatcattgatcctgaggccgatccacggtaaaagactaaggtttctatggaacacttactcttattgaagtatcaccggttgtctcacatgcattgtatatgatttatgaacatcaacatacctaaaagtgagattatctctgacttgaatatagcatgactatctgatttccgcagcagtaatcgcagaagagacatgactgtaggcagagaggtcatgctgagccaccttgactccaaaatgaattcctgatgtgtgacattatatatctcacatgcgtctggagatgaatattgtatatgataatgcatctgatcgcattgcatgaaagcctcgtgattaagtgttcgtctctcaagagagagggaaaacaattcttaatcgtaggtacgaaagccaatggctgcggatttatgaacgatggctacgatgaaagctcggagacattatggcaataaaaacaagctaa

SEQ ID NO: 79602 - DNA, 453 bp, Glycine max
  Clone ID: PAT_MRT3847_42897C.1
gtttttatttttttgtgttaaattttttttttgttttttatctttttttttgtgttttgggttttaaacacaaaccaatcttattttttaagggaatttattccagacccattaaacctcaaagtttcttcaaatgttttgggaacatttttaactttactcaaggggcttaaatccccccccggaaaccggggacaaggggaagggttgatctcttttggttgctgatatcaggaggggtcctttcattcttaagctgcttgccaacaaaaattaaactctggtgggccggggggatgcctctcttgccctaaatattggccttaaaaatgacaagggggtaaaacttttctccctctggggtaatagttttacccataaaagttttaaccaaaattttgttttcccccccgaaatcctctctccatggggggagggtgctccctttggttg

SEQ ID NO: 79603 - DNA, 1110 bp, Glycine max
  Clone ID: PAT_MRT3847_42898C.1
tctcgagccggctcgagcggctcgagcatattaagcaggctgcagcgctggttgtcaagcttgaaggaaattccgtgttctcatctggaaatattggtggagctgcatcaaaatactctgaagcattggcattgtgtcctatgagatccaggaaggagagagttgttctatatagtaatcgtgctcaatgccatcttttgctgcaacaacctttggctgccataagtgatgctacccgtgcactatgtctccatagacctgtcaatcgtcatgccaaaagcctctggagacgagcacaagcttatgacatgcttggattagcgaaagagagtttattggatgctattttatttataaatgagtgctctcagtcaaatgatcctgatctctcactgaggcaaaataaagttccagattatgctgagcgtttggttaagaagcagatgcgttctgcttggttatttcgagaggcagctattaagcatggtggggtccatagtcagggtgatggcggtgatatgtatggcccagagactgatgattcggaatgggagacagctagtgaaagtgatataggaaatgatggacgggatgacatgggcgaagacgacgatggtgattggaataatgatgatgagaggaaaaattatgacaaaccctcgatgaaagatataaagcatggatacaatgtgcagcttgcggaagaagaaccttgacaatagtaatccttgcatttaattgttctctccagcacgaatgaagcagggttggctgctgtgactattcaaactctacatgctttgtgggatttaaaagagaaaattctaagtcgctcgttgtagtaagtggcaggttgaaagtgatgagtgagtttttggtcttacgattatttgaggttgataatttatataaacttttccatgttccatatttgttctccccatctttcttgtcaagtgtaaaaattgaagattttaagtttggagaactacatagcgtttggaggatgtgaagtttttttttttttcctttattttccccggaggtttgtgtatataaatcctttgtgcttaagttttctgagtccgtttccactattattttgattgc

SEQ ID NO: 79604 - DNA, 341 bp, Glycine max
  Clone ID: PAT_MRT3847_42899C.1
ctcgagccgattcggctcgagttcaattcaagcagctttggaaaacccaaccagccaacagttaagttctggagggaactgaaaagaaatctttatacaagattacaccttcagaagagtcttgccgaagtgtgtggaatctttgtgacagatgttggtttgattgtgtggacttaggagtgaatagtttgatatatgcgcatggaaggaagagaaggcttcagttctggggttacagtgataggggcagaagctccatcagcctatcatatggcaccaaggagtgaagctccaagtcaggttcctcctcctgttcctgaagcaacaactggagctattgg

SEQ ID NO: 79605 - DNA, 378 bp, Glycine max
  Clone ID: PAT_MRT3847_4289C.1
cgggggtctcttttataatttgtggtgggcaaccaccacaggtggcatgaattgaattttcaaaattctaatctattttcatttaaatagattggatttcaaatttaaacccgattaaatgaattggattgaaaatcgatatccatattttgtaaaaaaaaaaaacaaattgaattttttggatccattttaaattcagtttttaaatcaaaaatcatttttgtctgaacttaattgaggcaacttatgatcgatatttattggcgtaatttttgattgacttcggctaaaactattttcaaccaatcgagaacaggactatttttggttaatcttgattagggtattttcggtctacctcaactgagatgattttca

SEQ ID NO: 79606 - DNA, 458 bp, Glycine max
  Clone ID: PAT_MRT3847_428C.1
ttacttgtcaagctttatcggttccttgttcgaaggactggcagcaatttcaatgctgttatactcaagcgcttgttcatgagcaaggttaacaagcctccaatttctttgtcaaggaggataaaattgctgtaatagtggggactgtaactgatgatatcagagtatatgaagttccagcattgaaaattacagcactcaagtttactgagagagcacgtgcaagaatagaaaaggctggtggtgaatgcttgacatttgatgagcttgcccttagggctcctttgggacagaatacggtccttcttagaggccccaagaatgctcgggaagctgtgaaacactttggtcctgctcctggtgtgccacacagccataccaagccctatgtacgagcaaagggaagaaagttcgagagggctagaggaaggaggaacagcagaggatttagagtttaa

SEQ ID NO: 79607 - DNA, 412 bp, Glycine max
  Clone ID: PAT_MRT3847_42900C.1
ttcaattcaagcagctttggaaaacccaaccagccaacaggtttttttcaactcttgaaatttccaagttgttttaaatttctggagcaaacggtttttcacttttttctgctctttttccttttttctgtgttttttttttttaatttcattttcactttctgggttgagtgagcaagttaagttctggagggaactgaaaagaaatctttatacaagattacaccttcagaagagtcttgccgaagtgtgtggaatctttgtgacaggtcatgatctttgtattctgagcagtattcagagtttgatgttgatgttggtttgattgtgtggacttaggagtgagaatagtttgatatatgcgcatggaaggaagagaaggcttcagttcgggggttacagtgataggggc

SEQ ID NO: 79608 - DNA, 238 bp, Glycine max
  unsure (1)..(238): unsure at all n locations
  Clone ID: PAT_MRT3847_42901C.1
btcgcngcacgcgtacgtaagctcggaattcggctcgagnctgaatcngtnnntgnnangncnnactctgcgagtcngnangangnacnnnnntngcaacttcgnaangnanangttcannataggtgantntgggacncacancggnattncngtcanaggacatgncgacncnnggaagncngctacnnccggtcnttananctacnagcnnnnangnnnnnacgnnngngnncnt

SEQ ID NO: 79609 - DNA, 441 bp, Glycine max
  Clone ID: PAT_MRT3847_42902C.1
actaaaaaaacggggcgtgcgaatttattaataatctcaagaacggcccctcatcaaatagatattatacttaatccaacctttcctcactataaacgggtgcggctatttttatagactaatacactaactcatatatatgcttaatttcatttagactataaaaactcatctataaataaataaaaatctaacatcaatttcaaatagcttactacataaatctgatcattaacaaagtccatcatcttataaagacactcttataatctataatttaatcaattcaactaatacactacatatgaaaataattttcataaaaatctaattattcaaaaattgacatcacctctaaaagttctcaaatactaaaattcataattccagtattatttttatcattccttccatagagaacataaacctccagttctattt

SEQ ID NO: 79610 - DNA, 240 bp, Glycine max
  Clone ID: PAT_MRT3847_42903C.1
aggctcgagccgacctatacaccgtctcacgcgggcaggccatataactcgtgctgctcccatcgtgtgagaacccacatagtctaacgcgctactgcttcaaggtcaaatcactctacattggcgctatcggttctcaaatctcaacacatgctatttccacgggaccggtaatgttattataaaacatgacgccgatactgatgaaaggccacgagaggccactggcgacttcaattc

SEQ ID NO: 79611 - DNA, 324 bp, Glycine max
  Clone ID: PAT_MRT3847_42904C.1
attgtgaaagggatgccattcatttcgaagtaatatcacaaaactaacgcatgtctcatgaaataacatcggcacacgcctactgggtactcgaaagcaaactactccacagcattggatacagaatttgtctcagttgtgaagatgcgaacgttaaacacatgtgatctattgaggcgcacttctatcgaattggtttttcaaatacacacggtgcaattaaattgttcaaaactaatacaaataaacgccaagggcataaatacttatatcggggtgatgaacataaatagacacttatggaatgatgttggtaaacaccta

SEQ ID NO: 79612 - DNA, 454 bp, Glycine max
  Clone ID: PAT_MRT3847_42905C.1
cttcgatgttttttgttgttttttttttttttggtctttcttttgttttttttttttgtcgttgttttttggtcttttcacggtgcttgtttttttttgtgtttttttttttttagaaaaaaaaaaaacgcccggcggcggagtactcggctttttagcggaggagcgcaattatcggcaacctgggggagctcggaggcgacgtctaccccctgcatattatgctctgccggaaggctgaaaaaggcggcgatgacattttgtgggggggctacctaaccaacaaccatttcctcaccacaaaagaacctgcccagagggtgccgggtatggaacccccacttgaagaaaaaattttttgtttcacttccagcccggcgggggaacaacttgtcgaagctgcgcaacgagctgtttagttacgcacacatgatgtcaccggggggggggagaa

SEQ ID NO: 79613 - DNA, 436 bp, Glycine max
  unsure (1)..(436): unsure at all n locations
  Clone ID: PAT_MRT3847_42906C.1
gggccgtcgacccacgcgtccggcgcgcgtgagctgagccggtgggtgagcggcggccacggcatcctggtggctgtgggggctacgaggaaagatctaattatcatggacctgcaacagtttcttatgtgcctgtccctgtgcacagcctntgccttgagcaaacccacagaaaagaaggaccgtgtacatcatgagcctcagctcagtgacaaggttcacaatgatgctcagagttttgattatgaccatgatgccttcttgggtgctgaagaagcaaagacctttgatcagctgacaccagaagagagcaaggaaaggcttggaatgattgtagataaaatagacgcggataaagatgggtttgtgacggagggggagctgaaatcctggattaagcacgcccagaagaaatacatatatgacaatgttgaaa

SEQ ID NO: 79614 - DNA, 549 bp, Glycine max
  Clone ID: PAT_MRT3847_42907C.1
ctttagtcctcacttaaaattcctatgatgtcgtcaagaacaagtttttccgtggtgcatggtgagcctgaactggtggtgccagcaggaccaactccgcgagaattaaagaacctctctgacatagatgaccaagaagggttacgttttcagcatcaggtaataatgttctaccaaaagagtcatgttatggaaggaaaacaccctgctacggttataaaatatggtttggctgaagcacttgtacactattacccactagctggtaggttgagagaatggcctaatagaaagttaacagtggattgcagtggtgagggcattttgttcgttgaagctgaggctcatgtttcactcaaggagctaggcaattccattctgccaccatgcccccacatgaaggaactcctccttgatgttcctggatcacaaggcattctcggatgccctctgctgttgtttcaggtaacccgtctaacatgtggaggatttgctttcgccgcacgcatgaaccacacaatctgcgactcactcgggctagttcaattt

SEQ ID NO: 79615 - DNA, 188 bp, Glycine max
  unsure (1)..(188): unsure at all n locations
  Clone ID: PAT_MRT3847_42908C.1
tttttaaagacaaaacattttctgttgttcggatgaaattcaacctttaatgcccttaacataagaggaaatgttacatcctatgatccctaatgacgaactaagtagctgtntagctttcagtaatcttccttaatatataacagcggcgatctatactatacggtttgaaaacatcaatgttggaa

SEQ ID NO: 79616 - DNA, 312 bp, Glycine max
  unsure (1)..(312): unsure at all n locations
  Clone ID: PAT_MRT3847_42909C.1
gggacattcttnttattgaccaatgctgcgtttgngaggnttcgaaccatgnggatctctcccccgtcctttttcccntcacncttccccaaccactaggccaactttatatanncnagtagtgagaacatgcgtctactatagttgccaggnnnnnnnnnnnnnnnnnnngacgtctgcccttcttgctattaaaaccatgcntcccattgtcggatacttggttgcatgattgctccagctcgccaagatctatagcaaaaaaggattccatgtcgtagtccgcacttagtgtgcttggtccgatctatt

SEQ ID NO: 79617 - DNA, 475 bp, Glycine max
  Clone ID: PAT_MRT3847_4290C.1
gagaagtttttctatggtcatatgtttacaacttaatgcggatttcctcaagtagaatccaaaatgaagacagtacaagcaattacagcagcatgttgaaggcttcagcagacatatcagtttcacacccacacaatttttcaaaaacacttaatactacaaaaggcacagtggataatgcatataccatactgctacctgaaacaaattcggaggaaaaagtttcattcccaagtaaaattaagcactacgttaggatgatctcaagccacttaaatttcaaatccatgtttgcgccatcaaccctcggagcaattgctggttttatcattggtgtagtcccccaaatacttaatttcatgataagcaataatgccccgcttcatgtggtcgaagactcagcttccatgttaagtgaagcagccatccctactgtcactctaataatgggtgcaaacctacttaaaggtttgaa

SEQ ID NO: 79618 - DNA, 1466 bp, Glycine max
  Clone ID: PAT_MRT3847_42910C.1
cgcagttcaagaattgaattcgttaatattttttcttctcttttatctgaatggcgaagcagaggcaagaagacgggaagaagggcgtggtcgatctcatgcctcttttcgccaaggaactcctcgccggtggcgtcgccggcggctttgccaagaccgtcgtcgctcctctcgaacgtgtcaagattctctttcagacgcgaaggacggagtttcagagcacagggttgattggatcagctgttagaattgcgaaaacggaaggccttttgggtttctacagaggaaatggagcaagtgttgcaaggattattccttacgcagctattcattatatgtcctatgaggaataccgcagatggattatacaaaccttttcctcatgtttggaaaggccctacccttgaccttgtggcaggctcactctctggaggcacagctgtacttttcacttatccacttgacttgactcgaaccaagttagcttatcagattgttagtccaaaaaagttgaatgcttcggggatggttaataatgaacaagtttacagagggatccttgattgtcttgcaaagacttataaagagggtggcatcaggggtctctatcgtggagtggctccaactcttgttggaatattcccatatgcgggtttgaaattctacttctatgaggaaatgaagcgccatgtccctgaggagtacaataaaagcatcatggccaaactcacgtgcggatctgtggcagggttattgggtcagaccattacatatcctcttgaagtggttaggaggcaaatgcaggttcaaaaactcctgccatcggataatgcggaattgaaggggactcttaaatctgttgtttttattgcccaaaagcaaggctggaagcaactgttttcagggctgagcatcaattacataaaggttgttccatctgttgccatcggctttacagtttatgatagtatgaaatcatacctgagagttccatcaagagatgaagctgcagttgaaaattgaaatggtaaccaacaaaggaataagatggacatcctcaccggaataatataaaatgatccccttcccatttcagcctgctaacaccctagggacttcaaactggcttcttagtctctgtcgatttgactgttatttatacataatggtagtgcattctttcaagttgtacagcgagatggagcttatattccatcttcaaataggatactacatatacttctgtacaccttaccaaggaatgacccctttagattcgggtctcattcatttcatcatttgaggaaacatcatgtctgttgtttagataggacaaaccatgtacttataaataaaagataaattgaccattttgaatgtgcaagtagagaatcatttagaaatgttgatattaaatatcccttcactgcatttggtttattctaagcactcgccagatttctatt

SEQ ID NO: 79619 - DNA, 746 bp, Glycine max
  Clone ID: PAT_MRT3847_42911C.1
ctttttctctgctcaagtatttaaccacctagggtgtgtttaattgtgttttttattttagttttttaaactttatttaataaaacaattttcaaaatctaatttttagatagtaagaataggggaggaaaatggttttctagaaggaagagtataaacaacagaactaaaaaacaaaaaaacaaaaaaagcttaaagatgttctgatttttttatttaaaaaattcaagatgtactacttttgaaaataacttttaaaaactactgtaatcaaatgagtttgtttcttttcttgtttttaaaactgaaaacaaacaagccctcattgttgaattttcatttccactattagctcctctgatagttcttcaagttatcactctcaacacctccattcattctttcactgataggtaaagttttatgcaaatcaaacatatccttacgaggaaagatatgttcagtgctcatatcaatatcaatggagtaacaattacacctagcaactagtggctatggtggacatcatagacaccttttaaagaaatttcttctcaacaagcaaaaaaagcttcaaaattctaagatctaacttctcagaagaaatcacaattcacgaacacgcatatgattttgtcagatcctaaaactgggaaactatttgtattcaggtgcaccattaatttaatttctgggtatcattataattaaaatggcattagttctaaacatatttcgaaaatatc

SEQ ID NO: 79620 - DNA, 390 bp, Glycine max
  Clone ID: PAT_MRT3847_42912C.1
cccacgcgttcggacggtggtgataatgttagagccgttcacgaggccaaggttaaggaggaagttaccaatttcaaagacactgcgtctctccaaaacggtgcattgggatcacctgccagtgtgccgcccgagacatctttgacccctccttcttccattcctatcaagatggaccttcttcaactgctggaaaaactggaagcttctctattgatgcccttgctaaggctaagaaagctttacaaatgcagaaagagttgtcagaaaagctcaagaaaattcctcagttgaataagagttctacccaaactttgcaaggaagctcaaacttgggttcaaagactgaatctacaatgccctcttcaatgctggagtggcattaataac

SEQ ID NO: 79621 - DNA, 303 bp, Glycine max
  Clone ID: PAT_MRT3847_42913C.1
caccaaaggagggagtgatcgactttcccttgaaacatttgatcctgccctaagcattttgctatatacataaatacctgtgtcagaatctgagagtggggtcgggttggttttgttttgttgaagtcggggctcatatagtcaaatttgtatagcaattcataattcataattatctcagttttgccccgtgaagcctgaggaactgggaaccactgctgcgggacctcatgaaaaccgtcgtacaggggagacactcaccacatatatcgtagattcatacttaatcccctttggatcaca

SEQ ID NO: 79622 - DNA, 153 bp, Glycine max
  unsure (1)..(153): unsure at all n locations
  Clone ID: PAT_MRT3847_42914C.1
aaaagcgcttcanggagttgaaagttgaaacctcttcaatcttcacgatggcggagaagctgnacttacgagagttcctanaggaggatcaagaacccttccntctgaaacantacatttnggagagacgcagccagntcanaagggtaacac

SEQ ID NO: 79623 - DNA, 547 bp, Glycine max
  Clone ID: PAT_MRT3847_42915C.1
tcgcgatctagaacggcattctttgtctaaatggaacttgttaaaaaacaaactggcgaaggttttcatatgcaaaacaaacgtgattaatgaaaaaggcgcccaattggctcaaaatcaaaattaaccaagccaatagatcttttcccaagaacctaaggggcaaattaagtggatacttgacaccaagcttacatactgacacaaaaaatttgcatataaaaaaaaaaaaattaaatctttccgaacaacaaaaaaaaattccaccccccattttttctaaacaaacacacagggggggcctaaaaacccctattttatcccctctcacataaaaaagttgcccctggttgaaacatcaccatggcaccccttggaattaacagatgaaacctccatcaaacgttcacatgttggatttgggccttttatagttacaagcacatctggattggtcttaacaaaaacacattgtgtgcgaaacattaactcatcaagcctggtcttataatactcaacaaagggctcgtaaaacccttttttttgg

SEQ ID NO: 79624 - DNA, 418 bp, Glycine max
  Clone ID: PAT_MRT3847_42916C.1
ggctcgaggtacctagcaacagtagcagcggatataccgagacggagatagaaaaaatattacgcaggaatcgaattcttaattttatcagatgatgcgacttcacaaactgtatcatcgcttcactcttgtccccctttcgctcccttctaatccctctcttcttcctctcgctcctccgttgcgcctcacgctccgtcaccgaacctgtgtgaacttcgcttccatggcttcctcgcggctgcgcaatttatcacctctcgctgctgcgcccactgaagacgccgacgctgcctccatttcttgctctcccaacgccgttgcttccgttgactacgatgatgagtcaactgtaggagtaaaggatcgcgttcctccatctgtgatcagtgatcttgttgatgctccacctgtacct

SEQ ID NO: 79625 - DNA, 184 bp, Glycine max
  Clone ID: PAT_MRT3847_42917C.1
ccacagctgaccaatatgatgcactatatgtttttcaacgatcagtcatgaacatcatggcccggtgttcaaccactcggtgccaggcgagcctttgcaatcggcaaagccctaacgctagctcttgtacacaacgaagtctttatcacgcatcgaaatttctctgatgaaaactaacacacac

SEQ ID NO: 79626 - DNA, 1651 bp, Glycine max
  Clone ID: PAT_MRT3847_42918C.1
ggctcgagaatttttcttttcatcttaatctgctagctatcattcactttccccatccatccatccaccgaaccctaaccctaatcctccatcatcgatttgactcgattctctcgctgtctgttatttccttcaaagcaaaacaattccatcgatgaatcgggcgtcgcagctttcgtgataatgatcttggcgctgcgaatcgattgcatgggtttggagaatgccggagcttcgtagtggaccgcgacgacgtcgtgctccggttgctcgtaaaagctccgaaccaccgtctccggccgggagatacgtcaagactcgcgctgcagtcgccagagaggcagcggcggtggagaggccaagaactcgtttggcggccaaaaaagaggagaatccccttataataatatccgatcacactaagaaagacgacgctgccgccatggccgacgagagtggtggcttgagtgcaaacaagggcgttgctcaagaagatgacaccaacgcagctccttttccggagagggttcaagtaggaggatcacctgtctacaaagtagagaggaaactgggcaaaggtggctttggacaggtttttgttggccgtcgagtcactggtggtaacgatcggaccactggtgctggtgccactgaggtggcattgaaatttgagcataggaacagcaaaggctgtaattatggccctccttacgagtggcaagtatacaacacccttggtggcagccatggaatacctaaagtacactacagaggaagacaaggataataatatgtgatggagagggacatgcttgatggccttcttattagttgtgtgtcttcttgttgcaatctttgggcccttattatggatgctggaactggttttacagctcaagtttacaagttgtcaacctttttcttgcacaaggaatggattatggagcagtgggataaaaacttttacatcacttctattgcagggagcaacaatggcagctctcttgtggtgatgtcaaaaggtacgcagtatactcaacaatcttacaaagtgagtgaatctttccccttcaaatggataaacaagaagtggagagaaggttttcatgtcacttcaatggctactgctggaagtcgctggggtgttgttatgtctcgaaatgctggattcagtaaacaggtggttgaacttgattttctctatccaagtgagggcatccataaacgttgggataaaggttataggattacagcaaccgcagctacattggatcaatctgctcttatattaagtattccgaggcgcaaactcagtgatgaaactcaggaaactctacgtacatcgcaatttcccggcacacatgttaaggaaaaatggtcaaaaaacctttaccttgcctgtttgtgctacggacgcacagtatgctgatttccatgacattttaaagcattttattgacaagcggattatgagttgtcatctgcccccccacaaaagatctttttgtagaaaggaactaattgttgtgccagcagagaaccttattttgttatgttataagaatattgttctgttccctgtccctccccttctattatatgctttactgggatggggaatgttgcagagtaatgaatgctgtttagcttt

SEQ ID NO: 79627 - DNA, 977 bp, Glycine max
  Clone ID: PAT_MRT3847_42919C.1
atcctccatcatcgattcgattctcttgctctttgttatttccttctttggtgaacaaagcaaaacaattccatcgatgaatcgggcgtcgcagctttcctgataatgatcttggcgctgcgaatcgattgcatgggtttggagaatgtcggagctttgtagtggaccgtgacgacgtcgtgctccgattgctcgtaaaagctccgaaccaccgtctctggcggggagatacgtcaagacccgcgctgcagtcgccagggaggcagcggcggcggcggagaggccaagaactcgtttggcggccaaaaaagaggagaagccccttacagtaatatccgatcacgctaagaaagacgccgccgccatggctgacgagagcggtggcttgagtgcaaacaagggcgttgcacaagaagatgacaccaacgcagctccttttccggagagggtttttgttggccgacgagtcattggtggtaacgaccggagcactggtgctggtgccactaaggttgacttgttgaagcatggtatctcagacccgtccttgatgacttcttaatcacaaagctctagttctgagcttgagaaagataagcttcttgaacatgaggaatacatggctactcctgtgtttgtacacaccaagctcgtgaggctgctatgacagttcaaagaaagatggtagattctcagtgtaagaagagcaaaggttggtagactcctcggcttgtttatgggcagtgctctttttcaataaaactcggaacatttcgacagattctgtgtatgcacttgacatggtcgctggtgtggtaaacttgtgttattattatttttatctacaacaatatagtttctaagttcttggaattaaattacaacgaaaagaccaacaatatttgatacacctttaccaattatgttgtatcactataatttgtttagtgtaccagaaatccacttatattatgttc

SEQ ID NO: 79628 - DNA, 1336 bp, Glycine max
  Clone ID: PAT_MRT3847_4291C.1
cccacgcgtccgcccacgcgtccgcccacgcatccgcccacgcgccctctcttttcccttaattctctctctaaacatcacaatggagtatggaaggttgggaccctctgatcctggtggctcctcgcgcctcaacaacgttcctccgacatcttccgggaggaagaagattgtcttgctttcactctttagcgtcttgttaatagccgcgtctgctgtaactgcagttgtcgtccgctctcgtattcaacaaaatacgagagcccatgagactaggctcggaaagcccactcaagcgatttcacgcacgtgcagcaagacacgctttaagaccttgtgtgtcaaatcgcttttagactttccgggatctgaagaggcgtcagagaaggacctcgtccacatttccttcaacgtcacgctgcagcacttctccaaggctctgtactcctccgcggccatgtcctacaccgccatggatccccgcgtccgcgccgcctacgacgactgcctcgagctcctcgacgactccgtcgacgccctcgcccgctccctcaacacagtctccgtcggtgccgtcggctccgccaacgacgacgtgctgacgtggcttagcgccgccctcaccaaccaggacacctgcgcggagggggttactgacgccgtcggcacagtgaaggaccatatgtccagcaacctcagggacttatccgagctcgtgagcaattgtctcgcgatattctccggcgccggtgccggcgacgacttcgccggcgtccccattcagaataggaggcggttaatggaaatgcgagaggataattttccgacatggctgagtgggcgagataggaaattgctgagcttgcctctgtcgcagatacaagcagatattgtggtttccaaagacggtaacggaaccgttaagaccatcgccgaggccattaagaaggtgccggaatatagctcacgccgcatcattatctacatcagggcaggaaggtatgaagaggacaatttaaagttggggaggaagaaaacaaatgtgatgttcataggggacgggaagggcaaaaccgtcatcacgggcggaagaaattattaccagaacctgaccacatttcacaccgcttccttcggtaaattctttctttttgtcctctccttaatgtttattacagtgctttgagtgatgcaagcaatttgtaattaagccctgcttgtattttataaattttcaaattttaaaataaattgataaatgaatatatatttaaccaaataaataaaagttagcaaaattaaaactgtgaaaaaatatatgataattcttgttttc

SEQ ID NO: 79629 - DNA, 706 bp, Glycine max
  unsure (1)..(706): unsure at all n locations
  Clone ID: PAT_MRT3847_42920C.1
cgttttcattttcatctgggagggngatggaaagncttgcctcccgttactccggctttcccgattaatctgctcccgagtttgttcactcatcaaaccctaaccctaatcctcatcctcatcactcgatttaaaaccccattcccattgctatcgtgacatcttccgacaaattttctctctgtcttccgtttcgttcttccaatttcaggcatgaatcgtgcatcggtgttccggtagagcatatgacgagggaggttatcggaactgcgaatcgattgcatgggtttagagaatgccagagcttcgtagtggtgtgcgacgggggcgtggccgtggccagaaagcatcggaacctgcaaggaaggaggtgaaggctcgtgcggcgccgagagggagacccaggactcgattggcggcgaaggaattggagcttcaggagccgttgatcccgataccaccgacaccgataccggaaccgttgatcccgatactggagccggcgaaagaagagaaaaaggaagttggtgtgggcgtgaatatgggtgacgaaagcggtggcttgagtggcaataagcctgaggaggatgccaccactccaccttttcctgataggggtcaagtgggaggatcgcccatgtacaaggtagagagaaaattgngtaaaggtgggatttgtcaggtttttgttggccgtcgtgagcgt

SEQ ID NO: 79630 - DNA, 786 bp, Glycine max
  Clone ID: PAT_MRT3847_42921C.1
gagggccggccggggccggggagggcccaaaaatctctcaagaaatcataccaaaaaagcaactagcacttcaaattcgctgtctcagtccctcgtatccaactattttgcttaggattttccttcttcatcacaacctcgtaataaattcgttaagttcctccttgtttggtcccaaacaatctgagaaccctctttcaattcctcttcctcaactccatcgttcatcgccgtccactattattagcaattggtatttagtaattaattaattactaacattagttaataataatggaccctgcagagctgaagcgcgttttccaattgttcgaccgcaacggtgacgggagaatctcattgaaggagctgagcgattcgttggagaatctaggcatcttgatcccggacaaggaccttgctcagatgatcgagagaatcgacatgaacggagacggttgcatagacgtggacgagtttggggacttgtatgagtccatcatggaggagcctgatgaggaggaggacatgagggaggcctttaacgtctttgaccagaaccgcgacggtttcatcaccgtcgaggaactagggacagtgctggcctccctcggcctcaaacaagggaggacccttgacgagtgcaagaagatgatcatgaaagtcgacgttgatggagatggcatggttaattacaaggagttcaggcaaatgatgaagggaggaggcttcactgtccttaattagccctacgtttaatgcaaaagcattgcttgccattacaaa

SEQ ID NO: 79631 - DNA, 2435 bp, Glycine max
  unsure (1)..(2435): unsure at all n locations
  Clone ID: PAT_MRT3847_42922C.1
ccacgcgtccggacgtcctgggtggagtgtgaaccgaggagacacatgccttaattatagtctttctgaccaataaaaaaaatttgtttttcatcttccgtttctttcattctatttatttattggattgaatttttctatttctaatttttctttccatctttaatctgctagctatcattcactttcctcatccatccatccatccaccgaaccctaaccctaatcctccatcatcgattcgattctcttgctctttgttatttccttctttggtgaacaaagcaaaacaattgcatcgatgaatcgggcgtcacagctttcgtgataatgatcttggcgctgcgaatcgattgcatgggtttggagaatgtcggagcttcgtagtggaccgcgacgacgtcgtgctccgattgctcgtaaaagctctgaaccaccgtctcccgcggggagatacgtcaagactcgcgctgcagtcgccagggaggcagcagcggcagcagagaggccaagaactcgtttggcggccaaaaaagaggagaagccccttaaagtaatatccgatcacactaaaaaagacgacgccgccatggccgacgagagcggtggcttgagtgcaaacaagggtgttgcacaagaagatgacaccaacgcagctccttttccggagagagttcaagtaggaggctcacctgtctacaaagtagagaggaagctgggcaaaggtggctttggacaggtttttgttggccgacgagtcacttggtggtaacgaccggagcactggtgctggtgccactgangtggcttttgaaatttgagcacaggaacagcaaaggctgtaactatggccctctttacgagtggcaagtgttcttcacccttggtggcagtcatggaatacctaaagtacactacaaagggagacaaggggaatattatgtgatggtgatggacatgcttggtccaagcttgtgggatgtttggaattcctcaagtcagacgatgactgcggaaatggttgcatgtattgcagtcgagtccctgtcgatcctggagaagatgcatgcaagaggctatgtgcatggagatgtaaaaccagagaactttttacttggtcaaccttttacaccacaagaaaagaaattgtttcttgtagaccttggattagcaacaaagtggagagacacctccagtgggcagcatgttgaatatgatcaacgtcctgatatgtttagagggactgttcgatatgccagtgttcatgctcatttgggaagaactgctagtagaagggatgatcttgaatctcttgcatatacactcatcttccttcataaaggcaggttaccctggcaaggttatcagggtgatcataaatccttccttgtttgcaaaaagaagatgggaacatctcctgagatgctatgctgtttttgccctgctccttttaggcagttccttgagattgtagtgaacatgaagtttgatgaagaacctaactattccaggctaatatctttgtttgatggtatgcttggaccgaatcctgcattgaggccaattaacactgaaggtgctcaaaaggtcgggcagaagaggggtagattgaatattgaggaagaggatgattcacagcccaaaaagaaggttcgtttgggggttcctgctacacaatggatttcagtttacaatgcaagactgccaatgaagcaaaggtaccattacaatgtagcggacgcaagattagcacaacatgtggagagagggattgctgatggccttctaattagttgtgtggcttcttgttccaatctctgggcccttattatggatgctggaactggcttttcaagtcaagtttataagttgtcaccatttttcttacacaaggaatggatcatggaacagtgggaaaagaactattacattacttctattgcaggggctaataatgggagctctctcgtggtgatgtcaaaaggcacacagtatacacaacaatcatacaaagtaagtgactcattcccattcaaatggataaacaagaagtggagagaaggttttcatgtgacttcaatggctactgctggaagtcgttggggtgttgttatgtcacgaaatgctggattcagtgatcaggttgttgaacttgattttctctatcctagtgagggaatccacagacgatgggataatggttataggattacagcaacggctgctacatgggatcaatctgctcttatacttagcattcctaggcgcaggccaggagatgaaacccaggaaactgtgcgtacatgtgaatttgcaagcacacatgttaaggaaaaatggggaaaaaacctttaccttgctggatggagctatgggcgcacaggatgctgattggcttgacaggggagcgggtggggggtgaaattgatgtattg

SEQ ID NO: 79632 - DNA, 280 bp, Glycine max
  unsure (1)..(280): unsure at all n locations
  Clone ID: PAT_MRT3847_42923C.1
aatccctattttnttcctcagtagtgtcatttacgcttctcttctctgcancaactatgcctaaccctaaggtcttcttcgacatgaccatcggcggtcaatctgctggccgcatcgtgatggagctctacgccgacgtcactccccgcaccgccgatannttctgcgngcnttgcannggcgacaatngcgtagngcggancgnnantcccctccactanaagggctcgtncttcnaccgcgtgatcccgagtttcatgtgtcagggtgcgacttcacc

SEQ ID NO: 79633 - DNA, 349 bp, Glycine max
  Clone ID: PAT_MRT3847_42924C.1
aaaaggccaaaaaccaagcttgggggactttaatgaaaaactttcaaagggttgccccaagaaggctttttttcctttttaccccccaaaaaatgtttttttcctttttttcccccttaccctttttttttgtgccctttattgaccaagtcctttttggtttaaaggaaaattttctaaaagggttgggtttttttaggtggataaaaaaatttttcctttcgccctacaggggttcaaccttgttttgcaaataaaccaatcaatttttgtttttgcagagggagatgggttttaatcccaaaagaaccaacctttttttttcctgaaggaattttttttttccccc

SEQ ID NO: 79634 - DNA, 2429 bp, Glycine max
  Clone ID: PAT_MRT3847_42925C.1
gactcgattggcggcgaaggaattggagcttcaggagccgttgatcccgataccaccgacaccgataccggaaccgttgatcccgatactggagccggcgaaagaaggaggtgaaggctcgtgcggcgccgagagggagacccaggactcgattggcggcgaaggaattggagcttcaggagccgttgatcccgataccaccgacaccgataccggaaccgttgatcccgatactggagccggcgaaagaagagaaaaaggaagttggtgtgcgtccgcggacgcgtggggaaagcggtggcttgagtggcaataagcctgaggaggatgccaccactccaccttttcctgatagggttcaagtgggaggatcgcccatgtacaaggtagagagaaaattgggtaaaggtggatttggtcaggtttttgttggccgtcgtgagcgtgcaacaggtgctggagctatggaggtggctctgaaatttgaacatagaaacagtaagggctgtaactatggccctccttacgagtggcaagtatacaacacccttgggggtagttatggaatcccaaaagtacactataaaggaagacaaggagaatattatgtgatggttatggacatacttcgcgagccgatcggctcgagctggaatacctcaagccagatgatgtcttctgaaatggtctcatgtatagcggttgagtccttatcaatacttgagaagatgcactcaaaaggttatgtgcatggggatgtaaaaccagaaaactttttacttggtcaaccagctacagcgcaagagaagaaactgtttcttgttgaccttggattagcaacaaaatggagagacacctccagtggacagcatgtggactatgatcaacgtcctgatatgtttagaggaactgttcgatatgctagtgttcatgctcatttggggagaactgctagtagaagagatgatcttgaatctcttgcatacacactagtcttcctccataagggccgattaccatggcaaggttaccagggtgatagcaaatccttccttgtttgcaaaaagaagatggggacatctcctgagacgctatgctgcttgtgtcctcctccttttaggcattttcttgagattgtagtgaatatgaaatttgatgaagaacctaattattccaagctaatatctttgtttgatggtacgattggacccaatccagcattgcggccaattaatactgaaggtgcccaaaaggttgggcaaaagcggggtagattgaatgttgaagatgatgaatcacagccaagaaagaaggtccgtttaggggttcctgctacacaatggatttcaatttacaatgcaagactgccaatgaaacaaaggtaccattataatgtgtctgatgcaagattagaacagcatgttgagagaggggttgcagatggccttcttattagttgtgtgtcttcttgttgcaatctttgggctcttattatggatgctggaactggttttacagctcaagtttacaagttgtcaacctttttcttgcacaaggaatggataatggagcagtgggataaaaacttttacattacttctattgcagggagcaacaatggcagctctcttgtggtgatgtcaaaaggtacgcagtatactcaacaatcctacaaagtgagtgaatctttccccttcaaatggataaacaagaagtggagagaaggttttcatgtcacttcaatggccactgctggaagtcgttggggtgttgttatgtctcgaaatgctggattcagtaaacaggtggttgaacttgattttctctatccaagtgagggcatccataaacgttgggataaaggttataggattacagcaaccgcagctacattggatcaatctgctcttatattaagtattccgagacgcaaactcagtgatgaaactcaggaaactttacggacgtcacaatttcccagcacgcatgttaaggacaaatggtcaaaaaacctttaccttgcctgtttgtgctacggacgcacagtatgctgatttccatgacattttaaagcattttattgacaagcggattatgaattgtctactgcccaacaaccacaaaagatctttttgtagaaagaaactaattgttgtgccagtagagaaccttattttgttatgttataagataagaatattgttctgttccctccccttctattattatatgctttatgggacggggggaatgttacagagtaatgaatggtgtttagcttttatgttcctccattatgtatatgcaaggttttatattgtttctccatgccgcattcttaattcaactaatgtcgaatctggtatgttgatgggattttttaggtttatctccatgacatactttaataagaaaaacaattaagctgt

SEQ ID NO: 79635 - DNA, 1306 bp, Glycine max
  Clone ID: PAT_MRT3847_42926C.1
gtccggattcccgggtcgacccacgcgtccgaaaaatttgtttttcatcttccgtttctttcatgctatttatcattcactttcctcatccatccaccgaaccctaatcctaatcctccatcatcgattcgattctcttgctctttgttatttccttctttggtgaacaaagcaaaacaattccatcgatgaatcgggcgtcgcagctttcctgataatgatcttggcgctgcgaatcgattgcatgggtttggagaatgtcggagctttgtagtggaccgtgacgacgtcgtgctccgattgctcgtaaaagctccgaaccaccgtctctggcggggagatacgtcaagacccgcgctgcagtcgccagggaggcagcggcggcggcggagaggccaagaactcgtttggcggccaaaaaaagaggagaagccccttacagtaatatccgatcacgctaagaaagacgccgccgccatggctgacgagagcggtggcttgagtgcaaacaagggcgttgcacaagaagatgacaccaacgcagctccttttccggagagggtttttgttggccgacgagtcattggtggtaacgaccggagcactggtgctggtgccactaaggctcgtgaggctgctatgacagttcaaagaaagatggtagattctcagtgtaagaagagcaaaggtttttcctggtgcttggacaaccattttggtatctcttgacaacgccgatatttggaaccttcgtccaaagaacctcaactcgtggtatctggggcaagaagtttatgtgcatgttgtaaacccagagaaagacaacaatgtggttgtgtaaattcctaacaaatttcaggtgatgccactctggatttctcataagcacactcttaaatcttgcaccacattttgcagcaggtttaatattaattgggtgcagtccaggaggcacagctagtaacattataacatatctttcacgtggagatgtggcgctatctgtaataatgacaactgcaagtaccctaactgccatggttggtatagctataatttgagtcttaatctttggtttccatttttgacgagcaattaattaattcatgacaagatgtgggtaggcattagtacaatgatacaaacatttagtaatgatttcagtcccacgcatctgcccacgtttgtacttgggcagacaaattaattttctccatcgcagcccttttggccctccctctctggtattgaagactagcataagacacgtcttgtttgatttattacaaacaatgtagagtgtgtt

SEQ ID NO: 79636 - DNA, 152 bp, Glycine max
  Clone ID: PAT_MRT3847_42927C.1
acgaggttttgcgtgtcgttgtgctttaccttgtaaatgatgaatccataatgaggctatttttctgggtgtcctgttcttgaagaactttgttatgaggaagtgaagtctaataattcaacctcgtttaaaatatgtgtgccttcactgaa

SEQ ID NO: 79637 - DNA, 531 bp, Glycine max
  Clone ID: PAT_MRT3847_42928C.1
agacccatccttgatgacttctttaaccacagagctctagttctgggcttaaaaaagataagcttcttgaacatgaggaatacatggctactcctgtgtttgtacacaccaagctcgtgaggctgctatggcagttcaaggaaagatggtagattctcagtgtaagaagagcaaaggttggtagactccttggcttgtttatgggcagtgctcttttttcaataaaactcgaaacatttcgacagattttgtgtatgcacttgacatggtcgctggtgtggtaaacttgtgttattattatttttatctacaatatagtttctaagttcttggaattaaattacaataaaaagaccaacagtatttgatacacctttaccaattatgttgtatcactataatttgtttagtgtaccagaaatccacttattgttatgttcatatcacgaggacttctcagtcttgatttacttgattctagttcaaattaaggtcattgtcttaatagcatgtcttctctattaaacatag

SEQ ID NO: 79638 - DNA, 430 bp, Glycine max
  Clone ID: PAT_MRT3847_42929C.1
aacagctaaatctacagtcacataaatagggttattgtgtggttaataattgctgtagtactagaagtaatatacagtggttgattaagtctgccatggattggagaggtaagtgatacccaccaacatttccacaaatgatctgagaccgatcaaatactcatatccttaacacaagaagatgctacaacttttaaaagagctaattcacaaaacaaaggaaacgaaattaattcaactcacagcacatttcaaaagcctctatagattacaacaaagcaaggcaatatagctttagggttgaacacaagcaactcatccaaattagaataagctacaacagcaccggcgacaacaacagaatcatactcctccatgccaccttgtgcattcttcttcaccctgcctgctatcactctacaaaccagca

SEQ ID NO: 79639 - DNA, 401 bp, Glycine max
  Clone ID: PAT_MRT3847_4292C.1
cacagacatccgttttctggatgtgttttttctcactctcaggattgaaactgtagggggggtcatgacaaagtcgctgcgcactaacactgctattctaaccaagagatgtcaggtgttacaccacctatcatgaccagcagactacattctcgattcatgctctcgaaggctagaggagtactacataggatcgaccacttcatggaatatgggatctgtctggaatcccgttaacaagcacgtgatccctaaatatgagacctgacacacataagtttgcaccctcaagagttctaaacgtaaaccgcagattacatgggcaactggtaaatcacagaagatcacgctttcaaacgaataggaacgtctcagccaatatgaaacagatagaatggatc

SEQ ID NO: 79640 - DNA, 141 bp, Glycine max
  Clone ID: PAT_MRT3847_42930C.1
gggggggccccactaaagtttggttggacccccccaccaccgtttctacactattttaaaagtttgaaagaacgaattgagaatccgaaatggaattcgggtcaagacaggaggctggatggtggggcgctcatccgaccc

SEQ ID NO: 79641 - DNA, 319 bp, Glycine max
  Clone ID: PAT_MRT3847_42931C.1
caatcaccaagatgactacctcacgttgttttacataggactccctatgaacaagggtgttaaacagtatcatggcagctgatccatcatgccatgcgccactatcagtcaaagcaaaagcacgcagccactcctcggaaacagctgagattccggacatggaagtaccgtagagaatttctcaataagcggcgtcaggctattaaaagacaagctgcttgcaagggcttacaagcacggaagcaatgtcgtaaaatcggatggtcagctggtgtgcttgagacagtgaaccagcgttggcttttaaagagaaaaggct

SEQ ID NO: 79642 - DNA, 495 bp, Glycine max
  Clone ID: PAT_MRT3847_42932C.1
tgcatattaactgcccttttagagagcctttggaaagcagtccctgcagatggttgtcaagctgtttatctgggttagacttgtggatggctaatgctgaaccatttaccaagtatattcatatgcaattgtctcatacttgtataaatgctcctggtgaaatgactgaagttttaaatctgattctaagggccaataatagtcttctattatttggtgcaatccatacagaggatgagatgtgggctgctctacttttggctaaacaccttcagtggcctgttgtagcagatatcttgtctgggttgcggttaagaaagcttttaacttcttttcctgatattgaaagaaactttatatttgttgacaatcttgatcatgctcttctctcagattctgtcaagggctggttagaggttgatgtggttattcaggtattatgacttattactaaattttattgattccccatcaaataattagttactggacaga

SEQ ID NO: 79643 - DNA, 1314 bp, Glycine max
  Clone ID: PAT_MRT3847_42933C.1
ccccgaggagaaaaataattgctgcatcaccggatgttttgcttgaagatgttgctttcatgggaaaatttcctctgacggaatctcctcctaaaaatatctcattggaagtggttgttgagcctcagcaacaaaatcctaagcggaaaaacgattctgaaaagctaaaccataaaacagaatgttcagctgagaatgcagttgcaaaaagaacatctttttcgtccccgaaaaatggtagccaccttgcaaatcacacccccttttcaggaactccacaccaggcaaatgtagcttctgataataaaacaagtccctggtgtttcaatcagacacctggacatcagtggttaattcctgtcatgtctccttccgaatggctttactacaagccatatcctcagcccggatttatgagaacaatgcatggaggatggcacaagccactcgtgctagcacctctcagtgctactttcatgaatcccgtttatcaattcccagctactcatgctctagttagggtttcaccgtttgtccctgagctcagtcacacctacttcgctctctttggcatgcgggtagtgaatcaagcaacatcaggatcagccgttgaacaggtgaaccagtttgctgcacaaggttctcatggtcaaaatggtcattcatctgtagagggagccgattttaacactcatcataaccaaagctcatctaacttgccagttcagaagaatggagctaggttacatgttaaaaaatctcaggccctgaaggagagagggttacaagggagcacaagaagcagtcctagtgaaatggcacagggaatcagagcagggaaaattgctgacggaagtgatgcacagtctctttctcttcacgctgttgaaaccagacagcaaacacaagccatcaaagttgtaccccataaccggaaatccgcgacggaatcagcagctagaatttttcaatccattcaagaagagagaaaacagcatgatttggtctagtgctgtttgtggaggtggagttatttgggttgattttgtacaatgcgtcaagtcttgtactttgttgtttgataatatgtatcttgccgttttattctacttttccttttggttgtcctttttattgcaaaaatattcgaatgtagatattgttaaaactactacatggaatgctaaaattcatcaaatgtaatattagtggatggtgtctccgtgtatagtgataattttcattttgctcaattaaattgagtttcaacccctgtatattgcttggctagtagagaaattgttgtcggaagcc

SEQ ID NO: 79644 - DNA, 313 bp, Glycine max
  Clone ID: PAT_MRT3847_42934C.1
gaaccaaccattctgaaaaaccgatttggaaagaagctctcggcctctgtatcccatgatgctccacagccctgaactgctgtggtcggacatcagaaatatgtactccataatctccatccagttgctcgcaaccatcctctgcggtaccgaccccttcaccgcccgcccaatcagtgtcttcttcgccaccaccggcgccggactggctctctacatcatactcattttagctccctttataacgttgtgtccactttactactattcccagaagcataccgtcaactacttgctcctagagtatttcacc

SEQ ID NO: 79645 - DNA, 514 bp, Glycine max
  Clone ID: PAT_MRT3847_42935C.1
aagcgatggagtcttggtccattcgaatccgaagatacgaaacgctggctcgagtttgaattcaagcgatggagtcttggttcattcgaatccgaagatacgaaacgcttccaacaacggctaaagacttcgagtctcgttggaaggccttctcccactgaatccatccaacggtggcctcgactacttgcaggcacgtgtggactcttgcacggtggaggctatgctatctcaatctgcaccctttttttatggttcctcttccattttctaccttccttgatctttgtaagaagcggatgcagatgtaaagtaagcaccaacaatgccttgatcattgtcctgcctcacatacacaaactcatgatgatacacaacatgcttatttggccttggaggatgttcccgaacaaatttatttagcacaggttcaaaatccaacatctgtgagataatcggtatctttgtcagttggtttatgaaaggattttttttttaaatgaaaatactatgc

SEQ ID NO: 79646 - DNA, 128 bp, Glycine max
  Clone ID: PAT_MRT3847_42936C.1
aacaacgacgttaagagcaaacaacggtacggctgttaaatacaacagcgggcgttctacaggatccatgcctacgtacccgtgcatgcgacctcgtaactcttcgacaatgtcacctagattcaatt

SEQ ID NO: 79647 - DNA, 196 bp, Glycine max
  Clone ID: PAT_MRT3847_42937C.1
tgttttttttttttttttttttttaatttattttttcctggtaaaacattcactatgaatacacaatctgacatcaacgattctttggagcaacattgacagctgctgcctctaatataacagtcattatcactattactcatatcagctgcagatgcttctacattttccggatcccaaaaagtaaccaaagcat

SEQ ID NO: 79648 - DNA, 112 bp, Glycine max
  Clone ID: PAT_MRT3847_42938C.1
aaatatggaaatttaagctaggcttgtaaaaaagccaggcttcgataaattggccgatcaaataagtgggtcaagttttaaaagggtaacatttattccatacaaaaaccac

SEQ ID NO: 79649 - DNA, 237 bp, Glycine max
  Clone ID: PAT_MRT3847_42939C.1
cacaaagcgggttactgtctgttcaagctaccatctctctctctctttcttagtgcctccttgccagaagttaaaatggcccaagaaactttcctattcacatctgaatcagtgaacgaggggcaccctgacaagcactgagaccagaatatcgaagcagcgcacgaagcagtcctggagcaggacccagtacagcaaggcagttcgtgtaaccagtaccaagaccaaccaggtgat

SEQ ID NO: 79650 - DNA, 2246 bp, Glycine max
  Clone ID: PAT_MRT3847_4293C.1
tttcgatctccacaatatccctctcttttcccttaattcgtcgctctagctctaaagaaagaacacatcacaatggagtacggaaggttaggaccctctgatcctggtggctcctcgcgcctcaaccctccgagatcttccgggaggaaaaacattgtgtttctgtcactctttgctgtcttattaatagccgcgtccgctgttactgcagttgccgtccgctctcgcaccaaaaataccggaggggacggaactagtctcggcaagttcacacaggccatttcacgcacgtgcagcaagacacgctttaagatgttgtgcatgaaatcattactggacttcccgggatctcaaggagcatccgagaaggacctcgtccacatttccttcaacgtcacgctgcagcacttctccaaggcgctctactcttccgccaccatctcctacaccgccatggatccccgcgtccgcgccgcctaccacgactgcctcgagctcctcgacgactccgtcgacgcgctcgcccgctccctcaacacagtctccgtcggcgccgtcggctacgcgaacgacgacgtgctgacgtggctcagcgctgcgctcaccaaccaggacacctgcgcggatggcttcgcagacgccggtagcacagtcacttatctgggccgtccctacctactttacgctagagagctctacatgctatgtttcgcgatattctccggcgatcccgccggggaggactagggcggcatctctattcagaataggaggcggttgatggatatgcgagaggataattttccgacatggctgaatgggcgagataggagattgctgagcttgcctctgtcgcagatacaagcagatattgtggtttccaaagacggtaacggaaccgttaagaccatcgccgaggccattaagaaggtgccggaatatagctcacgccgcattattatctacatcagggcaggaaggtatgaagaggacaatttaaagttggggaggaagaaaacaaatgtgatgttcataggggacgggaagggcaaaaccgtcatcacgggcggaagaaattattaccagaacctgaccacatttcacaccgcttccttcgctgctagtggttctggtttcatcgcaaaagacatgacgttcgagaactacgccgggccggggaggcaccaggcggtggccctccgcgtcggagcagaccacgcggtggtgtaccggtgcaacatcatcggataccaagacacaatgtatgtccactcgaaccgtcaattttaccgagaatgcgacatttacggaaccgtggacttcatattcggcaacgccgcggtggtgttccaaaactgcaccctctgggcccgaaagcccatggcccaacagaagaacaccatcacggcccaaaaccgaaaggacccgaatcagaacacgggcatttcgatccacaattgtaggatcatggccacgccggatcttgaagcatccaagggtagctaccccacttatctgggacgtccttggaaactttacgctagaaccgtcttcatgctgtcctacataggggaccacgtgcatccacgtggctggctcgagtggaacacttcctcctttgctttagacacgtgttattatggtgaatacatgaattatgggccgggttcagctctgggccaacgggttaattgggccggctatcgggccatcaattcgacggtggaagcgtctagattcacggtgggccagtttatatcgggctcgtcctggttgccctctaccggagtggcgttcattgctgggttatcaacgtaagttgatccactgccactgtagacccttttcaaaatcttggttcatagtttaaaccaaatcaatttgccaaatgtactaaactacaatatagttttttttttaacccaatgatgatggtgataataaggaatgtatgtaaacaatgttcagtgtcatatatagttctttatttttggcttgcctcactccacgttagagttgttgtagttgtctagctagttagtagcattttcatttcaccgacagaaaataatgctagtatcataatgtatgcatattgactttgggtggccacttgttcaggtgcatcttggttatgtgacttgttagaagttaacactagtctctatcatcgctaatgttcatcaccaccacttttataatactatgtaaattatagaatttttatataataaattatattaatt

SEQ ID NO: 79651 - DNA, 239 bp, Glycine max
  unsure (1)..(239): unsure at all n locations
  Clone ID: PAT_MRT3847_42940C.1
acaagattagtggtcttgtttcatggtattattcgatatgactgtgtattaacgatnaaaaaaaaaaaaaaggggaaaaaaagggggaaaaaagggggcccaccaccaactaaaaaaactaaaacaacccaaaaataaattggccggcccccccctgcatacctaccaaaccctcaaataaataccccacctacagctcagcctaaccacttatatatatggtgactgaaataaaaagt

SEQ ID NO: 79652 - DNA, 2497 bp, Glycine max
  Clone ID: PAT_MRT3847_42941C.1
tcttctttccacgcgttcgcccacgcgtggggccaggcgtttctccacgcgttcgggcacgcgtccgattaatacaatgatagaagataacgatgcacgagctttgatggctgcaacagctttaaattcttgcaaagagacccttgctaagttgcaagagacacaggcacaatcatctgaagaggctaaagaatcctaccaaagggttaaggaagctcgtgacatgtttgaaaccattagaggccaattcatttctaaacttaatagtcaagaagaccaaggaactgaaccaaaaagcatagaggaagaagacatgtctagcttggaagaagaaaggcatgagcctgatgtggagttgttgagagacacgattaaggaaaagcttgagaaagattcaggtagctccctctctatgacagaaatgacagagaagattgatgagcttgtaaataaggtgattaccctggaaatcgcggtctcttctcagactggcttggtaaaaagactaagatcagaagcagataaacttcaaaaaaacatactgagcttggaagaggacaaggaagtgctgacagaagattcagaaggaaccaaaaagaagttggaagaagtggaggaggagttgaggagagttaaaattctctatcaaagtgccaataggcaagacaacagtctccaaacacattttgctgaagctagttgtgatcttgaacatctttcaggaaaattgaacgatgtgaagctagatgaggagggggagaacttgcaacttcacaaaaacaaaagtgcacatgatggagaaataaaagtggagtttgaaaaatcaggtgataacacagaacacatgaaagatgttgagacagcaaaggaagattgcagtgtaaattttggtgatgttgaaaatgaagataacaagtccaattcgaaagaaaatattgattttaggactgaagagattccagagcaaatgctgcagaataaggatgatttgtctgaggcaaggagtaatcttgacactgaatcacttgatcaggggactggtgaggaagaaaatcaatccaacaggagtcagatgatggcaagtggactagatgacggagaaaagattctgacggaattcacatcagttttaaagaactacgaggatgtaaaggacgagctcaatgatgtggtgaagaaaaaccaggacagcattttccagttggcacttcaggtgagggaattgagggatactgtagaaactaaagatcaagagataaacattttgcaacagatgctgacctgctcaaaaacaaatccagatgaaagtccttccacgcctctcacagattataaacatacaccacaagaagcacttcttggaactgcagctcaaggaacagaccctcaggaccctgaaaatccatcttcaaacacaaatgcaagtgcagttactacttcttatgcagggcaacaccaaaaatatgttgaaaacaaagcaaggattggcatattgatgaaggtgagatcaaaccagcttgataggacccactcactttcaaccttggaaaagaaatttcgttccaacatggatgacttgctagaggagaacttggagttctggttgaggtttagcacctcagtgcaccaggttcaaaagttccaaagttccatacaggacttaaaatttgagcttaaaacaataagggacaacatgtcccaagagaactcaagttctatacaatctgagataaaaccaatatttagacacctgagagagataagaaccgagttatcgctatggctggaacacagtgaagagttgcatgaagagttgcaatgtaggcatccatcattgtgcaccttacaagatgaaatagcaagagcagccaatccaaactctgcatcatcaaataacatggcaaaactaagtggatatcaggctgcaaagtttcaaggtgagattctcaacatgaaacaggagagtataaaggtttctagtgaactgcaagcatgtgtgagttttgtgaaggaactaaaaggtgaagttgagaagatggtagaagaactgagtcaggaagttggagttaacaatcatgaccatatgaaacactccacaagtcgtcctagaatacccttgaagtcttttctgtttggaatcaagttaaggaagcaaaagcaaacggtcctctcatgtgtaactccaacaaagaaacaacacagggatctagcattggctgaagaagatgcccctatatagacacactttcatcttctgtttgagtatatgatgggtaaactctacattctgtttagtgtttttcgaaggtttgttagtctgattatgattttgaagttttctcgtacaaactattttgagatatttaccattatggtatgtgatcagcatttgcgtatgtgtatatatacttacacggaaatttaaagattctctctagattttaacctatccatccaatacgcataatattataaaaaaaattataatcacttcatt

SEQ ID NO: 79653 - DNA, 385 bp, Glycine max
  Clone ID: PAT_MRT3847_42942C.1
ggtgggtgtggatggaggtgatggttggggtataagatctgcgactgaaagtagagaatagaatctggatgtgaataggtacagttgcacaggacaacgtactagggaggtaccattactcagactaagcgctgtcagactatcacctgcttggggatgagctcaatcatgtgtacatgggcattctacacagtgctgcatgatgggtcagatgcattgagcatgactcatccttggaaaggtgaccatcttgactattgctgggctcattatcattgctcatgcatgagcttgaagaacatgaagtacagaatttgaaatatctgacgttgatgaagaccatttcaaatgcttactatgagcaatgtactaaatttgtctgcta

SEQ ID NO: 79654 - DNA, 360 bp, Glycine max
  unsure (1)..(360): unsure at all n locations
  Clone ID: PAT_MRT3847_42943C.1
gaattcggcacgagcaactttccaagatattcgtctctcttcctcaatgtctcttacatggtccgaatctgtagttgagggtaggtgaacttgtgtcatgaatgacaacatagaatttggattcattttctggcagcaggagttggatttggtgctagcggagactgtgaggccaaagcgcatgcatcatttagcaaattcatttatcatcttatcggattggtttggaagaagaaatatatttttcttttttacaattcaacttatacacagtccaattttatagttttgaattttttgttgtacagaatgtaccattatagattttgatcntgatatattatgcttgattagctcaaa

SEQ ID NO: 79655 - DNA, 422 bp, Glycine max
  Clone ID: PAT_MRT3847_42944C.1
tacggctgcgagaagacgacagaaggggtccttcaaaaattcacctcaccttttcttttccctattagctccgaacccgaacctgtaaaatggatctactcgacccgaaccgtttccgcaaccgcaagcaacccaccctctcctcgcgggaacgcttcctcggcgtcccatcccacgcgccgcgactcgaaaacccttcctccgacgacgtcgttttctccaacaacgacgacctaatcgaagacgacgtcgttttctccaacaacgttgactccaccgaaccctcttcttcctcttctccaatccctaatcaccacaaccacaaccacaatagccaccacaaaggctttgcatacggtccctccgacgcgtcgttcggcatcctcgccgcgctgccggagaacgaccacgcttcttcgaac

SEQ ID NO: 79656 - DNA, 416 bp, Glycine max
  Clone ID: PAT_MRT3847_42945C.1
ggaaaaaacgggggcttttcttaccttaaaccttttacattacaaaaaacactttctaaaaaaaaaaaaagattttttgtccccaaagtgcctccccttaaaaaaaaacccagacaggggggcccgaaaccaattggcgacggaaggacccaaattcccattttaactgggaaaaaaaccttccaaaagccccctcttaatgaataataaacctttgaaatccccggtttttaggccccctcaaccccaaaaattttggggaagtgccccctttgggttcccgaacattttttttttccaaaaaccccatttggggattgggttctagggaaaaccccccacaaacctgccttggggggggggaaatataataaaaaacgagcttgaaggggaaacttgggaggcccgggcccccc

SEQ ID NO: 79657 - DNA, 117 bp, Glycine max
  Clone ID: PAT_MRT3847_42946C.1
acggcagagggattttctacattttttagaacggaaagaacgaatgtacgggggctttttcgaattggctagatgagcactgcaacgaggtcggacaaaactgctaaggcggaggcc

SEQ ID NO: 79658 - DNA, 499 bp, Glycine max
  Clone ID: PAT_MRT3847_42947C.1
ttagaacatgaaataatcctgatgaaatatccaggaaacttcaatactcaccttttagaaccattcccttctataatcacatggcttcatgtaaaaataccttattttaatctcaacaagtcaagtgatcatgctcatattaagcacttgaaattggaatttacttcaagtttctttctgcaatttgcttctcattggttcaattcccattgatcataaaaataggtatatatacatatgttgaaagacccctatgacgtaaacagagatgcatcctaatgatcactcatcagctattgatttatacacaagactattgaccaaatttgtttgaacgaattaccagaactatgatctaatttatgcggaaactttgttatttccttagaaatgccaattaattttgtaatttggaatgacaaaataaagattgaaaaagtctgcatgaatagtaccaattcataaatgattaagctatttttctcatgctacagggatt

SEQ ID NO: 79659 - DNA, 149 bp, Glycine max
  Clone ID: PAT_MRT3847_42948C.1
cacgcttccgtgtacgcgtaattctatgacctgaaggtcttggtagctatgagaatcctccagcgtgcgcgccttccactgagataccacctggtcatgtgccgctacttgcgtagcctgctgtttgcaaacccccacctgatccccgg

SEQ ID NO: 79660 - DNA, 309 bp, Glycine max
  Clone ID: PAT_MRT3847_42949C.1
aataagaaatgcacaattatactttctgccctttttttacaatatcctttatacaatttttaccccctctaaattttaaggtccaaaatacatcaaaaaacttcttcaacaacctacctattttcaaaccttaatcttaatactcctccttaccaaacaaactatttacactccccaccatttaaaaaaaaactccttatatttttaacccaatcttaaaccccaaacctacaatttaaaactactttgacaccaaaaatttccctgatttaataccatcacaaataattttcaaatacttttacttaa

SEQ ID NO: 79661 - DNA, 356 bp, Glycine max
  Clone ID: PAT_MRT3847_4294C.1
cccacgcgtccgtgtctctctgaatcttatgtccacactttgcgaggctctgcacagtcctcacaccatcctgtgtctgtgagtttgtgcctttcttcatgtgcattcacactttgtaggaccaaacacgtgtttctcatgaatctcaaatatgccgagtaaaggccagacaccaacattggcctctgcaccagaagcagattgtttcctcgacgatggggaagaaaggagggagctggctctcgtcggcgaacaaagtgctcaagtgctattctaaggactcgcacgcgcctgagaagacgaacgagatcatgggcgagcagtggcagcagcatgtggcgccagaggaggattct

SEQ ID NO: 79662 - DNA, 534 bp, Glycine max
  Clone ID: PAT_MRT3847_42950C.1
aaaagaaaaagacccttacaagaaaaacagggtggtccaaaaaaccaaattggggggaatatttttttctcattaaaaaccccccccctagagaggggggggaaaaggaaaacccctcgggataaaccaggaaaaacagccttttagaaattcaccggcttaacattggcctcgggggggggggggaccccccccccggggcaaaaaaaagggggggtaattataaaaaaaccaccccccttgcgttaccaccgggccaatgagcaaaggggtaaatttctttaaaaagcccacctttttgcggccggcccggccgctgggaaggaaggccaccgggcccaagaaacccaatttaaagggcccccccccttggccctttggcgccagggcggcgatttttggggccgaggcccctggaagcttggttctttcccacaagccccgagccccccctaaccaaaggggcttctttctccgggggataatctgccccaaccgggtttttccggggggggggcccggagagaacccccc

SEQ ID NO: 79663 - DNA, 1435 bp, Glycine max
  Clone ID: PAT_MRT3847_42951C.1
ggcggtgtcggttattggctaccagttatattgtccacttcacacatctattgtcagaatcaaccactaaaaattatttcaccctaaaattgacgtttttattatttttcagccttttgtcaaataacttttatataaagaaagagcttttcattaactataattattttgacaccatagcaacttttttaatgttaaagaagggagttaagttagatatttatgatagtaattttgattaatttagattatcatctggtcacatcatactttagcacattatccgaagagtttgacttctcaggtttagtttagataacgcaacagccacttaattagatgatagtgaaaggctgaaaggaatccaaatttaactcaatcttcataacttcatttgatatcaaaattgcatctttaaatcatttttttcttctttttactttaagcagattagtacaattgttttgatgtttgtacgtttcaaaatttagaacatgtgttctatgctaggatgcacttgatacatgatttggttggttaagtctaatgtctgttctgacatttgaaggattttgaatttgaagagctggaagaagtgttgcagcattaccctcaagggtatcatggagttgacaaggaaggtaggccagtttacattgaaaggcttgggaaagctcatccaagccgcttgatgcgtataaccacaatagataggtatttgaaataccatgtccaagagttcgagagggctctgcaggagaagtttccagcatgtaccattgcagccaagagacgaatttcttcaaccacaacagtattggatgtacagggcttgggaatgaaaaatttctctcctactgctgcaagtctattggctgccatctcaaaaatagataacagttactatcctgagactttacatcgaatgtatatcatcaatgctggtcctggatttaagaggatgctttggcctgcagcacagaagtttcttgatgccaaaactattgcaaagatacaggttcttgaacctaaatctttatgtaaattactggatatcattgactctagtcagttgccagactttttgggtggaacatgtacatgtcctggagaaggtggatgtctaaggtctagcaaaggtccatggaatgatcctgatatcatgaaaatggttcatagtgtggaggcaacgtttgagagacaaatcgcccgaatgtccaatgaacaacagaatttagactctttttggatatgcccacagaaggggcaatgcagtgatacgtcaacagccgaatctgggtcagatcttgatgattctttttcgtccatcggacaaagtagattcacttttcctcgtttagctgcagttcatgaagaagtcagagtatcagacaactactatagttgtgatgatagtgctcctgcagccgagaaa

SEQ ID NO: 79664 - DNA, 220 bp, Glycine max
  Clone ID: PAT_MRT3847_42952C.1
tttgtctgagtttctacctgaagctctgtcctgtctgccatgtgttccttgggaggttccactgaaagaaattcaaagtagaatagatcttagaaatttgtgcatatttactattgatccttcaactgccactgatctggatgatgcactgtcaattgaaggagtgcctaatgggaattatagagtaggtggccacattgctgatgtggctaatttggtc

SEQ ID NO: 79665 - DNA, 715 bp, Glycine max
  unsure (1)..(715): unsure at all n locations
  Clone ID: PAT_MRT3847_42953C.1
tacggctgcgagaagacgacagaaggggcgcgtccgtggaagtgtaacccaaaaccctagcggcgcctgctttcttcgttcgtcttttgcatcagccaggtgcgaactcaccctatggatttctatccaccgctggctgatccttcttctctaactctaatttattattttcatgtattgttctcgcttcactgcttcatatttggctgtcatttgaaatttctttaataattcttttcttttaattctagtttggctatctgttactgtgtttatgatttcaatttcatggcggaattattattgctttcttagtgacgttgggtgtttagtgtatgcgttgatcttttgttcttgatttgggtcgcatagctttagcggaatttataatttgaggcttgcttggtgaagtaacgtagacccgagtgttctaacaaatgatacgtggattcgttcattagaatactttttgtcatttataataatgttccttaatcttcatttggaatttttacctttggaagtcatatactgtaaaacgtcataaactatattgtggatcttgttttgaatttaacattcatttagtccttccacaacaaaagaatctggtgtaggttgtatcctatgaaatgaaacaaagtttatgcccgaagtacatataagaagactgatctgntattgatattattgctggactaggntttcttttctc

SEQ ID NO: 79666 - DNA, 179 bp, Glycine max
  Clone ID: PAT_MRT3847_42954C.1
ggggggttttttttttacttttttacatttttctccaatatttatgggattaaaaagtacctttgcggtttgcctataggattggggggccgttcaaacttcacctagtatgaatctaaaacacaatgggtgaccagcttattccagaatcgcgttttttaggagaggggcatacaaaa

SEQ ID NO: 79667 - DNA, 419 bp, Glycine max
  Clone ID: PAT_MRT3847_42955C.1
gtatttaaatgtttacccatgtttgtctaatatttcatgtgctgcggtattacgctcgcttagctattgctcattacttctgtatttttggggtcattctatggtagtaatgtttggccataacccctaaatcctaccatattttctacagtgcaatggggtcattctgatgatttttataattgatttttcatcctggaaggctggaacaaagaatatgtacttagttagataagcaaatgatttagtatggatgatcattattatgcaccaactttatagtttgggtagaagttctgatgagactgactatctgcattcctattctttaatgatcgctattattaatattgggactgtcctcagtttgaatatagctatgctatgagttcttgctttattgaaaaactaatttctga

SEQ ID NO: 79668 - DNA, 114 bp, Glycine max
  unsure (1)..(114): unsure at all n locations
  Clone ID: PAT_MRT3847_42956C.1
tcgctaaataatatttntatcctttgaatcacgccgcgaattttcctattgaaaggcatccccaactatgtaagaattggaaccgaattgtcacatgtttgtccatcaaacaat

SEQ ID NO: 79669 - DNA, 407 bp, Glycine max
  Clone ID: PAT_MRT3847_42957C.1
gatagttctagcgcacagagagagcacgaggatgataagagaggcatctattaccacagggcacgccagaataagcggaggtcgatttgtctcaccaagaccgccgccaggtcgatgtcacaagactccggaccagggaccgattcagaccactccactgacttgtcgagtagtggtgctgctttgtccaccgatgagttgagtgggagcacatctggccgcgcgacgaccagattgaagctgtcatcggcctatcgacaggatacgactgacgacaacgttccgatatcgtcggcaggcagacctgccaccaagcgtgctggaccattgcgaatgacagctcgggacaagaaagagctcaagaaacaagcgcagaaagcggccagaaagcagcggcaacaggagtc

SEQ ID NO: 79670 - DNA, 139 bp, Glycine max
  Clone ID: PAT_MRT3847_42958C.1
tcggctcgagtctctctcgctctttctcactctcctctgatatttctatatttcggtgctctgtgtctctatgatctggatccaacggtccaacatgatcggggcttgtgctgcatgtgttcccatgttcgagagctcc

SEQ ID NO: 79671 - DNA, 646 bp, Glycine max
  Clone ID: PAT_MRT3847_42959C.1
ggccgctcgaggggccggccgggcccggggtttcatccatccatctctcgtgttctaagaaatacatatccgattgaaagaataagtagcaactctgtagcctcttttcccatcatctccttacctcctcttttttcaaattagtcctgcagaagaagatcatcatgaggcgcttaaagtcaagaacaacaccacttttgtccaagtttgcgccgttgttggagccatggccaaatgatgctataagaaaggaactataaacctgatcaggacatttgacctgaggaaacatgccctctaggcaagtctgatgcttggcttttcatctctgctgttgagaatcaaataaggcatggctcacgtcatgaaattatttagcatatcatatctgtttgatattagtataagtttttctgtttactacctctcctccttcctttcccagttgggacaatgatatgttatgtatatccttctctgctctacaacagctgcttttgtaatactacttgtatgaaagctttattatacctcagtttttttctcctttctttttgttcaattggattcttagtttattgtattgattatgtgcaactggcatggccaggtaagaaaaagaacaaaaaaagcttactggtttctc

SEQ ID NO: 79672 - DNA, 199 bp, Glycine max
  Clone ID: PAT_MRT3847_4295C.1
aaacaggaggttgcagaatgaagtgcttgagcttagagctctgaaactttccccgcagttctacatgcacatgaccccacccatcaccctcaccatgtgcccctcgagtgagcgtgtcgcggtttccccctcctctgctcgagatcttgacacgcatgactattacgtgccttcatcttacccctgggcctttcccatt

SEQ ID NO: 79673 - DNA, 715 bp, Glycine max
  Clone ID: PAT_MRT3847_42960C.1
ggcccggatttcccggtcggacccacccgtccgaggtttaaaagtcacaccatgaccactagagatgcctatcaatattttgtactgaaggcccaagagatggctgtttcgaaaaattggagtccagtgaactggtatgatctgtatatatgtggtattataactagaaaaccttatttgtacccttaatttgtccttagtgtctgcttcacccgagtatctttccatcctaatccctcatgttgaaaacatcaatatttcaacattcaaatgccactactagtttgcatatgcttggaacagtatgaacagtatagtttatgcgcaaatcaataagtaactgttctgtttagtgcatgttctttaaatgaagatacattttttagatgtgacttttctttaaaaaaaaaatctcagggaggaaaccttcaatacgtttccatcaaagctccatccaaacaccatagtgcacaactggtgagtttccatatctgtaattagttttattgcagggccaaacatgtcatagtttcagaataaagcatttcaagtaaacattgtaggttgggccctggtgtttgtccaaaggttgttgcaaaaggtttcaggtgcatttacagtaatcagggtgtctggtatcttgaccatctggatgtaccttgggatgaggtctacactactgagccactacagggaatacatatagcttctgaac

SEQ ID NO: 79674 - DNA, 456 bp, Glycine max
  Clone ID: PAT_MRT3847_42961C.1
gggtgtggaagcaacatcattaagaagtctttcttatttacccagagatggtgggggatgagaagagatttctcacccctcaacagagagtgttcacattataaaataaactgctctactggggcgcctgaaagatcaccttaccccaagtgggggtggtaacacggggtcaaaccgccatgacacactctgggggggggcattctcgcgcatacatatctgtgcccaaaaacacagggggggggggggggcgattttttctatctatactcacagagacctcggtgtcctctggagaccactaaaagtagaaagcgagaaagatctctttcaacctccccagttgggactatagaagaaacaccacagcgttcctgtgtatcccccagagagggctgaccggggcggcagtttttttgtttttttcacccagcccttgggaaaactgggccctcc

SEQ ID NO: 79675 - DNA, 1980 bp, Glycine max
  Clone ID: PAT_MRT3847_42962C.1
gtataatcataaataaaattaagagattttttttaccgaattgaactcacattagttataatgggactaaaatactaaaagtgcaataagcctaaactaaaatttgacaaaattacaacctatatcaggaagcaaacttcaagaacaatatcccagaggccaatctgacagccataaataaaggacgacattatgcctccttcccacttgggatactattttaaataatacataaatagacaaaattctgatagtaaatctcaatagtttaaaaacgggaacattatgaaagctatctggtaactggtggatgtaactgcattccggcaaggatcaacagaagcaacggatgtcaaaataaccttcacttgaaacatttgcacattccgtccatcaaaatatatgaacaatgtcataggcaaatgtccagaacagcacgaacgacattaggccggatgtacggctgcgagaaaccgacagaaggggaacaacgacgagcacaagatccagccggttgatccaagaagatagaagggggacttcaccttacactctcgatgtatttgcaagttttgaagatcttttaaaattgacgcgaccacgaaaacattagaaaaaagggttaagaagtaaaagtttggtgtgaggtgtgagtgttctgcacgcaccgaatcaacaataatttctcaaacagcgttgtaaaagaaacacattagactaggcagataactatggctgtacattctgattcggcttcatccgagaagaaatcaagcaatggagtgaatgagttgctgacttttaatgctgagaacatgcaaagcaacatgaaaattatctattacagccgaacatttttatctataattggtggagttgttgctggtattttgggatttacaggcttgaaaggatttgtgttttacttacttctcatggcatttacttcacttgggctcgtggccaaagcaaagttttccacccacacatactttgactcctggaatcgagtgctacttgatggctttctgggtggcctaatgtcgttcgtgctgttctggacatttgcctatgacattgttcatatattttgatggacggaatgtgcaaatgtttcaagtgaaggttattttgacatccgttgcttctgttgatccttgccagaatgcagttacatccaccagttaccagatagctttcataatgttcccgtttttaaactattgagatttactatcagaattttgtctatttatgtattatttaaaatagtatcccaagtgggaaggaggcataatgtcgtcctttatttatggctgtcagattggcctctgggatattgttcttgaagtttgcttcctgatataggttgtaattttgtcaaattttagtttaggcttattgcacttttagtattttagtcccattataactaatgtgagttcaattcggtaaatttaatctcttaaaaataaaaaaaaaaaaatctggcagccacaaataaaggataacattatgcctccttcccacttgagatacttttttaaatgatacacaaacagacaaaattctgacactaaatctcagtttaaaaacatcatgaaagctatcttggaggatgtaacggcattccggcaaggatcaataacagcaacgaatgtcaaaatagccttcccttgaaacatttgcacattccgtccatcaaaatatatgaacaatgtcataggcaaatctttatttttgtcaaggaagtgtacaacagaatggcaagaatttcagcacaagagatatatccaggaagttaaattgttaggttgggttttaattggaagccataatctggggaaaccagtgtcgagataaccatagcacaatttgaattagcatggcaattgctactcaagaaaatctgaaaatttccaatagtttacactttactcatttggaagttattcctgttactaaaacatgtaattagga

SEQ ID NO: 79676 - DNA, 1534 bp, Glycine max
  Clone ID: PAT_MRT3847_42963C.1
ccttttcctcccttcaacaaaacacaggggaagggaaagtagtagtagtagtagtagtagtaaggaacgaaacaccaaacatgagtttcttgttaccattaccaaccctcttgttgtgtctctttgttgtgttaatttattccctccaatcaaaggccgatgaatttgatttcgatgagtccttgttcaatgcaaaaaacgcttccagtggcagaaaacttgcaggaagatgcaacttgttccgtgggaaatgggtttatgacccttcataccctctctatgacccttctacatgtcccttcatagatccacaattcaactgccaaaagtacggtagaccagacaaacagtatcagaaatatagatggcaacccttctcttgtcctttacctaggttcaacgcatttgatttcctggctaagtataggggcaagaagattatgtttgttggtgactccttgagtttgaaccagttcaactctctggcttgtatgattcactcttgggtgcctaacactagaaccagtttcataaagcaagatgctctctccaaaatcacatttgaggactatggccttcagttatttctataccgcacagcatacttggtagatcttgaccgtgagaacgtcggaaccgttctgaagattgactctataaagagtggtgacgcttggagaggcatggacgtgctagttttcaacacgtggcactggtggacccacaccgggagttcacagccgtgggactatattcaagagggtaacaagttgtacaaagacatgaaccgtttgattttattctacaaaggtttgacaacttgggctagatgggttaacatcaacgtgaatccagctcaaagcaaagtcttctttttaggaatttcccctgtgcattatgaggggaaagattggaatcaaccagcaaaatcctgtatgagtgagacaaaaccattctttggattgaagtaccctgcagggacaccaatggcattggtgatagtgaacaaggttttgagtaggataaagaagccagtgcatttcctagatgtgactacactctcacagtacaggaaagatgcacatccagaaggctacagtggggttatgccaactgattgcagccattggtgtcttccaggactgccagatacatggaatgtgcttctgcatgcggctctatttgactgaaggaaaggaagcagctagctagtgacttgcaaactttgtttattagaggaaaaccaattgttttctaatgtaggaaatatttaatttggcatttggtttcttggaattggacaataaaagggtttgattctacaaattgtaaattttcatattattttggcatagacatgccttgattgtaccaaatagctcccctttggaatattgaaaagcatttgcactgatgtttcctttggaataacgtgctgctggatcgttgtgaatcaggtgcttgatgaaattccttttttctcaagcttaagaatgaaaaagcgatcagagaatctgttcccactttgccaact

SEQ ID NO: 79677 - DNA, 601 bp, Glycine max
  unsure (1)..(601): unsure at all n locations
  Clone ID: PAT_MRT3847_42964C.1
agcctttagtagtctggagtgtggtctggtactctggtttgactgtgaatctggttgaagcaaattgaaagggtgactctattgattttgtcctgtcaagtctgattctactcacattgtgttggatagttgaagtgaggtttaacatatatgaatttggctattcaattcaggagcttatttgtctgtactctcatagatttagttgaattatattaagttgctattctttgtctgcctttaattgtaaacattagttgtatatcacttgcattttgttagattatacctttgctaattgtcaagctatgactgtgtgtttagattagcttgttttaggaaaatttatctctattttttggttttttatgcaatttctcaagaggttttcttttttatttaagaagagcaattatttctcttatcttatgcttcccaaacactcatctcttgcatcattttgactagttctggatctaactaatatntggttttaggaattggttgtgatgcacacgttgctctggacattcataatctgcgttaagagaatccagattaagtttataaccaggttattaataaagtgtatattcaagaa

SEQ ID NO: 79678 - DNA, 275 bp, Glycine max
  Clone ID: PAT_MRT3847_42965C.1
tcggaatcggctcgactcgagcgaatcggctcgaggacatagtagcacaaaactcacgcctaagttacgagattgatggaaactcaaaggcaccgcttggttctaataccaccaccatttcaaggacacttaactccaatgcttcaactagccaccatccttcatttaaaagggttctccataaccatatcacatgctcatttcacctcccccgatccttctaattaccctaactttagttttctacccttgttctatgatttatccgataccaa

SEQ ID NO: 79679 - DNA, 1444 bp, Glycine max
  Clone ID: PAT_MRT3847_42966C.1
gtccttttcttcccttcaacaaaacacaggggaagggaaagtattactagtagtaaggaacgaaaccccaaaacatgggtggtggtttcttgttaccattgccaaccctcttgttgtgtctctttgttgtgttaatttattattccctccaaacaaaagctgaggaatttgatgagtccttgttgttcaatggaaaaaacgtttccagtttcagcagtggcagaaagcttggtgcaggaagatgcaacttgttccgtgggaaatgggtttatgacccttcataccctctctatgacccttctacatgtcccttcatagatccacaattcaactgccaaaagtacggtagacctgacaaacagtatcagaaatatagatggcaacccttctcttgtcctttacctaggttcaacgcatttgatttcctggccaagtataggggcaagaagattatgtttgtcggtgactccttgagcttgaaccagttcaactctctggcttgtatgattcactcttgggtgcccaacactagaaccagtttcataaagcaagatgctctctccaaaatcacatttgaggactatggccttcagttatttctataccgcacagcatacttggtagaccttgaccgtgagaacgttggaagggttctgaagattgattcaataaagagtggtgatgcttggagaggcatggacgtcctagtttttaacacgtggcactggtggacccacaccgggagttcacagccgtgggactacattcaagagcgtaacaagttgtacaaagacatgaaccgtttcattttattctacaaaggtttgacaacttgggctagatgggttaacatcaacgtgaatccagcccagaccaaagtcttctttctaggaatttcccctgtgcattatgaggggaaagattggaatcaaccagcaaaatcttgcatgagtgagacagaaccattctttggattgaagtaccctgcagggacaccaatggcatgggtgatagtgaacaaggttttgagtaggataaagaagccagtgcaattcctagatgtgactacactctcacagtacagaaaagatgcacatcctgaaggctacagtggggttatgccaactgattgcagccattggtgtcttccaggactgcctgatacatggaatgtgcttctccatgctgctttatttgactgaaggagaggaaccagctagctagtgacttgccaactttgtttctttagaggaaaaccaattgttttctaatgtaggaaatatttaatttggcatttggcttcttgggattggacaataaaagggtttgattctccaaattgtaaattttcatattattttggcataatcatatgccttgattgtaccaaatacccccccttcggaatattgaaaagcatttgcactgaagtttccttcggaat

SEQ ID NO: 79680 - DNA, 812 bp, Glycine max
  Clone ID: PAT_MRT3847_42967C.1
ccacgcgtccggttgtcgattgtggtctgagttcgcggtttcagtgaaagatccccgctctgttggacctctgattctgattcctgttagggtttccggggatccaattccagcttcctctttcccatggaattgaaaaagggcaagcttgccaggttctacacggatggtaaaaagcataagcaatcgttttggggagcaagagcaactgagcctccagcacttaaacctagcaatttgctaccactagggaaaaatagaattgctgaaacatttagaattggaggatcgaaggtgttcccggaggaccatgagccgtggcgtaaaagaatacttgacccgggtagcgatattgtgttgaaatggaaccgggtcttcatagtttcatgcctggtggctctttttgttgatccattgtacttttatttgcctagtgtgatagaaaatacagggtctacatgtgtaaggacagacctaacactgcgcattgtcgtgacctttcttcgcactattgctgaccttttttatctgttgcacctgataattaagtttaggacagcatatgtggcaccaagctcacgggtgtttggcaggggtgaacttgtgatggacccaaagaagattgcaaggagatatataagatctgatttcttcattgattttattgctacactccctctacctcagatggtcatttggtttattataccagcaacaagaagccctcaaactgatcacaaaaataacgcacttgcattgattggtttgcttcaatatgttccaagattatatttgatttttccattaagctc

SEQ ID NO: 79681 - DNA, 397 bp, Glycine max
  Clone ID: PAT_MRT3847_42968C.1
agatagctaggtaaattaagaaagataaatgaataagtagatcttgaatctgatcttaaatcaggggcgggcataaaagatggatgggatatttgaggtaaagaacaaaaactccactcaaaagaattgatgaaatcatatggaagatgtcataaatttagaaaaacacccttagaaattcttaagaaattttttttatacgtgatatcaaaatttatgatacgtatatattatatttaattaattaaattaaacttcattaatatataaaatttgtttaaggttttaaatttgtcagtgtaaaatttattatcaaatttatgacatatataaactctgaagtgatgagttattttttttatagagaaagtaataacttagttgaataagaacttat

SEQ ID NO: 79682 - DNA, 320 bp, Glycine max
  Clone ID: PAT_MRT3847_42969C.1
acacctgacggaatctcagaattcgtcttctatacttattgccttcgattcacacactctcttcaatttctatgttaaggctatttctttgcctccgttccccctttctcacaaaaacaactccttttctcttctccttcttatctattctttgcatattattttttgttgattgaatgcattcacatcctaattcattactacattttaatccatttatctaaccattactgaattacctaatctaatctaaacgtttaaaaaataaatctattattattattattaaatcaaatttttactaaacttacctcccatac

SEQ ID NO: 79683 - DNA, 372 bp, Glycine max
  Clone ID: PAT_MRT3847_4296C.1
tctagctatctcgatcgaactgtccaaggtcctgtcactataacgcgcttcttcgtattcacgtcgcgttggctactagctgataacctgggcaagcagtattagcgttggtggcacccgatttgaggcaacttaaatagccgtattttgccagtttaagtgctgaaccgggttttgtacgccggcttcactatatgcgtacagtttggtacacaattcgcttgctgctacggttgctgcgtcggggtggcgtccgccattcacgcaccgacacctagttcgtaattgtaatgttaggaattaccgtaagcccaacaacttagccgtatgtgtgggtgttgggccaaccatatggtaatacagtatttggaa

SEQ ID NO: 79684 - DNA, 503 bp, Glycine max
  Clone ID: PAT_MRT3847_42970C.1
ccaaaacaacctaaacaaacccaaccttggaaaaccccaaaaaaggggccccaaaaaattaaccggggagggagaaccccctttttttggaaaccccccttggccaaaaaaaaaaataggactggccttcccccggcttggcctaaaaatttaaaaaaaggggggggggggggccccccttcccaaggggccggttttaattggcttttcccccccccgggcgagggcctaaaaaccaaaaaaacccccccccccctcacaaaagtccagccggggccaagggacaacccaaaaacctgggtggcctttcccgggggttctttttggaaacccccccccccccccgggagattcgggggccaaagtaaaaaccccccccccaccccaagggaatgggggggcgggaaatcccggggggctgggggggggttaaattaaacccccgggccccaacggagcctctttttcaagaagttttggccaccttttttaaaaaggaaaaa

SEQ ID NO: 79685 - DNA, 574 bp, Glycine max
  Clone ID: PAT_MRT3847_42971C.1
ggctcgaggtccaactattcaaatttatcttgggtttattttcttcaaatcttccagtttctcacttcatctcccagtggtgattctttctaaaccagattaataccagcgactcaaagacgtctaaatgctttatctcctaattattgtgtaatgcgctgactgattctgaaaatacttttcaattgttaattttagaggacgtggaaccaatagagattctcaaaggctttagtgctgttctcaatttgcagttatttggtgtatctagttggaaagaaatgctacaatttttactggttgattgttgcctcttgagttaatttgggatcaatttgtggtgtcctgctaatggtcctttttgggagtgtctttggtagatatacagagagattgacatgttgtattacatatttcatgttcatagtttttttttgtttcctttcgttcttggtgtattttttgaggattgcttgtcctcttgcatttgcatctctccttttctttgtaaattctttgtatattaaaaaaacattaataaaaaagaacgtagaaggtagaaagtaccagtccc

SEQ ID NO: 79686 - DNA, 895 bp, Glycine max
  Clone ID: PAT_MRT3847_42972C.1
acgaggagaaggcgagtccgcggcacgagggaaggttctaggtgcagtcgtgtgaatgggagaggatggaggtgctgcaattcaactcgagggcaaagatgaagacgaagatgaacaagaaatgttcgacgcgcaacaaggaggatagcatgggagaggaattagacgaggaagatgaagaagagaagaaggtagaagaaacaaaagcggaagtgaatattgtgagtaaaaagagagcaaggggtagtgcactcatggaaggttctaggtgcagtcgtgtgaatgggagagggtggaggtgctgccaacaaacgctggttggttactcgctgtgtgagcatcacttggggaagggaaggctcagaagcatgacaagtgttagaagccgttccattgcttcaactgcaccaaaggaggtgcacgtgcaccacttgcctgacccatcttcttcttcttcttctcctcctccttctttttgttctcttgatcatgagaagcaaattgagtgtgttgataatgctgagccctttggggatgaggagaagaagccagagataataatgacgaagaagaggatgaagcttggcatggtgaaagcccgttccataagcagcttgctggggcaaacaaacacccagattgctgctgtagctcatgagaatagcaagtaaggccataataagtacaagtgcagaaaacggttattatttcatgtactagagggttgaaacttgaaagatatttttaatactatagtttaattgtcttaatacttggtgccactgcatcttgttcaacttggtggtgctttatcttatatcgtaattgtgtttatatattttgctacgtattaactttgcaatgctttcgttatggtttgtgggattatttttga

SEQ ID NO: 79687 - DNA, 250 bp, Glycine max
  Clone ID: PAT_MRT3847_42973C.1
acgaggttttgaagatatatgcatcaacaaagatgcgtttgagggagatgagaagttctgtgctatattcttgggaacagtaattggttttgtcattttaaagctgggaaagaacattcaagtgcttttaagttcctttgtcgataagcaagagctatactctgtggatggagtgcggattcttgcagacaaaacaatgatgtgtcatgggctaaatttcagaactgcattattttactgccataaagtc

SEQ ID NO: 79688 - DNA, 539 bp, Glycine max
  Clone ID: PAT_MRT3847_42974C.1
cccccccccaaaaaaaaatttaaaaaaaaaaaaaacccaaaaacacaaaaaaaaaagaaagggcaaaaaaaaacaaaaaccttgcaacaatccaaaagagggggaaccccaaaaaaaagcccccccctcaccggaaaaaaaaccccccgggccccccccccaacccaaaaaccccaacaacaacaccggaaaaaaacaaaaccaaaaaaaagcccctccacggtggccccggaacccccctcgaaacccctggggaggaaaacaaatttattccggccaacaaaatgccctccaactttttgacaaaaggccgcctccccaacagccctggttttggaaggacaaaaaacaaaaccccctagggcccccccaacacccaaggtcatttgggccgcccaaaccccaaaaaccacccccttttgggggttttcggggaaagggaacccaatttcaccaccaaaccccccaagacacaaaaaaacaaggcccaagggggccgcccctgggggcccccttaaaacttcaacacccaccggggg

SEQ ID NO: 79689 - DNA, 2315 bp, Glycine max
  Clone ID: PAT_MRT3847_42975C.1
catgcctgcgcctttgattgttgttcaagacccgttgattcatgtccctcgtaattcttcctcttcaattctcggttcggctcctccacagacacacctcattctctctctccttttaacctaaatcatcttctgctgattccgcccctttttctgttcttaattgctcccaaattgtactctcgtttcgagactcaatggtgctttgaattatttttttttttaattgttattgacgtcagtctaattcgttgattttctggcggtgaattgttgtcgatcaagaggtttcggttaacagtgctcgtgattttggtactattgcaattaggagtgattgcgaaggtgcactgcatgttcgattgttgaggagtgggggtcctctgttccgaggattcccgtcgctggttgttcagattcgaagttggctctaaattttcgttggggaaatgtttgcttcggttgcggatggggcatttgaggtcagtggagtttcatgaccctttttgattccacagcgctttgtttggccttatgggggaacaacggtgttcctaaccggttctttcaccagatggtcgaaccatatagctatgtctccgatggagggatgccctgctgtgtttcaagttgtttgcaacttaatgccggggtttcatcagtacaaatttaatgtagatggtgagtggcggcacgatgagcagcagccatttgtaaatgggagctgtggagtagtgaacactatttatatagtgagagaaccagatatcttaccttccatcttaaatactgaaacacctggtcgatcacacatggaggttgacaacatggaagctaatcccaggatgactgtgtctgatctggaggtttctcgccaccgtatatcggtattcctgtccacgcatacttcatatgatttgcttcccgagtcaggaaaggtcattgccttggatataaatttaccagttaagcaagcattccatgttctttacgaacagggtatatctatggctcctctatgggatttttgcaggagccagttcgttggagttcttagtgcaatggacttcattctaatattgaaagagctggggaaccatagttcaaatttgactcaagaacaactcgagactcatactatagctgcctggaaagaaggaaaatttcaacaattcagaacacttgatagtaatgggggatcatatccttggcgatttgttcatgccggaccccatgaatgtctaaaagatgtggctttgaaggttttgcaaaacaaggtgtcaactgtccctatcatacattcttcttcagaggatggttcatatcctcaactgctacatcttgcttccctatccggaatactaaaaggtatatgcaggcattttaagcactccttgagttctttgcccattcttcaacttccagtggcttcaatacctttgggtacatggatgcctagagttggggaaccaaatggtcggccactagcaatgttgatgccaagtgcttctctcggtgctgctttgtctatgtttgttcaagccgaagttagctcaataccgattgtggatgctaatgattcgttgcttgacatttattcaagaagcgatattactgcattggctaaagataaagcttatgctaggatatctctcgatgaaattagtattcaccaggcattgcttttgggacaagatgcaacttctccttatgggctttacaatggtcacagatgtcacatgtgtttgagatctgattcgctttacaaagtgatggagcggttggctaatcctggggttaggagacttgtggctgtggaggctggcagcaagcgtgtggaagggattatttctttaagcgatgtgttcagattcttgttaggctagttgggatatattggccggcttatatgaaggaaatagctgtggttggcattggaaggaactcgtttgttctatttgcactgcttttctgagctatccccagtcttccttggtgctgttgccctcgtatactgttttaggatagaaactggagagaaaaatctgtaaattgaggatcgtttttctccgttaaacatcttaacgaaattgttttctccttgtgtgccggcacatcagcaatacgtgtgtccagtgctaatagaaatcaaggagaagctgtgggaagaaaaaaaaataaagactataaaaagacgaaatatatagccgtatgcagcgccatgctgttggttgtatcgatgtattttaagggtcttctttttccgaatcattatgacttaatatttcagctaaaaagttcatcagagcgtttcc

SEQ ID NO: 79690 - DNA, 2042 bp, Glycine max
  Clone ID: PAT_MRT3847_42976C.1
cggacgcgtgggcttggtgaaggtaacactgctgttgtaaaatatttggatgaacatctctcactcatcatggaagaatcatatgctcacaacgaatcggctcgagggcgaacaaaaaaaccaacaatatttagagcaacagagcaatggtttgcttctgtggagggatttcgtcacactgctatggatgctattggccatgtaaaatgggttccacctcaggcagcaaacagaatctcatcaatgacttctattcgctccgattggtgcatatcacgacaaaggacatggggtgttcccattccagtattttatcatcttcagtctagagaacctcttatgaatgaagagactattgatcatatcaaatctatcatagcccaaaagggtagtgatgcatggtggtacatgacagtagaggatcttctcccaactaaatatcgtgataaggcagcagaatatgaaaagggaactgacactatggatgtatggtttgattcaggttcctcctgggctgcagtcttgggaaaaagagattcccttagttatcctgcagacttgtatctcgaaggaacagatcaacatcgagggtggtttcagagttcattgttaacaagtgtagctacaaaagggaaggctccatatttgagtgttttaacacatggatttgtattggatgagaaaggcttaaaaatgagcaagtctttgggtaatgttgtggatccacgtttagtgattgaaggaagtaaaaatcaaagggaatcacctgcatatggagctgatgtcctccgactctgggtttctagtgtagattatacaagtgatgtgatgattggcccacagattcttcggcaaatgtctgaggtttacagaaagttgcgaggaactttgagatacctcttggcaaatcttcatgattggaaaacagaatacactgttccataccatgaacttccgaggatcgatcaacatgcactttttcagcttgaaaatgttgtaaaagccattcaaggaaattatgaaaattaccagttttttaaaatatttcagattttgcagaggtttgttattgttgacctgtcaaatttctattttgatgttgccaaggatcgactttatgttggtggatcaacaagttatacgaggaaaagttgccaaacagttcttgcagctcatctcctttccattgtgagaataatagcaccaatattgccccatttagctgaggatgtgtggcagaatcttccttttcagtatataactcaagatggttctattgctgaatatgtatttgaatctagatggcccatctcgaatgaaagaaggcttgccctccctgttgaagaaattaatttctgggagaatattcttgagctgagaacagaagtaaatagagtcttggaagttgctcgaacaggcaaactaattggggccagtttagatgcaagggttcatatctatacatctgatgcccgcctggcatcccaattatgtgaactaagtgcagccaaaaatgatgctgatacattgcggcgtctactcataacatctcaggctgagattcttccctcattggacgacgaacaaattgtaaatataccatatagtggtgaatgcctaattcaagggaagaacaaaatctggattggcatatctcgtgctgtgggttccaagtgtgaaagatgctggaattattcagagcaggttggttcatttttggaccaccctaccctctgcagccgctgccacgatgttgttgctgttcagatgccccctcaagtagcagcagtcagttaaattttagaagcaaagtttgaattccaaaatatcattttttgttcactactgtctggcattatgtattaaaaaataaaaataacttgtatgccactgagttatttattccaaaatgtcattttttgttcaataatcatctggtatgtcattttagaacatttttataggaaaattttagaacaaattgaataaataatattctatggcactgagcaattgattgtacacgtaatttcatttgaaaa

SEQ ID NO: 79691 - DNA, 387 bp, Glycine max
  Clone ID: PAT_MRT3847_42977C.1
gaaatgtggggatgtcaatactgctaggttggtgttcgacaaaatgcctaatagagataggatttcgtggaatgccatgatttctgggtattttgaaaacggggtgtgtttggagggactgagattgtttggcatgatgatcaaatatccggttgatccagatttgatgaccatgaccagtgtgattactgcatgtgaacttctgggtgatgatagattggggaggcagattcatggttatgttctgagaacggagttcgggagagacccttcaattcataattcgttaattccaatgtactcatctgttggacttattgaggaagctgaaacagttttctctcgaacagaatgtagagatgtggtatcgtggactgcgatgatatc

SEQ ID NO: 79692 - DNA, 1202 bp, Glycine max
  Clone ID: PAT_MRT3847_42978C.1
gagagaactagtctcagctttttttataatggttccacatgactatagaactgattcatacttttcattactactagattttaaatcttgcacgcaataaatcagagatagaacgtagagttcattctgtcattgataagtttgcagacaggggcttacggtctcttgcagtagcctaccaggtacatatgcatttatgctctttcttttgcagagttcattctgtcattgataagtttgcagagcgaggattacggtctcttgcagtagcttaccaggaagttcctgatggaaagaaagaaagccaaggtgggccttggcaatttattggactcttgcctctatttgacccacctagacatgatagcgctgagacaatacgaagggcattaaatcttggagtaaatgttaaaatgataacaggtgatcaactagcaataggaaaagaaacaggacgccgtctggggatgggaaccaacatgtacccttcatcggctttattgggccaaaacaaggatgaagcaattgctaccttgccagttgatgagttgattgaaaaagcagatggatttgctggtgtttttcctgaacacaaatatgagatcgtgaaaacgtttacaagctaggaaacacatatgtggaatgactggtgatggggttaacgatgctcctgctcttaaaaaggcagatattggaatagctgtcgccgatgctactgatgcagctcgtagtgcttctgatattgttctgactgaacctggtctcagtgttatcatcagtgctgtattgaccagtcgagcaatattccaaaggatgaagaattacacaatctatgcagtttccatcacaatccgtattgtgcttggtttcatgttactggccctcatatggcaatttgattttccaccattcatggtgctgattattgctattcttaatgatggtaccattatgacaatatcaaaggacagggtaaaaccatctccatatccagatagctggaagttggcagagatctttaccactggaataattcttggtggttatttggctatgatgacagttattttcttttgggcagcatacaaaacagattttttccctcaaacatttggagtctcaagtcttcagaaaaaggatagggatgactttagaaagcttgcctcagcaatatacctacaagttagcacaattagtcaggc

SEQ ID NO: 79693 - DNA, 501 bp, Glycine max
  Clone ID: PAT_MRT3847_42979C.1
aaaagatataattgacttaaaacattacttattttacataattgtgtgtcttcgatctatatttttcatgatttcggcatttgagactcttggaagaattttcttattacaagacataaaatcaactttgtgaaatcaccataagattgaacaaaagtgactcaccatcaatgcatcgccacccattaccaaatatagcgagggtgaagcacccacctcaaaccatttcccatccttcaatttgacccctaagccttctaccttctgattcaatatagttatgaaagctgtgtcagaatgaggagccactcccaaattgctctcacccacttggggtattctgtatttgtaggctcggagcacatactcggttgattcgagtaaagtgtcaaatttctttgtctcgattccatagttctcaaacaccattctcttcacaatgtggtccaattccactagtttctttgcataggaattgacactttcacagaaatggtcatt

SEQ ID NO: 79694 - DNA, 307 bp, Glycine max
  Clone ID: PAT_MRT3847_4297C.1
tgactttgttgaatttgatccaactgtcagattctttttttacaatgccttgctgggcaaatgagctttcaagacaagttatagttcatttgatgagtgccagcgaatctgagatggtaggaagcaggctatattgtttgtttttctgcagagccctgaggatggcgagaggctttactgtgaagatcatctactgcggattttttagtacagaagcataatgaaattgtacacttgtttgcctgatactgttaacagagctatcatctttgcgactgaaatgcttactagtgtttccctgatacag

SEQ ID NO: 79695 - DNA, 530 bp, Glycine max
  Clone ID: PAT_MRT3847_42980C.1
cattatgaccattataagatctataatctctgtatagaagaaagttatgatccagataacttctatggacgcgtggaagcatacccctttgatgataaccatgtgccatctcttgaaatgatcaaagctttctgtgaaagtgtggattcatggctgtcaagtgacccaaaaaatattgctgttattcattgcatggcgggaaagggtagaactggattaatggtgagtgcatacctaacttattgcggcatgtcagcagatgaggctcttcaattgtatgcagatagacggacaaccaataatgaaggagtatcaataccaagccagcgtcgatacgtagcatactgggatagtctactttcaaattctgtcccaaggggaactggaaatggaccgacaaaggtgaacttgcctcagccatgtggcagagaattacggcgaatccggctttatgatacaatcaacattgacacaatattctttgttatctcagagctacacgaggttagttcaccacaagttgtgataca

SEQ ID NO: 79696 - DNA, 226 bp, Glycine max
  Clone ID: PAT_MRT3847_42981C.1
agctgagaagcgcttggccgagtatggggaggatcggccgagtatggtcgacgtcttgtggaatcttgaatatgctttgcagcttcaggagacctgatcatcactcatggaacctgaagatgacagcacaaaccacattactggaattgaattagcacgtattgagccttttgataacactgttagtatgatgagatggcggcatctattccacagatgatgatgc

SEQ ID NO: 79697 - DNA, 363 bp, Glycine max
  Clone ID: PAT_MRT3847_42982C.1
ccgggacgagccacgcgtccgaacaaaaaaaaaaaaaaagaaatttaatttttaaaaaaaaaaaggacaagggcgcacaaagaaaccggaccgggggggcacgaacaacgcgaacagcaaggaaaggggcgacaaaaagacgggcaccccaaaaaaagggccccggggccgacacacccccagcggcgcgggaaagaccacccccaaaaagaaagacacaccccccaaagaaaaaaaaccccccgcgcggcgcacaaccaccactggtaaaagagggcagaaacgggggacaaacccaaaagccccgcgtcccccccgaccacggggacgaccccgggaacggcccagaaaaaccagccccgg

SEQ ID NO: 79698 - DNA, 414 bp, Glycine max
  Clone ID: PAT_MRT3847_42983C.1
agttattccttttttttcctttagggggaaaaaaccggcaaccctttcggcccgataaagcccccaaaaatcgggggagtttttgggggtttttcaggggaattaggggaaaatccccccaaaatcttcaactttggccccctttgccaccttttaaaagggcttaagggggccaatttggcccctttttaagggggtctggtggcaacccttttaaaaaacttttggaaaaacatgttccaaaagccttggtaaaatttggacattaaggcccctggtttaaaaagggcttgaaccttcccaagaaaatcctggaagggcgttttagggggatttaaagaagggtttaacccagagccccccgcaaaacctttaaaaaaaccccttttttgccccttttggcccacccaaagc

SEQ ID NO: 79699 - DNA, 342 bp, Glycine max
  Clone ID: PAT_MRT3847_42984C.1
gaagacgagaatgaatatcaagctccctccacatctctaaccatggctcagactagtaacattcatataatgctattgattatcttcggccctctgacgaagcgacattctacatcggatctgcatccagaatattttcttcacaagctatctgaatctcaaacacctgatacctgttcagatgccactgggtcccggaaccaaaccacacccttctatacaaccaacattgtccctatcaccggaacccatggaactgcctccggaccgaccggttgaacatgacccttatcaacttatggagatggagaccacggaactgacacttgccccggatcgacc

SEQ ID NO: 79700 - DNA, 262 bp, Glycine max
  Clone ID: PAT_MRT3847_42985C.1
tccacttgcttgcgctgcctgtttccttgtgatctaaccctaaaaaaatactaacgtaccctagtgctcggaggctcctcgttatgtgaaatttaaaggggagggtaattgtatgcagtcttacccttgcatatgatgcaattaggctgtttttcagatccccatgaccaaccggtcaccaaagaacaactttaccgctgtgccagggctctccctcgcattcttccttgtgatctaaccctaatgcttgccaatttatgtt

SEQ ID NO: 79701 - DNA, 163 bp, Glycine max
  Clone ID: PAT_MRT3847_42986C.1
tctgtggtttttttttttttttttttttttgggagtaaaatacttttttatttctacgtagggctcttgtggcaaggaacaataacacttcctcagagtgctatgttgcacaacaaacatctgatgactgttttaaatggggggtcacgaaaagagcctggaa

SEQ ID NO: 79702 - DNA, 265 bp, Glycine max
  Clone ID: PAT_MRT3847_42987C.1
cctttgcaccaatttgtggtctgctgaactctcaaagcttgcagccaatgctttcctgaccgcaaggatctcctacgtgaatgccatgtccggcactttatgaggcaactggtgctgaagtctcccaggttgtcgacattcaatcggcacagactcatgagttggaccaaaattcctgaatgcacgtttgtgttatggaggatcatgctatcaaagagacatatggaacttggactatttctgtgagatcaatagccttactgaa

SEQ ID NO: 79703 - DNA, 180 bp, Glycine max
  Clone ID: PAT_MRT3847_42988C.1
atcccacaccagtgttcatgtgcctttcgcgttgtgctgactactcaagcccctggctgccgtgttgaactgtactccgcgggcaagttgaatgacttcttgcgcaatgtggcgaccatattctttcacactagaatactcttcagcaggaaaggccctttatactactgtgacatcctt

SEQ ID NO: 79704 - DNA, 440 bp, Glycine max
  Clone ID: PAT_MRT3847_42989C.1
atattcactccaaaaaaaaaaaataagctcagagagagagaatggggaaaagacaaatcccagaccctccgaactttaagaaatacggcgttccttgtctactccgttgcgtggattccccaacacgttgtcaaatcgcgccaaatcgaaaccgccggtaactacctgctgttcgccggcggcggcggagcaggccacagcggtatccccaatgcttcggttattgcgcacttcgatgtcgcgtcgaattctctctctgatcaaccggtgtgtaagctaggaactgattctgaattgccttataggatggcacttaactctaatggtgatggccttatttgtgcaatggaaacgcccatggtttgcagatggtttgactgggatcaaaacaagagctctgaaattcataagttgagtctgaagctgtcagagaaagtgct

SEQ ID NO: 79705 - DNA, 268 bp, Glycine max
  unsure (1)..(268): unsure at all n locations
  Clone ID: PAT_MRT3847_4298C.1
gtctggcctacaatctgttggatagagcgggaagttgggtgccctggggaggctatgatgatttcactgcatccttgcctgaaaaggattgccctgttgctcttgtggtctctcgtagctcctatcatgaacccagaaagggggttctgagcattaggttcgtcaggtccgagtttatgacggaaaacgtgccgcctaactactatatatgccagtggtgtngatgtttataattggatatacggactgcatctatatgagcctgcat

SEQ ID NO: 79706 - DNA, 522 bp, Glycine max
  Clone ID: PAT_MRT3847_42990C.1
tgtacctggtactgagaattatcattcccgtcatcactaccagccacctccaccaaaattatcattcccataatcactaccagcgtaattccctctgccaccactttgattgttgtcattattattgtcacaattgtcactactatcaatgtcaacacctccccaaatatcactaccgctattattattgcctccatcagcatcactgctattgttgctgccactgcaatttttctataccaccacttctgcttctacttcctctgcaatttttcgtatgggaactttttcttttttgataggaattacaaatccaataaaccagaaatgaaacacagaaccgaacaataaggaattgcagagatgaagcgcacaatttccttgtgcgtgtatttgtcatttgccttctcttaacagaacacagagtgttattctagtatggttttgtatgtcagttagagaaataagtaagggaagtcagtgttcgtttaaaaactagaggggatgcatgtgtcatctaaa

SEQ ID NO: 79707 - DNA, 1681 bp, Glycine max
  Clone ID: PAT_MRT3847_42991C.1
ccacgcgtccgcgctttctaaaacaagcagtgtcacgcagctgaatcatattcactccaaaaaaaaaaaaaaaagctcagagagagagaatggggaaaagacaaatcccagaccctccgaactttaagaaatacggcgttcctttctactccgttgcgtggattccccaacacgttgtcaaatcgcgccaaatcgaaaccgccgatgagtcctcggactccgatcacagcacttcgccggcgaccgaggcggagaaggaacccgcgacggtcgccggtaactacctgctgttcgccggcggcggcggagcaggccacagcggtatccccaatgctttggttattgcgcacttcgatgtcgcgtcgaattctctctctgatcaaccggtgtgtaagctaggaactgattctgaattgccttataggatggcacttaactctaatggtgatggccttatttgtgcaatggaaacgcccatggtttgcagatggtttgactgggatcaaaacaagagctctgaaattcataagttgagtctgaagttgtcagagaaagtgctctcacagttggaggatgttggacagcaattagcattggcattcaacaatgatggtactgcactagctgctggtggggaggatggcaatctaagggttttcaagtggcctagcgaggaaattattctcaacgagactaatgctcattcttctttgaaggacttacatttcagttctgatggtaaattacttgcctctttgggaagtggtggcccttgcaaggtttgggacgtttcttcatcaatggtcttatcttctctatcaaatgaaaatcgcgaaacttttagctcttgcagattttctcaaacaaatgacgagactctgatcctatatattgctgccatgactgataaaggtggaagcatcctgacctggaatacacaaacatgggaaaggatggcctcaaagcatattattcgtgatccaatctctgcatttaatgtctcagctgatggaaagtttcttgcgtgtggaacaccttcaggagacattgtagttgtaaattcaacaaatatgcagattcacacaatgataaaaaaggctcaccttggcatagtaactgctttagcattctcccctgattcaagggcggtggcttctgtatccatggattcaagtgcgagggtaacaataattgaagagaagaagactaatgggcttagcttgtggattgcattatttatcatcctacttgcagtagccgcttacttcctgaggcaagaaattgaaaagtgaaggttccaagattttgcttattgaaatatgaaacaattagcatccttgtgaatgctactgcttatttttgatgcattgtcattttttaaggggtttgctgatacttttatatattttggcatctttatgaacagttgttctaggacacgaccctctctctaaaatgccttgtaacatgggttgtatcgttacgttacatgtttcgtacaatgcttccaggtagaattgagctatcattcattacttgctatttgctgtgtattttgatgttatatgatatatagctttcactgtcagaagtaacccgagggcacgggttttggattaccaaaaaaaaaaaaaaaaaaaaaaaaaaaaaaaaaaaaaaaaaaaaaaaaaaaaaaaaaaaa

SEQ ID NO: 79708 - DNA, 788 bp, Glycine max
  Clone ID: PAT_MRT3847_42992C.1
cggacgcgtgggtattattcgtgatccaatctctgcatttaatgtctcagctgatggaaagtttcttgcgtgacctcaagggtgcattttgacaagaacttatttcttctgttttggtgggttgacatgcagtggaacaccttcaggagacattgtagttgtaaattcaacaaatatgcagattcacacaatgataaaaaaggctcaccttggcatagtaactgctttagcattctcccctgattcaagggcggtggcttctgtatccatggattcaagtgcgagggtaacaataattgaagagaagaagactaatgggcttagcttgtggattgcattatttatcatcctacttgcagtagccgcttacttcctgaggcaagaaattgaaaagtgaaggttccaagattttgcttattgaaatatgaaacaattagcatccttgggaatgctactgcttatttttgatgcattggcatttttttaaggggtttgctgatacttttatatattttggcatctttatgaacagttgttttaggacacgaccctctctctaaaatgccttgtaacatgggttgtatcgttacgttacatgtttcgtacaatgcttccaggtagaattgagctatcattcattacttgctatttgctgtgtattttgatgttatatgatatatagctttcactgtcagaagtaacccgagggcacgggttttggattaccaaactttcacaaatgaaatgattcaaccaataatgaaggcttcatgactgaattttactac

SEQ ID NO: 79709 - DNA, 362 bp, Glycine max
  Clone ID: PAT_MRT3847_42993C.1
acataattgattcatcaaattctgagaggtcattattatcaaacttagaaaactccctctccgcggctatataggctaatttctttgggaacttctgatacttactcaatatatcactgaaaaagtatcttaccctattattacatgccaacataagaccattcaccctacgtccagtatgaacataacgagactgattaaatcgcacactatgttttcaaccaatttctcatgtaaaaagcatttcctacttctaagaattactaaacttcatttaatattccgacccccccccttatattcacttgaatacaaagattatcaagattgctttcctcctacttataacattacttacatga

SEQ ID NO: 79710 - DNA, 351 bp, Glycine max
  Clone ID: PAT_MRT3847_42994C.1
acaaggggaaataacttttttttaccccaaaaactcctttgggcaaattgttacattttgcaaacaaccaaatccacattttgatagaataatgcggcccccccccacttaaaacaaattttactgggggcctcaaaaacaaattggtatttttcaaaaaacatttccctttccccttaaaaaaaaccaatttccttaaaatcctccccagtttttcctttggggttttcccccatctggggaaaacgtgccttcaatttttcccccaaaaaccggccttattatttttattcggcctttttccttgctttttcccccctggccccttaaaaagccttaataaatttgggc

SEQ ID NO: 79711 - DNA, 276 bp, Glycine max
  Clone ID: PAT_MRT3847_42995C.1
ggggagcaagggggatcctttatgagccgggggattctgtatattgccaaaaaaaactatttccctcaattttatacaaaaaggattggatttatttgatattctaaaaaaaaattgggtatttgggccttttccgagactcatagcaatagatagatttcgaaccaattcccttcaactaactggaaccgttattttcggggagggatatgggtgcattcctgaaaccaaaattacaatctgagtcctgatatgaggggggtcatgcttgaccct

SEQ ID NO: 79712 - DNA, 683 bp, Glycine max
  Clone ID: PAT_MRT3847_42996C.1
agaacaaatcaaattcaacatttaggatgattgaatttttcgatacaagggagatgcaaatgcgaaggattaaccctactttataacatcagtgcatctccatctgaagagactgggctagtgctactcgaattagttgatggaattatttctgcatgccgtgtttacttttaagtacctataaaatcgcaaatatacgatgccgatgccctagttatacagacatcaatacttgtacattatattgggatcctcaacgttaacaagatgaagcttgctcaatatattctccaatgcatgtaccgcagtcctgtaatgatcatgagatttcttaccttcctctacaaccttcacaacctgtctgtataaatggtcatacctatgaactggattactaatatgaatgccaccaccgttgtgatcatcaacattgctacgcttcatatcttttctccatcgtgaaagaatgtactgagctgggatctcttttatcccattttggcttaagataaataaagcatgcctacacaagtaacctctgaaattgaacaaaccacagatgcaaaggacctccatttcagcttcattataacacaccttgtaatctcttgcatctctctgatttccctcaacttcaacttggtcctggacaatgtatgtgacgactgggccatcagcattta

SEQ ID NO: 79713 - DNA, 619 bp, Glycine max
  Clone ID: PAT_MRT3847_42997C.1
gtagacacttggttcacttgatgaaattttaaagcttgcccattgaatggtttcttgttagccaagccactattagttgttctgattttgatttacttgtgttactgtagattttgtcaatgattggataatatttctaaatgattcctaaaaaacattgatgttattcttttctggagaacttagtattatatgtacatttaatttatgttgaaaccataagaaatatctcttggggaatcatcgaaatttactttctattgacaatcctcaactatttgaagatggttcagtaggcatcttatattttgtgatgtttccttgaccttttctggggtgtattttggagtttttttttaaaggaatgatggtaggcgtgtctcctttactattgttttctggatgttatggtgctacagatggctggcaaggtggtgaacatcaagcttcacaccagaagatcccaacgtgtagtggaaggatcaagaagtcagtgtacttgtgaatgcaggcctggcttcatcactaatacggcttgaataatttcttgaatgactttggtgggtttgtgatgtggttgtcttgggggtgtggtgctgggcccccgggggtgtgcttg

SEQ ID NO: 79714 - DNA, 438 bp, Glycine max
  Clone ID: PAT_MRT3847_42998C.1
gtttcgtggagcagaggaaacaacagcttcgttgtgtgggatcctcaggctttttccatcactcttctccccagatacttcaagcacaacaacttctccagctttgtcagacaactcaacacctatgggtttagaaaggtagatccggataagtgggagtttgctaatgaagggtttcttagaggacagaagcatctattgaagaacataaggagaaagaagacattaactaatcaacaacaagctcttccaatagaccattgtgttgaagtggggaggtttggatcattagatggtgaagttgatgcattgagacgtgacaagcaagttctcatggtggagctagtgaagctcagacaacaacagcagaacacaagatcctttctccattccctttgttgaaccaattgttgcaagaagttggggttcctagatcgc

SEQ ID NO: 79715 - DNA, 1187 bp, Glycine max
  Clone ID: PAT_MRT3847_42999C.1
tcctccaagcatatatttttttttctttttttcactatcagaaaatttgtgcattagaaaagcatccgaaacagcaaaaatgttacaactctaggaaataataaaaaaaaaggtaacttatttggctattttcctacagtgaagctggtgggaaaactggtgaatgatgttactatggtaatgctacagggggctttccttggaggctagtgttacaattacattaatgtaatgttaaactatatattggccaatctaccagaatttgatcctttccttcgtctacgcctcttttggcgaatgcgccaaaaactcaaaagcaaaataccagttactgcaacaacaaatggaatcagccagtgaccaccaaccagcataggtgcatcaggctcatccccatagaacaggcctaaatacctgttccccagaaaatcatccttattacttctcacagtcaacctaggacgcctaatgttggaagcatcagaggttgaatttaaacccctccccaaatcaatggcaggatatccgggcaatcttctgtttcttcccctgacttgcaaattgtagcccttagttccccagatttcaaaccttgtgtcagtcctgcagatcaattccttccccacaatagctgaaaatgcagagaaatttacatcagttctgcgggatggcaactgattgtcaggttcatacaaaggagaatcttgtttatttgagtcagagaaaagttctggatctctaacgtcttcattagtaaaatctagcaatttcctcagaagggcaaaacaattcgtaaccatatgactgctgtccaaacaattggagtccccatacacagctatgcgaccttcacccatcactgtgagaccaagaattggagaatctgccttggttgagccagaagcttgcagcacattctgtgtggctccactttctgaactatctaagaaaggaaagctatgtacatagccaccccttggaaacctcactatatctgttccagaagcataacgattctgctcacccaaaagtgaaaaatcaccatccagaatcttatctccaaaagcaatcccaaatggggccaaaagatcattaagtgcaggaacattagcacctccacccactggggtccaccagctccgtgtattgtaatcaaagaatctcatctttaccatggcatctac

SEQ ID NO: 79716 - DNA, 617 bp, Glycine max
  unsure (1)..(617): unsure at all n locations
  Clone ID: PAT_MRT3847_4299C.1
gttcagaagtcagaagttgggttttttcttccgcttctcctatatgacacaatttgaatgcattgcttctcatatgattgtgtttatttgagatgcattcagtgttggtgtcctgtcaaaacactttacgtgcagtattctcctggcaacattcgcttgatgaaatgtgagaattgcaaggctgttgcagacgaatacatagaatgtgaaatcatgatacttgtaatagatttgatacttcacaagcccaaggcctatagacatctcctccacaatgtcatcaatcaagaaacaatgaagtttcatggactactctggaaattggctgtcatttttcttctttttgaatcttgtatgcattcttttggtagatgntatccttttttaatgctttaggtgcataaagtctaaaattccagctttttggtttacttttactaaactatatattgcatatgaggactttatcatctgttgaagacagatggtttgatctttggaaagcagcaagggaaaattggggtttctctaatagcgtctcttcattagtatcaatatgctggnaaggtgctgattggatgttataattggggattttggaggtttccttttaactt

SEQ ID NO: 79717 - DNA, 758 bp, Glycine max
  unsure (1)..(758): unsure at all n locations
  Clone ID: PAT_MRT3847_429C.1
ccgaatttttggaggctttattgtggaagaaacacaaacatgaacatggaaggtggtgtcttgctggtcagaaaggcagagatagacacaagggcaccattccggtctgtcaaagaggctgtctcattgttcggtgagaaagtcttagctggagaggtttatgcaagtgcaaacaagctcaaaaagatacagagtggagcaaatgaaaacggcgttgatttttggagaattgaaaacgttgaagctgagttagaggagacgagggaaaacctgcagagggcaaaggaagaaagcatggtaatggcccattgcctgtcttctctgcaggaagagcttgaacgcacgaagcaagagctccaacaactgaagcaacgggaaacagagaagcacccggtggaatctgaaattgaagatgtcaagtttgtggagaacttaacgacgtttggagtgcaaagttcgagattcgaccaggaaaatatggagttccaaaagaaaaggtacgtcacgttcgcgaatccgccatcggtgtctcatcacgtgatgctaccgcaacacggngttgaaaagttggaaaggcacccttctctcaggaagaagaacaagaagtcgttcattcctttgattggaggcattttttcaaggaaaaagggaagccaagaaattccatgaaaccaatttgaatcaaacgtaagttcanggctttggttggttttccaaacatacgctaagtaccatatatgtttttcgtttactaatat

SEQ ID NO: 79718 - DNA, 366 bp, Glycine max
  Clone ID: PAT_MRT3847_42C.1
tccctctggagccacacatcccgagacacctaatgtgaaataccactatttctttcattacattacttattccattaatgataggtttaatactagctatatctttatacccaacgtcacactctccccacatcaatcatcatcgtatgacattctccacattagtaactcagaataatccctctacacatacattaactataccgcagccgatcatacactaactctccaacacatcaaacattgctctctccatatggttaacaagctatttaacaatcataaacagtcttaatccaaacttaataatacctttctatcactgctttatcctattgaaaactacaaactatatgtatatctcac

SEQ ID NO: 79719 - DNA, 414 bp, Glycine max
  Clone ID: PAT_MRT3847_43000C.1
ggctcgagcaaaatgtcttaagcccacatgttttcacatcaactggtaacccaaggatctgaagtacgaaaaatgggatctggaagactgggccttcctggagcggacaatgaccctctacatgaacaagagggtctgacgcggataaagcatgctgttagccttggcaatcacatttgttgctactgcagatgattatggagcccatgcaaatgaacaagcgtcaggaaaggttttgaaacatgtgtacactgataagagttagatagccactgaaatgggctttgctatgctaggtagacctgatatgaagatcaaacttatgctggaatctgtactatcatgctgcgaagctagcttgaagcgtaattgatgatgaatacatagatctttctactgagcacagtgtgctca

SEQ ID NO: 79720 - DNA, 544 bp, Glycine max
  Clone ID: PAT_MRT3847_43001C.1
acgaggaatcaagccctgattaatatatttaaaagaagaacttttataaaaaaaaaaaactcttgtttgaataaataagagcactaatgtttgaatttatagattcaccttagacattgcctttataggtgcactatagactctagagattgccttttttgcaaactacttatgtcaaatacgctcttactagtactgtattttctttccgtctccgctgcaaaatttaactgcgcgtaggtagtaaatgaatcgccctgcttttaccctcattttctctcctaaacatttattatttctattttctactagtaatattttgttttctttcatcaacctctccataaataaatggaccgtaaggattctatataagtttgaatgtatttctttaacatggtttttaaataataaatactgacaatatctgtaaaaaatattcaaaattgaacaaataatttaagttatgtataaagttattaaattaatacatccaacttttttccctgataaaaaattacattcaaattttcttacattactt

SEQ ID NO: 79721 - DNA, 774 bp, Glycine max
  Clone ID: PAT_MRT3847_43002C.1
ccggaattcccctcctgactcacgcgtccgctgtgagtctcagtctctttttcttcttcggttgtttgtaaaacatgttttcttctcttttgttcacctgagtgaaggaagacataggcataccttgttgctattgctgtttttgttgtaattgtaattgtaattgttattgttattggtggtgatagattagaatttagatggagccttcactcctactttcttcaccttcatcatccacccctttacctttcttcatctcaaacacacttctttgccatccaaaacccaaactttctaccaaactcaattgcaccctacaaaagtcccaagtttggggcacaaatttgagttgggtcccatcacaatcacatcatggaagacctaaattggatgcagtgaggcccataataacagcagcggtgaagagaaggaaagagattcccttcgacaacgtcatccagagggacaagaagctcaaatttgtggtcaaggtaaggaacattctagtgactcaaccagatagggttatgtcacttaagacccttggtaagttcaaaagagatttgggtcttgataaaaagaggagacttattgccgtgttgaagaaattcccagcagtgtttcagattatggaagaaggggtttactccctcaaattcaaaatgacccctgaagccgaaaggctctattttgaggaaatgagggttaggaatgagatggaagactggtgggttgtgaagcttaagagttgttgatgatgtcactcgaaaa

SEQ ID NO: 79722 - DNA, 593 bp, Glycine max
  Clone ID: PAT_MRT3847_43003C.1
ccacgcgtccggaggaccttcaagaacaattggcggagatcactggcaccacagatactacggcactatggctctggatggacgatacggacgacgaatccctggctatgagcctctttgtactgtgtgcaagacacactcctcggagcaccgtttggtccttacactgccaagtgcaagggtttgaggtgcatcgtttctgatctcactccattacctgaaccactcctggaacccaagtacactgccgcatgccgaggtttagcgacacttactacgacgacggttctcacatgctttgcgagaaccacgactggcacctcaaggccgggggacgctagttccttacccgtgacatgtcctgccaggctgcttaacactttggagatgggcatgcctactcttttagggatgttcggtgtcttttgatgcgccattatggtgcatgacggggtccttcagtgcatagttcgatgcgccctgctgctgtcactggatgacggtagcacacggacagacgctgatctatgctgaagcccatgacggtgctctgtacgtgtgactactccatggtgactgtgcagacttatgga

SEQ ID NO: 79723 - DNA, 740 bp, Glycine max
  unsure (1)..(740): unsure at all n locations
  Clone ID: PAT_MRT3847_43004C.1
gtgctgctcttctgcttcatccttagaccggagctttgagtctcagtctcttcttctgtgttgtttgcaaaacatgttttcttttttgtttacctgagtgaaggaagacatagacatacctagttgttattgctgttttttgttgttattgttattgaatttagatggagccttcactcctactttcttcaccttcatcatccacccctttacccttcttcctctcaaacacacttcctttccattcaaaacccaaactttccaccaagttcaattgcaccctccaaaagtcccatttttggggctcaaatttgagttgggtcccatcacaatcacaccatggaagaccaaaattggatgcagtgaggccaataataacagcagcggtgaagagaaggaaagagcttccctttgacaacgttatccagagggacaagaagctcaaattcgtgctcaaggtaaggaacattctagtgactcaaccagatagggttatgtctcttaagacccttggtaagttcaaaagggatttgggtcttgacaaaaagaggagacttattgccgtgttgaagaaattcccagcagtgtttcagattatggaagaaggggttttctccctgaaattcaaaatgacccctgaagccgaaaggctctattttgaggaaacgagggttaggaatgagatggaagagttggtggttgtgaagcttaagaagntgttgatgatgtcactagaaaac

SEQ ID NO: 79724 - DNA, 316 bp, Glycine max
  Clone ID: PAT_MRT3847_43005C.1
ggtgcatcgaacagggttcatatttgtgttgcaagcaaataacacgcagcgtgtttgaatccataatcccccatcacatagtgaaacatatgaacacaacacaaacacacatacatgttggatggagcaccttttcagaggcaccaatatatatcaccaaggagcactctttctctccacctgtgtttttctatccaccatcatgcgtcttcaaaaactcctacaaaaaccttcctaccaattggtgcttataaccccccttttaataatctcttgggataaatacaaaacaaaaattttttgtcggaaacctggg

SEQ ID NO: 79725 - DNA, 452 bp, Glycine max
  unsure (1)..(452): unsure at all n locations
  Clone ID: PAT_MRT3847_43006C.1
tttataaatttctatattttaaaatttcacaattaanatttaaatacacataaccatacacaagtttcactcatgaatcaccagtggaacaatgatgttctatcgtgcctctaacaatgagattgaaatttcatttactgaacacctttcatggtgctttgaacaagatgctgtgtcaattgtattatcttttccagtgtagaacccaggctgtcttggttttgggagtaacgttccgccatttaacatcaaaaccacagatgacatgttaggcctattttctggattctcttgtacacacaatagacccacatgaatacgccgtaatatttctgaagatatgggcgtatcatcatctaacatgtcatctattaactctagggggctttcttcagtccataatctccatacatgggctaaaaaggtaaaataattattgggaggggcaccaa

SEQ ID NO: 79726 - DNA, 106 bp, Glycine max
  Clone ID: PAT_MRT3847_43007C.1
ggtccctgcaaccttggcctggcacgttctctgccgatctcgctctcacgttcacatgccatgccagtgtcgtaggcagcaccccttcatattcgttccacccacc

SEQ ID NO: 79727 - DNA, 413 bp, Glycine max
  Clone ID: PAT_MRT3847_43008C.1
caggtaccggtaccgaatctcgcagatgtcgagcctacggcgtacgcgtgcgctcacgcgctcgatcagccgagatgacaagtattcataatgtgctcaaaaaatgcttggagcgatgatagtgcacgtacaggaacttgttccacagcaagctacctcaagtgcatgggcgacttcagcactaggtagacccacactgacgcatgaactattgttatctacataggaagcttgaaatggatgcttatgctggacgaattgtcaagaagaagatcgagactattttctacttgactgacctagctgatgcccaatcggcaatggacgtcgaatcccttctgaggaaaggatggattccttgcttggaattatagttggagcatggttttgtataccgcgagcacaaatgttca

SEQ ID NO: 79728 - DNA, 190 bp, Glycine max
  Clone ID: PAT_MRT3847_43009C.1
gcccccaaaccgaaagagagcataaacaggacacacagacggaaaacgagaccccaaacaaggaaaaagagcccaaaggggggaaaaccaagagtacgacaaagcaagcaagatatcaccgaaacaagaccaaacaacctcaaacacagggcaaaggaaaaaaaagagcgaccgcgacaaacaacaaaac

SEQ ID NO: 79729 - DNA, 636 bp, Glycine max
  unsure (1)..(636): unsure at all n locations
  Clone ID: PAT_MRT3847_4300C.1
gcttactttcattggcagagataaaactcgaaaaattaataatcctgcagaggtaattggtatggtactcaacggtatggtccaagaggtaagcaattaatgagggttgatgaagttaagccaaaaaatgcactaacacttcaaattaaaatagtattaatttttatgtgtattggacacgtatccaagccaagaacttcacaaaccacactaactgtactttataattattttccttttattttcatatcatacatattagaattccacaataactagataaattatagtaacattttattatatctaaaatgatttgtgttgagttttaaaactctgatttctcaatttgatttaagactagaattttattataataacttatatgtgggtttatagctgtggtattttaattcataggagttgacacaaaagttaaatatcctgctttatttacacatggacaaattacttatttagtagaaacactcatattggatattttttttatggatacaaaattttcttattctagcgattatcatgtattaccaaaggtaattattgtgactcaaaataaaantgactgccatatttaaaaattttaaagtaattattaatgcatatggggggaat

SEQ ID NO: 79730 - DNA, 319 bp, Glycine max
  Clone ID: PAT_MRT3847_43010C.1
acgaataatttcatctttgtgccctgtaatgtgaagcaatacattagtcgtgatgaattttttgaaaatacttttccagccgcgcctcgggaggacccgatgtgccagatgcctactgtataaaaacacacataattgctatgagaaggcgtacacgccggatcttgtgcctagttatgagcgaacattcaagcagcaagggtccatgatgccatcttagcactgatgccacaaaatgccaccattctatgaaaggggacattgctattttatgaatagatctatacgccggtcgatgtcctatctaattgccaaacta

SEQ ID NO: 79731 - DNA, 221 bp, Glycine max
  Clone ID: PAT_MRT3847_43011C.1
cattgtcctaatctttctgcacatcgttcttcattttcggtcttacaattctactgcgtctgtcttaagggttctctaatatttctactacttcttgtagtgttaaagttgtcagctactagtcctctaagtgtttggtgttgtagtaggcagagccgaattaacatgttcattcagtgtgacgtgtgtaagtgagagtgggaacagggatttgttgcgcg

SEQ ID NO: 79732 - DNA, 272 bp, Glycine max
  unsure (1)..(272): unsure at all n locations
  Clone ID: PAT_MRT3847_43012C.1
anagaaaggaaataattgatctttgaaaatgcagggaggaaagaaagctggagagtccatcaaggaaacagctgcaaacattggtgcttctgccaaggctggcatggagaaaaccanggccactgtccaggagaaggcagaaagaatgacggcactgatccgatgcaaaggagttggcacccagagaagggaantgaccagaactggcacaggnggnanataccggcganagtcagnagnctggcacctggnctantattccgntgacgcac

SEQ ID NO: 79733 - DNA, 171 bp, Glycine max
  unsure (1)..(171): unsure at all n locations
  Clone ID: PAT_MRT3847_43013C.1
cattntgctccanaangntgctagtctttcatnctatgaggaggantctcanttcancacntgncagaaacggngtgcaaacctcgggntctctcggtacgtgcnctttacgctgcnccantccagntttgggacagcgaaaccggcnaggtagccagctgggctacatcc

SEQ ID NO: 79734 - DNA, 236 bp, Glycine max
  Clone ID: PAT_MRT3847_43014C.1
tactgtccaatggtttctaagtggcgaatcgagtacacatcatatggaatccggtccctctgacactgaatgtttagcatacatctttaaaattaagggacacaactgttcattataaacatctgtataatctatcacactaatactgcaatctaataccaattagtattattaatgaatattgccaacagtcacattttatcattcggatatttaatgtccatcaattgcctata

SEQ ID NO: 79735 - DNA, 229 bp, Glycine max
  Clone ID: PAT_MRT3847_43015C.1
cttcaagcactcatcaccatggacaagcttgtactgtccctttatgaccttctaactagtagatgcttcgcgctgagtctgcaggtaccgcaatctgagtgccagattcacaagctgactgctctcaaaccggttcagcgtatagagccagaaggtgggttcattgcgacctggaatcctagcgccaatccattccagcatcgcggtcatcgcctctctcgctgcaccc

SEQ ID NO: 79736 - DNA, 174 bp, Glycine max
  Clone ID: PAT_MRT3847_43016C.1
atgacgaaacatgcacgcgtcacttaagttggaatatcgggtttgagaagagaccgggggtgcgcgggcttatagaagatctgatccaatcctcgcttggattgcgggtcgagaacaatcttctccccatcaaaccctaaccctaactcagcagatagagttttcctcccaccc

SEQ ID NO: 79737 - DNA, 500 bp, Glycine max
  Clone ID: PAT_MRT3847_43017C.1
ggggcagaagtttctgcttccttggctaacaatttttctgccttggtttctttctcttcaaaatcaccctcctccttatctttcataggctttcttgactcagaagattcctctttaacttccttatttgagatcctttccttctttgcatcttcagcacttgtttcctctgtcttcttttcctccaattgctccttaactgatggcttccttgtaacatttgttattgaaggtcttgactcttcttcctctacacccttgtggggtctttcagcagttttgactttggtcagcattgttggtgtttgttttgcttcaaattcctcttcacccttttgtggcctttcagctgttttggctttggtcaacattgctggtgttgattttgcttcaaattcctcttcacccttttggggtctttcagctgttttgactttggtcagcattgttggtgtttgcttggcttcaaattcctcttccttcttttgtggtctttcagc

SEQ ID NO: 79738 - DNA, 358 bp, Glycine max
  Clone ID: PAT_MRT3847_43018C.1
ccacgcgtccgatcactatatttattaaacgcgacccatcatgtgtgtttcctgagcacacagcagaaaagaacaaacgcaggttcccaattgaaacggttctgaagaagtgaagaacaatctaggttttcctttctccgattcactcccagagcgaagaagccgccatgggaggcgaggagaagcggcaccagatgatgcagaacctcttcggagaccaatccgaggaggaggaagagctcgacgttgattctgagcacgaatcaaacccgcaactcaattacccctccgacgagggggagggggtgggggagcatgagggcgaggtggagggccagggcgaggtggagatcgagag

SEQ ID NO: 79739 - DNA, 466 bp, Glycine max
  Clone ID: PAT_MRT3847_43019C.1
atcattagagagtgaagtgttcttccctcagttgcttaagatgttggaaggaaaagctgtggtgagagagacagacatgccagagggaatgcagagctatgttatggaattagcacaccaagctctcgatgcacatgaagtttctgattgtcagtccattgctcatttcatcaaacagaaacttgatgaagcatatggacctgcttggaattccgtggttggaaaagactttggatcttgcatcacacatttatgtggaagtttcatattctttcgtgtggagatgatggaatttctgatcttcaaagatgggaagaatttcacagaaagcagggaagaagctattggagtgctgcagaaggctagaaattgtgattagtaaattccaaaatttttagttgttatagaacaacctaaactctttaatattcctaattaatctaagctaaacatgttcaaattacct

SEQ ID NO: 79740 - DNA, 258 bp, Glycine max
  Clone ID: PAT_MRT3847_4301C.1
tgaaaacatgggtatcaacagaacatagctcctgcggttcaagatgatgaatttccaatttgttgaggaacgaaaatggtcaaaagatgctgaaacaatagaattgaagagtatattaggacaagctcaagcattagatctctaggccaaactggcacagttggcaaagggaaaggctgctcttgatataaatcctcacttactagagataacagagagagttgtaattatagaaaagctcaaggatcatattccaga

SEQ ID NO: 79741 - DNA, 525 bp, Glycine max
  Clone ID: PAT_MRT3847_43020C.1
cagaagacgatctgactcagacccgttatcttcattctactcaatcgatcctcactttttcttgtcaaagcaggctagttgcaaagactactcaattagagggtgagaaaatgcagaaagaggctgaagttcagaaacttatggaagagaatgttaggttgagtgcactgcttgacaagaaagaggctcaacttcttgcattgaatgaacaatgcaaggtaatggccttgaacgcttcaaacatgtaaatgccaaagttttatgctgaccactggaggcactaaaaagaaggtttatccataaacatcgttaatgccttaagttttattttctggtgccatttgttgttaaaattgaacgcagaaaatacttgtgcttggaatgtaaacttggagtgctctttcatggggaagaaaaaaaatgaggatggggtgtctctttgctgtaaatgttggagaccaaatcacgaacctcacatcacagatatcactgagtaatattatagtaaccagttaattaccatca

SEQ ID NO: 79742 - DNA, 430 bp, Glycine max
  Clone ID: PAT_MRT3847_43021C.1
ccgccagctaaccacaggtaatcgacaacagcaagatcgatctctgtccagtcgaatcttccaaaatggccgactctcaagttactctgcgcacgcgcaagttcatccgcaaccccctcctcggacgtcgtcagatggtcgtcgacgtcctccaccccaaccgcgcgaacgtttccaaggacgagctccgtggcaagctcggtgagctgtacaaggccaagaaggacgatgtctccgtcttcggtttcaagacacacttcggtggcggcaagagcaccggcttcgctctcatctacgacagcgccgaggccatgaagaagttcgagccccgctacaggctagtacgctacggcatggccaccaaggtcgagaaggccagcaggcagcagcgcaagcagcgcaagaacaggatgaaggagttccggggcac

SEQ ID NO: 79743 - DNA, 642 bp, Glycine max
  Clone ID: PAT_MRT3847_43022C.1
gagctttctagagtgaagcaggaatttgagtctctgaaatcatatgttagcggtctaataacagtaagagaaaccttgctttcttcagagaagcaatttcgaactattgagaggctgtttgaaaagctagttgcaaagactactcaattagagggtgagaaaatgcagaaagaggctgaagttcagaaacttatggaagagaatgttaggttgagtgcactgcttgacaagaaagaggctcaacttcttgcattgaatgaacaatgcaaggtaatggccttgaacgcttcaaacatgtaaatgccaaagttttatgctgaccactggaggcactaaaaagaaggtttatccataaacatcgttaatgccttaagttttattttctggtgccatttgttgttaaaattgaacgcagaaaatacttgtgcttggaatgtaaacttggagtgctctttcatggggaagaaaaaaaatgaggatggggtgtctctttgctgtaaatgttggagaccaaatcacgaacctcacatcacagatatcactgagtaatattatagtaaccagttaattaccatcaatcaataggtgagtcattcaatcaacttataattttttcgataaatatatttgaaatttcaactt

SEQ ID NO: 79744 - DNA, 1747 bp, Glycine max
  Clone ID: PAT_MRT3847_43023C.1
attttggttctgtctttatttttctttttcatgtaagcaaaagaacgaattagagtgggaagacgatccaactcagacccgttatcttcattctattcaaccgatcctcactttttcttgtcaaagcagggcatggcaacagatgaaaagttgagtcaatcgcatgaaacatggaagcaagagattgcaagaatccaatcccaagtggatgtattgcaaaaagaacttacagagttaaaggcttgcaatcaggcttcagatggaaatgcaaaaaaggagttggaggttctttggcgaagagtcaagactgcttctacattgttgacttacctgaaatcaaaagctaggctcatggctgttcctcatctagcccatacatcttgtggcatcaaacaattagagggggtatgctttgttgacaaaaatgggataccattatcaggttggtccagcaatgttgatttttcttcatttgatgacgcagatgaagaatcttggaatggaattaggcatcagcatggttccttagatgaacaagatgcagcttatataggtgaaatgctcaagtctgtacagatggtcacagatgtgatgggaagcccttgtcaaaagggttttattggcatgagtcagaaactgcaatagaagaagaaaaagtgagtataagtcaggaagaaattatgcggaagtctacccagttagagaacatgtctatgaaattacaggagatggagcattttgctttgaatacaaatagtatcctaactgagatgcggcaaagagttgaggacttggtggaagaaacaaccagacagagagaacgagctgctgaaaatgaagaagaactttctagagtgaagcaggaatttgagtctctgaaatcatatgttagtagtctaataacagtaagagaaaccttgctttcttcagagaagcaatttcaaactattgagaggctgtttgaaaagctagttgcaaagactactcaattagagggtgagaaaatgcagaaagaggctgaagttcagaaacttatggaagagaatgtcaggttgaatgcactgcttgacaagaaagaggctcaacttcttgcattgaatgaacaatgtaaggtaatggccttgaacgcttcaaacatgtaaatgccaatgcacgtgacagactggttgctttgcgttttatgctgaccactggaggcactaaaaagaaggtttatccataaacatcattaatgccttaagttttattttctggtgccatttgttgttaaaattgaacgcagaaaaatacttgtgcttggaatgtaaacttggcttgctcttttccgaggaagaaaaaaatacctctttcaagtgtcaaactggtattaattttccttagaatgtaaacccggcgtgctctttaatgagacaggcaagtcgtgtctcctctagaaactgtaaacaaaccagagaccgaaaaagaaaaaaacacgtctgtgtcccttcgctgtcccatcaaatttttttgagaaaaaaaaaaaaaaaaaaaaaaaaaaaactgggaaattcttaggttccctcgtaacaaaagaaatagtttgctatgtttcagccatagatagcgttaaaaatgtagtaagagatgtcaatggctcacaagactgagatgatatagattcaatgatataaagagatttctcttgttttgataacatccaagaatttctcattacattgaatgtgtatcattagtgccactgacatat

SEQ ID NO: 79745 - DNA, 425 bp, Glycine max
  Clone ID: PAT_MRT3847_43024C.1
tttacatgtgtgcttgcattacgccaacagatgcaggcaggtcatcaggatactggactacaagcatggtggaaggaagctgaggagaaggggcatggtgactcaaaagaaaagccatggtggcctaaaacgcatgacaactgaagatctcattcaatcatgctctattatcggtcggacagcccaagatatccatgctgctgttaattgtggacaatatcctgatgggggcttaatactgaaccgtgcaactataggcagaaggttaatcccagctgaaggaaccccagagtatgatgagatggggaagaattctcaaaaggtttatatgagaacaatcacacccgaagttgagaccctgactgatcttctagtgatagacatattgtcaaggcatgctaatgacgagacatacctttgagaga

SEQ ID NO: 79746 - DNA, 276 bp, Glycine max
  Clone ID: PAT_MRT3847_43025C.1
cagcgtctccggtcgacttttgccctgcctaacctaatatcatggctgtcctgtttcatcacacgggtaaactggtctgtatatgagacacacgcagtacctatgtgatacaccaataacggctcatggtttcactttctcgactctgcctagcctctctttcagacgctcttatgccagtaccgtgaagggtgccgcgccgttcgcaggaggctacattgatgcctatttgtcttttggcgcgattagtacagcggtgccttatatgttgtccat

SEQ ID NO: 79747 - DNA, 294 bp, Glycine max
  Clone ID: PAT_MRT3847_43026C.1
tcttctatccccggtgattatgggattggacgctaacttggcgacctttaacaacatgtgtgcatatgggctcaatcctggtattacaggatctcctcttcagggcaccatttctcagcgattctataggtatattgtttgaattaagtggcatcagcgtgaactccattgaattttgtatctagcatgcaaagcttttgattagtgtttaaagacctctttggtggatgaattttagtggacaatacctgtatattggatcacactttttcaaacttctcatttagttacttg

SEQ ID NO: 79748 - DNA, 272 bp, Glycine max
  Clone ID: PAT_MRT3847_43027C.1
aattttggggggggggggggggaaagtgcaacacagggggcgccacacacatctataatcaaataatgttaattttcttttacaaacacgaggcacaacactttttatgatttagatgtggcaagcaacaacaaacggggaaccttaaaatcctgttcaggaatgcggggggggggatattttcttaggtcactaggaacctatgactgctttattttaggggacaactggacaagtgctctactatctgagctcaggactggactcatctc

SEQ ID NO: 79749 - DNA, 418 bp, Glycine max
  Clone ID: PAT_MRT3847_43028C.1
ctcgagccgattcggctcgagagcctctctgtcattttcacctcactgttctctatctctgcacgaacgacacgattgaacccttaaacgagaatggcgtggggacagtgccgttgctgcgtttggtgactgatgatgctgcgcgtcgtcgtcgtggacggaggtcgcatggggtggaatctggtgcggccgtgtgcattgtgatcaatcaatcataatgaggaaagaggattgtttgattttgtgattgaaatcgaaagagaaagaaagagagaaatttgttgtgatggctgaattagtggcccgaacaggtcgacatcagcagcgatacgaacacggttatcgccttattgccgggttcgtgtgcttcactttttttttctttttgaattaactttgcttttagtttttgaaaaat

SEQ ID NO: 79750 - DNA, 247 bp, Glycine max
  unsure (1)..(247): unsure at all n locations
  Clone ID: PAT_MRT3847_43029C.1
aatggcattaaacataacctccatcaaaacatcctccaacggcttatggcaaggagacaaccccttagacttcgccttccctctcctcattctccaaatcaccttaatcatcctcctctcccgctctctcgccttcctcctcaaacctatccgacaacctanagtcatcgcccaaattatagtaagttcaatcaaatacaacttgtttcagtctttataaaataacttgggcatttttttatttatg

SEQ ID NO: 79751 - DNA, 717 bp, Glycine max
  unsure (1)..(717): unsure at all n locations
  Clone ID: PAT_MRT3847_4302C.1
gtgcctttgtctctgtttgtagaagatgggtgttttctggatgctggctgttatgaaggtgctattttgatcgaatctgaattataaattcatcaccaatgggttacagatgcattcagtgttggtgtcctgtcaaaacactttacgtgcagtattctcctggcaacattcgcttgatgaaatgtgagaattgcaaggctgttgcagacgaatacatagaatgtgaaatcatgatacttgtaatagatttgatacttcacaagcccaaggcctatagacatctcctccacaatgtcatcaatcaagaaacaatgaagtttcatggactactctggaaattggctgtcatttttcttctttttgaatcttgtatgcattcttttgtagatgttatccttttttaatgctttagatgtttgatcttggaaagcagcaagggaaaattgggttcctctaatagcgtctcttcattagtatcaatatgctggaaggtgctgatggatgttataattgggaaatttgatgtttcttttaactttcttctttantggtaagatgtttttccatgtatcgatcaccatctccaggtgcattgaccttttgcttacactcatgatttcaagttacttcaagatttttcttattgccatgatggtctgggactttccatcttctgtgatcttcatcattgaattattttgtttatcatctaatgct

SEQ ID NO: 79752 - DNA, 245 bp, Glycine max
  Clone ID: PAT_MRT3847_43030C.1
cccactcgtccgatccgtacacctcaacatccgtgaattgcatgcaatatgaaactgcatcacgtcatgcttcacgaacaacaggatgatcaaattccacgaccagtctttcctaccatcgaatcagattgctcaagaagcactctccacgatacacaaacacctaactacttaaccatatacagcatctatgagacaagtactatcctacgttcttatgcaacgtaagaataccctatttttac

SEQ ID NO: 79753 - DNA, 1681 bp, Glycine max
  Clone ID: PAT_MRT3847_43031C.1
caaacgtaagctcgttattcgttcctacctcgagccgctcgagccgtccagcctcaggcacattagttcaagccttcaagcacaaaaatgataaccattgttgcttcttacaatgtcactccaaatcagccaactcccagtgatcctatttggctatccgatagtgatcaaattgggcacctacgtcatgtaaacactatctatgcctacaaatcaagacccaacaacaccattgatattgagaggatgaagaactctcttagcaagattttggtgccatactatccaatagctggcagattgaagctgacaaaaaatggtagaatggaagtggattgcaatgcaaaaggagtgacattgattgaagctgaaagcacagccacatttggtgattatggagactttgcaccttccgattccaccatggaacttgttccaaaagttgattatactcgaccctcagaggacatgccgctaatgctagtgcagttaacaaggttctgtggtggtgaaggtcttgccattggagttgctttctctcatcctttggttgatggtactgccgctattttcttcatcaaccgatgggcaaagctggttcgaggcgaagaactggatcccaatgaagttccttttcttgatcgaacactactcaaatttccagagccatcagaaccatgtgttgatctcccagagtggaagcctgtaaggttcatgccagacaacattgctgagcaaaacaagataagtgctatattgttgaaactctcatcaagccaagtggagaagctgaagaagaaggctaatgaacaaccttcaaaagaaggggtaagaccttatagcagatttgaagctatttcttctcatatatggagatgtgcatctaaggctcatcacgctcatgcatctgatgagaatcaccaaccaactgtagttatgtttagtgttgatattcgcagtagattgaatccacctctccctcataattattttgggaatgctttggcaaaaacagtgacacctaagtgtagtgtgggagatatcttattaaacccattaagctatggggctcaaaagataagggatgcggtttatgcggttacatatgagtatataaggtcacacataagttatgttttagggcaagagcaattggataacataagggcttttttctcgggacaaggagacattattaatgaaccctattctgggaatcctcataacattctcatcacaagctggatgagcttgccagtgtatgatgcagattttggttggggaaagcctgtgcactttggtttagcaaaagtatttcgagaagttagggcacatattattataagccctgatggagatggtgttcttatttccatgaatttcctgacagcacttatggatctttttaaaaaattcttctacgaggatatatgaagaaatatccataccaaaccagctttgtgcaaggaagaattacatgtgactcgtcattttctgtgatcaataatttacatgtgatttaccgtttaatatgttaaataattaaagatcctgtttttattacgagatttattttcttttatttttcatggtggtatatttgagtgtataatctttgtttaaaaaaatctgtacatttaaattataaaatttatctaaggattgtgaaaattatgataaa

SEQ ID NO: 79754 - DNA, 1117 bp, Glycine max
  Clone ID: PAT_MRT3847_43032C.1
ccacgcgtccgcaccactcggtaactgcactttcatttcctacatacctgtgttgagtgtgtttttcagcttttctctttcattacaaatttggactttttttttccccttcctctggggtgtagtttatgatagcattaacagtgttttgactcgagttcctgtgggagggtgtaagtacattttggcttgggttattgagtttttttgttttctttctcctctcgtgatgtttcttcccattttttctctaaaaggacgagccatcgttttctgcttagtgctactgtgtgttttgaagaaggaaaatatggggactcatgcacgtgcttctgatgtaaaaccatgatactgctctctggtttttcggtatttgttcaagtcaagagttgtgtgtgtgcttatattgtcaccttggttgttctgtgttcaacagcacttgattactattgcagaaagtgtgggtcaggggctttgaaggagaggttctttagcttacccttcctatcaactcagatattattaaagtatgcagacaccaaaagcaagaactggtacttcagaagtgccccaaaggaagtctcctgcatctcctcagaatgctcgcaaattgaagacaccaggctctgataccgactcagtctcatcatctccaaaaccaggaagtaagacgccaaaaaatagaagtcctaaggtcacagaacgcaagtcaccaagaagtccaatatctgagaagaagcgaccaggtagggttcaagaattggagtctcaacttgctcaacttgaagaagatctaaagagaactaaagaccaactcaactcatctgagtcatggaagaggaaagctcagcaggaggctgaagaagcaaataagcagcttttagcggtatcgaaagagctggaggaatcccagcaacagcttctggaactatctgcttctgaagaggaacggcttcaagaactccgtaagatttctcaggaccgagatcgagcatggcagtctgagcttgaggctgtccagaagcagcactcaatggattcaactgctctagtgtctgccatgaatgaaatacagaaactgaaaattcaacttgaaagagtgcgtgaatctgaagct

SEQ ID NO: 79755 - DNA, 238 bp, Glycine max
  Clone ID: PAT_MRT3847_43033C.1
cggtacttattgacagcaccataacatatcaaaagtgaaaacagctattgtgtgtgccacccaaaggatggaaaggtgatgatatatgattcttgacagataaaattagaagaataccatagtcatcataactcaaaagggatgcttttaagtattcattctttctgatcacaagtttgccaaaagattcgaaagataacatccatattatagaccaaaatgatcttacttacaaact

SEQ ID NO: 79756 - DNA, 353 bp, Glycine max
  Clone ID: PAT_MRT3847_43034C.1
tactgactacattactatgggggctgctgctcctgctggagccgccgctccaataattgcctggacccaccagtccttcgagcagactacagataggggagtgatatgacgaccttaaagcctagaccgttcttccttcttgattcttcagctttgcaagctatcatcaatggctatactgaactaaggatcagataatgactcgatgtccagtctgctgatggaatcacacatgtcccgtgaggaatccatgcttaataacatactatgcatgtcgacaagaccgctctacattgataggccttaaatatggatttgatgaccaatctttaaaggatccattcccatgcttt

SEQ ID NO: 79757 - DNA, 338 bp, Glycine max
  Clone ID: PAT_MRT3847_43035C.1
ccacgcgttcagattggaagcgaggtggtcttggtgggcgtttatgcccaagaacatcatatcagcactgggaaccttttttttctttttcaccctgatattactgtttctcactgcaccagatgaggaagcccaatggcgtgggctctattgtggaatcaactacgggcagatagccaacaaccttgcatctgcatctagcggggctgatctaataaaatgtctgaatgaatccagaatcacactctatgatgctgagccaacagttctatctgcattctgcactatagatgggtcattcatgatacgagtcgggaacgagtatcacactagcatgt

SEQ ID NO: 79758 - DNA, 535 bp, Glycine max
  Clone ID: PAT_MRT3847_43036C.1
ttcttttttttttttttttttttttttccaaacggacaaaaggctgtgattgccacggcatgtctaacaactgataaaagggggagcccttcgctggctcgaaaaatctcccacatttacgaatgcttcgtaataactcttctggttcaagcttgagttatgggttctcattttgcccaggttatgcttaactattcggccgtaatacaaatacatcaaatgtccaattttccttcaaatgctatgtgatcattgcgtaaccttttgttctccctcctgagccttgggttcgttttgaacgcccttccagccaggttccgcttgtacaacgcaccatgataaaggcgagaccaccagcagctaaaaacaatcctctcaaagcgtcttcgtacccagcaatggctttagctttacttcgctcctttcaacagactgaccatagctggactgcccaagagacggcgaacaaggtcaccgtggctgtcgtctaacgtttcctccaaagacttcctgaaatacgggtgaacagaccacc

SEQ ID NO: 79759 - DNA, 217 bp, Glycine max
  Clone ID: PAT_MRT3847_43037C.1
tgggcgtggaaaggggggcaagggtttgggaaatggatgagcgaagcgacaccgtaaggtgtggctcgataacattcagggaatcacctggcctgcaattcagcgattggctcgcaggggtggagtgaagcgtatcattggtctcatctacgaggagacacgtcgcgagctcaggatcgaattggagaacacgattcgtgacgaccgtaccaacaca

SEQ ID NO: 79760 - DNA, 263 bp, Glycine max
  Clone ID: PAT_MRT3847_43038C.1
ctttttcaacaaacctatactctttatttaaatacgacggcagccacggcaaccacggccctttattaaaaccgggaaccctcattcttcaacggaaagcccgtcacatattcttcccaagacacgcccaccaccaaattatcctcatccaaacatagcacaaaatccatgcccccaaccccaccccccttctacctccaaaccttcaaaattcaccccttcaaagaatccatcatttcacgggacaacgacccgcccccaac

SEQ ID NO: 79761 - DNA, 230 bp, Glycine max
  Clone ID: PAT_MRT3847_43039C.1
tttactcttacgaataaatacaagtgcggtctaaccaggcttcagtaactgaggtgcatacgttaagtactagctagctgttaaagacgacgcccgagcacatggacgaaacagtacaaaaatggctaggggggccccaagaccccgaggggactatcataggaacgccgaagacgtgaaacaagtctttgcttgaaaaacataaacccctagggtgctaggcattagga

SEQ ID NO: 79762 - DNA, 299 bp, Glycine max
  Clone ID: PAT_MRT3847_4303C.1
tttttttttttttttggatagtgggaagcaacgaatatcgaataacatacaagttaccacatggtctcgtctttcttctgactttcctattcttctttttgtgtggtgctcggctacttggacattaattaatctatcatacttcttacatgttttagattttttttataaaaaaaatataagcgttaaccacaagtgatttttttggacttaaaataaaagaattcatgataaaataatttatttaagttttgaaatgatttagatattatgaagtatatttcaaaaccttctcgtgc

SEQ ID NO: 79763 - DNA, 298 bp, Glycine max
  Clone ID: PAT_MRT3847_43040C.1
ctccccttctttccctttcttgtcttttctgccctttcacctgtcttctcttctagtcctttccagcatacaaatttaactgaattttcatcccattctctttttctcacacattctcattctcatggatgacctttccactcccaaacaccgtcttctaactctcctcaactccctcaaagaagcttccaaaaggccttaaaccaacaacaaaccccttttccttcacattagaaaccctttacacgccccgatatagactctcttctagacctcaacgcaaaagcccacgccaccc

SEQ ID NO: 79764 - DNA, 2134 bp, Glycine max
  unsure (1)..(2134): unsure at all n locations
  Clone ID: PAT_MRT3847_43041C.1
attctagaatcaaccaaacacaacacttcactctcaagcttcaagcatgactcctttttacttcctcctatttgccttcatccttttcctctccataaacttcttgatccaaacaagaaggttcaaaaaccttcctccgggaccattttctttccctataatcggaaacctccaccaactcaagcaacccctccaccgcacgttccatgccttatcacaaaaatatggccctattttctccctctggttcggctcccgttttgtcgtcgtcgtttcgtcgccgctcgcggtgcaagaatgcttcaccaagaacgacatcgtcttggccaaccgccctcacttcctcaccggcaagtatatagggtacaacaacaccaccgtcgccgtttccccctacggcgaccactggcgcaacctccgccgcatcatggcgctcgaggttctctccacccaccggataaactccttcttggaaaatcggagggacgagatcatgaggctcgtgcaaaagcttgctcgggactcgcgcaatggcttcaccaaagtagaacttaaatccaggttttcggagatgacatttaacactataatgaggatggtgtcagggaagaggtactatggtgaagactgtgatgtgagtgatgtacaggaagcaaggcaatttagagagatcattaaagagttggtgacgttaggaggggctaataaccctggggacttcttggctttgcttaggtggtttgattttgatggtttggagaagagactaaagaggattagtaagagaaccgatgcgtttttacaaggactcattgatcagcatcgtaatggaaagcatcgtgccaatactatgatagatcatcttcttgctcaacagcaatcacaacctgaatattacaccgatcaaatcatcaaaggacttgccctggtaatgctacttgcaggaacagatacatcagcagtaactttagaatgggcaatgtctaatttattaaaccatccagaaatattaaagaaggcaaaaaatgaattagacactcatataggacaagatcgtctagtagatgagcctgacattccaaaactcccttaccttcaaagcattgtttatgagacacttcgtttgcatcctgctgctccaatgttggtaccccatttgtcttcagaagattgcaccataggagaatataatatcccacaaaacacaattttgttggtgaatgcttgggccattcatagagatcccaagttgtggagtgacccaacacactttaagcctgagaggtttgagaatgaaagtgaagcaaacaagttacttccatttgggttagggaggagggcttgccctggagctaacttggctcaacgcacactgagcttaactctggccttattaatccaatgttttgagtggaaaaggactactaaaaaagaaattgatatgactgaaggaaagggacttactgtgtcaaaaaaatatcccttagaagctatgtgccaagtgtgccaatcactgacagttaaggatatttataacttctagtgctgttaaaagcataaacatcttataatgtttttgaagaacttatatatgtaaaataaaatttatagtagtgctttatttattcaatgttttgagtggaaacgaactagtaaggaagaaattgatatgactgaaggaaaagggatcactgtgccaaggaaatttcctttagaagctatgtgccaagtgtgtcaatcaccaacaatttaaggatattttgtagctagtgttgttaaagcacacacatgttgtagtgttcgaagaagatataaaaaggtataaataaaacaaaattaataatacttgtgttaaaataaaacataggatcaagcttattcttcaaaagtacttacacttttaattttttttcctgcattttttgcttttaagttatctataaattttcttattagttatactgaaaagagaagaaaggaagagaattgtgtgaaaatatagtgtgcatgtgtgttcggttgagaagaagtttgtggaattttgagttttaatatgggcncggtctcatacctcttattntttacctaccaaatcacttttattaattcaatatttccaatatatttcactccc

SEQ ID NO: 79765 - DNA, 430 bp, Glycine max
  Clone ID: PAT_MRT3847_43042C.1
ctcgagccgaatcggctcgagggctgtggtgtgtggactgcgttttcctctctctgttctcttgtttgctacgctgagcactggccttttccgcaaaagggtcgcacccggtttccctgtggaacagtgaagatggtttcttttttatttttctaattgatatgttgtgggatttggtgactccttctagtgggtttctttctttgatcttcccaatggtggtggaggtgggtgcatttgttgttgttgtgtataataaagtaatggactttgctggtggagccttttgatttgatgctcaacaaactactacaggagatttggttcatgtgttgttgctattgacgtatcttcaacaaacaaggctttggtctttccagggtaagggtaaagatctgatgaaggtggaatatctgattgcattaatggc

SEQ ID NO: 79766 - DNA, 381 bp, Glycine max
  unsure (1)..(381): unsure at all n locations
  Clone ID: PAT_MRT3847_43043C.1
ggnnaatgggtgtatgtggtttatgggggnttgttttatggggcnnggggttgggttttnntggcttttttgaaaaaaaaaggtttaaaggtttttttttcccggaggcccttgtcattgtttgggaacccacttaaacccaaggggttgtccaacagggaaagggggttttttttgagcggactcaaacaaaagaaactttcctttttgggggggtccccgggggaacacaagagcaaaaggggtttttttggtaaaaaccacgggggggggattcaacttttttcagaggggggggtgttttttaacagggaggtttggggcttaaaaaaaattgccgggcttttgaaaggggctaattttttttcccccccttttttt

SEQ ID NO: 79767 - DNA, 349 bp, Glycine max
  Clone ID: PAT_MRT3847_43044C.1
cctctagctgaattgtcgaggagctggaagttctactgagacagttgggtattgcccgtgaatcaacctggctttagcactatttcaatgttacaggtgggatttggaaacgcctggggctgctgtattatatcctgacagagaagacttcagatggcttgtctttggtattaagcgaacaataacacagaacctctttttactcacagtgcatatgttccaaggatgttgggacttctatgagaattcaatctttttatagctttgttgtgtctgattcgaccagatgttatactactggggtgcaaatccgatggctgttatactttattgaagactgtgcgtttga

SEQ ID NO: 79768 - DNA, 498 bp, Glycine max
  Clone ID: PAT_MRT3847_43045C.1
aaagagaattcgtcatcggcgatgagttcggaggagttaagccctcgccggccggcgattggagatgacgtggcactgtctggttttgcttcaaagctaaggccaatcaatattccatggagatggaactcatccactgtgatgcctgaggctgaggaatacccaagtaaacttggggtgcctctttttgcatgcaaggaccagtcatttgaaattcagcatcaggacaatgaatacaaggaaaacttcagaagcccccatttaggatcctcaagaagagtctcatccccagaaaccattagtctcgaatccaattcatatcaaagcatcaaagtgttcactgatgactgggagctcaattccccattttctgatgtctcttccctttatcaagaacctggggcaaaattttcagtgcatgatcgtgtgctttcagaacaaattatagaaggtgatgatgacgacgacgacgatgatgaaattatgagctcctatgtc

SEQ ID NO: 79769 - DNA, 526 bp, Glycine max
  Clone ID: PAT_MRT3847_43046C.1
ccacgcgtccgttacaaggaataatcttcatccatcctctcttcatgttatctctctaaggaaaagagaagagcttgaatcattttgggttttgaagagtaaagataggtgggaaaagttccactaggaggtactttgcccttgaaagaggattacttcccttacttgatctctattcttatcaactggtccgacctgttatagctgaccatgtgacgctcaaagccaccactaataggttggaggaggccatttcccacctatccctccaccacacttagctcgacagcaaggtcgattccatcctcgaccgcctcaacatcctaccaacaccaattctgcttctatttctagctctcataccatccaatgcatcctcgaccgcctcaacatcctaccaacaccaattgaagacagatttgaatatggatgcagagttgaagcagcagtagcaagatcaagttcgcctggacttttggggtaaatagtccaatcatctcttttacaagatatcaaaatgctttga

SEQ ID NO: 79770 - DNA, 247 bp, Glycine max
  Clone ID: PAT_MRT3847_43047C.1
ccccttttggagaattgtagacgctggacttggcaatgtaaacctcactggttgctgaaacttgacatataatatactttcagccttggccagactacctggtggaaccctctaagtactatatcttgatggatgctggaaaattactgatgcaaacttggttgcaattgcgaacaactgcctactgcttactgatctagatgtgtcatagcgtgctctcaccgatgccggagcacctgttctctca

SEQ ID NO: 79771 - DNA, 137 bp, Glycine max
  Clone ID: PAT_MRT3847_43048C.1
ctcaattcgacttcagccgagatatgaatcacattcttggggtcaataccgagcacctttgcacgactgatttgacgtctcttaatggacgggaggggaataccacgttttcgactcccgttaacctcatactgtac

SEQ ID NO: 79772 - DNA, 376 bp, Glycine max
  Clone ID: PAT_MRT3847_43049C.1
cacaccaacaaaacaccatgtaaatctactttattttcctattcattcttttttcctactggacacatttcatcatcaacaaatttaacccttttcctaatatttaaaactgccgaaaaattaaagaatcccacacctaaaacgtggcctgagttaacgaggttgtctctattcctggaagcaccacctcggtaccgattccgagcaaaccccgccgaatcgtaaaactcgaaaatctcataaccatctccatctcccacatttttcaacatgatgcaaaacctttgtccccttatcccttgccctctccgtacccgtttcctcaatctccttcaaaaccttcgaaaatcatcacttctttagccaaaccctcgaa

SEQ ID NO: 79773 - DNA, 760 bp, Glycine max
  unsure (1)..(760): unsure at all n locations
  Clone ID: PAT_MRT3847_4304C.1
ccacgcgtccgcagaagttgggtttttcttccgcttcgctatctatgacacaatttgaattcattgcttctcatatgattgtgtttatttgagaagttaggcgtttcctggatgctggcagttatgaaggagctattttgattgaatctgaattataaattcatcaccaatgggttacagatgcattcagtgtgggtgtcctgtcaaaacactttacgtgcagtattctccaggcaacattcgcttgatgaaatgtgagaattgcaaggctgtggcagacgaatacattgaatgtgaaatcatgattcttgcgatagatttgatacttcacaagcccaaggcctatagacatctccttcacaatgtcatcaatcaagaaacaatgaagttccagacagatgtttgatcttggaaagcagcaagggaaaattggattcatcaatgagtgtctctccatcagtatcaatatgctggaaggtgctgatggatgttttatttgggaacttgatgtttcttttaactttcttctttatggttatgatgcttttccatgtatcaatcaccatcaccaggtgcattgaccttttgcttgcactcatgatttcaagttacttcaagattttttttattgccatgatggtaatatttacaatgaagaaatctaagttggttcttttagttttactgttgatcacgtccggtgcctgtcttaatgtctgngatgttaaatccaatacatatctataactttataaaggat

SEQ ID NO: 79774 - DNA, 559 bp, Glycine max
  Clone ID: PAT_MRT3847_43050C.1
aacggctgcgagaagacgacagaagggatcaaccgagttggtgagagtccaaaagtaaatgcaagagcttgttctgttatacgcccacgtgcagtcttatctagtcccgaaaatgatggattaattggaagcataaatgacttgaaccacagtgtatcttcagctcacagaaagaataatgcaaaagtgaagatagaaggccaagctaaagttttgtctattcaggtgaaggaaggaaaatattcggacaaggaggaatgtgaggcattcaacaaaggcagaactccttccaaagtgcatgttagaaacttttaatatttaagaggccatgcttgaaagaagagacatcaaagaaggttcattgagtcgggcttttatgattacaatttgaaataggaaattcttatgagagtgaagttttggccgatcatacatgccagtgcttctttagagtgttctgtattttttaaaaatctgaccatttgtaattttgtgtgaattgacaatatcttaacgagtttaattattttcaacaggaaacactagttgtttctcttcc

SEQ ID NO: 79775 - DNA, 283 bp, Glycine max
  Clone ID: PAT_MRT3847_43051C.1
gatccacgcgttcgctttcatacacaaaaactatgtaccagaagaaatattctcatttcatcaagagtattagtaacacacatttcctgatccatgggatctttccggcgaatgttgttgaatgtcataatcctcgtgagacagcggggtatgcgtgaacatcattgatgactctggatgggaactcgatatatagtggtcattataacgtggccatgcgtacgtattatattacttgggaggtacaattcgatgatgagctgttgacattgggataagacat

SEQ ID NO: 79776 - DNA, 824 bp, Glycine max
  Clone ID: PAT_MRT3847_43052C.1
aattcggctcgagatctcattaacttgagtagagatctgttgtagacctgtagtttactagtgaaaaagtgaaagatgggttcgaagatagcaatagtttctatgctggccatgctccttttgatctcctcggaggtgttagagttagctactgcgggtggtgggggcaaccttggtgttggtggtggattatcaggtgctggtcgtggtggctcccctcgtggtcgtggaggcttccctggtggtggtagttttcctgctggtgatggtgctggtggcttccctcgtgttggcggtggcttccctggtggtggtggaggcttccctggtggtggtggtggtggaggtggaggcttccctggtgggggtggaggcttccaaggtggcggtggaggcttccctggtattggtggaggcttctcgggtgttggtggaagcttccccggtggtggtggaggcttcccgggagttggtggaagcttcttcggtggcggtggaggcttccccggtgttggtggaggcttccccggtgttggtggcggaggcggcttccccggtgttgttggcggaggcttccctggtggaggtggcttcccaggtcaacgaggttaagagtaaagaatgagcccctgcacgtagttctacctagtttctacctagttataatatatttcatgaataaactcgtgttgtgagaggcatggatatagtcaacaaagaggcctgtcttttctctaacctttcttaattatcactagagttatttcccagtaagaaaatgttgaataaaattatgatatatgtgcaaagttatcgtttttcct

SEQ ID NO: 79777 - DNA, 331 bp, Glycine max
  Clone ID: PAT_MRT3847_43053C.1
ggctcgagagaacattaaaatggaattaaacagaataaaaggaaacagaattcgacattaaggttaatgggctacgacaagaccttctctactgaccgagactgttgacttgacattcaagttaagcatgcatgggtttggacatcagcaatttgttgggcgaatataccgaatatgcgcaagttaacagatacctaactgaaaccatgctatcggaccaaatcaacagccataacgccgttacagtacttgcccttgacgacgccagaatggcttacctctacggtatgtcgcacgacgccgttaaggccatacttagcacccatgtgct

SEQ ID NO: 79778 - DNA, 285 bp, Glycine max
  Clone ID: PAT_MRT3847_43054C.1
agaaaatactttctttttataaacccataattcaatggcgcgctttctgagcggggtaccttcaacaccgtatctgcatccatctccaccaccatcaccacctttctctctcttttacaaaacccatcaatacctaaaacttagaactatcgagtgatctacttaacaatcacatcctatatcttcattattgagactcaataacagcgaaatgattattcactcctaaactcattaagtataccactgccgccacaacatgcctcagaactacaactgcaatcg

SEQ ID NO: 79779 - DNA, 316 bp, Glycine max
  Clone ID: PAT_MRT3847_43055C.1
cccaggggcataagaaaatatagtccctctggatttttatacatggtaaagaccttttttccatcagttttttcacatttttatttttgtcccccaacttagaactcaccaaactaagcactttaaaggcaaaaccaaaatttttattgggccacgaaagaaagacaaaattttgttcccacttcccaccggcaactaaaaaaaccccctagtgaggttggtaattgcattccctttccctttgggggggaaaatccggggcttccaacccttactttattggaaactcaagggggggtattccaaaacccccctt

SEQ ID NO: 79780 - DNA, 855 bp, Glycine max
  Clone ID: PAT_MRT3847_43056C.1
tttttgccgacaggtccgggtaatctttgaaatttcatcgtttgacctcgtgaattggctcatgaatagaccggagtggaagatcatgaacgggagagaccattttctcgttgccggtaggatcacttgggattttcggagactcactgaagaagaatcggattgggggaacaagcttttgtttttacctgctgcgaagaacatgtcgatgcttgtggtggagtcgagtccgtggaacgcgaacgatttcgggattccgtatccgacttattttcatctctgccaaggatgatgatgtgtttatctggcaggagaggatgatgaggttggagaggaagtggctgtttttgtttgctggagctccgagaccggataacctgaaatcgataaggggccagattattgagcagtgtaggagatccaaggttgggaagctgttggagtgtgattttggggagagtaagtgtcattcccgtagtgtgtataatgcacatgtttcaacgggtcgcttttttgtcttcagccctcaaggggattcgtatctagaagatctgttttgattcaatgctggctgggtgtatacctgtgttcttccatccgggttcggcgtacacccagtatacatggcatcttcctaagaattataccaagtactcggtgttcattccggaggatgatcttaggaagaggaatgttagtatagaagagaggctgagtcagattcctgaggaggaagttaggatcatgagggaggaggtcattggtttgatccctagattggtgtacgcaaatcctcgatccaaacttgagactcttgatgatgcatttgatgttttcgtgcaagctgtgattgac

SEQ ID NO: 79781 - DNA, 662 bp, Glycine max
  Clone ID: PAT_MRT3847_43057C.1
ccacgcgtccgctccgcatgttaatttgagttgggttttgagtatttatcttcctttacttatttgaaatgtcttgcttattcatgttccctttgagacatttagttttgacttttgatagttattgattagttttgcttatttatttattgactttagcttatgtgtataatcaattaaactaaccagctaggtacaagtaggtctcgtatgatttgattttcatgtgattcgtatgaatgaatggtttctggtcttgtataagactttcctaataaatatgtgtctttgcttatctattacttcgttgtgtttctaggcataaaccataaacgaatcttgtgctttttccgtgggtttgagatggatgagaatgatgatgatgaaggaaaactatgtgatagatctctctcttcaagaatcaaaggaaaattagattaattgtgacgatgatgatcagagaggaaaagggtgtgaagcctgttctactaaaatttggtttggctttggctctttcatttgctggatttatctactcacgcctcagaaccagaagaatcaagccctccaagtcacgcaaggggtgttctttcagtcatgattcggaagttacttttataggatctataggtgcagcattaagtacttgcaatgccatttca

SEQ ID NO: 79782 - DNA, 2354 bp, Glycine max
  Clone ID: PAT_MRT3847_43058C.1
gaaaaaaaaaattgtaacaaatatcattttccaagttaaaaaatgttgtacagtggcaatatgaactaagataatattgaagtatgccaatgattgaaaatgcattcttatttggggtatgcctatcactgaaaatgcattcttatttaatacacggttggtgtatgaactagacctaacggctaatttacattgtctactgtactacctatatttctaatgcatgatattcacagttcaaaagggtaaaatctttgcatattgataataagttacaataaactaactacatgatgctgatcttctacatctttcatgtgtagcactcacactagaatcttttaaagcttctgcatatttctccaaattatttttttccaagcctaaggaatctgagaaggaaccttttttacatgcactgaatttatttgagcttcccacaacaatgctatctgaatttctcctatcaccttccttcacactcgtcaaactagagaaatcaagggaggttctagaggtgccaatgggggttgcaaactcactcctaagaccctcagttctggttgatgtgctcaaatgaggaggattgctatcttgatatccagatttttcttgtgatgaagcatgactatggtgatgactactacctttaccttgtatcagttgcctgagcttgccaaaaagtttggtcgggtttgtgttagttctggcagcagatgaattatcagcagaagaaaaatcatcacactctccgaagtcagtgatagaagaagcctgtgaggaggaccattggtctatatcaaagtccacaatgttccctggtccattagcatttgcatattcaagtataagctgcttggctttcttctcagacatagggcttaagcttctgcttaagtcctttgcaactgttttaccaggtggggcttgataatttcttagttcatatcgcaagcaagcatttatccaccgcagatataccaattcttcaagatctgaacatcgatcagactgaaattgctcaatttccttcatcaagcgcacattttcttgtttaagacactcactttcttgcttcacagcacctgcctctgggtcttccagaaatgcatttgcaaggatctgggtagaatccaatcttcgagctaagtcagaattttctatctgcaatcttaaattagatttcctcaactcttctgcttcagactcaagatacttttgcttttgcatcgttatttgaatatctggatcacaagcaacatctttacattcttggtcttgcaacctggaaactttctgcttaagagttatgatctgctccctattatgttcagcttcgtgcctaattttcttattgagcaatttgacttgcgcttttgcagtctccagctcagccagcacttttgcatgaccagcaacctgttccttcaatctccaattctcagactgtaaggtcttaacctttagattgaagatctttacctccatggtacttgctttcaatctattttggagctctatcactgctgtttcttgctctctaagacgacagtactcaagcagttgaacctcaagacttcgccccctgtcttgaagcattctaatcatgctcctgagttgacttatctcttgctcatagtcgtccttctcgggactagcatatgctatagaagatcctacttttaaccatggtgcttccatatcttctttaaaagaatttctgacaatgatggctccaaagtccatgtccttaacaagatcattaaattcaggtaggaggaactcatctttatctcccttttgtgtactgtcagaagagagagcaatacgagattcatcacttatcaccctgttgatgcatgcttcttcttgtgccacaaaagaagaacatagaaaatttccctctgaaatggcattgcaagtacttaatgctgaccctatacctcctcctaaattatcttcattctcatgactgaaagaacaccccttgcgtgacttggagggcttgattcttctggttctgaggcgtgagtagataaatccagcaaatgaaagagccaaagccaaaccaaattttagtagaacaggcttcacacccttttcctctctgatcatcatcgtcacaattaatctaattttcctttgattcttgaagagagagatctatcacatagttatccttcatcatcatcgttctcatccatctcaaacccacggaaaacccccaggattcgttaatggtttaatcttaaataggattgacgttgtcttttggttaatagctagggtagcgttttaggtcgtcccggacgcgtgagagtacgcgtgggcggacgcttcaagccccgcgtggg

SEQ ID NO: 79783 - DNA, 1791 bp, Glycine max
  Clone ID: PAT_MRT3847_43059C.1
cggccgctcgagccggcgggcgtgactcttcgatcattcggctcgcagcaccttagtaccttgaatcattatcattcgggtaatggacacatcactagtgtttactgtgaggaggagtgaggcagagctgatagctccggcgaagcccacccctcgtgaagtgaagctactctcagacatagatgaccaagatgggttacgtttccaaattccggtgatacagttctatcgccacgacccatcaatggcagggaaagaccctgtcgatgtgataagaaaggctgtggccaaaacgcttgtgttttactatccttttgcaggtaggcttagggaaggacttggtcggaaactgatggtggattgtactggggaaggtgttttgttcattgaggctgatgcagatgtcactcttaagcaatttggtgatgctcttcaacctcctttcccgtgctgggaggaactcctttatgatgtacctggttctcaaggagtgcttaacactccccttctgcttattcaggtaacgcggctcaagtgcgggggtttcatattagctgtccggctgaaccacacgatgagcgacgcagccggtctggttcagttcatgagcgcgctgggagaaatagctcgtgggaggcaggagccgtcgatcccaccggtgtggcgcagagagctcctgaacgcgcgggacccacctcgagtcacatgcacccaccgcgaatacgaacatgtccctgacaccaaaggcaccatcatccccttagaccacatggcccatcgctctttcttcttcggccccagtgaagtcgccgccatccgctccctcatcccccaaactgatcaacgctgctccaacttcgaggtcctcaccgcatgcctctggcgctgccgcaccattgcgctgcagcccgacaaagacgaggaggttcgcatcctctgcatagtcaacgctcgctccaagtttgaccctcctctgcctagcggttactacggcaacgcttttgccttccccgttgctgtcaccactgcggggaagctgtgcgataaccctttgggatacgctctcgagttggtgaggaaagccaaagcggatgtgactgaggaatacatgcactcggtggctgatttaatggtcaccaagggccggcctcacttcactgttgtgagatcgtatctcgtgtcggatgtgactcgtgctgggtttggaaacattgagtttgggtgggggaaggctgtttatggaggacccgccaagggaggggttggagccatacctggtgttgctagcttttacataccctttaagaatgctaaaggagaggaagggttggttataccggtttgtttgccttctgaagccatggagaggtttcagaaggagttggactgtgtgcttaaccaccacatcgtccaacctagtgccattgctccaaactctaggttcattgtttcttccttgtagatccagtacttttcgactttacttcgtgccaattaaggaatcaataattgagcatttgatgtcatcgagtacgtatatgtaatcaacaagccagtggcagcaagagaagaatcaaaattattattacctactcctccttgatcagtctataaatgtcgtgaattgtgaaaattttattggctttaaaagctatgtattcacatttaacagcgtttgtcaaccagaactgttcgcctgctcttcgtgccaatgaaggaatcaataattgagcatttgattcgtctctcgctgccactcgcctgtcgagtacatatacgtactcgctgaca

SEQ ID NO: 79784 - DNA, 1224 bp, Glycine max
  Clone ID: PAT_MRT3847_4305C.1
cacggctgcgagaagacgacagaagggggagttcagagttcagaactcagaagttgggtttttcttccgcttcgctatctatgacacaatttgaattcattgcttctcatatgattgtgtttatttgagaagttaggcgtttcctggatgctggcagttatgaaggagctattttgattgaatctgaattataaattcatcaccaatgggttacagatgcattcagtgtgggtgtcctgtcaaaacactttacgtgcagtattctccaggcaacattcgcttgatgaaatgtgagaattgcaaggctgtggcagacgaatacattgaatgtgaaatcatgattcttgcgatagatttgatacttcacaagcccaaggcctatagacatctccttcacaatgtcatcaatcaagaaacaatgaagttccagggactactctggaaattggctgtcattttccttttttttgaatattatcgtttgatcttggaaagcagcaagggaaaattgggttcatctaatagtgtctcttcattagtatcaatatgctggaaggtgctgatggatgttataattgggaattgatgtttcccacgcgttttaactttcttctttatggttaagatgtttttccatgtatcgatcaccatctccaggtgcattgaccttttgcttacactcatgatttcaagttacttcaagatttttcttattgccatgatggtctgggactttccatcttctgtgatcttcatcattgaattattttgtttatcatctaatgctgcggcattgaaagtgatgactgagtcaactatgcgtcgatgtgtttggacctgcttcagtgcatatgctataaaatttattgtcactcgaatactggagctcatattgttggggcaattaatgcaaggctggagtcaaatgccattcacattctctaaagccaccatgatttagtttagcattctcatgctaatgtattagaatttagaagcagaatttcgtggcaagtgtttctgaactgtatatatgctcattgacattttttaaatttctttaatttaatttgatgcttgaactcttctagcgtgctcgtggaacctgctgcgatgctgcttaattcatttcttgacaccttttttgccattatgtacccatcggaaaacatttagaagtatctgataaacaagttgttcctattaacttgcagcattttttcg

SEQ ID NO: 79785 - DNA, 646 bp, Glycine max
  Clone ID: PAT_MRT3847_43060C.1
gcatcctctgcatagtcaacgcgcgcgccaagtttgacccacttttaccaagtggttactacggcaacgcttttgcgttccccgctgcggtcaccactgcagggaagctgtgcgagaatcctttgggatacgctgtcgagttggtgagaaaagcgaaagcggacgtgactgaggaatacatgcactcggtggcgaatttaatggtggccaagggacggcctcacttcactgttgtgagatcctatgttgtgtcagatgtgactcgtgctgggtttggaaacgttgagtttgggtgggggaaggctgtttatggaggacccgccaagggaggggttggagccatacctggtgttgctagcttttacatacctttcaagaatgctaaaggagaggaagggttggttataccggtttgtttgccgtctgaggccatggagaggtttcagaaggagttgaacagtgtgcttaacaaccacatcgtccaacctagcatcattgtttcttccttgtagatcgattcaatactattccagtttttactttgtgccaattaaggaataaagaaataatttagcatttcattttgatgtgatcgagtacgtataattaattattaacaagccagtggtaccaagacaagagtgac

SEQ ID NO: 79786 - DNA, 436 bp, Glycine max
  Clone ID: PAT_MRT3847_43061C.1
aaggtttcccgtcatcactgtatgacgtcctccttctttgggggggggggggggggaactagttaaaaatagaggccaaaagtagataaggtcaggataaaactgctgtgggcgttaggatggcaaataaaagggataagtttagggacagacccgtgccggaggaaagttaccaaaagcacgtagaagtaaggccgtccgtgtgaaaagcgcgggctgcagcgaggccagcaggtaaataagagggtatacggagggaggagtatgcacaatttagtgaagtggagatagaattacaacgctgtggccgtacgcgaacacacgtgacatgcatggtaaacaactagtgtatgggcgcgacattcccggcatacaagttcgagggtgaagaatgtgcggcaagcttgggcagcaggagatgtagggtggtaaaggc

SEQ ID NO: 79787 - DNA, 307 bp, Glycine max
  Clone ID: PAT_MRT3847_43062C.1
ctcagacctatacttaaggttgacgctatacattgaaaagcgtttgcctcgtgccggcgtgtgctgctaataccgcacttgggttaagatcctatggacgccccacaaacttaaagtgttggttagtgccacttcacttgcattgacggtgagttgctgcagcatagatccagatgttctgggagtctataaatgatgccggaatatagaagaaaggcatgtgtttgatgcgatagcaggctattatgctagatagggatgtgagagacagctttgattcaagcatcactaaaaacttttgatggag

SEQ ID NO: 79788 - DNA, 269 bp, Glycine max
  Clone ID: PAT_MRT3847_43063C.1
actggaggggctattttgtaacaagattttatgtttcctaattaaaaaccttccgaatgagaaattataaacccaattaaaataaaaatctaccccctaacccaaagaaaacgcgagtggggaaacatggaactttgagggaaccaggcagcacccacatctcaatcaaaagggaaatgcgacagcttaactggaaaaaaaaaaaaacggttccccaatcagaaaaagcctaagatgctaaacccttcggggccgggggtggggccaaa

SEQ ID NO: 79789 - DNA, 282 bp, Glycine max
  Clone ID: PAT_MRT3847_43064C.1
acgttttcgcctgggtgaaggatctgttgaatttgggcaacatcgaccaaagcaagggttaattcttggaccgtcaggaactccactaacgaaaaaaagcacacgtcctcgattgggctcaatgaggacggaaacaggaatctcatttgcacaggagctgacaccattatatttgatcgacctgcacagactggaaaaatgtgtatggacactaccactcaacattagagtgcaattcgaaaagctggtttgagaactctagcccaggcctacaaaagattg

SEQ ID NO: 79790 - DNA, 313 bp, Glycine max
  Clone ID: PAT_MRT3847_43065C.1
taggtacggctgcgcgacacctacagagagggacaacacaattaattaatatcaatgagtttgatcaccaacatgctcgtgctgaacgtgtgtttgttgcttcctttccttgtgtgggatacacctgcatgcaactcaccttccttcttcatgattaactcagtcatcaagttatgagcatgatgagtattcccaaccatacatttctccctgcacatacacacatctcactccctcctccatgcttctgtgaccatagtaggcttaattcataccactcacattgtcctatctgtatgtacacacactcaca

SEQ ID NO: 79791 - DNA, 322 bp, Glycine max
  Clone ID: PAT_MRT3847_43066C.1
ccccctcacaagtttttttggggtagttcttttaaaccctggaccccttttaccggggaaaactaaattgggcaacggggggacactccccggggaaaaggggcccccccttttatttaccccccctgggaaaggcccaataaacattccaaatgggtgggggtccccccggggaagggcccctgtttaaagggccttttaagcctgcaagggcgccaattaattttttttgggggttccttttgcaggaaccgggcaaataggtggggccccagcggggacccccactggggcttaaggaactttaattgcggggtaaaaa

SEQ ID NO: 79792 - DNA, 250 bp, Glycine max
  Clone ID: PAT_MRT3847_43067C.1
gctttccacatgtctccgtattagtgatcatgagacacattattcccatcgctatatattatggctagcatgtaggttacatggagggatgtgatcatgtgcatggccgaggtgggagcaccgatgaatgcgcaagccatgatcatgcaatgatgtgacggtggacattgctcagagcctaacgtacctgatgcacgggcgtacaacggcaacactttgctgcagcgtagtcaataacattcttggctct

SEQ ID NO: 79793 - DNA, 261 bp, Glycine max
  Clone ID: PAT_MRT3847_43068C.1
ctacaattacaactaactttctttcttatcttctctataaacataggaggttcttcattaccaaagtgctccttctatccataaatatttacattgcttgagctctttaatacatttccaccaccaaaacatactttgatccacctttcaaatctggttctatgaagaaaaacattttatcttgtataactctactccactcatattctctaaattgttcatcttttaactatatcacattcacctaaacatattaaaata

SEQ ID NO: 79794 - DNA, 606 bp, Glycine max
  Clone ID: PAT_MRT3847_43069C.1
taaactttttaaagatgtaacatttttgtgtttgagtgactgaataacagtgtaaaagctttaattatgttatttgaatcttttttgttcttggtcaaaaatatgttcatacaagctccaattgcctcttgtatcttttaaagcgttcttccttttaattatgaatcgtcaaaatggttgagtttgagcaacttctacactttccagtttccaatatccatattatcaagcatgatcagttcaacgtccccatgtctgtgccagattggattgaaccaataatctcaacaacttaaaagatatttcaaaagaaattggaataaaatcaaacaaatcttacctgagagcccagtcatgttctttacagtgaagcctgtaaatttgttacaagttataggaatttttttcaaagttgaagaattttgatatctcaaataatctgatatggagtgtcaatatggatagaagcaggtcagaaggcgggacaaagggaaaaatcttctaaatcaggcttcgacttcagaaagaggttcttaacaagcacctagggagggagatggccaaacgacctttttctttacaaactttgcaccaaacttgtctgct

SEQ ID NO: 79795 - DNA, 468 bp, Glycine max
  Clone ID: PAT_MRT3847_4306C.1
cagaaactctccttccaagccggtgaacgccactcccttgtatgcaattcccctttccattccatctacttcctggactcctcatcattcttaaaattaataaaaagctattaactttctattattattattactattttttaaataattgttcttgaatgaatggaattgagctctggcaggagtccttgtgtttagggttaattggtgtgagctgtgtgtctgatttcaggaaaaactctatcagtgggtctggaggcaacaagagagtggatcaagagttgcaactgttgatatactcagctacattcaggttggtttcatgcttttggttattctctgtttttttatatcatcgtgtggtgaacattgcaacaaaattagagggagagaaagagagggtgaggacttatagctgtggaagttagtgacaagaaggtgtgcatatgtgtttctttgtgatgattt

SEQ ID NO: 79796 - DNA, 255 bp, Glycine max
  unsure (1)..(255): unsure at all n locations
  Clone ID: PAT_MRT3847_43070C.1
ctttctctttctctgtctgcttcttcactttctctcgtttcaatngaaaaaaatcatgggnagaaaattcttcgtgcggtggcaactggaaatgcaatgggaccanttangacgtgaanaagnttnttantactttaaatnnngntaaagtccctggagangatgttgtagnnnttgttgtgagccctcctttngtgtnccttcctnntgtaaaangtttnctgcgcncngatttccntgtctcggcccanaatt

SEQ ID NO: 79797 - DNA, 434 bp, Glycine max
  Clone ID: PAT_MRT3847_43071C.1
gaaattcggctcgagcatcgagctctatccgattccgctcgagtaatgattcacctactaatgaattgtttgagtcaaaaccagacacggtatttttttcgagaataacggggtccatcaatcatccttataccgtggaaagaatctctgaccttattatgcataagttatctactcaagatgctgatgatgttcaagcgtattgcgtgttgtggatcttattccatcaaatttttaagcttcaaccttctggcatgtcaatgattgtcgacaaatacctgctatcgaaagtattccatataagctgcctgaaatgcatccatcaatttgctggtcatgaatgcccacctggtacctgattatcaggacataatcaccctgtgattttgaatactgtccaacgcctgatctcagcacggtctaagaaagaattt

SEQ ID NO: 79798 - DNA, 327 bp, Glycine max
  Clone ID: PAT_MRT3847_43072C.1
ataattctcttgtatttatcatacttacatctgccttgaatacaattgcaattaaacggcaaagaaacattatcacagtctaagagagtttaaattcaagggacaatcacttacaatcctccaaaaaagagggaaatgtatgcaagctaggagtcatacacaatgctgacaaacgtcaccagtcaatatcccaggacaagtcacatgtatttgttcaaacaatgccacagtccacaagcacttacactggaagacacagtcaattggaccaacacttcacaaatcacactatatagaaattgggtatccaaaatttttccacctttc

SEQ ID NO: 79799 - DNA, 496 bp, Glycine max
  unsure (1)..(496): unsure at all n locations
  Clone ID: PAT_MRT3847_43073C.1
gtttcccgtcatcactgtatgacgatcctcgcttgctttgggcggggggtgggtgggagcggacaaccggagagcgccgaggcaagctagcatagctaacaaataccgaagggaaacatacaacgatatatgcgtgtataataaacagaagacagacgcaccagatacctatgtagaaaacgtagatgtaaacgacccaaaaggaattaaagtatactatagcaaattactagaattaaagatgagaacagagcgttggactgacacactaagtatagtaagtggttggttttaatacagcaccagcaagggtggcgacgttttgcacagggttggccttatgcgtagttgtaaccgcaatatgcgggtgtggagaagagtntgtgggcagcgtttgcacagttggtgtactttgcacattattatactccgtaacgtagttgtagtacggttaataggggggacagtcggctctacaattggggtagacgatggg

SEQ ID NO: 79800 - DNA, 274 bp, Glycine max
  Clone ID: PAT_MRT3847_43074C.1
caaaggactggatgttacagtatatagatggttagggaaagtctatgcatttggtcttgatgagcatcatgtgatctctgacgccttgagcacccttatatagcttctggctgacgtatgctcataggcattggactctgtggcaatgccggaatatacaaaacaaactcatcttgccactcaaattgcaagggtggccgctccatattagatgccctttgtgatctcgaccatacactagaagcacgaatatagattgactgctgtagatgac

SEQ ID NO: 79801 - DNA, 377 bp, Glycine max
  Clone ID: PAT_MRT3847_43075C.1
gcgaacgatctgtttaacggtcaaaaaagaattttatttggcggttccaaataccatctaaaatttagaatgagggcctgctcaagacgacaatcatagcactcaaatttttatagcgggcggggaatttaatacatacaaagagttacaaactatcatgggacgcttactgctgcttaactacaaaaaaggccttgtgccacaagcgaacgagggcacttgacaacatcccccagagcacccatcaagccgtagagagcaaaaccggacaaaaggccagtgcacacgccattctcaaccacatgccccaagttaacctgaaccgaaacatgaaccttagcggggaacaaaacacatgtgacagaacactgcctaag

SEQ ID NO: 79802 - DNA, 232 bp, Glycine max
  Clone ID: PAT_MRT3847_43076C.1
tttttttttttattttttcttattgaatttgattaatataaaaggggggttttatcaaaaagaaccccctgtcacaaaaccaattattttccataataacctccctcaaaaattcaattcataaatttcttaactaacaaaataaaaataacacaattctttttacaaaaaaaagcgcatcatactttttaatttcacccaccttcattattccccttttaatataatccat

SEQ ID NO: 79803 - DNA, 187 bp, Glycine max
  unsure (1)..(187): unsure at all n locations
  Clone ID: PAT_MRT3847_43077C.1
gttcgagacgggcgaggaagacgaacagaagggcggaaccaaaactccggggaacaggtacccgggttacgaacactcgcggtcttcagcccttcaggcttcgggatcctctgccctttgctctcacccagttttctaggcgcttctgaaatcaatgggccccatttccccaccgcagngacttgga

SEQ ID NO: 79804 - DNA, 326 bp, Glycine max
  Clone ID: PAT_MRT3847_43078C.1
cccacgcgtccgcccacgcgtccgcccacgcgtccgcccacgcgtccgcttcgagccgaggacagttggttgaagagctcagacaagtacttggctaagtgtgccgttacatctatacttttctctggcatttggaagcgatgtatgatgtcgataatcaagtgcctttttccttgttactgtagcagatgtagatacatggtaatgttgagggggagatttagaaagttttttagataatagctgactgggaattttatttctaatgtaaattgtttacttttcgtacataatttattccgtcttaatttattttagattttact

SEQ ID NO: 79805 - DNA, 172 bp, Glycine max
  unsure (1)..(172): unsure at all n locations
  Clone ID: PAT_MRT3847_43079C.1
tcgaagtagagatggggtgttgggtttaggtcactttanattactgaatatgctgggttgtggggatatcgacatcgtttacctctctgagtggacaggaactaggctgtgcttctgcatgaaggttatggccagaggtctgctgctagtcgcacaaaagtgacgtctgctc

SEQ ID NO: 79806 - DNA, 394 bp, Glycine max
  Clone ID: PAT_MRT3847_4307C.1
aaggccctggaatgatttgaactcttatatctttttggttttcaaggagtggaacctatgatttctgcacacttgagttaagcctagtggcaatgttcatgactctatttaccttccatgtttttttaccttttcattttaggtaatcaaagttatctctttgatataaagagatggttgcatggtagttacactagagtgcttttaagatgatggtatgatgcaccctaatattttatttgggtggtaccttttgatgcagggaagtggaagattttgcccgcagattaaattctgactggccagaaagaatgcaagaacttttatcttcagggcaagaacggaagacaatgctttttactacagatggttttctaaggcgacaagcttgact

SEQ ID NO: 79807 - DNA, 1708 bp, Glycine max
  Clone ID: PAT_MRT3847_43080C.1
ccacgcgtccgatttcttttgttttcttttttttatgtttaacaagtcttactttttcttaaagtgtttatcttagattgaaataatttttttattagttcttttgcacagaaaatgttaattttgactactatatcaaacacatttaaagcataacacgtttcacagtttatcatattgcagtaaattggtgtgataaaaaaagatcaacttagtttaatagaaacactttaatagatcaaagtgatgtttttcaaacttaagaaactaaattggaaaaaaaaaaatcaagcaccaaaaatatatgtatgttaattattcaaatgaaatgggtaatttgaactatagatatgaaactaaaaagattagtgttgcaggaactgtgcgccactagaagtaaaggggagatttcaagggatacagaattggctagtcagaaaggagcacaggcacagcaacaaaacgtggcaatggagaacacggcattggagatgagtgtgacggaccgagcgggcctactatcagagctatcagcagtgcttgttgagttgggctacagcgtcacctctgcaacggcctggacccacaacgacagggtggcctgcattatattcctggaagacgcatcctcacctgggcccataagcgacccaaaacggttgggcctggtggaggagcagctggagaatgtagtggcggcccacggagaaacgggccagaagaacagcgtgagggtgacgacgctgggcaccgggcgcacccacacggaacggcggctccaccagctaatgtacgccgacagggactacgagagctgccgcgcctgtgataggacccacgtctctgttggtcgatgcgaggacaaaggctacttggtggtcaacgtgaggagcagagaccgtcctaagctattgttcgacaccgtttgcgttctaacggacatgcagtatgtggtctttcatgctgccattagctccaaaagatccatggctgatcaggagtacttcataaggcactgcaagggtagtttagctctgcccagtgaaagcgagacggaaagaactcaccttatgcttaatcgctgcaattgagcggagagtctcgcgtatattcgaactgagaatagaatggggctactatcgaatgtgacccgggtgtttcgtgaaaatgggttatccatatcgaggtttgagattggaacagagggagaaaaagcggtaggatcattctttgttacagattcttcaggtgaacaagtgaacccaaacatcgtggaattggtaaggcaagcatccggtggatctgttgttacagatcacaagtcgcctcatagggtgcgtcaatctcaatcggatatagaagctaaacctaaattctctctgggaagcttgctatggtctcgattagaacgcctttccggtggttttgggcccattagatcgtgacaactttatacctccggaactattcttctacctcatggaatatgtcactactaaatatcggtgtacataagattttttttagttatttagttttttttctcttcttttcctcgtttgatttccttgtggttgaggtagaggggtaactgggtaagactgtaatagcttgcgtttttttgtggtcattgtacatatttttctcacatggaaaatcccacactattacaagttgagaaatatgagtttttgcatattaaacacac

SEQ ID NO: 79808 - DNA, 266 bp, Glycine max
  Clone ID: PAT_MRT3847_43081C.1
gatcaagttgcacttggaccactttacacgaatgactccatccagtcccttcccatggcgaatacgtttaagcctgtagagacagccgtcgagtctcgactaccattggctagcatgtacgatggtgtgccgggttacgccgattccatttgcgcttaagctggaatgtccctaaagattcgtcatattgcatcagagactgcgatttacacttcagggatggacttggctgaagagagtgtctgagactcactgcaatccccatg

SEQ ID NO: 79809 - DNA, 161 bp, Glycine max
  Clone ID: PAT_MRT3847_43082C.1
gaaatggactgaaacggttcactatcttatccggtcgagaaaaacgctgattcatgctatcacatgactgtggtaaacatccaaagaaaacatgctctatcaaagaaggcctgcttacatgcatgcagtgccatttatgcctagtacacttttcgttcgcc

SEQ ID NO: 79810 - DNA, 244 bp, Glycine max
  Clone ID: PAT_MRT3847_43083C.1
ttctgatgcactcaaggtgttgaggcttccaaagggtcacaagctttgtgtgctgcacatgttgtcatctgaagttgcattgatctactatgataccattagggagctggagaagaagagaaaggagaaggctgcggtggtttacgagagatagacgcatctcatcagattgctggtgaaagctctgaaggttgcttaagagaccctcgttttccaactttgtgtttttactcctgttaagttt

SEQ ID NO: 79811 - DNA, 176 bp, Glycine max
  Clone ID: PAT_MRT3847_43084C.1
ccccattattccctttcctccttaccttgtttcccagtaggtcgaatcacatattctcaacgcggaccctaaattctaaccttctaaaaatctacaccaccctccaatttttttccaatttcataattcctacaccatactcacgcatattctacgcccacaaaattatttcaccc

SEQ ID NO: 79812 - DNA, 572 bp, Glycine max
  Clone ID: PAT_MRT3847_43085C.1
tcacggcgccggggctctctgaatcgaagttaattgctctcacccactctcagcttctgcttctaaatctgaactcaacggttctgtgaaatcaaaatccgcggcagttcagcattctagggtgatattttcatggatggagatggtagcagtgaaagcccaatcgaaactaagaaagccaagtcaaaaacccctcgaaaacctaaagaaaccattctgaagcaaaaatcccctgccgaattcttcgcagaaaataagaacattgcaggatttgataaccctggaaaatctctttatactactgttagagagcttgtggagaactcacttgactcggcggagtccatatcggagcttccggtggttgaaattaccattgaggagatagggaaaagcaaatttaattccatgattggtcttgttgatcgggaacgtgttgatgcggctttgtatgatgattatgaaactgagaaggctcgtgagaaacgattagcaaaagaggcccgtgctcaagagatgcaagcaaagaatgctgccctcggaaagaaagtgaaagatactccagcttcaaa

SEQ ID NO: 79813 - DNA, 444 bp, Glycine max
  Clone ID: PAT_MRT3847_43086C.1
aagaagggaagggtagctggtcttgaaagctcttacgcttgtggcagtagtgctcaagaaactagaaaacaaacaaacaaaggccttcctccttctctatatatcattcccctctcttctctttcgttttgtctctctcatgtcaatttctatcttccgtcgcgccgatctattcacagctggtcacagtaagttctctttctctctctctctctagcttgttattaaccatttttttttttgtttctaaaatcacaggaatttcgattatgagccactgatggatctcatctcatcacctcttttctccggcgaaacccttcgatttgtctttcgtgtcttcaaaattcaccaccacgcaaacaacgccgtatccagatctactggtgcaacttttttttcttcttcttttccttttttttttccccaaagaaaatcgctgag

SEQ ID NO: 79814 - DNA, 396 bp, Glycine max
  unsure (1)..(396): unsure at all n locations
  Clone ID: PAT_MRT3847_43087C.1
gaccatctaaggtagctgtaaattagtgactttaatatttgaagtttgagatgttgcagcatgttttgcttgctggttgctgatggcaaagaccatgacttgaaggatgatggtgaagagaatggttgtaaagaagagtatttggtgcttgtgggtgtgaagctggatttttctcttttaggaaacatctctgttggacattaaaaacatgttaacagagagcacattgcaccgcagcccatcattgtcttcgctgtgcatactcgaggagacatangctgtctgtgttaatggctaagaaagatggaagttgtgagtgatgttgatgggttgaccaggtcaagggtgatgtaatgcatgcaagtacttgtgcactctgatacttgcatgtgtgca

SEQ ID NO: 79815 - DNA, 395 bp, Glycine max
  Clone ID: PAT_MRT3847_43088C.1
gctcacgcggggaggactcaaaaaacaagacactactttctcaccttgggtataagacatccgtggtgcgatgccccccgggtggatcaattttcaaacagtccctgcatatacacgggagaaaatgcttcagacacacaggagcttgaagcctttcaatgaacaaagaggtcgttcggaaatctgttgaaggtgaagtcgatgcttattttttgacatgcttttgaaggcaaaccatatcgttagtggcattctgataatgcagggaattcctgctgtaagattaatcgcctaatatgtgtaaaaatattaggggtctttgccactgcttgcgtgcatgcataagccttgagcttaataaataaaagtcttttactcgagtcttctattttttg

SEQ ID NO: 79816 - DNA, 480 bp, Glycine max
  Clone ID: PAT_MRT3847_43089C.1
ccacgcgtccgcttttcttctcgtttcattatcataattattgttcttgttgtttttgaatcattcccatttcccagtctttctttatggaagaagttcccgacacggcggcgaaccggtccgatccggggctcagggcggagatcgacacttcggcgccgttcgaatcggtgagggaagccgtcacgcgattcggcggcgttgggtattggaaacccattctgaacggtcttagtaacaagcattttgctgctcctgaggtaacccattttgtgtttttttttttctctttaaaagctttttgatttgtacagtgacggcattgcacgagtgaaaaggttggagctttctggttttgaaaattttaaaaataaaataaattaataaataaaaattgggtgtctgtgttgtttttacttatgggaactctttgttgtatgtggtgtgatgagaggaaatgggattttatttatttatttt

SEQ ID NO: 79817 - DNA, 453 bp, Glycine max
  Clone ID: PAT_MRT3847_4308C.1
ggtgtgttgaggggtggagggagctccacacacacaaaggaaaaataggtgtcactaattacatgaacaaactatccaattatcataatttaaaaaataaaaatattgtcccattgtaaaatattatttttacagtagttagtaatattttctatttacattgtatgatgtttatgcaattagtgacacctatttttcctttgtgtgtgtgttgaggggtggagggagctccacatatatttacaattcactctccaatgaaactcgtaattaaaactacgcctataaagaatgaaatctaagacagtaccctctgctgctgtattgtgccaattgccaactcgagtgtccacagcatatattcaacaaaaagttcaactgcttgtccacctccaaccccccgcaataataataagaccaataccttcgtaaccccgcaataataataagatc

SEQ ID NO: 79818 - DNA, 234 bp, Glycine max
  Clone ID: PAT_MRT3847_43090C.1
aacgtgatcagatgttttaaaaattgcaaggacaggagctatgttgggatgcctcaaagagcctggaaaaggatcctcttcaaatgatggccacccaattaaactaaggaaatttacactgtcccgtccagacgctttcccttcaatgaagagatcaagcgactctaagacgtgatcctcgattaacccagacaagaaatcagtggagacctcttgaaatgtggaataggaaga

SEQ ID NO: 79819 - DNA, 129 bp, Glycine max
  Clone ID: PAT_MRT3847_43091C.1
catcaacgatctgcagtctaacaaaggcttcgtgaaattgccttatagcaagaagggtggtggattgccagtggaagggaaaaatccaaatatagaagaaacaggggacgatggaaattgacattgtgg

SEQ ID NO: 79820 - DNA, 474 bp, Glycine max
  Clone ID: PAT_MRT3847_43092C.1
gtgtgtttcaagacctcatcgcaaacatgtcagccaagtgccagcgcccagcttgcgggaaaaccgtgtaccatgctgagaagatcgagcatgatggtaaaactttccattcaagatgcttaaatctctggaagaaagagatggaagaacaagccagaaatgagaggaacgctgtgaactacgacaagcctgccgatgtgtccccagcttactatcgtactggtgacgtgaccactggatctaccccaaccatgctctctggaaaggaggagcgcgaacgtggcctcgccccaaaaccaagcaccaccagcagtggcggctcgagtgccccaccgaaattctgccctgattgcggcgctgccaacgccggtggaaagttctgcggcgagtgcggcttcaaatggtaaatactgtagtgttctaggattcatatctgctctagtgcttgtaacaacaataaaagtgatttgaacg

SEQ ID NO: 79821 - DNA, 631 bp, Glycine max
  Clone ID: PAT_MRT3847_43093C.1
catgggtaaatatttttctgtttcaaaaaattggaacctttcactgttgaattttgatgactacacccttggaacatgattacataggcttatcagaggctccatccatggagaaaagctgtgataagatatcctcttcagtttcctccaatctttcttctgaggatgagaacactacttcatctctgaacttcaaggagacagagctgaggcttggcctgccaggttgtgattctcctgagaacaacaacaaatcaggggtctctctttttggcaaggatttgcagaagaagaataatggctattcttctgcttcttcaactccttccaacaagaacctcaagaggggcttccctgatgccattagctcttcttcttcctcttctgggaaatggattttctcggcgagtgatgcagcaactgaagctgatttggaaagtggttctaatatctctggaggatgcaacaaagaggttggaatggttcctcactatgagaaaccagctcaagttgctgcaacaaatgaacatgctcctgctcctgctccaaaagcacaagttgtgggatggcccaccaattcgatctttttcgaaagaacacgatgatggcttattatttggcaaaatgtgac

SEQ ID NO: 79822 - DNA, 663 bp, Glycine max
  Clone ID: PAT_MRT3847_43094C.1
cctaagattaccaccctcctttgactatatcattttgttttctgtccgtttatcacgagcactatattgcagctgcaccttcatacactcagtaccctgtaatgaacctgtcacctggcaatactcatggaatggcttagttagcagaagagagagaaaaggagaagttagttacaaattatccaagaaatgcgggtgtgaagaaaggcagcagcagagtggttaggtgtgaattgtgattttttctctccctctgaatattccctgtgtttcatccttatttgtcttttctgctatttttcatattggaattgtactagtcctcactggttgagagtggaatttgcatttagcagagcaataaaacagcacaatcttatttccatctttcctctgtcgcattgcataccttacatacccttctactccatggcttttcaagctcaccaccaacacttccttcttgttcccttcatgtcccaaagccatctcattcccttcacacacttggccaaattacttgcatccaatggcgtctctgtcaccatagtccttacaccccttaatgcagcaaagttcaacacgctcattgaccaagcaaaagccctaaaactcaaaatacagtttcatgtactaccctttgcttccgcagaagcaggggta

SEQ ID NO: 79823 - DNA, 170 bp, Glycine max
  Clone ID: PAT_MRT3847_43095C.1
gacattgtattttacacttgttgtcaactaaagataacaagatataactggtgcagttaggtgcacgcctcttattttactacatgatatagataagtacatgtttcttgctttgttacataacacgagacattatttgatttttattattttatttccacacaacatag

SEQ ID NO: 79824 - DNA, 488 bp, Glycine max
  Clone ID: PAT_MRT3847_43096C.1
agaatattgaacgaggcagtgagcttcgttgctttctgcgtgctcgaccttgtcgattttcttctatgttttgttttcaaagctgtggatttgtgggttgaggcagagttcaaaccctgctattgttcctcggcgaaggaagcaataacgagcagtgggaagatcttggtttcagagcaaggtggagaatccaagatcgtgtcccttcttagctcaacgaagcttcagttggaggacatctctgataccctctactctagaccctctttggtctctgaggtctcgaggctaaccattaatgagcttaagaagctcaagttggaggacccggttttgcagtccaagagaggaaactcgcgctgttccacgttcactgtcaacaccaccattgttgaaatgctacaaggtaagattggaagacaccttactcaccccattcctagatggtctgactgtgaatgcaaactatgcacaaggtggatctcaac

SEQ ID NO: 79825 - DNA, 401 bp, Glycine max
  Clone ID: PAT_MRT3847_43097C.1
tggttggaacctttgggctgatttatgtgcttgagaaaatttcagtttaattggactcctatgatcaggagacggtaaagctgaagaattatattgtctataattagcttcataaggtttacaagaacggtactaaaaagttaaagaggtactgttatatccttattaaagggacggacttaaagccctcgaggaattagaggcatgtgaggaagtacaataagaagagtggcgaaatagttattgaagaagagcaaagcgttatctctaaacgggttcaccaggacccgacccgccacccaagttttacacgccccgcgctgaactcactcccagcagcacagctacccccacgagccaatccaacttagagagaacgtagcatccatctccacagtact

SEQ ID NO: 79826 - DNA, 152 bp, Glycine max
  unsure (1)..(152): unsure at all n locations
  Clone ID: PAT_MRT3847_43098C.1
tggcanggagtgngggcccncagaccntnanaggctgatcttcggngggaagcagctngattagcngacggacccgtgcttactanaanatgccnnaaggagncanctctccacttggtgtggcggtcttgcggcgtgtatgnagattttcn

SEQ ID NO: 79827 - DNA, 280 bp, Glycine max
  Clone ID: PAT_MRT3847_43099C.1
tctcatcctccacggccccgtgttaatgctttaatctgtaactctctttccattcagagaactccattctcggctttcttcgaagcgttgagctaagggacttgaggactgaagacagaatcactgtgagtttcctttttgacgtttgtttgtttgttacatcaaaatttgcgccaccacgcagtggtatttttttttgagtttgtatgtgactttaggttaagaaggaaaaaaacaagggattggaaacttggccttggattgcaatgttacttagtat

SEQ ID NO: 79828 - DNA, 454 bp, Glycine max
  Clone ID: PAT_MRT3847_4309C.1
cgcattgagagcgagctggcgcagaaaacaacctgtgaagtgatcagccctaacctctcgatcatctcttcttcccgtagtattatattatattgcctcttggattgatcttaccatgaaccaaccctcccttttagaatatccactttcttgttgattctttaactttgttgctcagctcacagctcgcagagacgaacgtagaaataataatgagtaacacaatgaggccaaggaataaagccatgttttatttggtttacgacaggggttgacatccatcgatctttctaattttcattttccttccaaattatctaagctatatcagtatatatatagtttgtttgaacaaatcaaatggatgatgttgatgagatgaagagtactaagaagggaaaagggaattagaaaggtggtgggctgataaccaaaacatgggagcgatgcaagt

SEQ ID NO: 79829 - DNA, 1367 bp, Glycine max
  unsure (1)..(1367): unsure at all n locations
  Clone ID: PAT_MRT3847_430C.1
aaatatacaaagttatattatatttcttaaactctaaaatcctctgctgttcctccttcctctagccctctcgaactttcttccctttgctcgntacatagggcttggtatggctgtgtggcacaccaggagcnaggaccaaagtgtttcacagcttcccgagcattcttggggcctctaagaaggaccgtattctgtccctaaggagccctaagggcaagctcatcaaatgtcaagcattcaccaccagccttttctattcttgcacgtgctctctcagtaaacttgagtgctgtaattttcaatgctggaacttcatatactctgatatcatcagttacagtccccactattacagcaattttatcctccttcccctttgtatacttaattaaccttgacaaagaaattggaggcttgttaaccttgctcatgaacaagcgcttgagtataacagcattgaaattgcttccagtccttcgaacaaggaaccgataaagcttgacaagtaatttgaggtagatgtcattggattttggtgctgttccaagtcccatagcagcgatgggaatcgatcttaaggctgggggtaagagcaaaaagaccaaaagaacagcaccaaaatccaatgacatctacctccaatttctttgtcaagctttatcggttccttgttcgaaggactggcagcaatttcaatgctgttatactcaagcgcttgttcatgagcaagtttaacaagcctccaatttctttgtcaaggttaattaagtatacaaaggggaaggaggataaaattgctgtaatagtggggactgtaactgatgatatcagagtatatgaagttccagcattgaaaattacagcactcaagtttactgagagagcacgtgcaagaatagaaaaggctggtggtgaatgcttgacatttgatgagcttgcccttagggctcctttgggacagaatacggtccttcttagaggccccaagaatgctcgggaagctgtgaaacactttggtcctgctcctggtgtgccacacagccataccaagccctatgtacgagcaaagggaagaaagttcgagagggctagaggaaggaggaacagcagaggatttagagtttaagaaatataatataactttgttctatttttttttttttacaattgttcacttctgaaattaaactttttgctctaggcgtcggtaacagtttttatgatatttctgttctgataacatatcgtggctcccatgttttacattgacgtgtattacaaaaaactagcatttgattttttgattccccttattgactattgagtggccactctttataatgttgcactccctgctccttttc

SEQ ID NO: 79830 - DNA, 206 bp, Glycine max
  Clone ID: PAT_MRT3847_43100C.1
aacaactcaaaaaaaaattaataaaataaaaataaaaaaaacggccgccactaaaaaatgtcctaattcactcggaaatacatcaagacaaatatcgggcggccctcccactattcacctcttctacctcggatttaattccggactgttccatgcaggcttaaaagctttccctaaaatgattcctactaaaacttggcgtaatc

SEQ ID NO: 79831 - DNA, 632 bp, Glycine max
  Clone ID: PAT_MRT3847_43101C.1
ggatgcattgacaatataaaataattttacaatgtcatcatatctaatcataaatcaccataagcttgttgatttttgcaataaataccttaaaagttatatcaaccacaatctgtgattaaattacaatacaaaactaatttaggctaccagtggcacagttgatgactattaagctctttggatatacttagtgcatgcttatttgcttcagtctgttttgtagaattaatcaattggttttactaacttagggagtatttgaaaaaaataagtgatcatttcgaagaaacgggtttttactaaacactcgctcagtgtgactaattaaaatttgaatttgaacaacgaaattgccctgcctttatttgccttataagaattggttccaatttcatcaagcaggtaaaatatgtgcatcaaatcataattgacctaggtgtaaataattgatggagtgtagtttttatgtagagcaaaatgacttacgtagagtaggttccatcatatgggagagacagaagccccttaataccaccacaagcactgtgttcaatgaccacaatctgagacaccttaagatgctaaacagcatactcaactgctgccccagttccagcgtatgttgactg

SEQ ID NO: 79832 - DNA, 484 bp, Glycine max
  Clone ID: PAT_MRT3847_43102C.1
gtccaggtcctgtcacatcatacctcaagtcaaatctgcgtcggctggtaagtctccacggcggcgaccgccgctgatgctctcctcacgcccaccgccactgtagcacaatgtcatccaacattgccgaacttagcttccaacaacgatgctcatgaaccagcccaagcgaaccctgccgtaagggatgctgcgaattgtatgaggatgcaggagggttacattgattacggtcacaagtgtggtgttaactccaatgtcttccgcctctatcttcgtccaggggcccatgattatgtcggtagtcttctgcttctctggggtcacttctaacccggtcctattattcgcaataacatcaggtacagcagccacaggctccacggttgtccatatcgtcctactgacattgtggcgccagagccacgcctgattccagcattgggccatgccccgtgggcggataattagcaaagcaaggtga

SEQ ID NO: 79833 - DNA, 1213 bp, Glycine max
  Clone ID: PAT_MRT3847_43103C.1
ggtgcccccggggctgcctcgccctgggctggtcctgccgcctgcgcctccatctgtggtgcttccgcaccacgtgatatgaatgattgaaacactcatggacaaattgcaaggagtgccacaacagaaacaaatcctaattttgaagacaaggtcgccgcgcaccaagaacgaaggcaacaacagatgctatgcccatgagagagcaaatccaaccagaaaaatcccaccagggaattaactagccacctgcttccttccttctccgaattttgctgttgattaaaatcgtgcagggcaagaatatttgttagccttattaaccaaagtagtattcatgaaccaaaagggtcatgagaagaaaattgaaaaaccagatgatgagtcagagagctatggtcggagttggaggctaacggttgaagcaaacaatgcgcgtccatggaggattgttccagacaactgctacaaccaccttcagaactacatgtctggtggacaataccagcttgaccttaacctcgtcgtccaacatatcttgtcctatgcccatgagattcctcttgctgccgacggcatggatgcctggattttggatgttgatgacacttgcatctccaacattgattattacaaaggaaggcgattcgggtgcgacccatttgactcagcgatattcaaggcatggattatgaagggaaagtgtcccgcaaatcctgccgtgctagaactgtttaacgccttgataaagaaaggattcaaagtgttcttgcttactggtagagaccaagcaactctcgctcaaatcaccactaacaacttgcgtaaccagggattcatcggctaccaacgtcttattctcaggagtgctcaatacaaaggacaaagtgcagtgagatacaagtcagcaattcggaaggagatagaaggagaagggtacaggatacggggaaatgtgggagaccagtggagtgatcttcaaggagagtgtttgggcaatcgtacattcaagctccctaatcccatgtatttcatttcttgatcaacaaaatctagctatattatttactagtattttccttcaacttaatttctatctatctgcattctcccttcttctaagccttagggaacttattttcgacttagcttgtactcaagaaaccaataaatgcattggctacgtactcaatttaaaaaaaaaaaaaaaaaa

SEQ ID NO: 79834 - DNA, 286 bp, Glycine max
  Clone ID: PAT_MRT3847_43104C.1
ggctaacgtgaacgttacatgggaggatgtgatcatgtacatggtcggtgtgggtgcaccgatgatggcacaaggcctgtcatgcaatgatgagacggtgaacatggcacagagcctatcctacctgacgcacggaggaacaccttcaacactttgctgcagcggagtcaagaacattcttagctctgctgtcaccaccaaggacagacaaactgcgtgcaactgtctcaaagcggatgctgatacgtacaacatcaatgaccaatatgctcaagcactccctgca

SEQ ID NO: 79835 - DNA, 336 bp, Glycine max
  Clone ID: PAT_MRT3847_43105C.1
cccacgcgtacgctctgctcgtgcctctagggttatcatatctccatttccatttcctctgtctcaggttccaagaatcttaagctatgggaaagtcttacccaaccgtgagcgctgattaccagaaggccgttgagaaggcgaagaagaagctcataggcttcatcgctgagaagagatgcgctcctctaatgctccgtttggcgtacgctctgctttccatttaactttagatcactgttatgtacgactctgaggatgttgactgtcggtttgacacgttttggtacgtttcgtgagcagatggcactctgctggaacttacgacgtgagctc

SEQ ID NO: 79836 - DNA, 139 bp, Glycine max
  Clone ID: PAT_MRT3847_43106C.1
gatggcaatccctgctgaaatcaagccctcttgcaccattgagcctaatgaggcgcgggtcaaggtacccgatgaacggcgtgagtggctaagccaattattccacccccaaagtgaagtactagaatatcttaacata

SEQ ID NO: 79837 - DNA, 755 bp, Glycine max
  Clone ID: PAT_MRT3847_43107C.1
ccacgcgtccgtacggctgcgagaagacgacagaagggggtagttccaccgagtagcaacaatgtcgaagcgaggtcgcggaggatcggcagggaacaagttccgcatgtcactgggtctgccggtggcggcgacggtgaactgcgccgacaacaccggcgcgaagaatctctacatcatatcagtgaaggggatcaagggaaggctgaaccggttgccgtcagcttgcgtgggtgacatggttatggccaccgtcaagaagggaaagcctgatctccgtaaaaaggtgctccccgccgtcatcgtccgtcagcgcaagccgtggcgccgaaaggacggtgtttacatgtacttcgaagataatgctggggtcatagtgaatcccaagggtgaaatgaaaggttctgctatcactggtcctattgggaaggagtgtgctgatctgtggcccaggattgcaagtgctgcaaatgctattgtttaagctgggtttttagtttatgtaatgtttctgcttcttgaagttgtttcagatattgttttaggttgaattgcagacaatattggcatttggcacatatagtttgtttttgcttgacttctcagtgagaagtgttttgatgagattaattgatagttataagaggtgttttcttggtttttcttgtgaaaaaaaaaaatatggaaccaaacaaaatagacctaatataaaaaaacttgaatgaagaaacaactcaagtaacatggaaataaaa

SEQ ID NO: 79838 - DNA, 510 bp, Glycine max
  Clone ID: PAT_MRT3847_43108C.1
tctacaattaaaggattctaatatacagatttgtgggaaaaagatttgcggtggatactgatgcacacaagattgcatctttgggtcaatttcttctctgggagtggaaatgcaggcctccttccttacaaagatttccttttctttgagcatgaagaaaagtagcaaagatatacaaagggaagaggggaaaacaaacaagtatctttggggcaccatctgtatctagcgcaagctttctttccgaaaacagagacttcaaaaatagggttaaatgtttaatgggcttgagagcaaattactcatgtgcacattgtttagggattatggggccacgatcctataaaagaaaagcaatggacattgtgcacattttcttacaaacacatacgctcaagttgaagcattcattactttactttgagcgtaacttttgcatgtactcactccttcaccgatcaaagctttgaaaacaagggaatcaaagcacattcgcaacaaggaaaaagg

SEQ ID NO: 79839 - DNA, 255 bp, Glycine max
  Clone ID: PAT_MRT3847_43109C.1
caatacgcaagaaacagagtcttattagaaagtacatagaatcactgcatcattcaatcataagtcagtcacatcttgataagcttttacataagcaacttccagagattatctgcgaggataattcctgatttatggttaatgaaaagctttttactataaaggtgtatgaaatataacctcctacaatgataaataaaaatgggccaggagtgtattattagagactctgaggcgtttctgatcatagatata

SEQ ID NO: 79840 - DNA, 369 bp, Glycine max
  Clone ID: PAT_MRT3847_4310C.1
aatatattttgaggggatactgctttcgctaccaaggacattcttggcaatgtgatcagtggtttatgtatgcaaattccaaagcccttttaactcgcagagacaataaaagattgatcatggattaacaactcatcaatgcatgaggctatgaaaatgaaacgatcattgaaaaaacaaaactaatgcatgaaaggtataagacagaatatgacagatgggagtaaagagggcagcgattacaataatgatacagaaggatggtgcagacatgatatgcttacaagagacaaagaaagaagctgttgaccaagctatgtatcatgcattatagggggatgtggaggtttgtcggcagacgtctccagc

SEQ ID NO: 79841 - DNA, 343 bp, Glycine max
  Clone ID: PAT_MRT3847_43110C.1
atggttgcggaatggctcgattgcgttgatgaggaggattcctttgcggaagctcctctaaccgcagcacttaatggtgttgagggtttggactatatggaaagaatccctcttgccacatctgagggttctcctcatgtgcttccacgcacaaatggtgacaaaggcaaaaggagatttgtttctggggatggcgacgagatgacattgattccaggaaccagtgatgacgaggcttacaacaagctaattgatgaactcgagaaaagctgcccaacaatgactggcattgaaaggccccaagctgagaaacttcctcgtcgcagaaattgtgacaaaccta

SEQ ID NO: 79842 - DNA, 348 bp, Glycine max
  Clone ID: PAT_MRT3847_43111C.1
cgcgggcgtccgtacggctcgagaagacgacagaaggggactgcacgtttttcttcactctttctctctcttacatgccggaatttcctctctctttctctctccggagaatagaataaaaaccctaaaccttcgctttgctgccacacacatcagatctacactacaacttccaagttcaggaattatgtgtcactagcgatgtccgattccgttcccaaaacgcgaaaccgtccggtgccgtggccgccggcgccggacgccaaggcaatgccgcctgctttctgtgctaagaaaacaggctcaagccctgttctccgcgaggccatgcagcgacttgcagatagc

SEQ ID NO: 79843 - DNA, 333 bp, Glycine max
  Clone ID: PAT_MRT3847_43112C.1
aaaggatggaaatggaaataggggagtgttttgagaaattacagaaacaaccatgagatactctgataaggtctcagatgcaaaataaagcccgaaaaagcgcgtttgcttttacgaaataacgcgtatttacataacgtgccgattgtattttcattacaaaaaggtcaacaacccttacgagcatcatgtaatccactactcacacttaactgttgctccctatccgtaacactataatttataaagggcaatttcgacaaaaaaaattgcgtggtagcgttcccagatgcttaataaaggagtacgaaaaatattgcggaaaaccagatc

SEQ ID NO: 79844 - DNA, 305 bp, Glycine max
  unsure (1)..(305): unsure at all n locations
  Clone ID: PAT_MRT3847_43113C.1
ggatcgagcggctgcgagaagacgacaggatgggggaggtgagggttggttcatttgatctgcgactgagagtagagaagagaattgtgatgtggggaggacagggtcaaggcacgaccgccaaaagatgtaccattcatcagccnaagcgctggcacgatatcaccggcaacggtatttgcgcgatcaatgtggtattgggtatcctacagggcaaggcagatggtcatgtgtaatggtacactgtggtaattattcaatttgttctccaccctcctgtctgtcaaatcccctctttttttttt

SEQ ID NO: 79845 - DNA, 2768 bp, Glycine max
  unsure (1)..(2768): unsure at all n locations
  Clone ID: PAT_MRT3847_43114C.1
agtgaaaaaggggcttggtcattgttgacttttaacaacttttctaggagggctttgcagcttttctaaccaatcaacttttacagaacataatcctaccctttaaggaactaaaacactaccataattcttttattgcatataaggtcacaacatagcaagcatacacactaacacacatgggatatgatataaggtcataattacctacctactcatttgcagaaactgaagagaaagcctgattctagtcatctgcaaattgagtgttatggacaacacaagttggtatgtagcttctcaaaggaagaacatctttgtttattaatacgttctaccgaaacaaaaaaaaagaactcctattcaatcaattcatactaagccccaaggaccctttaatgagagagagtccattgcctttttgttacttgccggttcgctaacatgtggccattgggagcttggaagtggcattcgagcaattccactgcatagccaaaagggagataaatacaacactgtaaagcttctcatgcgctttgagtttattaataattgattctgtgcaatgtgcatccttctgctccccattattattattattattatgtacagtcattaagatgtgttagtagcaagagtttgtatgtagtagctggatgatatcgtgaattatgtgccccgttaaatacctgtttcaatttaaatattttttcattcatttttattttaataaaataactttattttctatttttttttcaaattttttgtttacacttctgaccaaacacaatgttaagaattgcaaagaaatatccatgaactataattacaaacttcctagggtattatttacacgccccataggccataaatggctttatttgaattttatcttcccatatcttacagtttaaatactcactcaagaatctgttcactcccagacattcacaacaataaataacttgaataaaaagaacatatacgaacgaagttgtcgagcaggcagagacgagaattcacaatttcacaccatctggacccaaataccgtggcttggaacttcttgatggaccacaaacagcagatagaaacccggtggcgcaagaacagcggaagccggcgcggtaacttcaacctcgtgcgttgattctccaaccccactcaaatggtgcggcttcagcaccaacagcctctgattcatggagaacgagtgcgtgttaaatggcggcgccagcatggtaacagacaccgaatccccaaccaaagtcgcgctcaccttaaaccgaagcctcaacgtctgaccgtacttgagttttgtttgggacgcaggagatactattgcgggacgcacgttagagaatccgggctcaagataccaaggagaaaacgcttctaaccgcagttccgttggaaacaacactttggtgaaattgtaatacgtgtgagggttgctcccagcgagaagaactcgcccatcgcgaagcaaaacggcaccggagtggtacatcctcggaatatgagacgggttctggacctcaaatctcatcccgacccgcttgttgggtttataaagaaacgggtttaacaccgggttacggcccaattcccagcccgcagtccccacagctgctccattaacaatcaaaacgtcgccgttggggagtaaaaccatgtcactcataactctcgcacccggcatggtttccatcacccaattcgctttcgggtcggttattttaatccgagcgcaagttctcaacgctccaacaaacttacccgagagagtattccgaaaagcccctctcggggctccaccacaaatcagaacctcagcctccacattaggttctcgaagaggaagcaaaactgcggaaccggtgctaggataacaccgtggatctccaccgggtatttgagggtaggttctcacgacactgttcttattgccatcgaacaagatagcgcggttgttggcaaagataaaaaggttgccatcgacgtttagaaaaacaaacgggtagagattgttttcagcgttagcgtcgttggtttgagcaagaaaaggtaaactgtaagtattcttggcttgtgtcttggggtaaaactcgtagttgaattgtcttcttccgccgataattatttgacgtccatctggcaagatgtggccggtggcgtaccatctccgtgccgcgagtccatcgtcaatttctttccagtcgcaggtgcggcacggggtgaaggttctgacggcgcggtcgccgtcgttgaatccgccggtctgaactagtgttccgtcgggagaggctgaagcggaggagcaccagacgttagtttggacgaagagggcgcggaatgtgttggctaccacgtcgtattcgacagagtgtgcggtgcagtcggttttgacgaccatttcgtttgggttgttgcggcaccttccgtcggggagggttaggttggagagtccaaagtcggtgcggtcgaagatgatgacgcggtcgttgtggaggagctgcatgtgcatggcgacaatgccgatgtttttgtggaggagctgccactgtcccttggcggcggcttccgccgcgtgaaagtggaggataggaataataataataataattaggaggaggaagagtggtgaagaggtcgacattggtgtggtttgggaataacttagtgtgggcattaccctggggtggagaacagtcaaagagaggtgagataaggtgcagtgcaatatggggtcgcctcgngcc

SEQ ID NO: 79846 - DNA, 507 bp, Glycine max
  Clone ID: PAT_MRT3847_43115C.1
ttgctctacactcctcgtcgcgaatttccatgtgggtctcactctcttcaccagctatggcatccgaggagccaatggatgctccccccgcgccgaatctgctttccgaaaccctaagtgccgccgaattggtcgccgatttgggcggtgattacgctctgttcccgcccggcggcggttctaccgagttccggcagctcgacgacgacgtctcgtcttcgctttggtcgtcggcgttggtttcgaattcgcgcgtctccgcagtggcgccggaatcgtggattgctccacaaggaaattggctcttacctgaaaatgaaggttcagacaatgctgaatctgcctctgaagtcgtgccttctaagatgggagcagggcttgtgaatcttggcaatacttgctttctcaatgctattctgcaatgctttacgcatacagtgcctctggtgcaggggtctttgttccagcactcattctatcccttgttctggcattaagatgggtcct

SEQ ID NO: 79847 - DNA, 1047 bp, Glycine max
  Clone ID: PAT_MRT3847_43116C.1
ggcaaagaaatatccatgaactataattacaaacttcctagggtattatttacaccccccataggccataaatggctttatttgaattttatcttcccatatcttacagtttaaatactcactcaagaatctgttcactcccagacattcacaacaataaataacttgaataaaaagaacatatacgaacgaagttgtcgagcaggcagagacgaaaattcacaatttcacaccatttggacccaaataccggggcttggaacttcttgatggaccacaaacagcagatagaaacccggtggcgcaagaacagcggaagccggcgcggtaacttcaacctcgggcgttgattctccaaccccactcaaatggggcggtttcagcaccaacagccttttaaaccgaagcgcgacggcgtcgttacttgagttaagaaaaggtaaactgtaagtattcttggcttgtgtcttggggtaaaactcgtagttgaattgtcttcttcctccgataattatttgacgtccatctggcaagatgtgattggtggcgtaccatctctgcgccgcgagtccatgctgaacttctgcccagtcgcacgagcggcacggggtgaaggttctgaccgcacggtagccgtcgttgaagccaccggtttggactaatgttccgtcgggagagaccgaaccggaggagcaccagacattggtttggacaaagagagcgcggaatgtgttggctgcgacgtcgtattcgatggagtgcgcggtgcagtcgcgtttgacgaccaactcgtttgggttgttgcggcatcttccgtcggggagggttaggttggagagtccgaagtcggtgcggtcgaagatgatgacgcggtcgttgtggagaagctgcatgtgcatggcgacaatgccgatgtttttgtggaggagctgccactgtcccttggcttccgccgcgtgaaagaggagaataaggagcaggaggagtgtcatgggtgtggtgtgggagaacagtcaaagaagggtgagctaaggtacccggctcgag

SEQ ID NO: 79848 - DNA, 299 bp, Glycine max
  Clone ID: PAT_MRT3847_43117C.1
aattgaagttaaaagccttagcctttcctacaacttcaaacacaaagacatcattatccatgggtgccttcggctccactgtcggagctggcaacaaaactcttttgaacccgaatgggtctggggctggggctttagcttccaatttagccttcttttggacccacttggaaaaaggtattggctttagggttcccaacaacaaaggtttcgggggaagctttaaaaatgttgctttttaaaaaaaaaaagagattggagagacccacccaacccaccagggccgattggaagggctt

SEQ ID NO: 79849 - DNA, 988 bp, Glycine max
  unsure (1)..(988): unsure at all n locations
  Clone ID: PAT_MRT3847_43118C.1
tggatacttcaatgtagtaaaatatcagaacttgtgaaaaaggggcttggtcattgttgacttttancactnttctaggagggctttgcagcttttctaaccaatcactttctacagaacataatcctaccttttaaggaactaaaacactaccataattcttttattgcatataaggtcacaacatagcaagcatacacactaacacacatgggatatgatataaggtcataattacctacctactcatttgcagaaactgaagagaaagcctgattctagtcatctgcaaattgagtgttatggacaacacaagttggtatgtagcttctcaaaggaagaacatctttgtttattaatacattctaccgaaacaaagaagaagaactacaatagaatcaatacatacatagccataaggaccctttaatgagagagagtccattgcctttttgtgacttgccggtttgctaagatgtggccatagcttctctgcttcatgccactcagagaattatgtttctctaatcaatcaccacaaaagggtatacatggaggaacataattctctgagtggcatgaagcagctcgagccagagagagtccattgcctttttgtgacttgccggtttgctaagatgtggccatagcttctctgcttcatgccactcagaggtttttgttccaccatggtgtccggttgattgaatttggacattagaagccaatggataaagcatagtctgactgttcttcgtgtagtgacattggctactcctgtagagcttatcagatgtttggggtctattaaggatcatgcctttgtggcatcagaatatccagttgtaatagccctagaagaccaccttacaccagatcttcaggctaaagtggctgagatggttacccaagcatttggagacatactatttactcctaactcagaaagtgtgaaggaattcccttctcctgaatcacttaagaagag

SEQ ID NO: 79850 - DNA, 1444 bp, Glycine max
  Clone ID: PAT_MRT3847_43119C.1
tttttgaggcagcaaccacgcgtctgtaaattgctattcaagcattgaacattaaagtagaaatttcattgttttatctaacttcatttaccataccagttcccctaataaaacatgaacacataaactgaaattaatgcctacttttgtggcgaaccaatataccaacaaggtgcttaatatttgttttttctgctgctatgctcatcaagccaagatataatatcaccaagcacgtgaaatatagtttcatcaggttcaccttcaagtagagtatggaaagcatccttatagaggcagagtttcttgtccttcactttagctttctcatacaaagccttactagctgatggatcagtaattatatcagcctctccatgcatgatcaacaatggcagagaaacttcttccaaacgctgttctagctcctgtgtggctttcaacagctccaatgcagttcccagtcttggtttatccttgtagagtaacacgttatagtgccagttttctcttgttcacatctctaaatatattatctttaacctcttccttttgtggaactaacttagttttaggaagaacttttgctacaccaattagtatctgcttcaccaaccaatgtggaatcatatctcccgccaacttgcacaaaggtgcaataagagcagcaccattccatgcagcaggttgtttgaagtgaatattcaaagcaatggctccacccattgattcacccaacaagaagcttggtacatcttgatatttcttttgttccttaatttttgagaaatgctcgatgacatcattcactagactttcaaagctaggaatataaccatgaagaccatcagaaaggccaaatccagggtaatccaatgcaaatactccatatccagatgatgctaacttccttgcaactccttcaaagtaaaatgtgcaagtatctgcataaccatgacagtaacaaatgattgctttcaaatgagaactttctggaagccaacttttagagaatatttttaatcctctggagttcacttcataaacctctttcgtcttcaccccatctgatgataaccgaaacaagcaatgatcaatggcaagttgaatatccttaaaagcctcacgagcacgccgtctagcgggtgcctcatccaagttggacagaaaaatcgtttgcaactcttcactcatatagtttactactacttgttgttcttttgtggttattgcagccattgctatttagctccttaaatactaatattgtgactaaaattattattgaagaaaaagaaagagagaaagtgtagatagcaagttgaggagtggaaattatgtgtctccttccatcagcagccagtagctgggaagtgggaagttagaacaaagagagaaagagagaggttcctaaagtgaagggggttgggagtgtacactgcac

SEQ ID NO: 79851 - DNA, 285 bp, Glycine max
  unsure (1)..(285): unsure at all n locations
  Clone ID: PAT_MRT3847_4311C.1
ttcagaggcaacnaaggnanttgtaaattangagnatggctgcacaagcttcttgnatcatgcatacatcncttaanntnctcagccgaggctacaagacaaagtcttggaacaagatcactccaatnctccatttggnnttctcangaaaagcctccntncttgttaaggcanctgctnactccccctgtcnagtcaaggnntcnggacaganctttgggnttttgcatnnaagcnaaagnctnncctacctgggatggcngcctttcccggntgcnganggat

SEQ ID NO: 79852 - DNA, 348 bp, Glycine max
  Clone ID: PAT_MRT3847_43120C.1
ctcgtaaatatatttttcattctctttttttccatctttttttttttttctcttttttacctactactgccacaaaaaaggggaaaaccccccccccccccacagaaaaaaacatctacaaaaccccaaaaactctccccgggaaaccccccccccccaaaaaagttacccccaaccacaggcggacggaaaacaaaaacaccctttgccgcccccacgccaagcttttctacgcgcgggaggaagccccccaatttttactcagcggcgcccaaaacccaaaaaaggggggtcttctctattacccccggaaaaaggagggcaggccctttgagcgctaaccccccc

SEQ ID NO: 79853 - DNA, 309 bp, Glycine max
  Clone ID: PAT_MRT3847_43121C.1
gggcagattatggggcagcatgattagagatatacgggggtttaattaatcatccacacttgatgaaatatttacttaatttacagctcacagtggcagaagaaaagccattttaactagcaatagcgtgtccctctctttctttccttggtgtataagatagtggcaaaaatctcgaggatcaacaaatatcactggggaagaggatctaaaagcgaaccaatcagattcttggatatccttcttagagacctcaagattcttaatgcgccacatgtcctctgaccacgagaacttgctccaatgtgg

SEQ ID NO: 79854 - DNA, 239 bp, Glycine max
  Clone ID: PAT_MRT3847_43122C.1
aaaaattaatagtaaaggaaaatacaaaacatccaaaatatgatatcacgtgggtttctacttccatgctagccatcaattaagtttcaaaaattttaaaacaacattttgaataataatgaaaaagataccaagcaccgcaaataaaaaatactcagtataattataattttcccaaatttcctagtagtaaaactaaaattattaggtaaaacatccattcaaatgttttgactaaa

SEQ ID NO: 79855 - DNA, 361 bp, Glycine max
  Clone ID: PAT_MRT3847_43123C.1
ccccacgatgtcgtaggagatcatcacgccggtgtaccgcactggggtgtcagcccaagtgcaaaagcggcgggccagggagctgtgcctgggccgacatgataatgccatcaagtacctgggccaggattatgagcagctgtgggtgcgatgcctgcagagtgggaccctcttccgtgatgaggccttacccccggtacccgagagcctgggttacaaggacctgggtcccaattcctccaagacctatggcatcaagtggaagcgtaccacggaactgatgtcaaacccccagttcattgtggatggagctacccgcacagacatgtgccagggagcactgggggactgctggctcttg

SEQ ID NO: 79856 - DNA, 303 bp, Glycine max
  Clone ID: PAT_MRT3847_43124C.1
cgcggcccgcctgcccgggccggcccacacttcccggttttcccacgcgtacgttttctcagacacacagggcgactccaccgcgtaggtgcaatttgctcttctttcgacacgttcttgtcgtgctttttcgtcacaaaaggccgaacgtcatttttccttccactgtattcgaagggctggctgcggatgtggtgaccgctccgccctgaaaggagtcggagccgccttgaccaccatctctttgtcgacgtggtgtggttacaaggactccctcatcactggagagattcatggcctggt

SEQ ID NO: 79857 - DNA, 489 bp, Glycine max
  Clone ID: PAT_MRT3847_43125C.1
cttgggggggggggggggggggggggggggggggggggggggggggggggggccggggggggggggggggggggggcccatggatagaaaaccgtaaaaggggttttgggagaattacccccgggattagggcatcattccccgtagagatgcaaaaagggttttccgggttaggatgggcctaaaggggaggatatccccccaaatagccgggcttggccatagcccccaaacccaaaaaggcaattttggaagggggggaaaataccatttggacccttttgtggccggcttttaaaggccgcaatatgccccttccgagcccaaaaccccgaacattcccgaaacaaaaggccctaataccccagttagccctcaaggaatcaattcccaaaatgaggcctttttatggaaagggcttagtgagaaccctagaaaccctttgcaattccctaatagcccaattaaagttgctaaggccatttgggg

SEQ ID NO: 79858 - DNA, 206 bp, Glycine max
  unsure (1)..(206): unsure at all n locations
  Clone ID: PAT_MRT3847_43126C.1
ggaancccggncgaccgacgcgtccggctgttcacaacacaacaaccacacatgacaatagttttcagaacaccctgaatagaatattgtggaattccatgactgctagtgaggaatacaacatatncaatgattacaaaattattcagtctctaaataccaaatttcaagcatccattgcttctaattcttttttttttattttt

SEQ ID NO: 79859 - DNA, 609 bp, Glycine max
  Clone ID: PAT_MRT3847_43127C.1
ttttttttttttatttttttttttattttttttatcttttttattttttctgggtcatttttttttaaatatttcacccacttcctgtttattgtctttattcccagttcatctaaatcacaacccacaatcggggagaaaaacctcccaacaaacacacaaaacacctcgcgaaaaaaaaaaaaaagcccccccttcccgaaaaaaaaacacccccgctgttaaaactgctccccccccccccatccacagacaaaacgaaaaaaccccccccccgaaaaaaaaaaaaaaaccctgggggaaaacccccccccccccataaaaaaaaaaaaacagcgcggaggggagggaaacaaaaaataaaacccacgggcggtgtaaacaatctgtacgcgggcccccccttttgggccccccaaaacgggagacacccccccgaggagaaaccccccccccccaaaaaaaaataagggcccccccccccccacaataatctaagaggggtgcggaaaaaacatcccccccaaaaacccccgcgggagaggaagaaaacccctccttccttgcgagagaaaaaaagaggggagaccaccccccccaccatgttac

SEQ ID NO: 79860 - DNA, 472 bp, Glycine max
  Clone ID: PAT_MRT3847_43128C.1
acaagtgatgatgccatgacacaaccaagagtgtcccacaaaattaaatacccatctcaaggcccacggatctgacacactgctgagattcaacagtctacatagaggcatgtttttagtgccaaaagtttttgtgccaacggcattactttttctaaatcgttcattgaatcagtgattggtttcacgggaatatactatgaactaacgattttatcaatctttttctgtacgcatggaatgagtgctttttctttctgctatgatatatcggaatgctgttggagctatacgcatgatgagtcggttgtaccaaaacccttatacatgggttctagcgtctctgggtctgggctatacgcggcgacttgtcaccaaatgaacataatcagattcctttcagtgctcctcttggctccacttgaacaactcgtgtactgtatgcccctagcagtaccaacctaatccacat

SEQ ID NO: 79861 - DNA, 281 bp, Glycine max
  Clone ID: PAT_MRT3847_43129C.1
tgtttggtttttttttttttttttttttttccggaacacagtgggggcctaacaaaatttttaaggacttaatttgcgtgggagaagggagttttaaaagtgcgactattagggccaagatcgataagaagtaagcggggtatgcgaacgaaaaaaacaccattgtttgctgtagaaaactagctcatggaggggttcaccccagcgtttaaaaaaaacctagcacccgagatatgtgtgtgaatctggaacacgtgccggaggttttatgaaggcgagag

SEQ ID NO: 79862 - DNA, 252 bp, Glycine max
  Clone ID: PAT_MRT3847_4312C.1
gaagttcatgggaaacaccactaaaaaggaaaagccccatactttcatatcctagatcacctccacaaatgacaccttctgaaccatcccgagagctatcctcccccatccacctcagtgacaagttccttattccaatcccttacttattgatttacattggggacaatgtaagatttaagtttgggattcctaaccttaggataatgcattttcttgttttattaggaacattatttgcatttgcatttt

SEQ ID NO: 79863 - DNA, 506 bp, Glycine max
  unsure (1)..(506): unsure at all n locations
  Clone ID: PAT_MRT3847_43130C.1
tgttttctagctgctacctcttggctttttgccttgctggttcaataacagtaagctctaagccaccgccaagttccattcccttcttttcctccctttctactttttggttattcttcttcaccttggttatcctgccctacccaaaagttcaatattttttttgcagcttcaataccccctaaatcccaataaagatataaagatatacatatacacacgtttatatgttcatatagtatatggtacactacatggcacaacaatattcatcctcaagttggagctgcaatttatccaagatggcagggcttgccttgtgcctccttgtgatgttgagctatgcaagttcttcatatgctcgtttgttgttgaatagaacacgaggagggttcatggtgtctagagaggcacataggagaaacctgcttgataatggacttggccatacacccnccatgggatggaatagctggaaccattttgcctgcaatattaaagaagac

SEQ ID NO: 79864 - DNA, 2551 bp, Glycine max
  unsure (1)..(2551): unsure at all n locations
  Clone ID: PAT_MRT3847_43131C.1
agcactacaaagaattgacagactcggtcccagtgatttttgttgcgattgagagcaaactgtgcaagataattgcgctgctgtgttctggtggcggcagtggctaanagagaagggctccacgtgccaccatggagaaccacctcatacatgcaagccaagtggctctctgtgagtcctaaagagcctagccatgcaggttatgtgggagaaaaaggtgatgccattggtgatgatcatgaacatgctgatcctgatattattggtaactgggtacctccattactgaagccaaagaaaagggatttggatggtggtggatctggtttgtcaagtgaattatctaacatgagtgtaaattggtgctaggggagtagtctctgcttattctaagaactactataaccactcccacgagtttccactacgctcttctctttgtctttgactatagtagagaagagaaaaacagagatgggaagtttagaggaagacgagttggtacaaatggtgcaagattttatagaatccgaatcaacatcccccacaagttccacttcctcaaattgccacaccttaaaccaccgaactcaatattttattctacaggatattctaaggagtgatggtgatacagcatgtgaggctaaggtattgaagtgtgtattgaagcatatgagaggtataaagggtgctgagaagacaacaagtctcagtaaatggcttgttatgaggatgaaaatggatggccttgatgcttctgtatgccacacctcttgggccacctctttgggttgtcctgctggctcgagcgagtatattgaagtgataatagaggatgaccagaattgtggtaaacctacgaggctgatagtagatatagactttaggtcccaatttgaagttgcgaggccaacacaaaactacaaggaattgacagactcggtcccagtgattttggttgggactgacaacaatctgtcacatagatcgtggacttactctactaggcctacggctgcgagacgacgccggacggggatccccaatcagagagaaaagttagggttcacaacttttccttttccttttgcttgcgaatctgaatcaaataatcaatcatccattcattattcatcatgtcgtcggcgaagaaaatcacgctgaagagttcggacggcgaggctttcgaggtggaggaggcggtggcgctggagtcgcagacgataaagcacatgatcgaggacgactgcgccgacagcggcatccctctgccgaacgtgacgagcaagatcctggcgaaggttatcgagtactgcaagaagcacgtcgaggccgcgaatcccgaagacaaaccctccgaggacgatctcaaggcctgggacgctgaattcgtcaaggtcgaccaggccacgctcttcgatctcatcctggctgctaactacttgaacatcaagagcctgctggaccttacatgtcaaactgtagccgacatgatcaaggggaagactccagaggaaattcgcaagacctttaacattaagaatgacttcacccctgaggaggaagaggaagttcgtcgggaaaaccaatgggcatttgaatgattttgttaatctcaaaaaatctgaatcaaagatctgccatgtggatttatgctatgcttgtttgtttatcaaagatctctcttgtagatttgcctatgctatatacttgtttgttttatattcaagactatttccgttgactgtgttcactacaactagtcataagaattatcttccttcatgaacttaagagcactttgaattgtaagtaatagttatgatgagggatgcgttgattctgacacgagggttattgagttcaataacagccaacccttggctccatatttttcatcccgtgaactacgtgataatgtgtatatgcacctttgtaaaggggaggtgcagaaacaagattcggagaccatttgatcatgtttgccaaggtggtaggtagctccatgtttcatggtcgattcatattacttttcatcacgtctcactaatctacattaatgtgttactttcagactttgtcattcatgtctaagaagtaagagaacattccaagtatcttataatattccagtatatttatgctctcttcccaagtgaactttttggcactacttctttgatagttcttcttgcagtgtctattaaaaattagagcacatgaaaaaaaaaaaaaaaaaaagatttggatggtggtggatctggtttgtcaagtcaattatctaacatgagtgtaaattgttgctaggggagtagtctctgcttattctaagaactactataaccaattttggtcgcaattttggagttctttttgataaattcagtgatcatcatcacaagtatttttttattgccacttatggtagtgccataaaataagagcacttcttacgtggattttaaaattttagtattttgtgagcaaaaagtgcttgtaatccacttgagaatcctattgtcgaataaaagaatatccttctccgttt

SEQ ID NO: 79865 - DNA, 276 bp, Glycine max
  Clone ID: PAT_MRT3847_43132C.1
ggcctgaaaatattaaaatggtggtttattacactttttttgaaacccccaaaaatttccaacggccaactgaagcttccaagaattcaaaaaaaggccaaaaaaacattctttggaaatacaaaggggaaaaaaaatttttctacccctttcctgaggaagccaagattaaataaacgggcgccccaaaaaaacccggataggttctcataggcacgaaaaaacaggtccacaggccaacccataagggccacctggcaaaaaaaccctttttgg

SEQ ID NO: 79866 - DNA, 355 bp, Glycine max
  Clone ID: PAT_MRT3847_43133C.1
cccacgcgtccggcgagacgagccgtttctaattaatgataggtgtcaagtggaagtgcagtgatgtatgcagctgaggcatcctaacagaccggaagactccagaggaaattcgcaagacctttaacattaagaatgacttcacccctgaggaggaagaggaagttcgtcgggaaaaccaatgggcatttgaatgattttgttaatctcaaaaaatctgaatcaaagatctgccatgtggatttatgctatgcttgtttgtttatcaaagatctctcttgtagatttgcctatgctatataccttgttgttttatattcaagactatttccgttgactggtgtcactacaacta

SEQ ID NO: 79867 - DNA, 791 bp, Glycine max
  Clone ID: PAT_MRT3847_43134C.1
ccacgcgtccgcggacgcgtgggcggacgcgtgggggaaagaaaccattttttggtgtgtcgaagcgagcgtggcgtctggtggaaaactccggaggtcaactcaagagaaagagagagtaatgagcattgcattgtgtctcacacactctttgaacgcatcctcctaatgaagacgacgcagcagcctgaagctcctcaaggcgatccctgtgaagagaagaagaagagcataaaccctgagctatggcaagcttgtgcagggcctttggttaaccttcctccctccggcacccacgtcatctacttccctcaaggtcacagcgaacaggttgctgcttctctcaacaaagatccccactctcaaatccccaactatcccaatctaccttccaagcttctctgtctcctccacaatctcactttgcttgctgatcccgaaactgatgaagtctacgctcagatcactcttcagccagtcccttcttttgacaaggatgctctcttgcgatctgatctcgccctcaagtcctccaagccacaacccgacttcttctgcaaacaactcaccgccagcgatactagcactcacgggtggtttctccgtccctcgccgtgccgccgataagattttccctcctctcgattattctatgcaacctcctgctcaagaactcgtcgccagggatttgcacgacaccgtttggacattccgccaattttaccgtggacaaccaaaacgtcatttgcttacactggatggagtctatttgttagtggaaagaggctctt

SEQ ID NO: 79868 - DNA, 423 bp, Glycine max
  Clone ID: PAT_MRT3847_43135C.1
atgcaggttatgtgggagaaaaaggtgatgccattggtgatgatcatgaacatgctgatcctgatattattggtaactgggtacctccattactgaagccaaagaaaagggatttggatggtggtggatctggtttgtcaagtcaattatctaacatgagtgtaaattgttgctaggggagtagtctctgcttattctaagaactactataaccaattttggtcgcaattttggagttctttttgataaattcagtgatcatcatcacaagtatttttttattgccacttatggtagtgccataaaataagagcacttcttacgtggattttaaaattttagtattttgtgagcaaaaagtgcttgtaatccacttgagaatcctattgtcgaataaaagaatatccttctccgtttcaaaaa

SEQ ID NO: 79869 - DNA, 1003 bp, Glycine max
  unsure (1)..(1003): unsure at all n locations
  Clone ID: PAT_MRT3847_43136C.1
ccacgcgtccggtgtttgaaattggaaagaaaccattttttggtgtaaggaagcgagcgtggcgtctggtggaaaactccggaggtcaactcaagagaaagagagagtaatgagcattgcattgtgtctcacacactctttgaacgcatcctcctaatgaagacgacgcagcagcctgaagctcctcaaggcgatccctgtgaaggtgactcagtctcttttctttgtatttatgtgtgtgctaacaacaataataatattggttggtgcagagaagaagaagagcataaaccctgagctatggcaagcttgtgcagggcctttggttaaccttcctccctccggcacccacgtcatctacttccctcaaggtcacagcgaacaggttgctgcttctctcaacaaagatccccactctcaaatccccaactatcccaatctaccttccaagcttctctgtctcctccacaatctcactttgcttgctgatcccgaaactgatgaagtctacgctcagatcactcttcagccagtcccttcttttgacaaggatgctctcttgcgatctgatctcgccctcaagtcctccaagccacaacccgacttcttctgcaaacaactcaccgccagcgatactagcactcacggtggtttctccgtccctcgccgtgccgccgataagattttccctcctctcgattattctatgcaacctcctgctcaagaactcgtcgccagggatttgcacgacaccgtttggacattccgccacatttaccgtggacaaccaaaacgtcatttgcttaccactggatggagtctatttgttagtggaaagaggctcttggccggagactctgttttgtttattagagatgaaaagcagcatcttcttttgggtatcagacgagctaacaggggcacccaccatatatcgtcatcagtggtgtcaagtgatagcatgcacatttgaaatncttgctgcagcggctcatgcagctgc

SEQ ID NO: 79870 - DNA, 427 bp, Glycine max
  Clone ID: PAT_MRT3847_43137C.1
tcaacatcccccacaagttccacttcctcaaattgccacaccttaaaccaccgaactcaatattttattctacaggtactggctgttcaatgaattcaatgttttgtcttggtttaaggttgtctcatgtgtttttttgctctctatgttttcaggatattctaaggagtgatggtgatacagcatgtgaggctaaggtattgaagtgtgtattgaagcatatgagaggtagaaagggtgctgagaaaacaacaagtctcagtagatggcttgttatgaggatgaaaatggatggcctcaatgcttctatatgccacacctcttgggccacctctttgggttgtcctgctggtgggtctttctttctctgccttttctcaacatctaattcaatttttgttaccccatattcaaattgaatcgtata

SEQ ID NO: 79871 - DNA, 203 bp, Glycine max
  Clone ID: PAT_MRT3847_43138C.1
ttttcttataattttgacttacattcacaaaaaaataaattttatgctcattataacttggccacattattaattctaccaaagatttaagtcccttccataatcaaaaatatcccttgctaccaagttgtgaattaccatgctttaaaacacaaagccgttcctcttatttattaagtagataataaaccccatttctttct

SEQ ID NO: 79872 - DNA, 877 bp, Glycine max
  Clone ID: PAT_MRT3847_43139C.1
cccacgcgtccgcccacgcgtccgcccacgcgtccgcggacgcgtgggtggcccacgcgtccgcccacgcgtccggaaaaggttagggtttgtaactttgtcttttgcttgcgaatctgaatcgaataataatcaatcaatcatcatgtcgtcggcgaagaagatcacactgaagagttcggacggcgaggctttcgaggtggacgaggcggtggcgctggagtctcagacgataaagcacatgatcgaggacgactgcgccgacagcggcatccctctgccgaacgtgacgagcaagatcctggcgaaggtgatcgagtactgcaagaagcacgtcgaggccgcgaatcccgaagacaaaccctccgaggacgatctcaaagcctgggacgccgatttcgtcaaggtcgaccaggccacgctcttcgatcttatcctggctgcgaactacttgaacatcaagagcctgctggaccttacatgccaaactgtagccgacatgatcaaggggaagactcccgaggaaattcgcaagacctttaacattaagaatgacttcacccctgaggaagaagaggaagttcgtcgggaaaatcaatgggcatttgaatgattttgttgagctcataaaatatgaatcaaagatctgccatgtggatttatgctatgcttgtttgtttatcaaagatcttccttgtagatttgcctatgctatatacttgcttgttttatatttaagactatttctgttgtcagaattatcttccttcatgaacttaagagcactttgaactgtaagtaatagttatgatgaggggtgcgttgattctgacacgagggttattgagctcaataacagccaacttttggctccaaa

SEQ ID NO: 79873 - DNA, 295 bp, Glycine max
  Clone ID: PAT_MRT3847_4313C.1
ccgccaacccgtcgccacgcgtcgcaattgatgtacacaggtagaccacacaatcccaccgggttcgtagcttgaattacacgattcacccgggttctcctcatccacctccagcaaacttgtgatggcacgccttggctctttcaagggaactgtgatgcggtgggtcatggtactaggcggtgcaaatgtgcaggatcacatcttgtgcaggggcttgatacctgttgtggcatggtgggcgctatacttgctttacgccagatagacacgatgctaaggaatgtgtcgatgt

SEQ ID NO: 79874 - DNA, 632 bp, Glycine max
  Clone ID: PAT_MRT3847_43140C.1
gaaggcaaattagtatattttgtattactagaaggatatgcaagtacaaggagtacggcaaagtatgtacaagtggaatagatctatttatatgtaaagcatatccaaatgcaaaaaatagtatgaatctactcatgaattcaaacagagtaacggggtaagcatccacgaagagaagatcttattagtattctgtttcttataaagaaaccattcccatgagttgatcttaatttcttcaagaagcttaccaccatcaaaagtgtgactcttaaaaatgattccatttctatgcttccacatacaccagcaggtgcaatgccatattaaatattttcatttcttcaccttttcccccaatattagtgaaccaaagagattgtatatggcttgcaaatcgtttggaataacaacaattatatccaaccactcaaaaactctttgccaaattaaagaattgtagttgcattgccgaaatagatgttcagtagtcttcaaacttgctctgcagaatgaacatgattgctagacattcaaaatgggaagtcttttttgttaagttggtcataagttggcaattgatccaaaaataatcgcaaagaaaaaacaagtacttttatcggggcaacact

SEQ ID NO: 79875 - DNA, 328 bp, Glycine max
  Clone ID: PAT_MRT3847_43141C.1
aatgagggttgtccctcacgtggaaaaaaaaaaaagagaggagggaaaaaaaaagcggcccacgcgtccgcccacgcgtccggagacacaaaacaagcccgctgcattgctccacaaatctgtgatgaagaaggagttcaggaggatgggaaaagctgttgaaaagcagggggccaaaaattactacaggcctgatcgcaagaaggctgcccttgcaaggttgagtggtgttcagaggaagcctcaaagtgtccaaggtctggggtcaggaacaggaatagacagggcgtgagagtcgcggggagagagtgaaagggaattgagaaag

SEQ ID NO: 79876 - DNA, 1232 bp, Glycine max
  unsure (1)..(1232): unsure at all n locations
  Clone ID: PAT_MRT3847_43142C.1
ggaacaatgacagaatcagagaagatgaaccccatcgatcaccttcccctccgtctgctcagatccgacacggttccacccgcccctaccttctctgaatccaccgtggatttcctccctcacttctccggctactcctggatcgcctacgccgcttcttcacttctcaccatctcccacttcccttcccctctctcccctcaccaaacccgcatcggcccctttttccgccaatccttccagctctccgcccatcccgtcgccgccgtcgcctggtcccccagctccccctcctccggcgacctcgccgccgccgccgatgactgcatctggcttttccgccacgactccgccgccggtaaaggttctttttgttggagccagaatgcagtgcttgtacaacatatgaaagtggcaaacatcaaatggacaggatcaggagatggaataatttctgttggaatggaggtggttttctggaaaaagagtaacacatgtccggaagtccgttggaagtttaaagcagatcagccccaaactcttgtttgtgcaacttggtctattgagggcccttcagcaactgcagcacatccaagtagagaacacattgaagggaccttgaccaatgaggaaagcaaatgtgtattggtatgtcaaagcaatggactatctgaatattcaaaagtcaaactacatcatcctctacctgtcgtaatgattcaatggagaccatcaagaggaaagctatcaaacagatatggtaagtgttctgtaaggcatgtacttttgacttgcagcttagatgggactgcaaggttatggagtgaaattgataatgcaaaggccaggagaactgcgaaggacatcaatgatcagaagaatgccggatgctctttttgtgttgttgctgttattgagattaatcagtccttaaatgcaactcttagttcagatatatttgtgagatggggaacagaatttgagggactatttcaaactgacaaagaggccaaacaagttttttccaaagaaggatttgagcatgatgttagaaattgtgattggcttgttgggttttggtcctggaatgctgcttagcttttgngctgtccactgtcttgatgatgtttcaccactgagattccccgagttacgttatggaagaacatgaactccagaccatgacatagcanatgttacaagtttaactcatctgattttaaaatgcacta

SEQ ID NO: 79877 - DNA, 420 bp, Glycine max
  Clone ID: PAT_MRT3847_43143C.1
gggcaatctttgccttgtctcaatttcccctctacattgatctcatacgggctacaaagaaagtaccagagcgtgaccaagaaacatttctacaatgaaaaatgctaagaacatactttataacattttcttttattgaaaattataaaattgggtatatttcatgtcatatttaatgactttatctcctaattttgtaaatttcaataaactttaatcagttaaaaaagatgtgattgaagttgtgccctaaagaataacactccttttttttctagaatagttgttagaccgtgccagcattccagtagaagagccaaaaattctgttacgttcaatgttcctgtaggctgttattatctaataccgcatcctactatctatacaatgtttatggtacatgtaacttaatcaagacct

SEQ ID NO: 79878 - DNA, 796 bp, Glycine max
  unsure (1)..(796): unsure at all n locations
  Clone ID: PAT_MRT3847_43144C.1
cggtcgtttgggcggacgcgtgggtttgtgagtggattcgaaaaagatgaaggtttggagatgggtggtgagtttgatgttagtggggttactgcccgtgtcaacaatgggtcgattcgtggtggagaagaacagcctgagagtgacatcgccggagaaaataagagggacacacgacagtgccattggcaacttcggaatacctcaatacggtggtagcatggccgggaacgtaatttaccctaaggataacaaaaagggttgcaaagagttcgatgagttcgggatttccttcaaatcaacccccggtgctcttcccaccattgttctactcgatcgcggaagttgcttctttgctttgaaggtctggaatgcccagaaggctggtgcttctgctgttcttgttgccgacgatgttgaggagcccttaattactatggacacccctgaggaggatggctcttccgccaaatatgtggagaacataactataccctctgctctcgtcggaaaaagttttggtctaaaattaaaggatgcctttagtggtggcgatatggtcaacttaaaccttgattggagagagtctgttcctcaccccgatgatcgcgtcgagtatgagttgtggaccaacagcaatgatgagtgtggtgttaagtgtgatatgctcatggaatttgtcaaggatttcaagggtgcagcccagattctagacaaagggcggnntacactcagtttacaccccattatattacttgggtactgtcctcatgctttcactttgagcaagcagtgc

SEQ ID NO: 79879 - DNA, 250 bp, Glycine max
  Clone ID: PAT_MRT3847_43145C.1
ctttagctcaactcgttcaataaactgtttatatgtgcacctgaccacacacaaccgcatgcggccgcctgaggctttcaactaacctcgtaccaagtttagttcattactgagaacgcgcattctgcaactggggtgggacgttgtcatacctcaacagactgaggcttggatatcctccttctatatacaaaaaccacagaacgactacgtggtacggactgatcctatggatagtgaaagataagat

SEQ ID NO: 79880 - DNA, 453 bp, Glycine max
  Clone ID: PAT_MRT3847_43146C.1
ggctcccgcttttttcatttgcagcatcaatttgagtggtagcaacgatggtagcgagagctggagcgatatgtttttgaaggcggctagtgcagctctcgatacaaaccgccgttgtcggcgagatatatgccattcttatattctcaacctctgctatctctgaaatggaagtgccaatcggcagctcacggtgtgagatcaaagaacaccgacgatggaggcttcgggtctcattctcgggagggtgccaccacggtcagtcgttggacgaaacctgccattggttgggtgaagctcaacgtttattgttgacgcgacccatacaaaaattcctgcgctggatgttgtggagttctgagggacgcatcaagaaagaggcttccaggctttgctaaagaactagacactacttatgcacttcaccacacagagttttgagccattcttacg

SEQ ID NO: 79881 - DNA, 239 bp, Glycine max
  Clone ID: PAT_MRT3847_43147C.1
gatagttgcagagaaacacttgctcactcagccccagcaaggatgaagacacgccacttacttaatgatctgtggctagtaatgctaggggtaaccctaaggtgtgcaacggacgaggattccactttcaccggcagcatcatttttaccacactcgggagaagcttctacgcctttgacatttatttccttccaatgccaagttaacaacaacaacaacaaccttttttcccaaggca

SEQ ID NO: 79882 - DNA, 471 bp, Glycine max
  Clone ID: PAT_MRT3847_43148C.1
atttcattttatcacaccaaatttgaccaattccaacctcgcttgaaaccatggctctctgcacatcttacttcttcttcaccttctttttcaccttctacttgttgctcttgaatcttcaaccttctgtttcccaacaacaattcacatccttcaacatctaacactctccatggttcccagcacagaacaaaacccttctctctccaaacaaaaacttcactgtatgcttctttcccatgccaaactcttgaaatgtcttcactttctccatttggtactccaaagtgcctgcaagtgcaaacccttttgtttggaatgccacactccaagtcaacactgttggctcccttgaaataaccccaaaaggtgaacttctactcaatggctcaccctttcaaagtgctgaaaatgctactactaactgcacttccaattcaacccaacttcttctacaaaacgatggaaact

SEQ ID NO: 79883 - DNA, 949 bp, Glycine max
  Clone ID: PAT_MRT3847_43149C.1
cccgtccccaaaaccctaatcgaggttctctcctcctcactatatattgcttgtgtcgctggagtccatcgcttagaaaccaaaaggctctctcacgcagtcgcagtgagtgaaaaggaaaaccctaattgcggtattctcagtgccttcgagagaaagaaaaaatggcagataatcttgttctccgtggcaccatgcgcgcccacaccgacgttgtgacggcgattgccactcccatcgacaactccgacatgatcgtcaccgcctcacgcgacaaatccatcatcctctggcatcttaccaaggaggacaagacttacggtgtcccccgccgccgcctcaccggccattctcattttgtccaggacgtcgtcctctcttctgacggccagtttgccctatccggctcctgggacggcgagctccgcctctgggaccttgctgctggcacctccgctcgccgctttgtgggccacaccaaggacgtgctctccgtggccttttccattgacaaccgtcagatcgtgtctgcctctcgtgaccgcacgatcaagctgtggaacaccctgggagagtgtaagtacacaatccaagacggcgatgcgcattctgattgggtaagctgcgtccgtttcagccctagcacccttcagcccactattgtttctgcctcgtgggaccgcaccgttaaggtttggaacctgacaaactgcaagttgaggaacacgcttgctggacacaatggttatgtgaacactgttgctgtttcccctgatggctctctgtgtgccagtggtggcaaagatggggttattcttctgtgggatttggctgagggtaagcgtctttactccctcgatgctggttctatcatacatgcgctctgctttcagcccacaggtactggctttgcgccgccactgaacagagcatcaagatctgggatttg

SEQ ID NO: 79884 - DNA, 917 bp, Glycine max
  Clone ID: PAT_MRT3847_4314C.1
gccagccagtgcgaaaagaaaaaaaaaaaagtaccaaaccatgataattaaccattccacgtgcaatttgctttaacttacgttgttcttgtgataacccgttacttactcagttactcttttgcgcaaacactgcgcaaagaaagagagagagagaaacacagacagagtaatgaagcgacagagcagcgccgtgtcgccgtcgtcgtcgcggcgagaaactccgccggagaagattcacgcgaagaccatcggttgcatgtccggcattctccacttcatctccaactccaattcccgtcgctctcgccgcttcctcacattcggaaagagccggattaataagaaccccgccgacgccggaaattcgaagccagccgccgatgaacggaggctgtcgtccgacgtgccgaggagtccgactttgccggcggagattcggctatcgagtgttaaggcgcctccggtggagagacgccgcgaggcgccggcgctagtggcgaggctgaggggcccgcagccgcccccgccggagccgccggtttccctcccggagatgccgccgccgctgcctggggcgtggcggaggtgcggcccgggtctccggccgcgccggcggagattcgacggtcgagtgctaaggcccctccgccggagaggcgccgcgaggcgccggctctggtggcgaggctgatggggctggaggccgctccggcggagccgacggatacggtggcggagaagaggcagaagcttctcggggcgttgcagcggtgcgacgaggatctgaaggcgctgaagaagatcatcgagaccgtgcgtttcgtttcgcgctggggcccacaccatatctgtttgcattttctttcttttctttctcccccttctgtcgtcttctcgcagccgtactcgagccg

SEQ ID NO: 79885 - DNA, 440 bp, Glycine max
  Clone ID: PAT_MRT3847_43150C.1
ctcatattatatgatatgatatgtaatatatttattcatttttgttgtgtatgagttgtttgcatcttgctagtgtaattgactaattgtgttgaaaaagaataaaacgagtaagttgcagtgttgttttttggtggcgtttgaaaaagtggcgatggtggggagaagggggtgagaccgccgtgagagggatgattgattattggttggtttcgaaatgccatacgacagtggcttttttgtcgtctgcctagagttttgcgcgcgcagtgctttggggaactggaatctgctgtttaactacacgctacacaggtccaacagatacaatctttgcttacgtgctcgatctttattggcggatagagttttgttagtttatctctaggaaatccagtaatcttgtactagtatttctaatttgattcatattctaacga

SEQ ID NO: 79886 - DNA, 588 bp, Glycine max
  unsure (1)..(588): unsure at all n locations
  Clone ID: PAT_MRT3847_43151C.1
tnccgtccgcttagtcccaacagcataatccacatatatagatttccttcggagatagtttgatggttaagcaacgctatgtatgaaagataaactttacataatcatcttctcgtaataaaatggagtagcaatagtttgagcgaggaatgcaaggattggggtttttagggtttgatgtctgtcaggggagagaaggagattgattttggcaataaaattgctttgttgtttcacttcaacatcaaaaaatggccgatacgatcagttgtttggcagacgcagttctgtgtaacattctatctttgtctcaaccaaagaagttgttgcaaacagcgttctctccaagcgatgggagcctctctggcgctcagttcccactctcgacttagaagaacacagctacctcaagctgagctatttccatttggaccaacccctcaaaagactccgccactgngttcgctcttctcgntacagncccgccgatgncaaagcatggctcgcggacgccgcgggntctcctgtgntccttggataattggnttaccctntgcctttgctaaagggcttnctttttgctgagct

SEQ ID NO: 79887 - DNA, 970 bp, Glycine max
  Clone ID: PAT_MRT3847_43152C.1
ggttgttcaggaggttgttcctgtattttcaggtgcacatgaagggctctgtttgtgttcatctagattactttttcctctgtgggaacttcctgtaatggttgtaaagggaagtttaggcccttcaggcactctatctgaaaatggagtagttgtgtgcagactctctgttggggctatgcaagtccttgaacagaaactccgatctttggagaaattcttaagatctagaaggaaccagaggaggggactttatggctgtgtagcaggtttaggagatctgagtggttccattctgtatggtaatggttcggcattaggagccggggatcgaaacatggtaagaaacttatttggtgcgtattccagaaatatggagtccaatggtggcagaacatctaataaacggcaaaggttgccatatagtcctgctgaattagctgccatggaggtgagggcaatggagtgcattaggcagttgctccttagatctggtgaagccctatttttgcttcaacttctttcacagcatcacgtgactcgattgattcagggatttgattctaaccttcaacaagcattagttcagttgacatttcatcaactagtttgttctgaggagggtgaccatcttgctacaagacttatatctgctctcatggagtattatactggtcctgatggcaggggcactgtagatgacattagtaggagattgagagatggttgtccaagctactataaggagtctgattacaaattctttttatccgtggaagccctggagagatctgctatgaccatagatgccgatgacaaggagaatcttgcaagggaatgcatttaattccttaagtaaagttccagagtctgtggacctacgaactgtttgcaaacgttttgaggatttaaggttatatgaagctgtagtgcgcttacctctacaaaaggcacaggctcttgaccctgc

SEQ ID NO: 79888 - DNA, 484 bp, Glycine max
  Clone ID: PAT_MRT3847_43153C.1
cataacactaggattgccagttgtaggagggatcagttccgagttttccaacttaaggaaagctgcggttacagattacaaaagttttgttggttcaatctcatcactctcagctaggattgttgagattagagaacttgtttcccagtgtggaaatggcaaaggaggcaactttgtgagagaaatgaacaattttcttgaaaatgctgaggaggaacttagattagtgagggaggagcaaacaagggtaatgcagcttgtcaaaagaacaacagattattatcaaggaggatcttcaaaagagagtgcagaaaaccctctttatctatttgtcatagttaaggattttctgggaatggttgatcaagcatgcattgagattgctcgtaacatgcagaagagaaagacaaagacatctttgtaatagtctgcagaggttccagcacaatggactttggagatttaacatagcagatcatcgaag

SEQ ID NO: 79889 - DNA, 201 bp, Glycine max
  Clone ID: PAT_MRT3847_43154C.1
cccacgcgtacgtaactgactatagcgacgttcttaaactgctgctaactgaggaagacgaggataccatttagcgtgaacctgacaacagcccatgtgcagcagaatatatcgggatccaaaagatcttaagatgcagttccatgatggccctttaataacgatcaattcgctcaatcttggaaaggaatcctagggaaa

SEQ ID NO: 79890 - DNA, 583 bp, Glycine max
  Clone ID: PAT_MRT3847_43155C.1
ccgggctacgagataccaaaaacgctgcggatcaataaggtcgtctatcaccttcctcgctcatacttctacgatgagtatcaatgtgatctgattgtgcttcgactcgccccaccggaccgatctgaggaaaaagttgatgtgaactttacttgacgccgatctgtcttcttgttaatgcacctaaccatattcatgatgaccgctcttcgttgcatctctattatgatgagggcattccaactatgtctcgacctgacaaggactaatcctgtactaaggacatttcataagcctcgtttatgcaactcattacctaatagttcctctcatacttctccattccatctgcgttattgtcatcatgatgcccggatgatgcttgactaggccatactgacatgtctacttctagattattagttcctccctcatatacgattatacattaaagattcattctcacatccgttgatatcgaagtgcctgcagctcttctatctgttcctaataatgagagatattacgcgagctcactgaaacgaaaaggtacctaggcccgagtgcgatcaacaagtagtga

SEQ ID NO: 79891 - DNA, 538 bp, Glycine max
  Clone ID: PAT_MRT3847_43156C.1
attcggctcgagcggctcttctgtggggatcttggtaacgaggtgaatgatgatgttctctcaaaagcattttcacggtttccttcctttaacttggcacgagtaagtggattcctcatctaactcgagttctctttatgtttagttatgattgttgtgctagtgtgagcatttttttatttcctgttcagatttttgtttgaagggacggagttgttaatgtgtattttaaggtaggtgttgctttataatttacattcgattagacattttttatgattaaaattgatgtgttattttgtcatctcaggtgtccgctttgttgttgctccttattcacaaatcaagggcaattgaaattatatgccggtgacataatgcaccttaatttgaacaatcgattcatttaaattagtgttggcctctctcaggggatgatcgccgcaacgggcttccacgtcggtgctaccttcttgcttttcgttgctgggttttttgggtctcttctcgttcttctcgctaatcctttggggggctt

SEQ ID NO: 79892 - DNA, 327 bp, Glycine max
  Clone ID: PAT_MRT3847_43157C.1
ccccacgttcgcgaacacgtgggggataaatgggttcttttaagggtttttcacaaaaacacaggggggacaaaatcttcaaaggtagtcccttcttgataaaatcccctaataccgcgtaaacctttttctatattactaccacctttcatgggtcctccttatgggaccaccaccgcctccaagattcttttccaaatattttttttagcctaaaatcatgtgctggttttttctctaacccatgttctaagaaaacaaaagggaatggcctttaatcacaagtttgaaaaattggcccctttttaaaaccctaaaaggtctccc

SEQ ID NO: 79893 - DNA, 230 bp, Glycine max
  Clone ID: PAT_MRT3847_43158C.1
aaggggcgcgagccaattatcacgatcctaaccaatctttactttttttccctcaactctcctgccattggtaccaaatttgagcccggccaaaaccctaattttctttctctcccgcacctatatcttcacgttttaggcaccttccgccatgcacaaattgtgaatagttcatcgtgacaaactccatcagctcataacaataactgttgccatttattaaattatca

SEQ ID NO: 79894 - DNA, 328 bp, Glycine max
  Clone ID: PAT_MRT3847_43159C.1
ttaggctttagggagtgtgggaggaagaaacagaatgtatttacaaggattgaaccgggattactccttgatgatgaagctgcctctaccaagagacgcaacgcatgaacaacctgaatagatcgaaagggaacttgtgcagatgactgaacaaatcaaatcatttatcccgggggttaatccaaccagggaggagagcatgatacccttgatggaatgacttctttacatgcatttggtccgaattccaaataatcccactaacttctttgatgtcgacagatgaaaaggcccgaaaactgtcctaccctatcgccaaaactatttt

SEQ ID NO: 79895 - DNA, 442 bp, Glycine max
  Clone ID: PAT_MRT3847_4315C.1
tgctcccttacctcagctctgagttcgagccgagcccatttgatgtacgtccatcggaccttactttatgcatcgtctgtcatctaggctaagcacacatggaatggcatccattctatatgatactatacaaatgcctcatgcattgtggacttacgcttcacacgatgtgcgacacgagccacataacacacataatggcaagtgggcttggttggatttggttgccacacaacgctgcctcattatctattgcctctctggttctgacctagtctgttacttgcggtgtagataagccccgatctctatgctctgtaaaacatatgaacatagcttgccgagagcgacccagattgtgttggctgtgttccggatgctctgcattcacaataccacgatgttctgcgccaatgctgagtatgatcatgactcatcagcc

SEQ ID NO: 79896 - DNA, 357 bp, Glycine max
  Clone ID: PAT_MRT3847_43160C.1
aggggaaaaaaaactttatagtgggggaaagcttaattcccaaatccttaatttggggaaacaaggccttaagcttgtaaataaattaaaagttggcttatttgccccaaaatcctttttaataattcccaaatccttaagcccaggtgggttacatggaatcacagaaccccaaaacctagtctttttaaacgggggaaggactaaaaatggcttagttaaccccagggggggcaaacccctgatcaatttaaaggccaatacagcaaaggctaaggcaaattttttagccgcctaaaataaacccccggggatagaataacggtcccattttttcgggggatcatatttccccca

SEQ ID NO: 79897 - DNA, 926 bp, Glycine max
  Clone ID: PAT_MRT3847_43161C.1
ggtccggaattcccgcctcgacccacgcgtccggttaggaagaagttatccaatcaggtggtcagattgagccgcctggaatgcacatgatttatcttccatattctgatgacatcagatttgttgaagagcgttattcagatacaagtgggatggtgaatatagcaagtgatgatcaaataaaaaaggcagccaatctaattaagcgtattgacttgaaagatttttctgtatgccaaatttccaaccctgccttgcagagacactatgcagtattgcaggcattggcactggaagaggatgatattccggaaatgaaagatgaatcattacctgacgaggaaggcttagccagaccaggagtggtaagagcattagaagaattcaaaacctctgtatatggggataattatgatgaggaaaatgagcctggcactgagaagcctactgaagcctccaagaaacgaaaagcaaatgctgagtttgcaacaaaagagtgtgaaaactatgactggggtgatcttgctgatactgggaaggtaaaccttgtaagttttttcatgtcaggctttttttatggagatcttgatcaaatttggtataggaagcggaagttcagcatcggccgaatattaacacacacagcaaaatgagcaaagggctgacgtttttgctaataattttgcaacctcgataactagaatgcaagactcctatttgccaccaaagctgctaaatcgatgtttggtttattattgttgacccggtttggataaaagaatgatttgtacttgactgatcaacatggcagtatagtatgtaatagcatattttactggtagaagataatccttgttagacctccaaccacaaagtaacacatcttattttgcaaaacaaaaaaaaaaaaagcttttccataaata

SEQ ID NO: 79898 - DNA, 799 bp, Glycine max
  Clone ID: PAT_MRT3847_43162C.1
gaacctttgctattgtctgccatgggagaagaagtgtcctacaaaaccgaaccagagtcagagctacactctgttccccaagagcataattcctctgctcaggaaaaagaattggagaaacctgaacctccaaacgacaaggtcactcctccttctccagttgctgctcaagaggttgcagatcatgctagtaaaaaggatacagaggagtcagtcgacaaagatgctatgcttgcaaaagttttaacggagaaaagattggctttaatcaaagcatgggaagaaagtgaaaagacaaaagcagagaacagggcatacaagaagcactctgctgttggattgtgggaggatagcaagaaagcatccgtagaggcacaactcaagaaaattgaggaaagcatggaaaaaaagaaggccgaatatgttgaaaaaatgaagaataaaattgctgaaatccaccggttagcagaagagaaaaaagcaattgttgaggctcagaaaagggaagaatttatcgacctagaggagactgcttcaaagtttcgtagccgtggagatgtgccaaggaaattttttgcatgctttggtggctaagcttttacatgaatatcggggaccaaattctcgctggatttgttatatgttgttacatatacatttaaattttgcttggtgtgttgttttttcctatatgctatttgaatcaaatctcaacagttgatttgaagtgcacaaatttctgtataaataagtgaagaaattttgtctacatacttataattgttctatattgactatt

SEQ ID NO: 79899 - DNA, 298 bp, Glycine max
  unsure (1)..(298): unsure at all n locations
  Clone ID: PAT_MRT3847_43163C.1
acaatttgtcctaaactacnttcccacataaaccttatatcacatcaaatatttcaataattgttcttacattcagcttcatcttaacaaaaacacttttactttcttccattccaaaaattcttactttttttttcacttcatcatatacataaagatatttcctttatattcttcttacacaatcacttctttctattaatcttcccaaaactcttatcattattatatatactttctattctttttaaacataacaatacaaccttacattctacaaacaaattttttcacccaa

SEQ ID NO: 79900 - DNA, 516 bp, Glycine max
  Clone ID: PAT_MRT3847_43164C.1
aattcggctcgaggatccttatgttttcagctgaccttttaaagtaaatcataattatattattgacaagtctatgaatgattaaaacaggatatcctaaataaaggctataaatatgtttggcaagaaacactaaatttgaataacactggatttcagcaaaatttgttagaaggtctgtttctttctattttattcttgcagatgacaaataaagttgggaaggaaattttccaaagggctggagaactcaatgtgccagtgggcttcatgtgtatgaaggggcttgatctgcatatttctgaaattgagcaattgtgcacagaattcccatcaacagttgtattgcttgatcacttgggcttttgcaaaccaccaataaatgatgaggaaggtcttgtcttttctcaacttttaaatctgtctagattcccacaagtaagtgtttgattctttcctcatgacaaaacttcaagaaagcaaagcatgcataatattttcaattattgcattttc

SEQ ID NO: 79901 - DNA, 148 bp, Glycine max
  Clone ID: PAT_MRT3847_43165C.1
agctacctatccaatcctactcctcaacaaaccaacttatttttttttcctatataatatctaaactctatttcaccacatctacgacgggcatctgtatacaacacaatctatccatatccatcttcctatacacttaatatatata

SEQ ID NO: 79902 - DNA, 452 bp, Glycine max
  Clone ID: PAT_MRT3847_43166C.1
ggtcttcttaaaagttttgttccttcgaacgatatgagcaagaacgcaacaccaaaggactcaggcgacgaaaccgcgacccacttggattttttcaagaaatttaaacgctttaaccctttcgagtcttccttggccgtactcgccttcttcttcgtcgcttttgtcttcattgccagcttcttctacttggattaaaaaggcttccgctccagggcactgccactgtccttcacttggatttgtcctcatcatcatcatcatctgtttcttcttcttacccagttcagtttctgagccaagatggtgataagtgtgatgtctttgatggggattgagtttgggatgagacctatcccctttactattccgcaaattgttcattcttggatcaaggttgtcgctgctcccaagatggcaggcctgacgctttctacactaaatggcgctgg

SEQ ID NO: 79903 - DNA, 175 bp, Glycine max
  Clone ID: PAT_MRT3847_43167C.1
gggtcaccgggtgactttattcacaagaggtaaaccccctgtcacttaacagttgcctggtgtatctgactgtgatatttctgattgttctgctatgatcttgcatttgacatgagacaggaaggactgcgattttgtagaatccggtctcttcttagatggatttgttgtcttg

SEQ ID NO: 79904 - DNA, 456 bp, Glycine max
  Clone ID: PAT_MRT3847_43168C.1
ggaaaggaataactggtgccatctattacattaatcctaatcgccctacaaacgataccacggagaactaattgaacaggggcatgagctacttattttccattacaggacacggaaggagtgcaaagtttatttagggatgggatgcatctgaacttataaaggccttcataaatggaaccgaatactttataggttgagatagagcctcatactcttatggagggggaattgggtcgcgaattggaaatggaggtagaagtggtttcttgaatttggggtgaagaggtatcttacgaatatacgcttttagaagaaaggattcgggtatagaaaaacctccgacttaacaggtgggatgggctttttcctataaatggtgtacgggatacgcttaagaatgggaacaggctccggcacagggttaataattggaaatggttaaacgacgggaat

SEQ ID NO: 79905 - DNA, 483 bp, Glycine max
  Clone ID: PAT_MRT3847_43169C.1
caagactgtatacaaagcgtttgacgaagtggacggaatcgaagttgcttggaacatgatcagcgttgaggacgttgtgcagacgccgcagcagctggaaaaattgtactcggagattcacctgctcaagtccttgaaacacgacaatgtcatcaagttgtataattcttgggtcgatgataccaccggcaccatcaacatgatcaccgaattgttcacctccggaagtttgaggcagtaccggaataagcataagaatgtggatatgaaagccatcaagaactgggcgcgtcagattctccgcggcttgtgctttctgcactgtcacagtcctcctattgttcatagggacctgaaatgtgataacatttttgtcaatgggaatagtggactggttaagattggagatcttggattggcaattgtcatgcagcagccaactgcccggagtgtcattggtaccaccgagtttatggccccaga

SEQ ID NO: 79906 - DNA, 2356 bp, Glycine max
  Clone ID: PAT_MRT3847_4316C.1
tctctcgtccgcgaaatctttaatccacagcatgtgctttacgctacctgtatatatgtaagatggtcaaaattcttcaaatactttttttattgtataggagcagaaccagaagagaaggctcaaccacaaagggatccaatttcatttttcatcttcctcttcttcactctcttttatggctccaagcaagctcaattcctcgggaaatactagtatgccatgttcacaggctgagaatggttttgtcaattccttttctctcttccccgagaaagtggtgcaagagcttcttcaatctccagtccaggggtcggatgaccatcttattgagttctctgaagctttaagaactgttgcgaaggctctcaggctagttgccgaagggaaagcttctgctcaagctgaggctgctgaatggaaacgtaaatatgagttggagagggatcggaatctgaagtttgaacatgcagagaaatcatgtatagagcatcaggctgaacatgaggatgtgaggacaaataaccctgccaaacaacctgttttatgtaatgaagctaatggacagtctgagaaatgttgttcaaggaatggtatttgctcccatgaagttcttagggatggaacacctggttctgattccaagatggtcaaaaaggcttcatttaaactctcatggttcagcaaaggtgatcaaagtgatcagtacaaacacgacattgtctcttttgaaaggggaaatataaccactgcagagcgcagtagtaagcagatctctttgaagtgggagtcatgcccacagacagtgctcatattgaccaaaccaaattcagtttcagttcaaattctgtgtgctgaaatgattacatggttaagccagcaaaagaatctacacatctatgtggaaccacatgtcagggttgagcttttaacagaatcatcatactttaactttgtagaaacttggaatgatgataaggaacttttgagactacacactaaagttgacctcgtggtaactcttggtggagatggcactgtcctatgggcagcttcaatgttcaaagggccagtgcctcctattgtccccttttctttagggtctcttggctttatgacccctttctatagcgaacaatacaaagaatgcctagaatcaattttaaagggacccattagtatcacattacggcatcgtttgcaatgtcatgttatacgagatgcagctaaaaatgaatatgaaactgaagaacctatccttgttctaaatgaggttacaattgaccgtggaatatcttctttcctcaccaatttagaatgttactgtgacaattcctttgtcacgtgtgtgcaaggggatggattaatcttatctactacatctggcagtacagcatattctttagcagctggaggatcaatggtccatccgcaggttccaggtattttattcactccaatttgcccacattcgctatcttttaggccattgatatttccagagcatgtgactttgagggtgcaagtgccattcaacagcagaagccctgcatgggcatcatttgatggcaaggacaggaagcagttagcacctggagatgcacttgtgtgcagcatggctccatggcctgttcctacggcttgtttggatgattctactaatgacttcttgcgcagtattcatgagggcctccattggaatttgagaaagacacaatcatttgatggcccccgggaaacatgacttctttcttagtaaactttagttgcaaactggttagtcatttatcaagataatagcgacttgttacagaaaaaatctagtgtaattttattcctttatcaatagtcacatgtagttataattattagagtaaattatactcctctacaccctattcctctctcttattttagaatgtatactctcctcttgagaaagagatgaatatggatcatactttagatcatttcaatataaatgtaccttttaatagtaatgaataattatgaatgtaattctctatgtgaaatcaatttaaattaattgggtacataagagagcagtctatcttgctattatacaatggaactgggtatttccttgattttagtatttgaagaaactatttctgatccaaatctagtaaaggttcattttcaaagtgaaacctgtcaactttgtcacataaaatatggtttgaagccataaaattatttttataaaatttaaccaacaagtattgggaataagagagaaaatggcacaccacaagaaactctcaggtttccagtaatttatccataccactgatgccttgagttgattgcaaattatttttttttgattaatact

SEQ ID NO: 79907 - DNA, 823 bp, Glycine max
  Clone ID: PAT_MRT3847_43170C.1
tgcgttacatagccgcattgactaagtactcactgtatctctctattctcccaaaaaataacaaaaaaatcacataaattattctcttggagagacttgaatccctctccgatgtttatatatattttctgtggataaactcttctccatcacactgaattgacacccttatccattgaatgcaccatcaatgcgccatgagaaacagcttcaagaagaccatgttcggggctcgttcttctctgagggtttttatatcaagtaccatctactcacatcattcacgtaaaatttgtagcttttcgcaggaccatgatccgggttcgtgggaatcaatggagggtcttcttcgttgccctgcgaatttcgttcctctgtctcccatcagcttcctagagagagcagcgaaggtttgcagagacagaacctcgcttgtgtatggttctttggagtataactggggtgagacccatcaacggtgcttgaaactcgcttctgctattacccacttggggatttcacgtggggatgtggttgccaccctatcacctaatgtccctgccatgtatgagctacattttgctgtcccaatggctggagccattctttgcacccttaactcacgcttagatgcggctatagtttcagtccttcttgagcattcacaagccaaggtcctttttgtagactatcaactacttgaaattgcacgaggagcattggacctgttaagcaaaaaagctagagaattgccaattttagttctaattgccgacaatgattgcacatctcacattgacattacttcagttagttatgagta

SEQ ID NO: 79908 - DNA, 3123 bp, Glycine max
  Clone ID: PAT_MRT3847_43171C.1
tttcgcatctgataaagaaaagcgtgcatccgataaagtgcatcgcatcgtgttcggtactgttgttgggttcccgaaggatcaggtcatggaaaagcaggtcaggtcagggaattagcgtgtaaccgacttctccttccatcctctccggagttgtgtggaaagaaataaaataaaataaaatcatagttcagctcaagtgaggattgattgattgattgatcgaattagaattagggtttgtggtgaagaaatgcagatagaggtatgttcatgggtgttacaatgattatgcgctcccattcttcattttcttcttcttcttcccctttgtgcaacaacgataaaatgtgttccgtcgaatgccgattccgatcggcgttcgattcatattccgtcgcttgtgaggccttctctgaacctcagccttcccctctttgatacactctcttctctccctctccatctcggcgccgtcgccatggccactttccacgttgttgagaaagatccaaccttcagtacgatgaattgttggggaaaggagccttcaagactgtgtatgcctgcctctctctctataactcatccattcctttgccgcttttatttattgttatttattttgaatttgaatgttgttgttttttatatgttggattggtgcagatacaaagcgtttgacgaagtggacggaatcgaagttgcttggaacatgatcagcgttgaggacgttgtgcagacgccgcagcagctggaaaaattgtactcggagattcacctgctcaagtccttgaaacacgacaatgtcatcaagttgtataattcttgggtcgatgataccaccggcaccatcaacatgatcaccgaattgttcacctccggaagtttgaggcagttgagtttatttattttcctataaatactcattcattttagggtttggtctgttgaatttgattgtctgattgagatgagtgtctccattaatccaaatcacgtttttacattgagatgagtgtctaatcctattaatttttatccggtagacgtgtgccaaggcccaaggatatttacattgaaatgtggtttttttgttgttgttggagaatgtcagaatcgattttctaaattgaaaacaatcacgggctcagccttttgctttccttttctcatgagttgagttttttgaatttgttctaaacactaagtgcttgattgatttacggtttggtagatttgatgttgttgacattgatcaaatttgattgagatgtgagcctatgctaatctgaatcacttatttaccttgaaagtgcaagaattgatgttttcactttaaaacaaataggggttaagcttttctgcttaactaagaatgtggatccttcatgtgcaggtaccggaataagcataagaatgtggatatgaaagccatcaagaactgggcgcgtcagattctccgcggcttgtgctttctgcactgtcacagtcctcctattgttcatagggacctgaaatgtgataacatttttgtcaatgggaatagtggactggttaagattggagatcttggattggcaattgtcatgcagcagccaactgcccggagtgtcattggtacaccggagttcatggccccagagctttatgaggaggaatacaatgaacttgttgacatatattcctttggcatgtgcatcttagaaatggtcacctgtgagtacccgtacagtgaatgtaaaaatcctgcacagatatataagaaagttacctctggtataaagcctgccgcccttgctaaagtaaatgatcctgaagtgaagcaattcatagagaagtgtctagttccagcatctatgagattgtctgcatctgaacttctgaaagatccattccttgcaactgaaaacacaaaggagatcaatcatgatacgctgcagctgcctaatcctcacatcaaattggtgaatctaccaaaatgcgagcctcatcccatggagatagattcataatccaggcgtacttcacctggctcctccatgggaagaattgaagaaacttctcaagtttcattttttgatcttgtgaggatgaccgagaataacaaatttatgctaagaggggagaaaaatgctgaaagtacaatttcactcacactgagaattgcaaatgcttgtggtggagcgaggaatatccatttcccattctatatcaattctgatacagcaatttccattgctgaggagatggtggaacatctggaactcacaaatgaggatgtatctgtcattgcagagctaataaatgacatgattgctaagcttgtccccaacttgaaacccttaagtgagaaactctcatccggaacagatcaattgtacaggccttcttcggaagttcagaatggtgaacaattcaactgccactggccattacaatcaagtgattatgatatgaagcctgtgtttaaggatctagttcactcatggcctgttgacggggatgatctggagaaacaagaatctgttatgtcagatatatcagtggagtgtgggattacagttgcctcagattctaaagttgtagagcctgacatttttatttttgatgaattctgggaggggtttgatgcattcaattccacttcagatgtcaggttttgtgggcaagaggatggacacaagaatcaatcagagaactcatcaggctctttaatcaattcatgttgctgcccattcaaaaactttgacatatcaagtatatgttctcttactctagctgacaaagatccttcagaagggctgcggttggaaattgaagcaatagatacatactttgaacaacgctttcgtgagcttgagatgatgagggtggcagccatagaaagtttgaagaggagacatggcgagaaacatacctgtgatgtgatgcattaggatgattttctttgattttttttaaatatgcaattttttttgcattcatttacatcatttgatttatgttaagagtgtgtttggatagagaattttaactaaggaaagtaatttatcagagaatttaaatttctgtaaaataaaattcaaaaaactcgagactagttccctcgtgccgaaatcc

SEQ ID NO: 79909 - DNA, 315 bp, Glycine max
  unsure (1)..(315): unsure at all n locations
  Clone ID: PAT_MRT3847_43172C.1
agncngaccgagnaacncggaatcngctcgannnctgatnccacacaacatacnancannnnaanacnncaacancnnctanacncnatnnncncnncnaacnngnnnnaacnacgnntgtanggancgtnatncnnnancattcaagagacngtncnnnncnacaacncatgnacaggccnatctggnanccnacanancnctannccangnnaatcncggnctannnaaactagnncgngttntannnaganannnanagcnnnncanaagtnnnccngngnnnncngacnanagnctggaccacgatancnc

SEQ ID NO: 79910 - DNA, 638 bp, Glycine max
  unsure (1)..(638): unsure at all n locations
  Clone ID: PAT_MRT3847_43173C.1
ccacgcgtccgagagcgtgttctaatatagcagctactggtgcagcatgccttgcttcaaatgttcctgtgaatgttagcgaaaaacaaccagaaatggcatccaatatggataatttggagggtaaagcaagtttagatatgccaactactggagaacatagcctgacatcagatgttaaagaaaaggctgaacagatgcaacattctgttgaaagctcaaccacgagttgtaaaatagctctagatacaactctcaatgctgtccaaaagatcgatggttcttctgagagacttccaactggctctgctctcaatgatttaaatatagatagttctagccatcagatgtgttcatcttcaggtgctgaacctcttgcagtacttgatcgtaagcttaaaaaccaatccgactctttagagaagtgttcaagatcttctcctcttgatattggtggcacaggatgcccaccaactccattggaaccagacagttttagcaataatcctgtaactagtcaggctgatacctgcactcggagccattcattctcaaacaaacctnctgataccacagaacacattttctaatgaaaaattggaacccttgcaaccatttttgaaaatcttatctcttgc

SEQ ID NO: 79911 - DNA, 2249 bp, Glycine max
  Clone ID: PAT_MRT3847_43174C.1
ccttacatcaccgagaataacacgatacggctcattgggaggaattatataatacacgtgaacgtgctcggcagttgttagccaatggaagctctgaaatccctgaggagactaccttcacaaatgttgaacagttcctggagcctcttgaattatgttatagatcgctgtgtgcatgtggtgaccaaccaatagctgatggaagccttcttgatttcttgcgccaagtttccacatttgggctttcacttgtaagacttgatatccgtcaagaatcagatcggcacactgatgttatggatgctattacaaaccacttagagattggatcttaccgagagtggcccgaggaaaagaggcaggagtggctcttgtctgaactcagtggaaagcgccctctctttggccatgaccttcccaaaacagaagaaatcaccgatgttttggaaacattccgtgtcatttcagagcttccctcagacaacttcggtgcctacatcatatcaatggcaacatccccatctgatgtgcttgctgttgagcttttacaacgtgaatgccatgtgaagcagccattaagggtggtgccattgtttgaaaagcttgctgatcttgaggccgctcctgctgcggtagcccgtcttttctctatagattggtacagagaccgcattgatgggaaacaagaagttatgatagggtactcggactcgggaaaagatgctggtcgtttctctgcagcatgggcactatacaaggctcaagaagagctcataaaggttgcaaaagagtttggtgttaagctcacaatgttccatggcagaggaggaactgtgggaagaggaggaggtcccactcatcttgctatattatctcagccaccggatactattcatggctcacttcgggtaacagtgcaaggtgaagttattgaacagtcatttggagaggagcacttgtgcttcagaacacttcagcgcttcactgctgctacacttgagcatggaatgcaccctcctgtggcaccaaaaccagagtggcgtgccctcatggatgagatggctgtcattgctacagaggagtatcgctccattgttttccaggaaccccgtttcgttgagtacttccgatgtgctacacctgagctggagtatggaagaatgaacattggcagtcgtccgtcaaaacgaaagccaagtggaggaattgaatcacttcgtgcaatcccttggatctttgcttggactcagactaggtttcatctacctgtatggcttggctttggggcagcatttagccatgttattaagaaggatccaaagaatctccaaatgcttcaagatatgtataatcaatggcctttcttcagggtcagccttgacttggttgagatggtgttcgccaagggagaccctgggattgcggctctttatgacaaactcctagtgtcagaggaactgtggccatttggcgagcgattaaggtctatgtttgaagaaaccaagagccttctcctccaggttgctggacacaaagatctccttgaaggagacccctacttgaagcaaagacttcgacttcgcgattcatacatcacaaccctcaatgtcctgcaagcctacacattgaagcgaattcgtgatcctgactaccatgtgaagttgaggccacatttgtccaaagactacatggaatcaaacaagccagcagctgagcttgtgaaactcaaccctacaagtgattatgctcctggtctggaggatacccttattttgacaatgaagggtattgctgctggcatgcaaaacactggttaagaagctgcatgcctgtgttgccttcctatacaagtaacttaactttggatacacacattttaacctatgttgtctgctacagatgtggaccagcattaaataacaattacgctatctattatcgttatcatgtaataaaaacggattttggcttatgccagcttggattttaactggattctcttctgtttgaaaaaaaaaaaaaaaaatgccataaaagtggtgtttttcttgttaaataatgtgtgttgtgattgtttcatggatatataagcattataacctattatgtctacgacagatttccaccaatatcaaataattgttcctctgttgttatcaatatagtatcatcatacaataaaacaaggttttggtcaaagtcaaaaaccaagagaaagactagttctaggtccggaccgtctactgtat

SEQ ID NO: 79912 - DNA, 654 bp, Glycine max
  unsure (1)..(654): unsure at all n locations
  Clone ID: PAT_MRT3847_43175C.1
ccacgcgtccgggacttggttgagatggtgtttgctaagggagacccggggattgcagccctatttgacaaactcctagtatcagaagagctgcgtccatttggagaaaatttaagagctaaatacgaagaaaccaagagctttctcctccaggttgctgggcacaaggatattcttgaaggagacccctacttgaagcaaagacttcgtcttcgtgactcatacatcacaaccctcaatgtgttgcaagcttacacattgaagcgaattcgtgatcctgactaccatgtgaagttgaggccacacttgtcaaaggactacatggaatcaagcaagccagcagcagagcttgttaaacttaaccccaaaagcgagtatgctcctggtcttgaggacacccttattttgacaatgaagggtattgctgctggaatgcaaaataccggttaagttgccatagaagtggtgtttttcttgttatatgatgtgtgttgtgattgtttcatggatatataagcattataacctattatgtctacgacagatttccaccaatatcaaataattgttcctctgttgttatcaatatagtatcatcatacaataaaacaaggttttggtcccagtctttaaaaaaaaaaaaatnnnnnaaaa

SEQ ID NO: 79913 - DNA, 461 bp, Glycine max
  Clone ID: PAT_MRT3847_43176C.1
gttagagagcaatttagtggtaagatcagaaagtcaagtcgtttgtttcaaagcatcctcgaacttttggaggccgaggatgcagccgaagactccaaccatgtcaatgggaaccagaatttctcccgtacaacgataatcactaacggtggcggaaattcaggtggcgaccggaacaggtcaaacaccccaaaccgttatggcgtttgcaccataaataacacttgtactttcagtgccactagtggcaatatcaaccgaggctttataaggaggatgtatttgactaatactccatcaggaactactagtattatatactattagttagttagttaatctactatgttatgctgtattaccaataataaaagtggagcaatggttctactaccggatgctctataacaaatatactagtttactttggagtgttacgtaaaccttaaaatgttgtaatg

SEQ ID NO: 79914 - DNA, 439 bp, Glycine max
  Clone ID: PAT_MRT3847_43177C.1
gggggctccaataaaccgtaaagcctatcttgacccgacttgcattgctgaacgagatgatgtcgcatagcaagaagtcaacgttgcatatgatgcatgtacagtcacatgtgactgggcataattgcttgctggcaaggccggaacccacaaaccatgagccggcctacacgctccttgcatcaacggcagactgacatttgcttcactgatcccatatggtgagccagcagtgcacagctccaacagctgtagtttactacgacttatcacctgcggaggccgattgtcaagagggtggcgctcacattggtgcacatgaaccggaggtctatgatccactggctacgaaaacttgttggggaaagactcccaaggaatggctactgtatctaccatgtgtcacaacttctacagagtcgactacaactgttgagag

SEQ ID NO: 79915 - DNA, 642 bp, Glycine max
  Clone ID: PAT_MRT3847_43178C.1
caaatctcacactctctcacttacagccatgtccatggattctatggccacttccatcggagtctcggtccccgtgctccgcttcctcctctgcttcgccgccaccgtgcccctcagcttcctctgccgcttcctcccccgcggcctcggcaagcacctctactcctccgtcgtcggcgtcgccctctcctacctctccttcggcttctcctccaacctccacttcctcgtccccatgttccttggctacgcctccatgctcctctatcgtcctcgatgcggcatcctcaccttcttcctcggatttggctacctcattggctggttcgtacaatcgatctattttctcttcactattcaattctccccccctctctttgacctagccccgcgtttgcctttctctcttctgcagccacgtgtattacatgagcggtgatgcatggaaggaaggtggcatcgatgccactggggctttaatggttttgacgctcaaggttatctcctgtgcggttaattacaacgatggtttgctgaaagaggagggtttgcgtgaggctcagaagaagtacccgttgatcaagttgccttccctgattgagtacattggttactgcctctgctgtggaagtcactttgctg

SEQ ID NO: 79916 - DNA, 2680 bp, Glycine max
  Clone ID: PAT_MRT3847_43179C.1
caccaattatatcaacatttttggtgttgagtttgcaaagagtgcagttactattccagctgtgtggaatattcaagtcagcacctggcttcgtcattatgtttacgaaaggtttctttccagtctgcgttactgatagctgggctcgagcaaagaagacatgacagagcactaactaagaaagatccgttggaagttgcggccacgcaaaggaggctggcatggtacttggtagggggtaggcgcgtcatttcactaatattctgagcaattgagagcttgagttgaagaaagcaccataaataaatcttcttcttcttcttcttcttcttcgcttcggtccgagcaaatctcacactctctcacttacagccatgtccatggattctatggccacttccatcggagtctcggtccccgtgctccgcttcctcctctgcttcgccgccaccgtgcccctcagcttcctctgccgcttcctcccccgcggcctccccaagcacctctactcctccgtcgtcggcgtcgccctctcctacctctccttcggcttctcctccaacctccacttcctcgtccccatgttccttggctacgcctccatgctcctctatcgtcctcgatgcggcatcctcaccttcttcctcggatttggctacctcattggctgccacgtgtattacatgagcggtgatgcatggaaggaaggtggcatcgatgccactggggctttaatggttttgacgctcaaggttatctcctgtgcggttaattacaacgatggtttgctgaaagaggagggtttgcgtgaggctcagaagaagtaccgtttgatcaagttgccttccttgattgagtacattggttactgcctctgctgcggaagtcactttgctggtcctgtttatgaaatgaaggattatcttgattggactgaaggaaaagggatttggggcactgaagcaaaagggccatcgccatcaccttatggggcaaccctccgggctcttctccaagctggtttttgcatggccatgtatttaaacctcgtgcctcattttcctttgtccaaatttactgatcctacctaccatgaatggtgtttctggaaaaaattaagttaccagtatatgtctggctttactgcacgctggaagtattatttcatctggtcaatttcagaagcttctattatcatctctggcctggggttcagtggctggactgattcgtccccacctaagcctcgctgggaccgggccaaaaatgttgatataattggtgttgagtttgcaaagagtgcagttactattccagctgtgtggaatattcaagtcagcacctggcttcgtcattatgtttacgaaaggcttattcagactgggaagaaaccaggtttctttcagctacttgccactcagaccgttagtgccgtttggcatggcttgtaccctggatacataatattctttgttcagtcagcattaatgattgctggttccagagtgatttacagatggcagcaagccgtgcctccgacaatgtctctggttaagaatgtgttggtgtttacaaattttgcttatacacttttggttctaaattactcctgtgttggtttcatggtgttaagtctgcatgaaactcttgcatcatatggaagcgtgtattacattggaactattgttcctgttgttatgattcttcttggtaaagtaattaaacctggaaagcctgccagatctaaagctcggaaggaacagtgaggtgacaatgctgtttattcttgttggaatttttgaaatcagattaggataatgcggcagaagggtttctagttcccacaggttttctggccctggttttcaacattgttgtaacagctcctttggtcttgaaaatggttgggcgctttcatactcttggctttagcattgaattgtatttctgtgataagaaacttcttgttggcaggtttgataaaagctgttattgaagaaatgttagaaacatttgtatttctgtgatttctctctactttcagctctctctattcctaacaattactgcaagaggctctagttttcaaatcttaaccatagacaaatatgcagatactctgatgtatggcaacataactgtaccatctaattttcaactctccaagccacttttctgacattttgtacaaaaatgatacccgccttgttggacataaagtatgggcactgtcactaagaaaattttggatcggaactgcctatcataggtcttaagaatttcatttttattctgaaatgcacctatctgaaaatgtctgggacagtgcttacctaactgacctaaggatatctaaattgtgtaggtttagaatgtcctgaaaatgtcttttgccttaagactgagatatacgataaggtgaggtagtattctactgcatgtgtggcctctaattgcctatttcaagtatttctagaccatgccaataagaaaaaaaggaacagggagggagagcgagaagttcccataacgttaagtttgttgaaggtgaaataaaattattcaatccattaatcaaagtaccattctcgtcttaatgtattcctgacgtatcaactggtttctccggtattttcgttctttaaatgtcactaatgcaaacaaatgaacagggtgtgga

SEQ ID NO: 79917 - DNA, 214 bp, Glycine max
  unsure (1)..(214): unsure at all n locations
  Clone ID: PAT_MRT3847_4317C.1
gaaaaagaaaacttgnattgcagtgnttttcatataccagcatcattgcagggattgttcggtgtgatcttccaatgaaggatcttcttcttccaccctaacctccggaaggtcatggtccaaccatgttttcttgaattttcgggcgtcataacaccccccaagggttcaattgcccacctttttctttccttaaaagaagggggatccaaac

SEQ ID NO: 79918 - DNA, 366 bp, Glycine max
  Clone ID: PAT_MRT3847_43180C.1
cacaacaccccctattcgggcgttatttataaacaaacagcacacctataatcccccccttcatgatacgtcgggcctagttttaaaataactcatccgcccaaaaccgagttccccatagcgagaggacaggacaaatcagatgactgtgcacccatgcgccaccatagttttataaaactacaactcaagaaaacgcctttttttaataaaaaaaatatctcccttctaataaattaaatgacgggggggcacaaggacttcgaccagactccacaggttatccattttgtgcccctctgcacccatgttgtgcaaccctaaaaaccgttcaagttggttgagggtgagaccatcccctccccc

SEQ ID NO: 79919 - DNA, 276 bp, Glycine max
  Clone ID: PAT_MRT3847_43181C.1
gatgaatataaaccataactgatcaggcgaactaattaagaataacgcccccggcccaggatggtagagatgacaaattaaatctctactttaataacaaaaacgttcaatgcaagcttttacaatagtaaccaattcgcggagttgaccgctacatggaactggactttgaacagtagatccaggctctaataaaactatggtgggagagaaaaaatactgcaagaaatggtatctagactgatctgctccttaaagggggtaaagagaagtgag

SEQ ID NO: 79920 - DNA, 705 bp, Glycine max
  Clone ID: PAT_MRT3847_43182C.1
caagaacagaagctgctaacgaacagctgcggaaagaattggaggagaaaatcgaccaggtcaaaacttattacaataagcatcaacttgaaaagcaggcaaataaagagaagatttgttttggttgcctggaagttcacgatatagctgcctttgtgctcactccagctggtcactacgaggcaattactaggaactgctctaactactacttatctgatgaatctgtagccctgtttgcagaccatcttcctaccagacctaactacatcgttggacaaattgtgcatattgaacgccaaattgtgaagacgctgccgcctcggcctgagcatggtagggctgataaatttacccctgacaaggggactgactggttgaccttgaattcaggatcaactccgaacccttacggtctccctgttggctgtgaatatttcctagtgacagtagccatgttacctgatacccccattcattcatcctctccttcctgatcctgcttcacccctggcagattagacgtgatggaagaatttaattgtacataaactacattcaaaatccaaatgctctttcttatggtcggttaaccatttatacagctgatgaaccaatttagtttcaatcttcctcgtgtacatatttctaccctttatgataatgtataaattgtgaatattattttcaacttgtttatttgga

SEQ ID NO: 79921 - DNA, 302 bp, Glycine max
  Clone ID: PAT_MRT3847_43183C.1
acgctttctttgactagacttgccatttgcacctgtatgatcgtacaaattatcatggttgggttgaatcttcactgaacaataatattataatagagaatcttggatcaaaacagacggtttaatagaaaaaaaaaggataggacttgtgatctcactgaacaagagaaacgcgtgatggtgcaaaacgaaataaaaacacgggggggcgtgctaagggtgtccaaggttactaaggcgggcatgcgaaaattaaggttgtttgttgtgtccactaaattcaattaagtgggcggtgtttt

SEQ ID NO: 79922 - DNA, 660 bp, Glycine max
  unsure (1)..(660): unsure at all n locations
  Clone ID: PAT_MRT3847_43184C.1
gaaaagaatgtagaaaatatatagttatcagttacaactttcagcttacagaaattgctggtacttgttggtgttgattttttagtgagatcagagtaaaactccaagtaattagcaaatagaaaagtacaacattataggagcaactaagattaaaccaagattaaaccagtagttgtaaaagtttacactaacagtgaatcaagattaaaccagtagttgtaaaagtttgatctatgattgtaagtatgtttattttaactaaggtttctctagcatgaaacttgaaatttagttctgatgcttccgtggtcattatcaagttttagatctaatatctgatggtgacaccccgagagctctccctcttcataaaaccttatattgtgcatgtataggaagatttattttatttttttcataaaaaaagaagagggggccagggataaaaacagtgctagttagtacgattaactgtactcatggtctgcccattttttgccatggaactatggataaggtgatttatagcttcactatgcatttccatataaatgttgttttggacttattcatttgtttttgtttctgtttcaaggattgtaagtgtaacattcataataggatttctgggcttcttgtggcttcnttttccaatga

SEQ ID NO: 79923 - DNA, 444 bp, Glycine max
  Clone ID: PAT_MRT3847_43185C.1
agtttaatatttttaaattgatgaaaaccatccaataatcctaacccatctattcgactcaagcattgatgtattaggattattggatggttttcatcaatttacatatttaatatttttaaatttccttgtagtgaatctgcatactatttgtattttattgcatttttggattgattttgggttgattggatacaattgccacactaactctttaagtatagctccctaaggattcagcttctcagtaatcaatacagatcactcttgatttagagtgaaactagaatgcattggatagatgcttgatactcataagcaggagtcacatctcagatggtgaaaattgtgttgatgttaagtgatgagtgtgtgtctgtttgtgctagtaactctacttggggggttacttgtcattcctccacatggtgcttagatatatgt

SEQ ID NO: 79924 - DNA, 149 bp, Glycine max
  Clone ID: PAT_MRT3847_43186C.1
taccggtcgagaattcacgggtcaaccaagccttcgaacaggcgtcaatacggcaacgaaagggggaacttaaggggaagcttagagaaataacgtgcacttcttcaaaaggtgtgtaaattggtgttcctcagcatcggcattacagg

SEQ ID NO: 79925 - DNA, 610 bp, Glycine max
  unsure (1)..(610): unsure at all n locations
  Clone ID: PAT_MRT3847_43187C.1
taccagagtcctgtcacacaaaggccatacatacatataatgctcatggacggtagtttggtgtaacttattcaacttgtatgggggcaaaggatggctagacagacagaagtagcctgagcagcaaatcgctgctggttgtgctctggtctgtgtggaggcttgtagttgttattggtattacaaattggtagcttgtaccgcaaaacaacaacaggccccccgcggtgataaacccaagcaagagctgaaaggcaagttaaaggggcggccagcgcggcaaccgctaggcccaagatcgcacgcctgccaagtatacccgtagtacgataggcgtatgcagcataaacaaccattgcaggtgcaatggcacaaatataggttacagctatagcgtagtagagtgatgttaggttattttcttgagcgtattctacaaacaaggaacaaacttaaaaagggccactgctggggcatgctgcctaggccggtgcagtagcggcagtgtaaactgctactgctgctgccgggaatgcgcctacagcgtataccagctaatcggcgcgtncggctccaccatcaatgtagcacaagttgtaggtgaagcacc

SEQ ID NO: 79926 - DNA, 318 bp, Glycine max
  Clone ID: PAT_MRT3847_43188C.1
tttttggacagtaaaagaatgaattggtgatgatctccgtgatggcaagcatccagctaattggaataggtcacaaatccaaatgtgtaaaccatattgaacaatatacagaaaatgcaacaatagacagaaaggactccatcatagaaaacaagaacaaacccttaattggatcgattcatcaccttaccacagccttcataaggacatacaaaatccctctcccctgtaagaatgagaaaatgtcttttcaacattaagctatccagaaatctctgctagatagacctttccacatcccttctggtgacaaacata

SEQ ID NO: 79927 - DNA, 144 bp, Glycine max
  Clone ID: PAT_MRT3847_43189C.1
ggccaacggtcaaccgacgccacccttagccctaccgctcggcggcacttgcgcaaaggactgtatcatgacaaagtgcgtacgagtgcacacggggagagggaggctaatacaaacaaaacaaattctacgaaaaaaaaaaaa

SEQ ID NO: 79928 - DNA, 192 bp, Glycine max
  Clone ID: PAT_MRT3847_4318C.1
acacgctaagaaggttagttatactgtgcaattggacatgcaaagtgaaagtgatggaacatgagggagaactctcaagattacttactaccagcagaacttggtacttttaaaacatcacattacatgatagcattaaaagccccacaatcttaacctaacagaacattggaatcataaagagatgttttg

SEQ ID NO: 79929 - DNA, 2236 bp, Glycine max
  Clone ID: PAT_MRT3847_43190C.1
actgggcacgatcttaaaatatctcttccatacaagtttgttttcaaagtgtttttgtctcccaaatcctactcttgtgaccacaagccttcacttcactctctctctctctctctctctctctctctctctctctctctcttttttgaaacccttttttctcttctcaaaccaaaccaagcaagcaattatattacactactcactcactgagaccatggctcctaatatcaccaccgtcaccgacgctcaagccaaggccgccggcgggcgtggccgtgcctacgtcaccttcctcgccggaaacggtgactatgtgaaaggtgtcgttggcttggccaaaggtctgaggaaggtgaaaagcatgtaccctctggtggttgcagtgttacccgatgttccagaacatcaccgaaacattctcacctcccaaggttgcattgttagagaaattgaacccgtgtaccctcctgagaatcagacgcagttcgccatggcatattacgtcatcaactattccaagctacgtatttgggagtttgtggagttcagcaagatgatatacctagacggtgatatacaagtgtttgacaatattgaccacttgtttgacttgcctgataactacttttatgcggtgatggactgtttttgtgagcccacttggggccacactctgcagtatcaaatcggatactgccagcagtgccctcataaggttcagtggcccactcactttgggcccaagcctcctctctatttcaatgctggcatgtttgtttatgagcccaatctggatacctaccgtgacctccttcaaactgtccaagtcactaagcccacttcctttgctgaacaggattttttgaacatgtacttcaaggacaaatataggccaattcctaatgtctataatcttgtgttggccatgctgtggcgtcaccctgagaacgttgagcttgaaaaagttaaagtggttcactactgtgctgctggatctaagccttggaggtacacagggaaggaggaaaatatggagagagaagatatcaagatgttggtgaagaagtggtgggatatatatgaggatgagactttggactacaacaatccattcaacgtggataggttcactgcggcacttttggaggttggtgaagtcaagttcgtccgtgccccatctgctgcttagagtgtctttggaaatcaagtgtgatccaagtacataggataagatatacagacccatacatcattaagttttatgtgtttttaaagtgtttagaggacctttttatgtgtcccttttttcttttttctttttcaattctgccattgtaaagcagtgaaataccatgtccttaattttattattggatatgaattttattttgtacactaaacaatatcagatcggttactgccagcagtgcccccataaggttcagtggcccactcactttgggcccaaacctcctctctatttcaatgctggcatgtttgtgtatgagcccaatttggctacttaccgtgacctccttcaaacagtccaagtcacccagcccacttcctttgctgaacaggattttttgaacatgtacttcaaggacaaatataggccaattcctaatgtctacaatcttgtgctggccatgctgtggcgtcaccctgagaacgttgagcttgacaaagttaaagtggttcactactgtgctgctgggtctaagccttggaggtacactgggaaggaggagaatatggagagagaagatatcaagatgttagtgaaaaagtggtgggatatatatgaggatgagactttggactacaacaatccactcaatgtggataagttcactgcggcacttatggaggttggtgaagtcaagttcgtccgtgccccatctgctgcttaagagtgtctttggaaatcaagtgtgatccaagtacatgtacaaagtcatacatcattacattaacttttatgtatttctaaaagtcatacatcattacattaagttttatgtatttctaaagtcttaagacttaagaggaccttttttatgtgtcccgcttttctttttttctttttccaattctgtcattgtaaagcagtgaataccgtatccttaattttataaatggatatgaattttatgctgtaaaaaaacaaaaataaaaaaaaaagaataccgaaaaagagttttttggtgggctctgagttttattttgtact

SEQ ID NO: 79930 - DNA, 874 bp, Glycine max
  unsure (1)..(874): unsure at all n locations
  Clone ID: PAT_MRT3847_43191C.1
aattcggctcgagcaacaaagatcttccttacaaaagtttgttttcaaagtgtgttttgtttcccaaatcctactcttgtgaccacaacccttcctcctctttcttttgaaacctctttttttctattccccaaccaaacaagcaaacgctactcactcatcatcactgagatcatggctcctaatatcaccactgtcaaaaccaccatcaccgacgctcaagccaaggtcgccaccgatcatggtcgtgcctacgtcaccttcctcgccggaaacggtgactatgtgaaaggtgtcgttggcttggcaaaaggtctgagaaaagtgaagagcatgtaccctctggtggttgcagtgctacccgatgttccccaagatcaccggaacattctcaccatcaactattccatggcaaactagattgagtccgctggggggtacacgggctcaatccaggtttgcatgggcatattacggggggacggttccaagctacntattttggagtttgtggagtacatcaagatgatatacctagacggtgatatccaagtttttgacaacattgaccacttttttgacttgcctgataactacttctatgcggggatagactgtttctgtgagccaacttggggccacactaaacaatatcagatcggttactgccagcactgcccccataaggttcagtggcccactcactttgggcccaaacctcctctctatttcaatgctggcatgtttgtgtattagcccaatttggctacttaccgggaccttcttcaaacagtccaaggcacccagcccacttacttttgctgacaaggttttaatttactaattaattaagtctataccatattaatatatt

SEQ ID NO: 79931 - DNA, 257 bp, Glycine max
  unsure (1)..(257): unsure at all n locations
  Clone ID: PAT_MRT3847_43192C.1
ccactcgggggctttgtccttctccacttgggccttcgtcctnctccacttgggcctttagactgtatttggcctgtttcatgattctcatcacactcccacctttantaaataggacttatgtttgnttanctatttantcangattttatactgaaaaatatggaaggaattncaaatttctgttttccatcactgatcagngtntnaaattctaattagtcgtgagtntnaaaaatttcccnnggncagantcc

SEQ ID NO: 79932 - DNA, 478 bp, Glycine max
  Clone ID: PAT_MRT3847_43193C.1
cacgcacacgcttgtataattatgtgtgaatcatcttgtttttttggctggtaattgatttttgaaaaaaggtagaggcaatggaatgatacccgtattttgtaacaacatccggcatgaattaatttgctaaatgcggtgtcagtgggagcggtggggcgtggcagaccaaaatgattataatgatccggtggtggaggaatcactgactgtgatgggccaactccattttctaccaaaagtgccgttcccagaccccaattcagatctgaagcaagggaagcaatgatagagagtaggcctagtaagaaccaagagcaacatgacttgccagagaggtggataatcttcattgtcgtcaaagaatttgacaaatggagtggcttgagttatttggcatttgatctaagttgcaactatttatagaatgataaagcgggaaatgcctagattaaacctttatttaactttgagtttt

SEQ ID NO: 79933 - DNA, 306 bp, Glycine max
  Clone ID: PAT_MRT3847_43194C.1
acccacgcgtccgaccactcctacggactgcttgataaaaaacgtcttgaggctatactgatgatctcacttctggaacaggtggtcagtatttatggagcttgattacctgcataagtggcattctttcatcccccaatggatgacatttctggtaccagagagtctcttatttatgttacctctttctacacagggtccggattaaacaaaccagactgtttgtcgacagtgtatgtgtatccaaactattcatctttttccaaagaaatacataggcttcccgctgcttatttaggtgactaa

SEQ ID NO: 79934 - DNA, 1311 bp, Glycine max
  Clone ID: PAT_MRT3847_43195C.1
ctgataatgatttgttaactcagatgtattctcgtacacaatattccctgcaatatatctaaaccacagactctagcatcttttccacagttgattgcgctagtgggtgcaccaaatcctcggtgtggttagactaacaatcctaaattattaactgtactgttaaatcattaaataatggccaaaactcaaagttaaataaaggtttaatctaggcatttcccgctttatcattctataaatagttgcaacttaaatcaaatgccaaataactcaagccactccatttgtcaaattctttgacgacaatgaagattatccacctctctggcaagtcatgttgctcttggttcttactaggcctactctctatcattgcttcccttgcttcagcgattatgtgattttttttctccctattgcatataaggcccaaacggaacccgctgcgcgccgcgcttttgctagcattcctttgtgctccctcccaccacctccttaatgcaagcctactataacggtatccctggggtcttcaccgcagcttttcccccagttcctcctttactatccaattacaccggcaaggtaccccggggactgtgcacgcctgccagaggtactaagctcgacaagttgaagtatggttccaatgttcaaattgttctgcaggacacaagcatagtgactactgaggatcaccctatgcatattcatggattccacttctttgtagttggttccggctttggcaacttcaacccagcaacagatcctgcaaggtttaaccttgtagacccacctgtgaggaacaccattggaacaccaccaggaggatgggtggccattcgttttgtggctgataatccaggaatttggttcttgcattgtcacatagactcacatctgaattggggtctggcaacggcacttttggtagaaaatggagttggtccatcacagtcagttattcctccacccccggatctgcctcagtgttaagatcaacaaagcatcattagtcataaattttatgttcctcaattattggcttgttgttttacgaggtctttaaatacttgctaaatagacagtatttgtctgtgttgtttcaaggtccagaattggaccatgctcaattgagcagctatgtttgtgtttttttgattggatgcaagtggtagtgctttaatcttttagaactgccacatcgttaagaccaggaaagcatcattagtcaaaaaaagttatttaatttcctcaattattggcttgttgttctagtgttttaccaggtctttaaatacttgc

SEQ ID NO: 79935 - DNA, 553 bp, Glycine max
  Clone ID: PAT_MRT3847_43196C.1
agaaaaattgcagtccaagaccaagggaggaaaatagaaattagtttaaattggccaaagcacccttctctgcctatatcttccgccttggcatttgaattgtcttgactgtaaccgttactctcacgttgccacaaaacatatgcaaatggatctactgaaaagatccaactctgccctgacatgtgctctctcatcttgaactctggtctttacgaccgcgaggtccaactgtccagggaacgacaactttttggactgtgtgcccctactttcggaaccttttcaactaggacaagaggtccatggatcacattttgttgtgccacattagggcatagaaaatgtttaggtgatgtattgaatgtgaggaaaaaaatgtatttaggcagagttttgggattcaatagataagaaatcatataaaaaaaaattagaaatatgttgtggtcttatataaccagtgatatcgacagctagccgccaataaaaaggactttaattttatggtgactatgtaactgttaagttatccctttataatgcaacttag

SEQ ID NO: 79936 - DNA, 269 bp, Glycine max
  Clone ID: PAT_MRT3847_43197C.1
ttgtgtatgattggaaatctttaaattcacttgatgctgtggtaaacccgaatttaaagatttccaatcatacacaatattgcaacaacaaaaagaatttaaattcgggttttccaccccatcaattcaatttaaagatatgtcctcttccattcaaaaaaaaaaaagaaaaaaaaaaaaaaaaaaagaaaaaaaaaaaacaaaaaaaacaaaaaaaaaactccaaaaaaaaaaggaaaataaaaaaagaggggggcgccgcttttttt

SEQ ID NO: 79937 - DNA, 383 bp, Glycine max
  Clone ID: PAT_MRT3847_43198C.1
gacagctcttggctttggagcccctcctactacacttccgcttcaggtacgactgacttcgtctccttctaccttggccttcccactaatccacatatgccaaaacgcaggcgagtcattgatcacaatctgtacaaagagaaaggccaaatcaaggttggacactctctgctctgcacctgtgcaagatcaggaggtccgtgatattactatcagagagcgaagcggctcactagacctattggctggaggtcacggcaagaggatctgatctagcatgccaaagcagtatgaacctctttgaggttaacccattgctctgtataggttctacactttgactcacactgatcaagtcaaataaatgatcgaggtttgtgatc

SEQ ID NO: 79938 - DNA, 392 bp, Glycine max
  Clone ID: PAT_MRT3847_43199C.1
ggcgaaaaaaaaaaaaaaaaaaaggcccaaatttgctaaaagcaaataacgggccacggagctttaatttttgggttaattgggccccccaaacaaaaaaaaaaaagcctaagggggcttcgcccattggaaaaagctataagttttttaagaaatcttgggacttgaaagggttgaaaaaaaagtcgtgggggtaaaaaaaacaaaactgtcctgggtgggagcgggggcacaaacagttttaacaattggagggggaggaattcacccaaaaattttcacagctgcattgaggaggcattgagcgggggcacatgcaaaaaaacagaagggtttggaaaactcataatcatcaaaactggaggacggaccactttggaaaaagctaagtt

SEQ ID NO: 79939 - DNA, 488 bp, Glycine max
  unsure (1)..(488): unsure at all n locations
  Clone ID: PAT_MRT3847_4319C.1
tttttgtgtttttttttttttttntttnnnaagaaaaaagaaaaaaactcccaagttgctcatgggacaagaaaaatggaaatcagactaaaggaaaaccaatgaacatgtaaccttcacgcataggttaatgttattggcctaaactcataatcgcaattgcccaaaaagaaaaggttttatttttcttttcccaacagagggaaatggatctttttgtaatacccttaggtttccttggcattctcatgatcaacaataacactgttttttttgaagtaaacctttgagattatgttctagtccttctgagtccggatcacaaccacaagggggagggcattcctatcaagcttaacctttgggattggcttcccccccccctttttcctaaaactaatccgaatcctcaagacgcgaatgggaaagggccattgccttttaaaactatcctaatccttcctcccccttatagttaaaaatggaat

SEQ ID NO: 79940 - DNA, 280 bp, Glycine max
  Clone ID: PAT_MRT3847_431C.1
agaaactagcatggtgaacctagcatgacttttgccaaatttgattttctttagaagaatgaaaaaaggaaagagaaccggagatttcaggtttatagatattcttagtagtccctttagttgcagagtgcagacccttcatgaaattattccagttcttttgccttccctattatgtttgtttggtaaagacaaagcaaaatctattttatgtactctactttatagttgggaaaaaatgtaaactatgggcaatgaagaatccatccatcacgtggac

SEQ ID NO: 79941 - DNA, 370 bp, Glycine max
  Clone ID: PAT_MRT3847_43200C.1
gggttgctccatgatctctgcctcatctgttgccactgtcaaccgtgccgatgccggtgtgaaaggtccatttactggccttaggctcatggctggattacgctccctgaccaccaacagagacattacctacgatgctcgtaacggcggaggattgcaaaccttgcaagtgtgaccaccagttggatacaagaagggtgagactctttcctacctgccagacctcgatgatgcgcaatgggcgaaggaagtggactacctgattaggaagggatggattccttgcttcgaattcgagttggagcacggctacgagtaccgcgagcacaacaagtcaccaggatactacaaaggacactactgaaccatg

SEQ ID NO: 79942 - DNA, 651 bp, Glycine max
  Clone ID: PAT_MRT3847_43201C.1
gttttccctttctcacatctctcctcttctcttctcagcacagctaaagctttcaactttcaacctcttctgaatccaaataacctttttctctttccaacacacactctctctctctctctctctctctgtttttcggtttcctctgatcatgggtcgtccacccagtaatgggggcccagcctttcgcttcacccagcctgaggtatcagaaatggaagctattcttcaagaacataacaatgctatgccgtcacgtgatgttcttacagctcttgcagagaaattcagtgaatcacaagatcgtaaaggcaagatttcagtgcagatgaagcaagtttggaattggtttcaaaataagcgatatgcgataagagcaaaatcaagtaagactcctgggaagttaaatattacacccatgcctcgggatgattacaattcaaccccaataaggagtatgcctcaacaaccaacagctgcttcaattcctgctgcttctgctacagttcccacagcagtaaaggcaactacaggaaattcagctatggaatttgaagctaaatctggaaaggaaggagcatgggatgaaggggctacctttctatcacacagatatttggaaaccattgatcccggaagtgctgggccgat

SEQ ID NO: 79943 - DNA, 352 bp, Glycine max
  Clone ID: PAT_MRT3847_43202C.1
caaaattagggcttaaggcttctttgcaaatggcaaccacttctggtacttactaaaatttatccgcacttgttttaccttgcttgttggatggctttttagtatgtaaataaacctttatcatattcctctacgctaaaaatgcatttaaaataaaagttttattttgaagcctatgccaggcgtatgtatcttttgtccctccttgtgtagagtttttgccttaggatatgtggctcaaattatggaatgttaactgtatatatccttttttttcttgttcttttaatttaaggtatcatggtctatagaggattgtgaacgctcacataaccattgccctacaaactgg

SEQ ID NO: 79944 - DNA, 1673 bp, Glycine max
  Clone ID: PAT_MRT3847_43203C.1
cctcgagccgttcgctgcttcttctacgaactttccagaagacagtttctccttcccactgaaccaaaccatgtccattttcatctagcttcgcttttcaatccattgtttctcagataccgcatggctcacaattacatcgccaccgattcacctctctctcgtcgcatagttcgtgctttcctccacttcctcaactccgttgaaccgggtcctggggttgatgctgaggggattgaggttgctagggagtgtttggcagaggcttttaagcttaatcaatctcctgtggctggtgatgatgtgaaatctgattcattgattgacatattcaagtctcttgaagctaaaaagcaatgtgaacctagcaagtcagacgttggtcctcagccggattccgtggatgcttccagttcattctcgggtgagaatcctgctcgtgggaagaatcattctgaggcgtcgaaatctacggatgaagattcaacacagggccctcatgcttttgtatctaaagatgaactgtgcgcacgattctttgctgctctggagaaaaattgctatttttggagcaatactgatgggagtgatgacccagtgcaactggagaaagcaagttgtttattcaatgaggcttgtatggagttggaaagatctggttgtcaccagtttagtttgaagaatttggctgaatcactaaaaacactaggtaacaaggcaatgcaatctaagaaatactctgatgcaattgagttgtataattgtgccattgcagtccatgaaaagagtgctgtttactactgcaacagggcagctgcttacactcagattaacaaatatacagaagcgatccaagattgtcttagatccattgagattgatccaaactataccaaggcatacagtcgtctgggtttggtttattatgcacaaggaaattacagagatgctattcataaagggttcagaaaagccttgcagttggatcccaataatgagtctgtcaaagaaaatatacgggtggctgagcgtaaattactagaagagcaacaccgtgcatatcccaaccagaatacaagatcatctcaagaattcccaaaccaatctgcacaaggaggatcaagaagccatggcgagccacctccattttcctctatgccgtttaacccccgtgatattgcaagcatgttcatgaacttcacgaacgctacaaatgcacagcagcaggggtcacattctcaggaaaggcaagaagatagcaatggtagtggagctagtgagcctgaaataagaattgggggaaatattagtgtaaacatggaggacatgccagaggatataacaggggcctttcaatctatgatggaaatgttatctggggctgcaccccccgggcaaccgcaagatcaaatgaatggaagagcagcaccaaactaagctatttcagcattctgagactgtaaagacagactcacaaaattgttaaatattttttttgcctgtttaagttttttgatagattacagcattaactaacaaaattctctctgtttacatcatatagagcttttgagtcactatcctttttggaagcacattatacaattgtcattcgtgcaatatccatacttttacaggttacaagcctaaaaaaaattaactaaaaaaacaaa

SEQ ID NO: 79945 - DNA, 748 bp, Glycine max
  Clone ID: PAT_MRT3847_43204C.1
caaaacaaaacttcaaacgtaacagcttctttgtgagattaattgtcctaaaccaaattgatattatggcagaccctcagaaaattcaccctgtgcaccatgatgttgaggcacaaaaccacccttcagcaccattggtgccaaggagcatgtcaaaatctgatgctggtgatccacaaagagtagtagtagtacaacaacaacaacaacaacagcagcaacacattcctgtgaagcacaccaagccaccaacaaagaaaagaagaagctgctgctgcaggttcttctgttggctaattagcatattgctgattctgattgtggcaattggcatcactattggaatactataccttgtcttcagaccaaagcttccaaagtactcagtggatgaacttaaagtcacaaactttgatcttgcagacaacaacagcttatcagtgacattcaacttgacaatcactgccagaaaccccaacaagaagattggaatagactataggggtggcagccacataagtgcttggtacatggacacaaaattatgtgaagggtctttgccaaaattctatcaaggtcaccgcaacacaacgattcttagtatccctcttacggggaaaacgcaggatgctaccggcttgcaaaatacccttcagaatcagctgcaagagactgggaatgtgcctcttaatttgagggtgaagcagcctgtgaggatcaagcttgggaagttgaagctgttcaaaat

SEQ ID NO: 79946 - DNA, 485 bp, Glycine max
  unsure (1)..(485): unsure at all n locations
  Clone ID: PAT_MRT3847_43205C.1
ccaaaacaaacttcaaacataacttctttgtgaaccaaattgcgcttatggcagaccctcagaaaattcaccctgtgcaccatgatgttgaggcacaaaaccacccttcagcaccattggtgccaaggagcatgtccaaatctgatgcaggtgatccacaacgagtagtagtacaacaacaacaacaaaacattcctctgaagcaaaccaagccaccaccgaagaaaagaagaagctgctgctgcaggttcttctgttggctaataagcatattgctgattctgatagtggcaattggcatcactgttggaatactctaccttgtcttcaggccaaagcttccaaagtactcggtggacgaacttagagtcacacactttgatcttgcagacaacaacagcttatcagtgacattcaacttgacaataaccgccagaaaccccaacaaaaaaattggaatagactatangggtggcagccacata

SEQ ID NO: 79947 - DNA, 472 bp, Glycine max
  unsure (1)..(472): unsure at all n locations
  Clone ID: PAT_MRT3847_43206C.1
aggtaaggctttttcaaactaatagtcgtcattattaatcaatccatttcacagcacacaggaaaaggccccaaagaccatttctacccctatgtgaagagggttctcctctctcttgaaaacaaacaaaaaaacacatttttcatttgggtgtttgaggngctgggacncccancacacgcgcggacaccaaaaaacgcaccccgggggggggagggggggaccaaataatggccaaaaaaggaaaaaaaaatctataaacagctcccgcaaagaaaaaagaaaaatcacacgtacacactgaattggcacgcaccagaaccgactgcgcacgtgccaaaaaaaaaaggctactatttggagccaaactgcaacttatgggcccttcaatagggcttaatactcggtgaggggatcccatcaaagcagtaacggggatggggaagaagcagggatgctggccaagaaatga

SEQ ID NO: 79948 - DNA, 1193 bp, Glycine max
  Clone ID: PAT_MRT3847_43207C.1
cggataggtcctggaccccggcttccgccacgctcatcctcacacgccaccgttttcacccactccacgccaccgtcgtggctccacccccgccaaaaccaccctcccaattccatttccatttttaccccttcccagcgctccgaattccaattcgccccaatcgcagttcggttctcgatctccaagaaacggagtcctaaaaatagttcttttagggtttctctgtctcggtggttttgggattgaaacttttgatccgtttaagaatgggggatcgaggtgaagacgaggatttgcaaatggcgattcggatgagcatgcagcgcgggacgccggagccgaagcgcagcaagccgcgtgacgccgtcgccgatgcggtttcggggtcgccggaggagttgccggagtacaagacccggcgaagggagctcatggcggcggcggccgagaagcggatggcggcagcggcgagggtttcgccttctccttcgccgtcgccatcgccggtgaaaaaaggcggtgaattggggaggagagaggaggattcgtgtttgaagagtgtgaatttgagtaaggagctttctgcggaagaagctaatcaattgtttggtatggtgtttgggaatgaagtttctaagggcattcttgcacagtggagcaaccagggaattcggtttagctctgatcctgtaacatcaatgggcctagtgcagcatgaaggcggtccctgtggcgttttggcagctatacaagcatttgtgcttaaatacattcttttcttcagtgatgagttgaaagatgtgtcatgcatgtcaccggagggtctgggtgcgtcatttaaaagtcagtctattccatcatataatttttcttcactcactgaaggtgaaaaagtaagattctcctatgctcagcgttttcgaggtgtcgcaccagatcagggcccttgtaagaagtatgggtgaaattttattttcatgcggaagtaatagaagggctgtgattgcaactttgagcatttccgagaatgacattcagcgttttgaagggatttcagaagttgaggttgttacaaaatcacttcaaggtctttccattgaatctgccttggatctgcaaaaagttcttagagttgaaacatgcacatcacaaacaactgctttgcaaaggcttgaagcaaatcttcccct

SEQ ID NO: 79949 - DNA, 426 bp, Glycine max
  Clone ID: PAT_MRT3847_43208C.1
ctcacacgtattacctcacatgcgtgcgctctgtcgttttgaagaatcaagctagcagagagggttgggttgtgatgaggcattaaggtgcccaagatcattggtactgtaggaggcattagcgggcacgtgatcaacgttactgaggtgttgatcactactaatgtggggtagtttgacgctgtcaccggcacttattcagggctggcaccggtgttgctgccacgcggtgtcttatggtgctacctgccgtcttgattgggaacattgccatccgtgctactgccgtctccaagactgacaggctatgcaatgtgacagttccaccgcagacttatgggctgaaacatcttactgtcgtaccgacctcttatgacaagcaacatgcatcttccgtaccatccttgtgagacaaggattatgcat

SEQ ID NO: 79950 - DNA, 366 bp, Glycine max
  Clone ID: PAT_MRT3847_43209C.1
tccaattcctttcgctatcagtgtcttcaaatttccctcgtttcagagtgagagaagctcaaatcgtttggaacgacgtcattcggcgaattcaaagctcgttgaatcattcgtcgctctctcttcagaaatcgagactccgctttcacttgtatatctatcttcaaacattgttcttcgctacaaatcgaagccactgttgcggtcagaggcaaaaaggttaggttactctctctctctgttctgcgcaaagcgtttcccgaaaaatgcatcggagcgaagggttctcgtgtgctccgatcgaggaatcgccggcggcttgatggaaaaggtgccattttgcgctccggtcttcgccattccatg

SEQ ID NO: 79951 - DNA, 121 bp, Glycine max
  Clone ID: PAT_MRT3847_4320C.1
caacgatcttgatgcacgacctgtgcatcttggaggaaccacccaatacactgtcaacaaccacataagaaatgccaccctcataaacattactaataaccccaccaatatacaccttcct

SEQ ID NO: 79952 - DNA, 589 bp, Glycine max
  Clone ID: PAT_MRT3847_43210C.1
gggtcggccaccctcccgtccctccacgccaccgtcgtggctccacccccgccaaaatcaccctcccaattccatttccacttttgcccctccccggcgctcccaattcccaattcgccccaatctcagttcgatttcgcagaacactggattccagaagctcggttcttgatcgccaagaaacggagccctaaaaataattcttttagggtttctctgtctctgtgtggttttggcactaaaacttttgatccgtttgagaatgggggatcgaggagaagacgaggatttgcaaatggcgattcggatgagcatgcagcgtgggacgccggagccgaagcgcagcaagccgcttgacgccgtcgccggggcggtttcggggtcgccagaggagtctccggagtacaagacccggcgacgggagctcatggcggcggcggccgagaagcgtatggcggcagcggcgagggtttcgccttctccgtcaccgtcgccatcaccggtgaaaaagggcggtgaattggggaggagtgaagaagattcgcgtttaaaagtgtgaatttgagtaaagagctttctgcggaagaag

SEQ ID NO: 79953 - DNA, 501 bp, Glycine max
  Clone ID: PAT_MRT3847_43211C.1
cccactcgtccgctcgacttgactttcaaatggatcgccgaggttcccgtcaacctgtcatcaaaaactttaagacaattttgccggctgcatccaatgacatttattatcgagatgagatcggcaacatctccacctcaaatgtttatccccgtgccgatcgtgttgaggttgagctccgcccgcgtttcccattgtatggcgggtggcgtacaaattacattttgggttacaacgttccaagtacgtcctttctccgtcattccggctcgaattttgcgatcaaaatgaaactgatggatcgtctctacgataatgctgttgtggaaaaactgtgtgtcaaaatcatattgcctgaaacgagcaagaacattaagctggtcaccccttactctgtgaagcgtcttcccgacgaggtgcacataacgtacttggacacttttggtcgccctgtgattgttcttgaaaaggagaatcttatcaacaaccatatccagccct

SEQ ID NO: 79954 - DNA, 216 bp, Glycine max
  unsure (1)..(216): unsure at all n locations
  Clone ID: PAT_MRT3847_43212C.1
gtcgcangcacgcgtacgtaagctcggaattcggctcgagcagncgannaacanngtnagnnggtannntgntnannnntaaggattcnnncgacgnggcntntcnnatagtgngccaggtgtcannngatngncnagnggnatagnttacctnncnnggnccgaagngtgaccttcnanctannganannagcactacancangaaantcnggcg

SEQ ID NO: 79955 - DNA, 201 bp, Glycine max
  Clone ID: PAT_MRT3847_43213C.1
gcccaggaaggccttttgcaagaaggagaggaatgggggagaggacgtgagggaccacccccaaccacacagctgccgcagcatctcacaccccgaagggctgaagagaaggaactttgggccaagcttggaaggggccaactggggttactgggcccgcatgagcctcgggcaactctccctcctggcctctgcttgggg

SEQ ID NO: 79956 - DNA, 806 bp, Glycine max
  Clone ID: PAT_MRT3847_43214C.1
ggctcgagatgcaaaatatcaatcgtatgttcaaaatcaaaacatgtacaacaacacaggatatactttgtttttttgcaggtttggcacctagcagggtaattatttgagggagcggggtcaggcttaattctccgggtctttaacttttaataacttttgttggagaagaattaagacatctaaatggcttcaaattccgataaggattccccaacaccaccttcacctgattcatcttcatcccaatccccgccatcatctcctccaccatcccaagatagttcatcgcccccaccatcatctcaggataattcgtcgccgccaccatcgtcccccccgccatcatccccaccaccatcatcttcgcctcctccgtccccgccaccgccgtcatcaaatgatcagaaatccccgcctccgccatctgactcatcctcctcccccccatctccaccaccgccgccacctcctgataaggattcaggcagccaccggtcgccaccgcctccgccacattcaagacatgagttttctcctcctccgcctccgaaccaccggttgtctccacccaagtcgtcatcatcaggttcctcggatggattgaaagacagtgaaagccattcattgagcatgccagttataataggaattgcagctggagctggcattttgctccttctccttctcggagtcgtttgtgcgtgttcaagaaggaagaagagatctcagccttccgttagttactacgctaatcaaccttcagatatggatattataaaagaccaaggggagggcaaaatcag

SEQ ID NO: 79957 - DNA, 338 bp, Glycine max
  Clone ID: PAT_MRT3847_43215C.1
aatgagaaaggacgcaacagattttgtaggtgatggtaaaatccccagacccatatacatagcgggtgttgtgattttgctctacagatgaggggccctagatttaatatgattttctacaagactacaactagagcattcaccccatttcagtattgtgaatcatggaggccccgaccatagaacgccaagtgggttttgctggccctgccagacctgataactgtcactcccgacttatgcttgacctgaactatgtaccgttgttatgcggcagggttaaccacctggtgaattcatcagagatgtctctcttcctttgcttcaagggcatgaac

SEQ ID NO: 79958 - DNA, 1161 bp, Glycine max
  Clone ID: PAT_MRT3847_43216C.1
caaaagggagatatgcacgagtcttggaatacctattcttggatttctagcagagggtttccctgctattcttatgcaaaagggtaaagggattgagctgagtttggcaagttgggtgcattgcattgtcccagaacaatggacaaagaatgtgtttgataaatgagagggggaaacaatgaaaaccaaggtaacgatggggaagctgttcaagactaccttgaattgtgatgaaagggatgtggtcacagactaggatttgaatgaagcattggagaaaatcctggatatcaagcagaccgataatgaaccagaccatttttgtacttcttatgctagtgaagcagacatgaagtcaaaaggtcttgaatatctatacaaggacatgccaagcctaattgcaccccatggaaatctcaagtcctctaatgttctcttgactgaatcattcgagccactcctcacagactatggcttagtcccagtgataaaccaggatctggctcaggacatcatggtgatatacaagtctcctgagtacttgcaacaaggaagaattacaaagaagactgatgtgtggtgccttggaatactaattcttgagattctaactgggaagttccctgctaacttcttgcaacaaggtaaagggagtgaggtgagtttggcaagttggattcattcagttgtcccagaagagtggacaagtgctgtgtttgatcaagaaatgggggcaacaaagaacagtgagggagagatggggaagcttctcaagattgccttgaattgttgtgaaggggatgtggataagaggtgggatttgaaagaagcagtagagaaaatcctggagatcaagcagagggataatgatcaagaagatttttttacttcttatgctagtgaagcagacatgaagtcttcaacttgaagaatattgtatgttgagactacgtaccttaattagttattgattcctagattttctgtcccttttgaaaacaatgccacatggcatgaatgggagatggaatacctgggacttttttctttctgctatgatctttcatgatgtaataataatcatgcataatgcaagaaatgaaagaaagaaaaaaaaatgaatgaaaaagggtataatatgggcttgatatgttgaagttg

SEQ ID NO: 79959 - DNA, 427 bp, Glycine max
  Clone ID: PAT_MRT3847_43217C.1
gacgcacgcgtcagcaagaagctaagattaacacaccaacccactagaaacatgaaaacccctaacaaagcctcattactcttattccctctcttgtccctttccttatttatcaaccattcccatgcagcaggaatcgctgtgtactggggccaaaacggtggagaaggcaccttagcagaagcttgcaacacaggaaactaccaatatgtgaacatagccttcttgtccacttttggaaatggccaaaccccacaactcaaccttgctggtcattgtgaccctaacaacaatggttgcacagggttgagcagtgatatcaatacttgccaagaccttggcatcaaagtgttgctctctcttggaggtggtgctggaagctactccctcagctcatctgatgatgccacacaacttgcaaactacc

SEQ ID NO: 79960 - DNA, 1296 bp, Glycine max
  Clone ID: PAT_MRT3847_43218C.1
cgagaataaaacaaacaaaaaatattcaaagatacagagaaccataaccaaagcccgatgagccaccttcctgaaacccaattcctcaatagtttctcacccttctcttctcttcatctactctttccaaaagaattgatgtataaagtctggtggcctctgatgtgatccccttttgatgtcaaataccagaagagaatgaaactatgattgattgatttgattaagtaaaaagaattagtggaaaatgggaggttgctgttgttctgccagaaaacctcatctgcaaggggcaccagtgtattactattgcccaccaacttttgaagagcgtgagtctttaacatctaatgatggcttgaatgcttcagtcaatgctggatttcttattggtttgaacctggaagcatccatgcctgatactttccagccccctcctgtgcctctaccttatgatatggtcttgggaggttctgcatcaacagattctgaatctggcagagaaacagttagtagttttgaaacttcaattacacgtgaagatgttgaagaatcagattgtaaagctcaagccaattctgctcttacatcgccaaagaaggcacaactaccaaaatcaaatgtaactcaagaattagtgacagaagaagaggatgtctgtccaatttgtcttgaagaatttgatgttgaaaatcctagaaatttgacaaaatgtgaacaccattttcacttatcatgcattcttgagtagctggaaagaagtgactcatgtcctatatgtgatcaggagatgatattttgaccagacaatgaattagtttgattgttctaaaatcaagcttgtaaaatgaatggaagatagatgaagatcattttatgataattggttagatgatggtagctacagattcattttcaattcgtggtgcattgacaaagtcatcattttagtaggcccaacctttggtcacgaggttttgacggaatgccataccatatgatatagcatatctgttcaaatgcaattcctttggtcagaatttgcccgttattattagtggaaaaaatgcggcaattctgtagatgccaacatttattttcacagatgcttttctatttatttactgctctccattctcttttgtaaaaaaattctcaatatttatttgtcatgcctgatttacattttcattgtatatatatacactagtggatttttggggttcagtgtttttgcaataagtacttaattatcaagtatacaataagacccttttcctattaaattttattcct

SEQ ID NO: 79961 - DNA, 699 bp, Glycine max
  Clone ID: PAT_MRT3847_43219C.1
tggatcctgtagaggagtaaggaaaaatatatgcttcttaatgttactagatgcaattaagctttactactaagttatgagaaagtaaagaacagaaacaataagtgagacaaatgtaaagcggaaatagaaagtacacatcggaaaagtaaaaagtgtatggatgaagaaagcacacacaagatttatactggttcggtcacaacctgtgcctacgtccagtccccaagcaagctccggttcttgatatttccaataaccttgtaaaatcctttacaagcaaagatccacaagggatgtaccatcccttgttctctttgaacaaccaagtagatgtacgctccacttgaactaatccacaagagatgtaccatctcttgttctcacaattatagcccaagtagatgtacgctctacttgtaccacaaaggatgtacgctccatgtaacaccctgatatatatatatatatatatatatatatatatatatatatatatatatatatattattggtaattatgtttgatgtttgattatttgttgtgttatttttatccgtaattatttttaaggaggttaatttagttaatagaggggtgtggatagataaggatctagcttctcaaagaagccgcttgagaaagcttctcaaagaagccacgacaaagcttatggaggaagcctcttaatgaagctt

SEQ ID NO: 79962 - DNA, 583 bp, Glycine max
  Clone ID: PAT_MRT3847_4321C.1
aattcggctcgagactttatcccttctctactcatccgcaagcaactccattcggcacccgcttatacccaccacaccctcctacaccctccaacaccgtatccttttccccgaccaccacctcctcatcctcaccaacccccaacaacaacaacaaaagctccacgaactagagtgcgtctactacacgctccaccccaacgcttcctcttccggttcacctgaaccggttctcgaagttcaggttcgaccggtcctgtccacggaccgttatgacgaatctcgatccattgttaggtgcccacttccccaaacgaactcctctgctggcggcggccctaaagccgtcgacttgcgacggcgcggtgaggtgggtcgccggagtttgggcattttgatgaaccaaacggctcaatcttgggacagggtggcgtacgaggcgaccctcgacggagacaccgtggtggtgttcgtgaaaggactgaatctccggccacacaagatctctgatccaacccggatccggtgccatttcgggctgaaaagtttcacaaggacaatgccttttacttaccagagagct

SEQ ID NO: 79963 - DNA, 495 bp, Glycine max
  Clone ID: PAT_MRT3847_43220C.1
tttactttctggaggttaattgttcttttaatacagcaaaagcatcgattatttattaaattatataatatggtaaataattaaaataatcaataaaaatataggtaactttttaattattaggaaatttatttaaatattctcaatagtcaatcaaacaaattcggttgtttctttcgaaatatggatcatgatttccaggaatgaaaaaatttctcccttaccaaatgcctcctaaattttactcataacttttataataaaaaaacattcaaacaaaagtcacatcaattcaaaatcaattttaaccaaaattagttttggcaaccatcatctaaacacgcacggaatagaatagaagattgttttaagtgtttgtttagtctttgttcagaagaaagcagcagaggtgtcttctgagctcaaagggacctccatatttctggttggtaagaagaacaccagctagcttttcgattaatgggtttggatgtt

SEQ ID NO: 79964 - DNA, 662 bp, Glycine max
  unsure (1)..(662): unsure at all n locations
  Clone ID: PAT_MRT3847_43221C.1
aaaaaatccgccgagctggtgccgggctcggcgcatgcgctgtccgagatcatcacccgctccggcattccggcgggtgtgttcaacctcgtcgtcggctccggctccgtggtcggccagaccctgctcgatcaccccgacgtcgccgcgatctccttcaccggctcggtgcagaccggccgcaagatcgcgcaggcctgcgtgctgtcgaacccgatgaagaaattccagctcgagatgggcggcaagaatccgctggtcgtgctcgacgatgcggacctcaagaccgccgtcgaggncgccgncaacggctcctacttctcgactggacagcgttgcaccgcctcctcgcgaatgatcggcaccatttgcatccatgaataatccacaaggtggacggaccctaagatcacatgagcatcaactacaacccttatcatttctattacgaccttttcgattaccgccaatgccaagactacgcactataacccccactataagaacgattccatcaccgcccctagctccccgagaattgtccctcattgagaccatacaattactatctgcctttgcttaccgctattctgcccctgtacaataccgcctctttgctccctatggtctctaatctgttttataggcccgaatcccttctc

SEQ ID NO: 79965 - DNA, 450 bp, Glycine max
  Clone ID: PAT_MRT3847_43222C.1
gggggaaaaaaaaaaaactttttttaataaggaaaatttaaaacaagccccttggaagccgggcttttttatgggggggaatttttttaaaaatccccaattccaaaaaaaaaaaaaaaaggggccaatgggcctgggcccccccccgcttaagggggggggggttttttaataaaacctaaaaaagccggcctggggctaaatattattttggccctagggttctttatccgggaaaaaattaaacttccccaaacggaaaaaaaaaaaagggcccttccccttgggggcccccaaaaaaaccccaaaaaaggggggttccccccttggttttaggggtaaaggggacctccccctagggccataaaaacccggggggggttttactccaaaaaaaagggggcccaaatgggattccccatcaggggaacaaatccggggggggggggt

SEQ ID NO: 79966 - DNA, 300 bp, Glycine max
  Clone ID: PAT_MRT3847_43223C.1
caaattttgtttcatttaaactactttcttctttcattttatttaaaccatgatagtttgtttctacaataatatgcttaatttctttccaacagatttaggaagtttttcaagagattctacttgctgtaaaatcatccttatttccgttccatgacaacactaattcctatctcccacttcgcatattgatttttatttttattttttgctgaacacttcacatattgatacacatagcatacatgccatattattactattaatattttgtggggttggttctatgcccatgatctt

SEQ ID NO: 79967 - DNA, 363 bp, Glycine max
  Clone ID: PAT_MRT3847_43224C.1
cggacgcatgcaggcttgatttcacctactcggcttgatcggtgtacggggatgctgcatgagaaggcataagagaaagctgcctgtgagaggtggtaacgacatgccaaccactctagtctcatatcctgaatcagattcatactcatgtaagacacactgattaactgctcttgtacaaagaggctctggcagtgatcatgtatacacaccatctgaacctggtggactaggcaactcaaggccatggaagagatatgaagaactaatcagggtcacaaacggcttatcaactcaaaatcttcaggactacagatgacccagctgggtgaataaaaggagccttcctgatcggagagacat

SEQ ID NO: 79968 - DNA, 545 bp, Glycine max
  Clone ID: PAT_MRT3847_43225C.1
gggacgcgggggtcgacccggaaattccgaaccgggacccggaaggggaaccagggttgcccaaaagggagaaaaaaaaaagcggggggaaaaaagggaaaaagttgttcccgggggaaaatggaaaaccgggaaaaaaaccaaaaaaaaaacaacccggaagaaaaaagggaaaagccgggggggccaaaggagggagcaaacccaaaaaaatgggggggcccccacggcccgcttacaagggggaaaaccgggcgggccaggggcataaaaaaagggcccaacccccgggaaaagggggttggggaatgggaccaaaggggggtttcccttcccacaaggaaaaggggaaaaagtggagggcccttaacggcctgcccctaaaaaaggggaaaaaaggggcccacgcgggtttgccccagggggcaaaaaaacggggggagggggggaaacggggggaaaaaacaagagcgggaaaaggtttggggggggcccacaaccgggaaaacccaaccagggcgcagccgggactgggaaagggcccc

SEQ ID NO: 79969 - DNA, 148 bp, Glycine max
  Clone ID: PAT_MRT3847_43226C.1
ttatatacaaaaggaaaccgatcaggtgccaccccattagtagctgtattatcaaatattcacctctgaataggaaccaatttccctaacacctcataatagctctctgtccttagaagttggaacagtactaataccaacaggtggc

SEQ ID NO: 79970 - DNA, 403 bp, Glycine max
  unsure (1)..(403): unsure at all n locations
  Clone ID: PAT_MRT3847_43227C.1
nnggggngggancttctaattgtttttttttttnntttttttttttttccaaaaaaaatggcttaatgggggccatttccaaaacatttattccgggaatattaaatccaaaattggcaaaaacaaaaaaaaaaattttggggggaaatttgttttggggaatgatttattttaaccaaaattttttgaaccaaagggttcccgaccctttttttagggattaatttagaaacctttaatttaattaaaaggccttttttgcggtggcaaaccaattccctttaaatgccgttatttataaaaaaatgccgtgggcattcaattcccaacaaaaggaatcactttactgaactttccctggtggacgagccacttttgctccccccccatttggaaaacccct

SEQ ID NO: 79971 - DNA, 512 bp, Glycine max
  Clone ID: PAT_MRT3847_43228C.1
ctgctggaggtttttagtgactccggggcttatacgtgaatagatagatctgaccttacactcaccggcgagcatcatctatgtgctaccgatctactaagcttcagacattgtcgtaggatccatggctgtttgactctattaatccatggtaggcttaacggaaatatgcctgttgagaaggctgacacgggggatgacgacactggccatgatgttgcagcggattactctggtgagaggctgggcgcggctacatcagatcacacagttgagatacttggggtgagcaactacggcctatgagcatcatagcaagctagaccggtcacgaaggacctgtatggcaagtggtgtgggctcaccctaagataggatgtctactagcgaggagcatctatgctggccaacacgatgattggtaggtgggcagccggatggaatgggctggaccttattagtccgacgaccacaacacatgtgggagtcctggtggttgggcgccacatgag

SEQ ID NO: 79972 - DNA, 238 bp, Glycine max
  unsure (1)..(238): unsure at all n locations
  Clone ID: PAT_MRT3847_43229C.1
cgccacaagcgatgtacaacagatgaaatcgacaacgcacanaggacaggagtggaccatcnnnnctaacgaagacgagcacaggcaacacatggatgcactcgatcaataanntaagtcctacaaggctcagagcagagctaccaacgactataaaaagtaacatgtgctgtgggcatataacagctagtggactataatttactatactnncctgacttggcaggaaaaatgatct

SEQ ID NO: 79973 - DNA, 411 bp, Glycine max
  Clone ID: PAT_MRT3847_4322C.1
ctcggaatgctcgtaatgcggatcgtgaatgggtgactgtagccagcgtcttatgtctgtataagtatgcaggtctgctccaacagatactagcaccctgtcaaagctgatggctcacttagccttacagtcagtgaagactgggaaaggagaggaccgtacagcctgtctcaattggcactcatatgggatggcttgatgcagacattgatctcctctatgagatatacactggatacaagttcgacgatgctggatcgactggtattatgccctggattgaagaacttatgaaaatctcgactgcagagcctactatagcactagtatagcacagttgggcaaccacgactaccggggtcatgatgtagctcaacagagtagcgattcttcagatgacggatcctagat

SEQ ID NO: 79974 - DNA, 1544 bp, Glycine max
  Clone ID: PAT_MRT3847_43230C.1
gtgacgaacaacatgaatgtcgttcatagaaccggacgttgttgagttgaggtaatgtcgtgtggacgtgaacgaacactttcatttaaaaatccaaacaccattgaatgttcaggtttgatttcgccgtccccttccgtctatcatttttttctttaccttcagtttttttttgaaagataatggcagacaccgaggacattcaaccactcgtctgcgataatgggacaggaatggttaaggctggttttgctggagatgatgctccaagggcagtgtttcctagcattgttggtcggccacgtcacaccggtgtgatggttgggatggggcaaaaggatgcatatgttggggatgaggctcagtccaagcgtggtatactaactcttaaatatcccattgagcatggtattgtgagtaactgggatgacatggagaagatctggcatcacactttctacaatgaactccgtgtggcaccagaggagcatcccgttctcctcactgaagcacctctcaacccaaaggctaatcgtgagaaaatgacccaaattatgtttgagaccttgaacacacctgctatgtatgttgccatccaggctgttctatcactctatgctagtggccgaactactggtattgttctggactctggagatggtgtcagtcacactgttcccatttatgaagggtatgccctccctcatgccatcctccgtcttgacttagcagggcgtgacctcactgatgccctgatgaaaatccttactgagcgtggttattccttcactaccacagccgagagagaaattgtaagggatatgaaggaaaagctggcctatattgcccttgattatgagcaagaacttgaaacttcaaaaactagttcttctgttgagaagagttatgagctacctgatggacaggtcatcaccattggtgctgagcgtttccgttgtcccgaagtcctcttccagccatccatgattggcatggaagctgttggcattcatgagaccacatacaattcaattatgaagtgtgatgttgatatcaggaaggacttgtatggaaacatagttctcagtggtggttctactatgttcccaggtattgctgatagaatgagcaaggaaatcactgctttggccccaagcagcatgaagatcaaggtggttgctccacctgagagaaagtacagtgtctggattggtggctctatcttggcttctctcagcactttccaacagatgtggattgcgaaggcagagtatgatgagtctggtccttcaattgtacacaggaaatgcttttaaatgcagcagaatggcttggtgtaggtacagcgtcctcgttttgcaatacagtagcaccttgcaccgattgaagatttttcttaaaaaatgtttgtgttattagaacagtgaactgagataaagtggagtttgatggcagaattaattctttcatttgttttgttttaccattgtaattgttcagcagttgatttttaatgataaatgaaaaccgtttcagcttaaaaa

SEQ ID NO: 79975 - DNA, 421 bp, Glycine max
  Clone ID: PAT_MRT3847_43231C.1
cggaggggcctgtccggaattaccgacgcgacccactttttcggtttttagagacacggaacagaaaccgacactggtgggggtctgtaccaccctggtagccatggcgacaaaatcgcctatcggagcattagcacacgcgaatggtgccatggcgacctctacgactctgtagttgagcacggcgcttgccaaagacaccgtggacgaaacactccccaagtacgagctaccgagaggtctgttgccggatgccgataccagctacagactcgactaggatggccctcatggcatcaatggagcgaatccctgggtcataccagtcgatatctcggataactccgagagcgcgatgtcctgcgcgatcaatatgtggtttcatggcgcatgccaagggcgttcatgacactagccgctt

SEQ ID NO: 79976 - DNA, 266 bp, Glycine max
  Clone ID: PAT_MRT3847_43232C.1
ggtttttgctgagatgattaggtcataggggcgggtggtactacggctcatatccctcatccttatgcctcaaggacttgctacttactacaaaccaattaataaatcaccagtgtacaagcctccagtgtacaaaccaccatcgtacaaaccaccgccttataaatcaaaaccacctcggtgtacgactagactacatcatgttacacaaccaaatgataacacgccttacactagactacactttatttattacactccactcg

SEQ ID NO: 79977 - DNA, 682 bp, Glycine max
  Clone ID: PAT_MRT3847_43233C.1
ccacgcgtccgagctcgtggcataatttagacactttttttttaagtcttcacctttgctctctccctccctctctctctctctctctctctctctctctctctcttttctctctctagattactttctttccctttttctttctctctctctttacaacttcctctgctggaggaggatggcatgccggaaagtggtcgccgggaacttggatccgcggagaaagagaagtggggggttcagaacgaaacaggcggggagaggatcgtgccgtggtagttaggactcggaatccaaactcgccggaaaatgcttcttctccggctttgaaacatacccttttgcgttttttctgttcgtgcatgctcttgttcttccattaggtcggataaaataaaacaagtaacaaattcgcgcttggttttgggatggggtttatgttgaaagaagctttgaggactctctgtggtcggaatcagtggtcttatgctgtgttctggaagatcggttgccacaattccaagctattaatttgggaagaatgctattatgaacctttaccatgccctccgcacatgtttgggatgcctgatttaccttaccaaaatggggaaggatgctgggtttctttagagtatcggtcatcgcagcttgggattcaagaggatgaccaagtctcttc

SEQ ID NO: 79978 - DNA, 193 bp, Glycine max
  unsure (1)..(193): unsure at all n locations
  Clone ID: PAT_MRT3847_43234C.1
aatgtaaatgtttcttcattaatttacctttccattttgacatgaacataagttatctgcatagtataaagcaaggtaacgcgagagatcagcccgtcaaccgcattgagaagcacgaggaagaaaaacacaatccttcaagagcacatcgatttgaaggcgaagaaccatttttactgttatntattcatac

SEQ ID NO: 79979 - DNA, 266 bp, Glycine max
  Clone ID: PAT_MRT3847_43235C.1
gtacacagcctcaacaaccctaaggcaatgcagacgcagagcagagatctcacgcacatcgggtgccagatatcacgccacagtgttattcgcttattatcaacatgccataccccaagtcacggttttgccgtggtattcctgataccaagatcacgatttacgatgttggtatgatgtacaatggtcttgatgagtttcctttctgtgtccaactggttacttggaataaggcaaacgtttctacttacgtcctggaagctact

SEQ ID NO: 79980 - DNA, 470 bp, Glycine max
  Clone ID: PAT_MRT3847_43236C.1
aaacgagcaaaaaaagactttttcttcccacaacagggggaacgggacaaaagagcaaaaaacaattattaaaaaaaaaaaaaatagggaagaaaaaagcaaaaaaaattattattaacttgaaaaaaaaagggggggaaggggggcatcactatttagttcaccacactaacaaaacattgggactcatgggtaaagggccaccaaattttgcatttcatccgagggaaaacaaaaaacttttctcactgaaacacccggggctcggtgctctaaagcccaaatcctgaatggcccagggggttcccagcagggagggccccaggttcctttatctcaacaaccacccaatctgacattaaaaaggttttggctacagagggtggatgctccaggcaacattggaccacctttgggggatcaaggaccccagcaaacatcaaatcttcatatttaccaggggcagcatt

SEQ ID NO: 79981 - DNA, 347 bp, Glycine max
  unsure (1)..(347): unsure at all n locations
  Clone ID: PAT_MRT3847_43237C.1
caccattgaattttgattctagcaagcacagcttttgtcagtgatctattgaccttctgggtggacgaatcttactggacaaaactggagattggatcacacttatacaaaattctccaattaggcactagctgagagttgctgcttggaataaaggctgtttaatggctaagatagtgatgcgcgggaatgcgaccatcgaaaagagggattgggcctcattggtacaggtgattttaacaaacangggcagggcagatcattttgatgcatgtgagtggactgaatctgaaccacattcctgggaatagatcttaccaataaaagtatcaggacctaataatact

SEQ ID NO: 79982 - DNA, 318 bp, Glycine max
  Clone ID: PAT_MRT3847_43238C.1
cttttcttcttcttctcgtgcccagcagacaagactttgaaacctacatgctgaataagcaagatcacatcaacacttgttactccataatttgaggacaaaagtcatacaaaggtcacttgggaatcaagcggtaaaatgactaccagattgaccctgtccttatcccgcatcatgtgctaacttaaaaccagcgaaatgacaagtgtgccagtgccaaacaaaattgatgagagtggtaacgagcacgattaccagaacgaatattacatcgctccagacgagtagggaatgactacggctagaaagatttcaagc

SEQ ID NO: 79983 - DNA, 292 bp, Glycine max
  Clone ID: PAT_MRT3847_43239C.1
acctcaccaaaaacatcatctaccgcgccgtgttcttgtctaattcccaaaacagccaggacgggttcattaaaatactgaaggggttgtggaatctctttatcacattaaatattccggattatataccctatctttactacatatatccacaaaccttcaactccatactctctatggcacttcgcccactcgatatcttcattaataagatcatccacgagcacgtacttaatatcaacaatgatacaaccagtgaatttattgattgagaaacctacatgagccatta

SEQ ID NO: 79984 - DNA, 447 bp, Glycine max
  Clone ID: PAT_MRT3847_4323C.1
ctaacctcttaattcgactcgagtgaggatagctttatctccaccaatgccaccatcaatttgtcacatgtttgttcagaactccaatacttggccgtctgcgtattctacactacaagatgcggtatatataacacatattcactcactttaaaaaccttctttattttccccttgtctttctccaccgcgaaaagaaaataacttattttccacttgtcaacagactgaactctctactctacggctgtgacaaactcacaatatcttctctatatatcacacctaatgcattgacctatatatagctcacttacatatgccaatacatccccaacgtgagatggatgcttcttacttattttggaaacactcatccacggcttttgaaattctctaatggttgccccactcttcataaacttgagatgacggcataatcctttt

SEQ ID NO: 79985 - DNA, 325 bp, Glycine max
  Clone ID: PAT_MRT3847_43240C.1
tgagggtactctataagatcaccctggagtatcttggactaaggaggggagatctcacgacaggactccccacatcatggatcattacctaggcaccattcacctgtttaagaaaaacggagagaatatgtgctcaaggaattaccatcccggttggtttacactgagagggaatacctcttattagataagcgacacccacaactatttgtctctcctgaatataccaaagacgctgtgaacaggccaaaagaaaaccttaaactgtctattcatactcctgagagctttgagcatgactttgttgaagaataaaatgccactg

SEQ ID NO: 79986 - DNA, 232 bp, Glycine max
  Clone ID: PAT_MRT3847_43241C.1
cctaagtgcttggtgcgagatacactattattttgtgccattaccctaagcgcatgatgaggaacctcttaggagtttttttttctgaagtaaaggagaacctgggggggggggcagcctttgtgaaaggaataaaaaacccaaagtttttggggcaaacatgaggcatcacctccaaagaaaaaaagtttttttgagccccttgggggctttcccccaaaaaaaggtaatt

SEQ ID NO: 79987 - DNA, 246 bp, Glycine max
  Clone ID: PAT_MRT3847_43242C.1
acatttgctcggtaccccctgggtcacctattgagcacttctgccaaatttctcacaggctacaaggacatgtcctaaactcttggtggaaagctggttggtgcgttattatctggaacatttggtataacagaaataagatattgtctggaggaggagaaggtgaggcacaagatactttttgatctttggtcatggctcaaggcttaccagagtgactttaacatctcttttcaacaatggcaa

SEQ ID NO: 79988 - DNA, 282 bp, Glycine max
  unsure (1)..(282): unsure at all n locations
  Clone ID: PAT_MRT3847_43243C.1
gtcacggagagagaagggaaggaagagtgggtgttggtggttgtcctcctccctcctccatgggtatggcaaccctctcctcctctcttcctcttttccatcgctaccctaaccntaaccctaatccttcgctctttcgcccctccctttccctctccttctccttctctcgcactaaaccccgtcgtgcnccctttctcnttctcgcttcctcttcccacgatttcacctcnaantncaaganatcanngctcactgnnttgatacaaganatanagcctt

SEQ ID NO: 79989 - DNA, 116 bp, Glycine max
  Clone ID: PAT_MRT3847_43244C.1
cttcactatttccattacgagtatcttatatcataactgtatacatgccttttattctttcgggtccctctactatttatagccaccttcatcttcccaaatgttattatattact

SEQ ID NO: 79990 - DNA, 114 bp, Glycine max
  Clone ID: PAT_MRT3847_43245C.1
ccaaaactgctgactgttttcgacttatcggtggcaaacaccccatagagtgtttggggcgctcacttaaattgcgtctcaatcttaaaacacagttttattgcacagcacttt

SEQ ID NO: 79991 - DNA, 182 bp, Glycine max
  Clone ID: PAT_MRT3847_43246C.1
ataaatgcggttacaaagccagaagtcaattcactccaatgaccacttatgaaaacagaagaagaagaatcatatgaataagagacccagcatgtgatgcatacattttcaccctgccctttacccataaaccagaacctcaattaagctcgatggagttaatacatatattactcgatcac

SEQ ID NO: 79992 - DNA, 530 bp, Glycine max
  Clone ID: PAT_MRT3847_43247C.1
tagggaatttggccctcgaggccaagaattcaagcatataataagaaatttatatgtatcctaactaaattatattgttaggataatatattttacactaacaatttgatttttgttgcaaaatactataccaatggaaattagccaaatgataaagtgtcaataaatggttttttttcttcactctcgctagaacatcaatatttttggctagtcatcatcatgttttttttttacttgattccagtgcagattgtattgaatctattatccttcatgagatggtataggtatgttcctttgaaaatgtttttttatctgaaaaacttagttttacaaactcttttggactaaaatcagaacctaactcttttgaaaaagcatctaagattactaatttgtcatttgtaagacttcctttttttcctgggcatggacgcatggtttaagataaagaagacaacatatggcttaaaagagtaaagtacaacatcaaaattaatattgctatcgagtatccatatcagttg

SEQ ID NO: 79993 - DNA, 326 bp, Glycine max
  Clone ID: PAT_MRT3847_43248C.1
cccatatttgggagacggagtacatgggggggaggagagtggcacctacatctttttgtcgactctgtttgtacaaactttatgccccatatcattacagtcactactgctgccgacattacaatgaaggttatgtctttttcccaacacgggacaccctctcaactatgacatcctatgccactagtcggggagggggtcgaaggactacacttctttcagtgctgacttcttcctggggcgaacccttaacctatgaaagggccgattctacatactactttcatacgccttgatatcattttatcgcgctactcgaccaacca

SEQ ID NO: 79994 - DNA, 400 bp, Glycine max
  unsure (1)..(400): unsure at all n locations
  Clone ID: PAT_MRT3847_43249C.1
gaagcaagcaacgtgaagaaaacagcaaacatggcaaataacatggttacgatggtattcctcatattgatgttgatttcatcaatcactccaacagaaattgatgcaaggaatcaagacctcgttgcagccactaaggagatgcaaaaggcaaattactttacatttgtaatgctcatcaacatgtctccacttgacacaattgagggaaatgtgacattcttgatgcccaatgatcgaatgctggctaacatggtcttacaagaagggtccatttcaagcttcttacttaggcattcaatcccatcaccaatgctctntgatgtcttggaacaattccncacagggacaaccattcccacatcactgccaaattgcatgctaagagtctncaacaatg

SEQ ID NO: 79995 - DNA, 238 bp, Glycine max
  Clone ID: PAT_MRT3847_4324C.1
gctactcaacaggttgtgaatccggtgagaatgacacaaatcatgatacacatgatcatggacgtggctatggagcatgcttgagggcctgatgcatatacatattcatagaaagtcgatatgaaagagctgatatagaaactaccgtatatgtaactagctcatgtgagacaaactgcgatgcaaacatgatgacatgtgtgaagccacatacgaactcacttaccaaatttcttga

SEQ ID NO: 79996 - DNA, 203 bp, Glycine max
  Clone ID: PAT_MRT3847_43250C.1
agcatatataggacgttatacaccatcaatgcatgtatctcgttactctgctcatggtaggggcttttatacctagacttatcgttatgatgccacaaggtgagatgaaccctatttaatgtggaacttttggatctgctgccaggggtgcatatcctgtgactgctttcagatgatattagacggttgatctggtggatatt

SEQ ID NO: 79997 - DNA, 388 bp, Glycine max
  Clone ID: PAT_MRT3847_43251C.1
gtgacatacaagaacattaacttcactgtttttgatgttggtggccactacaagagggggtgtttgttgaggctctcctttcataacacccacggtcttatttttgttgtagacagcattgatagggacagatttgttgatgccaaacatgagttgcataggatgcataatgaggattaactgatagatgcaatattgcttgtgtttgccaacaaacaagatcttcctaatgcaatgaatgctgctgagattaccgacaagtgtgtgtctacaactctatcatacagctccactgttacattcagagcacctgtgcaacctctgggtaaggcctttactaaggttttgactggctttacaaaaacatttactataatgcttaaatgcc

SEQ ID NO: 79998 - DNA, 258 bp, Glycine max
  Clone ID: PAT_MRT3847_43252C.1
tatctcaaaagatagaataatgggcggtctctacaccaagcttttcgtggtcctcctcctgctcgtttgttacaccggtacgccatgatatataaatatacatgcagaaagagaacattgtgtagattcatactactactgctacgacagaaccattacacatgtttagtttgcgttttgcaaggacgcaaggcgggccggtgactatggtgtctgcgaggaagtgcgaagtcgcatagctttcgctttaaaggacct

SEQ ID NO: 79999 - DNA, 386 bp, Glycine max
  Clone ID: PAT_MRT3847_43253C.1
gcaaggcacacggtaaatctttccaacgtgatctcgtatccgccaagatgggaataaacgagactatgatgagtgctggcgtgtactatagcatagatacatgatatctatgcgtacctttcagcaattttctattttctgctgtaaaggctacagattccaaaaaggatttcgctgctgatgacaaagctggagacagatgagagtcaaacatccgatgatgagactgcatctaaagattctacagcagaacatagagcgacagctactatcggacctagacctggacctgctgggcatgcatgcaaccctgttgatctctcagcaatgtctgagctgctcaatgatccaagtatcaacgaactggctgaacagataagcaaaga

SEQ ID NO: 80000 - DNA, 194 bp, Glycine max
  Clone ID: PAT_MRT3847_43254C.1
ccgacggaggggccagcggaaggttgttttgaggtgcatgcccttttttttacgggctagtacgggcggaaatcttgagtaaggtggagagcaggctaggagctttgtacgggatctcggggggacaacccaaacggggggggtgcttttgattacataggggaacgacaaccaacgaggcaaactgtaacatc

SEQ ID NO: 80001 - DNA, 641 bp, Glycine max
  Clone ID: PAT_MRT3847_43255C.1
ccacccgagattggaatgataattgagatacatttaaaaatggttaatgccgttgatagtttgctttctttgaatccgcagtcggaagagttcttatgggttgtctgggaactctctatgctctcacgatcggattgtgggcgccaggcattattggctttagggaattttcctgaggctgtttccttcttaattgaagctctaagttccatcaaggaatctgagtctgttgggaaaagcagcggatcttcagcggtaaatcttacaatatttcactcagctgctgagatcattgaagccattgttacagattccacagcatcatctttgggttcatggattggacatgctttggaacttcatagggctttgaatttctcctctccagggtccaacagaaaagatgctccctcacggttgttggaatggatagatgctggcgtagtattccacaaacaagggggtattggtctcctgcgttatgctgctgtattggcttctggaggagatgcccagttaactactgtcctagtttcagatctgactgatgttgaaaatgttgttggagaatcttccagtggctctgatattaatgttatggagaatctgggaaagtttatatctgaaaagtcttttgacgg

SEQ ID NO: 80002 - DNA, 374 bp, Glycine max
  Clone ID: PAT_MRT3847_43256C.1
cagaagtaattaatcctggttttgagactagtggtacactgggaggagtgtctaagtcctcaaccattcaaagctatcatgcttatgatggcagcatctcttcaaacgatggggtggacgagcagttccctaatcagtatttagattcttttgagaacacttacactgttgctaatggtgtttctgagggagggtccagaaagggaaaaggccttgttaatagcatgttacgcggtgatcttgaaacacaacgccaatcatattttcgcgagggaaggcctcgtatcccaagagacaacaggaggaatctaaatgaagtgtcagagactacaaggcacggccatgcacattggatgagaacaaagaaagatgag

SEQ ID NO: 80003 - DNA, 297 bp, Glycine max
  Clone ID: PAT_MRT3847_43257C.1
attctggtcgtgcggctgcagaatgcactgctacactgttgagagaggcacatccatgtcagttacgtgaggccatgaggattcgaccccttgcaggagataggcttggtggatctattgatcagcggccaggtatgttcgaacaggtctctagacgcatagatctggccgtagagactcttactgcatacgatcggggacgatattgcgagggacacctcctatgactgtatgggcctgcgcgtgtcggggactctaaccgtgcataacctgtaggcaaaagtgacggaggaggca

SEQ ID NO: 80004 - DNA, 579 bp, Glycine max
  Clone ID: PAT_MRT3847_43258C.1
tggaactgaatgctaaccatttaagtggacatatcccgcccgagcttggaaagcttacagatctgtttgacttgtaagagtggttaccttgaagtatcaattttgttgatttttaattttaagtttgatggagtcatctatttttctttcagaaatgttgcaaacaacaatcttgaggggccaattcctagtaatcttagctcatgtaaaaatctcaacagcctcaatgtgcatggcaacaagttgaatggatcaattcccccttctttgcagagtttggagagcatgacctctttgaatctttcttccaacaatcttcagggcgcaattccaatagaactgtcgcggattggcaatttggatacattggatatttcaaacaataacttagttggttccatcccttcttcccttggtgacttggaacatcttctgaagttgaatctaagcagaaacaatttaacaggaattattccagcagaatttggaaatcttagaagtgttatggaaaattgatctttcaaataatcaactctctggcttgtttcctgatgaacttagtcagcttcaaaacatgat

SEQ ID NO: 80005 - DNA, 352 bp, Glycine max
  Clone ID: PAT_MRT3847_43259C.1
ggaaaccaaaccttccctccccgccttaattcggagaagccaaaaaaaatttgcaccccccacccctttttcaccaaaaaaaccaagccttttgcccggttccccaaatggaaatccgttgcccatttttttgcctccaaaatccataacgttacttttttaattttccatggttaaaacaggggggtggggggatttggaaactaatccgggcttgaaattttttgcccataatgccatttggacctgcgtgcagttcacccccatggatgaaaactttttcattactggctcccttgttgccaagggcaaaatggggaacatccctgccccccccgtttgggattggatt

SEQ ID NO: 80006 - DNA, 574 bp, Glycine max
  unsure (1)..(574): unsure at all n locations
  Clone ID: PAT_MRT3847_4325C.1
ggctcgaggaagcacggcaaaactgagaggttgaattgaaccgacacgacagacaaacagtgccatgaagaggcactggcgcaactggagccacgacgacgaaggcgaaggcctcccagattcggattccgacacgcgctccagccggagattctctctcacgcgcctcatggcaatctttctcttctctctcttcctcttctccctcatcttccttctcccacatcctcccatccaatcagcttcaacagcaaagactctgcaccaattcaagcaaactcaacaaggtaacgttgctgattctgttgagttgcacaaagataaactacttggtggccttatagcagatggatttgatgaacaatcatgtctcagcaggtaccattcggtcacatacagcaaaggactatcgggaaatccttcatcatacctcatttctagattgagaaaatatgaagctctccacaaagaatgtggaccttatactngaacctataatnaaacggtgaaagatctgaggtctggtcatgntagtgagtccccagcattgtaatatgtggtatggatttcatat

SEQ ID NO: 80007 - DNA, 253 bp, Glycine max
  Clone ID: PAT_MRT3847_43260C.1
tttttctttaagcgcggggtattacgcgggggtacctaaccctcgtcctcggcacacaaactactaccataactcaaagcccagctggtcagtccatgcactcccaacgtgataataagaccaagggcttcaaaggattcgggtaacactcatgccttgttcatgctacgaaccaagacacaaagatggcgtactagatgagtgatacgtgatgcggatttcctattgaccaccacttatatatgagcatcaa

SEQ ID NO: 80008 - DNA, 478 bp, Glycine max
  Clone ID: PAT_MRT3847_43261C.1
gcactttaacttcatttccccaacacttcacttccaatttctctcagatcaaactctctcttcatgactcatcactaccgtttgcacccccttctcataaccccacctgcgattactattattctctcggatttttcaggaaaagcctatgctcaaaatctgctgaggaaatccaacgtggatgttggaattgccacactgtccctcattcggaacctttccttgtttgtgagtcatgtcggtgcattcagcctgtggatagctccgttgactattttgacatatttggggtgtaagtttctgtttctttatttttttttgttctgggtgttgaaattgatggctaagttttcttctttataacaaaggagaaaacttacacccaattgtctaggtgcttttagtactacatttaatgttctctgatcagaattagagttttacttcgttattttgtgtaataaaagtttgcattaaa

SEQ ID NO: 80009 - DNA, 312 bp, Glycine max
  Clone ID: PAT_MRT3847_43262C.1
ttatcaccttttttccgccttgaagacaaagttcgtcaagatctacttctcgcaggaggagcatgaccaccgcttccgtatcttcaagaacaacttgcttcgtgccaagtcacaccagaaatagtatccctccgccgtccacggtgtaaccaggttcttcgatctcactcctgacgatttttgcccttagttattcggcctgaagccgctcctacttccctctgacgctcagaatgctacgatccctaccgaccaacgactctcctaccaatttctattggcgcgaacatggagcccttttcttgtgtaaaa

SEQ ID NO: 80010 - DNA, 316 bp, Glycine max
  unsure (1)..(316): unsure at all n locations
  Clone ID: PAT_MRT3847_43263C.1
ntcgcatgcacgcgtacgtaagctcggaattcggctcgagggtgggtttgctgaagatggcggtatataggctgaattagcgagaaggggtaaggtagaacggggtttatcgattatagaacaggctcctctagatggatataaagtaccgccaagtcctttgagttttaagctgtagctagtagttctctggcaaataattttgtaggtttaattattaaggtttagggctaagcatagtggggtatctaatcccagtttgggtcttaggttctagatcgcgagcaggccgccgactagtgagctcgtcgacccg

SEQ ID NO: 80011 - DNA, 432 bp, Glycine max
  Clone ID: PAT_MRT3847_43264C.1
cccacgcgtccgcaatagcgcatagagagagaatcaaaattcaaaacccgaaattgatataatttatcaacttcaattgagacatgcatctatggccgacaaagaatctccgagattccttcaaggattcatacctcaaaaggctcgaatggaactaccagagaatgaaagcggaaaagaaccaacaacaatcctcgacggaacagaaacttctggaaaacgaaaaccaggatcatggcaacaataacaacggtgacgcacccaacctcctcaattgcgaagctggctcggtctcttccctgttccaggaattgttgttggttctctcctgctgctactgctgcttttgctgtggtggtaagtaactaactaactatctctctagtaagtaataaccccttttgattcttggcttatttagcttttcattct

SEQ ID NO: 80012 - DNA, 602 bp, Glycine max
  unsure (1)..(602): unsure at all n locations
  Clone ID: PAT_MRT3847_43265C.1
gaattnggntcgagttactacacaggttttgatgcactcatgtcctcaacattttcaggtgagtgtgcatcttgtgtgtgcaggaaagaggccttggttgtgggagggaaactagtgaggtataggggttggtcaatgaccatattttttgttgtgggggtgttgtgtttgaggattatgtgcaaaatctcaggagaaaactatgcagggaaatttttgttcatcaaagccttgatggaaaggtttagctggattttaataactgtggattgtgtttacctcacactaaactcgccaccagaaagagtggtgttgagagttgctgcttttggaggcatttttcttttgattttccttcaagccctcaaagaggcatgcagccaaatttactcaatggcttatgtggcagaaagattgggatgggtatcggcatcattgcacacaatatgaagaaaaggcaattgtgaaaagcaaaatggattttgggaagtcaatagtttagttttgttgtaaaatacatgttgttgattacataacatgctattgcagtcctctgcaaaaacagtgttgggtttgcattaacgtgtaaaaacactaaaagg

SEQ ID NO: 80013 - DNA, 225 bp, Glycine max
  unsure (1)..(225): unsure at all n locations
  Clone ID: PAT_MRT3847_43266C.1
ggaatncggctcgagcccgatgtgatcacgggcaatttaccgtactgaaaattttaagttttttattatatattgaattattaaactatttgtgaccgtattattaaaaagctgcgtagctttcattcattcaccataaaatcttgtaacctttctgctttaatctcccattaatcaccttgaaagccaccaatcatttcaaagctttccttcattttttaaaaa

SEQ ID NO: 80014 - DNA, 644 bp, Glycine max
  Clone ID: PAT_MRT3847_43267C.1
gtccggagttcccgggctcgcggcgcgtccgcgtagagccgtcccgaagttggagggtagccgagagagctcggaagtgggcgaagctgtgtgcaaactggtggcggaaggaagcagagtggcgccgatggaggagggtttagggaagagagaattggaaggtgaggtagttagcagggttgccgaagtgatttcggctataaagaatgcgaagcacgtcgatcaagtcatttgcgcgcttcattccttagccactattcttttcccctttgacccttctctcctctcagatagcattgatcagagttacggagacaaggtccaagttccttctgcggaaaaacgacatgcttggtggcgtgtgttttatcgaggagctgcttttcctacattggctaggtttctattacttgatgttgcctcgaactggttgggttgttttcccttctcggcacagacgtacgtttatgatgttttctttgttcgtggattggtcactgaggtgctgcagattttggttccttttctccagctgagttcgagtgatggtcttgatgttaatggctgcctctctaattctgaaagattgcttgtactgtggcttgcttgaaaataatggggcgctccagttggcgagagagttt

SEQ ID NO: 80015 - DNA, 132 bp, Glycine max
  Clone ID: PAT_MRT3847_43268C.1
aaggaaacgtattaaaccagaccctagaactagcatcagatcaaaaccaacgcgattgcgcgatcaaaaggtctgtgttctctctcgatcctcgcgaaacgcgctttttcgctcaccctttcttcatcttcc

SEQ ID NO: 80016 - DNA, 362 bp, Glycine max
  unsure (1)..(362): unsure at all n locations
  Clone ID: PAT_MRT3847_43269C.1
acgtcccgcgcgcgcatcctttagcgccgacctgcactcgtgctcgcttccttttttcaccaacaaaaaaaaagctatgggcctcttacaggagcagggggggagagatacaagaaaaaattgtgtaagaaattntcacaaaaagaataaaaatacagcttgatcaaactcaagtncntnccgaaacaacaaataaaaaactaaaaaaaaacggggccccccccccttttgggccctgccccccccggatttaattctcccccgggcccttggggttccccttttttcctttttgggggcccttttaaaccttgggggaacccgggccctacctttttccttggggaaatttgttttcccct

SEQ ID NO: 80017 - DNA, 1120 bp, Glycine max
  unsure (1)..(1120): unsure at all n locations
  Clone ID: PAT_MRT3847_4326C.1
gacggctgcgagaagacgacaaaagggattggaagaggcattgtgcagtagcttcaatttttgtttcctgggagagcgagaagagtgttcggatttcaccattccaggtggagggaactagctcatgtggtgacggcggaagatgcttctgtcgtcgatacgcagaggattcactagtcgagtaggtcccatacgaaccctctcttcgcactccgaaatgaaagactttctggattacctcgactccctcaaaaattacgagaaatcaggagttcccaaaggtgccggcaccgattccagcgacggtttcgatcttggtagaatgagacgcctcatggagcgttttggtaaccctcactccaagttcaaggctgttcatattgctggaactaaggggaagggatcaacagctgcttttgtatctaatattctgaggaatgaaggctattctgttggttgttacaccaggctttatttttctcaagcagtccacatatcctgaccatccgggagcgcattttactgggaaaatccggccatccggtgtcagcgaaattgttgaatgatctctttcgtaggatcaagcccgatattgaccaggcaatgaaagaggaaaatggttgcataagnccattttgaggttttcggaaccatggcattcctcctatttgctgatgagaatgttgacattgctgttattgaggctgggttagggggtgcacgagatgcaacaaatataatatccagctctgggcttgttgcatcagtcataaccactgtaggtgaagaacatttggcagctcttgggggttctttggaaacaattgcaatggcaaaggcaggaatcataaaacaagaccgcccattggtgttgggtggcccatttgtccctcatattgagcgcattattcgagacaaagcagtagccatggactcacctgtagtgtcagcatacgatactggaaataagtgtactgtgaaaagtttcagcatacgcaatggaaggccttgtcaaatttgtgatatactgatacaagttgtgaaagacatgaaaatgtcctgtaagttncatgatgtgaagttgcaaatgctttggagatcaccaacttcaaatgcagct

SEQ ID NO: 80018 - DNA, 480 bp, Glycine max
  Clone ID: PAT_MRT3847_43270C.1
gcctgcatctcgactctagatatctaggtcgcccacacctcctgcctaggtagatgagcagcccaaacgtacaccttccccacatgatgaggaatccttagggccgggtatcccgaaggtgccaatggcttctgctcttcctagacattcagtggtaagatcagcaggctcaatgttctataaatcgatttttacttaaaattctgcaataatggtgtttttatgactatcataggatgcttgtgaaggttgagaagcgacagctgaaaggttggagcgtgtgctcaacctcaggatgggcactgaaggcacagatttacacgagatcatgcaagattgcctcaagatcgctggagggactcctgatatggaagtcttagggcgcgacgtagacgccgaatatatccttgaaacatgtcttttatttgatttgataacattgttgtatccattatattaattttggttacaacctttatt

SEQ ID NO: 80019 - DNA, 276 bp, Glycine max
  Clone ID: PAT_MRT3847_43271C.1
gctaaaaggagaagcaaatggcttctaatgatctcttccagctgtaccactgtcaaccgtgccggtccgctggtgtcattcactgcctaagtcatggctggttcccaccgaaagaccaacaatgcattcctcattgtgcaacgggaagaggctgcatcagtgtggcacatgcagaaagttggactttctaccgcaactgtatcacaatggcaagagtaatacctcttagaaggtgattctgctggattggtgggcacgttctgtaccgggccacag

SEQ ID NO: 80020 - DNA, 711 bp, Glycine max
  Clone ID: PAT_MRT3847_43272C.1
aaaagagatgctcagaggcttaaggtcctagccttcacaaatctaatgagaactccatatcttagcaaaaaaatgaagtcctttgcttttttcgtagtcttttctcttctggttgtcaacctcagctatgcaagaaaagacatgggagactattggaagaatatgatgaatggccaacctatgcctgaagcaatcaaagacctccttgttcaagatccacaagtatcagatgcagtgaaggatcattttattagggactttgatataaagcctaatatcatattatatcacacacatgttgtgcccaacaagcataagcagaagcagaatattcagcaggccatggccaagaaattagaaccaaagtttcaaggaactgaaagacatggttgaacaaactataaaaaatttaagctcaaatcatttgctcgtgattagagatgaagttacacatatatctctagatagtatatgacccataaagatcatggtcttaatttagtatcttgtagagctatttgtttctaagcctctctttttctgctgaacacttgaagcctttatttatagatgtatcttctatatggttatccctttttttattagttgcatatatattatctttgagtcctgcagaatttttatgatcaatagacatgatgcatattgtcaggattactcttcataaattcttattcaacttttgctccc

SEQ ID NO: 80021 - DNA, 246 bp, Glycine max
  Clone ID: PAT_MRT3847_43273C.1
tgcgtcgagaaggttcagttcagatcctccgtctccaccatacgcaatcacaatgcatcgtcggcatggaccgaggaactttcctcaatagcagctcgcatcgtcttcatgctcatcatgctttcagatcgctctattcagggtgacttgcagatctggcatgtgtacaaccccgttgcatgtcacgtcgtcacgattaattgcaagtgagaacttcctgttgttcttgtgaaggggcttctgtac

SEQ ID NO: 80022 - DNA, 441 bp, Glycine max
  Clone ID: PAT_MRT3847_43274C.1
aagggaaaggaaaaaagacgtgattgcaatttttcgcaattatgcgggcctataacatttttttttttttcaggaataatcaaatttttttttggtggcaaaattggagggggaaaccctctatgggtttaccttcaagttataaaccaaaagttgttcccgtttgtgccaggccccgatgataattcaggggtctaagggttcctgaattatcaccctggggtctttaaaaaaatgttttttcgggattcgggaacgagagggggaatccttgggtaaacaggttttttcaagtcaaaaaagcagttttttgtccttccaaactaatcttcatgaaaatgatgttttctttttttgcaacgattaacataccatggggcatgcttctgtagccccatgccaatgaaaaccttgaggcttgggagcatgacataggtcatt

SEQ ID NO: 80023 - DNA, 262 bp, Glycine max
  Clone ID: PAT_MRT3847_43275C.1
gctgagggggctataggcagataggtcttgatcggtgttcgagcatcgggtgtaatcatttaactgcatatattgcatgtccactattccagcatctctgaaaatagttggagccatctaatgaatcctggttgatgagaacgcctactgcatgtgcatcttagatactgtattgatctcatggtgatcaccgtctatcatgcattcaattaaactattgatccatgagatagatctatcatgtcatgtacagcacccacat

SEQ ID NO: 80024 - DNA, 528 bp, Glycine max
  Clone ID: PAT_MRT3847_43276C.1
cgcaaattctcgcttcccatcgccacgagttgaacgcaacgcaacaaacacaaaataaaaggtgggcaaaccaatagaaatgtccttctgtgttgtgatcttcgaacaagcgtgagctcaaacacacaacaacacctgcttctggttcagacaaccttaactttggtcgctcttcggttctttccaagttccaaccacggtgtttgtgttttccgcacgagtgacgggaacagagaaaaagctcaaattgcacgtgcctctctcccttctctaattaagaagaagaagaagaagaagaatgtggggatttggtggtagatattattgggaaagaaaagtggcttgtgaaaaagtcgatgggatagttgtggtgttcgcgtggatgtcaagcgaggagaagcacttgatgaaatacgtggacctttattcctctattggatggaattcactcgtttgccattctcaatctctcaatatgttcttcccagagaaagccacaattcttgctgctagtattcttaatgaact

SEQ ID NO: 80025 - DNA, 308 bp, Glycine max
  Clone ID: PAT_MRT3847_43277C.1
tttttgtaaacaccactatctcatatatatgcggggaaatttaacacggggcgaaaccccctttaattttcccctaaaaaagaacctcttttttcatccttagccaaccaaaaattaattcgctttaacttggtgaacttcggaaaaatctttataacaaacccacgctaataatggttttgtcccattataaaccaaactaacttgcttgatagtgaactcaaaactctaccttgcttgatagtgaaaagaacccaaaacttttctgaaatagcaagggccaaaaccctctaaccgggccgcttttg

SEQ ID NO: 80026 - DNA, 233 bp, Glycine max
  Clone ID: PAT_MRT3847_43278C.1
acacacacacatcaggtgcatcatgagtcacttcttcagatgtacacctccactcttcaaatcaccccaccgttatcgtttcctacactacttaagaaacacacacccttttatacctaacttcacaccacacctaccctcatattcttctctcttccaacttgctattgctcatcccaaataataattatcatgactttctatcatgaaattagaccatatctacaaaacta

SEQ ID NO: 80027 - DNA, 147 bp, Glycine max
  Clone ID: PAT_MRT3847_43279C.1
ctcatacttgcgactatatgatttaattactaaaatcatctatggcttgggaatattttatcatccatatttcattctatcacatcaacatcgatctacagatcaacttatatgcaaaagcagttcttatctatatttcttaacatt

SEQ ID NO: 80028 - DNA, 880 bp, Glycine max
  Clone ID: PAT_MRT3847_4327C.1
ctcgttcgccaacgaacacgatgcggtcactcctcaccattttcagcgcattgctggcatacaccactgccgtgtatgctactgccctcacctacagactagaggcacacgagcaagcatgcttctacgcgcacgttgagaacaaggggaccaagttggctttctactttgcagtccaatccggaggctcattcgatgtcgactatttggttgtcggcccaacagacaagaccatcctggatggaaccaaggagcgacagggcgactttgtattcacggcaaacgatgtgggagaataccgtttctgcttcaacaacgagatgagcacttttgcggagaagatggtcgatttcgaaatcgccgttgagaacgaagccgcccgtgccaagatcccgtccaagcagggctcctcccctgaacagacctcggtccttgaggagtctattctcaagttatccgcacaactctccaccatctcccgcaaccagaagtacttccgcacgcgcgagaaccgtaacttcagcaccgtcaagagtaccgagaagaggatattcaacttcagtttgatggagtcaggcttgattatgaccatggcagggttgcaggtcttcattgttcgcttctttttccagggcgcgaggaaaggctacgtatgagcatgcgctagttcactttccaaatttggagttggatcatcatgcaatctggagatctagcgggtcgtttggagtactatcctgcgggacgagaagagtatgcaacttttttgattacctgattctggcgctactgggaaagcggcatcttcaaggtttttgggcgcactagtaagatacagaaattcgaggaagaagtgcaaaagccatcagttgtcgagaaa

SEQ ID NO: 80029 - DNA, 480 bp, Glycine max
  Clone ID: PAT_MRT3847_43280C.1
cgggttctggctgggccttccatcccttctgcaagagcattcttccaaaaaaggacgaagtggtgactttgattgatgaggatgggactgagtattcgacaatatatttggcaggaaaaacaggacttagtggtggatggagaggttttgcgattgctcatgacttagctgatggggatgctttaatttttcaattaattaagcgcaccacattcaaggtttacattgttagagcaatttgtcctccggatgataaacagctcgagtgaattgcagttggagattggagccagtaaaattaacgttctcttatgtgatggaaagtggaaggaacgttttgggttcagtttttggtcaagttttaattaaactaatgtgaaggggaagtacgtgtttatatctgtatgtgaagggaacttcttcagcatctatacgtactagtaaataatgaattgaatgatcccatgacggactttcttg

SEQ ID NO: 80030 - DNA, 220 bp, Glycine max
  Clone ID: PAT_MRT3847_43281C.1
aagaagctccctctccgatgaggattcttaaaaaagggggtgggcctaccctaacccatttttgaatattccataccatgcaaaagatgatttatgcccctgaatcaaatgatatttttgattttcttttgaacatttatttgtttgggttctcacaaatccagtatagcttttccaaacaaaatttattttgatgataaacttgaggtagcttacacac

SEQ ID NO: 80031 - DNA, 586 bp, Glycine max
  Clone ID: PAT_MRT3847_43282C.1
acgttctcaacattctcttcctcccttcactcgcttaaccactgaatctcgaagaagaagcgagagagacactgcgattcaaaaccctaacaaaaatggcgtgcgagatgccattggatctgataaagcacctacgaatacttctccgcagagaggccaatctctcgtggtacgaccccgagaaggaggaaaatctcgcgctcccaaagctcccttcggtggccgaaaccatagcgaagctcgatccctcgccgaattaccttcgctgcaagaattgcaacggaaaactcatccgcgacttgcaatcttcaatatgcgttttttgcggcacgaatccccagaacgacctcccacccgaacccttcaaattcaagagcaccattggatatcggtggctactcgagtcgcttcaactcgatggatcggagatggtggcaccagtagtgaatgaaaatgaatggaacagggggaggagtgaatcgaaagatgagattcccttatctgaactgctagatttgggaattagatggccttctgaggctgagagagttcagacaagtactttcggatcccggccgtttttcag

SEQ ID NO: 80032 - DNA, 488 bp, Glycine max
  Clone ID: PAT_MRT3847_43283C.1
cttttacagtggtgctggatggcgagcttgcatacagtcacgtagtgtgtatcgcaggtacttgggatatcgatgttttcatggccttgatgtcatagaatagtcaactgctaccaagagaaacgttgggctgaagtaagaagagacctttaagttctttttaggcatgagagatcatgtgaggtgatactctattgttaactatacttgatcatctaatggcaaaagtgagtgataatacttggaaaagcttcgtagcttgccttgctaatagattatcagatgtaaaccatgggggcaaatcaggtatgctatttgatctgtggaaaaatcgtgatatttagatactgagctattgacttttgtataaagtgcttgaaatggtacgctgctatttctttttgttctccatctctattgatttgagaaactatacgggactcagtttagtgtgtaacccatctaggcaatctcgcagaagtgttacg

SEQ ID NO: 80033 - DNA, 472 bp, Glycine max
  Clone ID: PAT_MRT3847_43284C.1
gggacatggccagcagtgtaggtaaccatagtataccggcgcggataccagagcgatgttacccgggtttggaaacgttgttcgcagctacgggagcatggtaggccagggtacgttaaggttagtggccgtgtgcaagtacggacactactacaaaaaggctgacaaacgattagaaacgtaaagcccaaacgtggaatcgtagtgatgatgggcccttgtaccaaaggacgacgtaagccaggcaacaataagccttaaagtggtatgcgtgagttacgacgcccggattaacgtaaaacgtaaatggtaccggtacgtggagaggtagtaacagggcatattgtagcggttccccagttaacaagtaaaccctgaggtggtgatcacagtatactaagtggtttgatcgtcaaaggtccacatggtcttctcagcgcacaaaatggacacattgtaacttcaaaagggt

SEQ ID NO: 80034 - DNA, 1788 bp, Glycine max
  Clone ID: PAT_MRT3847_43285C.1
cacgcgtccggtgggtgggtgcttccagattcggactcagctttgtttcttttcttccgcgcttcctctatggctaggagctggcttattgacattggaggatttgcaaagaaagtgaaaaatactactctgtcaacagatgatcaaatgaaggactgtggaacatatcgtgaatgcccgaaatgtcattatcatattgataacagtgatgtttctcatgagtggcctggctttcctgttggtgtaaagtttgatccttctgatgttgagcttttagagcatttagcagcaaagtgttgtattggaaacagagagccacacatgtttattcatgagttcatcccaactctagaaggagagcaaggtatttgctacacacatccggaaaatcttccaggtgctaagaaagatgggagttatgtccatttctttcacagaacaaccaatgcatatgctactggtcaacgaaagcgtcgaaagattcatcatcaacagggtttgactgaagagcatgtgcgctggcataagactggcaagacgaaagctataatagaagatggagcacataagggctttaagaagatcatggttctctacgtaagatccagtgagaatgggtccaggtcttataaatccaactgggtaatgcatcagtaccatctagggactgtagaagaagaaaaggaaggtgaatatgtggtttcaaaaattttctgtcaacagcaaaagcagactgagaaaaatgagggcaatccaatggctgaagatcctgacaatataatatcacgaacaggtcctagaactccgaaaccaaatccccccaatccacctcgtgcgggaaaatctgttgattgtgatgataacattgatgaaactgtacttctgtcttctgccctggataccaagacaatccctggagaatcacatgctccacaatcagatattcaggatcaagactttactggcaatgctgcatggctagctggcgaatcgcaggctgaggaaagcaccaaatatgatggctgtgacgacatcttattgtgcaaggagatcttagattcttctgctatattaaatgaccctggattggactccaccaatcttgaagacattgcaggctatgctacccaaagggctagaaatgataatgaatcttgcggaatttctgttctggattcactggaattggatactcctgattttgatctttctagtttgtatttttgttctcaagacagtatccttgattggatggacaggttatgaggtgctctatgtatgatgccctttttggtaccaaatccagaagttgttccattcaattgccggggtagtgcatcctttttctccctttcatgcttcaattgctgtggtttttcttcttctggatgcagcaaatatagtgcatgaagttttggtcgtcatcatctgatgtttcatgctagtaagcggaaataatactactttctttggttcctcaactcttgcaacttttgtcatattatgaagttaagctcttatctagctagagctggagttttgccttcttcattggaggttatttgtgtgagaaattgtttttggaggctatttgtttcttcatggccaatttaaacttgtgctttggctcattatgtcagccgtgaaagtgaatactactttggtgatgaaatccgaaatggtgtagttgactttatgtactagatttcaagatggtgagtgttctatgtgaatattgataacataattattgcgtccaattattttcaaggcaaaatattctctccc

SEQ ID NO: 80035 - DNA, 678 bp, Glycine max
  unsure (1)..(678): unsure at all n locations
  Clone ID: PAT_MRT3847_43286C.1
tcatggacgcgctggcgcaggagcaggaggccaacgcgcagatcggcgccgcgctgtgcctcgcggcggcggtcgaggcggcgccggaccccgatgcggaggcgctccggcgtagcgcgctgccgcggctcgggaagctcgtgaagagcgaggcgtgcagggcgcgggcggcgctgctggttctgatcggaagcgtggtcggcgctggcggcgcttcgagccgcggtgcggtgaactggctcgtgccgtgcctagtcgagttcctcggcagcaaggactggacggtgaggaaggccgcggcggaggcgctggcgaaggtggcttcggtggagagagatctggcgtcgcagcataaggttctgtgtttgaattcgttgcagaatcggaggtttgataagatcaaagtggttcgggagactatgaatcgtgcattggagacgtggaaggaggtaaccgaggatgctcctgcttacgttaaatctgaatgtgcttctgttggcacagatgatggtaaaagtcagtgtgtctctaaaagttcacccgatgttggctctaagttgtcttctaaaacaggccctgccaacaggtcccctccatcagtgatttcattcatgtncgccatgaaaagagagagttctctanagagtaatgagaagcatttgangatggggacattga

SEQ ID NO: 80036 - DNA, 1826 bp, Glycine max
  unsure (1)..(1826): unsure at all n locations
  Clone ID: PAT_MRT3847_43287C.1
gggtcgggtcggttggagtgtgagtgagtgagtccttggtccgaagcaatgcaagaagaagaagcatagcagagaagcagcaatgacaagagcaatgctcctggtgttattccctcaagacaacaaagccaagttcaacttcccttctccttctaagtctcttgtctccaaagcacaatccactatctcaatctgcctccttctctttttcacaactctcctcctttttactctctccaccctcccaaacacccctcacacccctcccactcaccctcctaaacccaccccccaccacctggctctccagcgcatgggcactctccaccgcagaggcaccaaatccatgtccgacctcctcatctgccacgtgcctgacgaaacccccctccaagacttccgcatcttcctccgcctcctccaccgttcttccctcacttcctcatccgacgtcgttttcctcttcccttctccttcctcatccatcaaattcacccatattattcttcaagagaacaccgcattctcttctttgctgcacctccacgcgcacctcaactccacgcgctggcgccaacaccccaaatccaccttcgaccccaatcgcttcatctccaaaaccacacaacaacaacaacacccctgcgcgcccacctcaactccccgcgctggcccctcccccccactgcctcccgcgtccctgctcgcttccgccccctccctcctcggccccgagaactccctcgcgagcccccgcggcgtccccccactcgctctcccgcgctcggcgcccgtccctctccgcctcgcccgtgtcagccgcattttcaagcacgtcatgctcgccgacgtgagaagcctcttgattttaaaggaccctctcgcccgagtgaggaatcggagccccgactcggtcattctcttcacgaaaacggagaagcacgggaagagaactcagcgcgcggtcgtctcctccgttatcatgggcggagctcgcggcgtacggcggctctccggcacggtggtggtggagatcgtccgcgccgccacgcagcacaggaagaagaaaaactcggtgtccgagtcggctgtactgagtcaactcgtcggcgggagcgagtttgtgtggaaaaacaagaacgttaatttgatagcttcgtccgagtcaatacccgagttaacaagtgcaagtgcaagtgcaagtgtaagtgctgcttcttcaacgacgtcgttttcggattccgcgatggttcaacgtggtgtgagtaatcacgaccttaattatgtcatcatgaggcaaatttgttcgtctgtggtagattcttctgtctatagcgattgttagttttttcttttaatttttttattgttaattgttagttaatagttaggataataatgatgataataataagaaaaataataaaacaccaagggaaaataataataataatgataaggaaattcatgttattattattatttatttatttacggaagtttgcctgtagctgaccaattttgttcctacctttgtatatactcactcattcatcttgaaattacattttttgtattcttcaatggaaaagttatggacctgtgtttcatatgaatggagctgacacaagattgaccatgcaagacgatgcagccaaatacttggtatatttgtttaataatattttgatcagggtctaatggaatcagttaatgttatataattttttctgtctatagacatttaaataatttgattttggaccttcatttagggcccttgtatttgtttatttaccattgagttnnnnaatattttatannng

SEQ ID NO: 80037 - DNA, 300 bp, Glycine max
  Clone ID: PAT_MRT3847_43288C.1
ctgccgttaatatttcaccggaaagaaaaaatttattgcaaaaaagaacattaaacaaagggcctttagggggcagggggtgggaggctttggttgaccctcttccatagtaccggtttaaaaacaatgggtaggcaaccatgttggctttaattccaattatcccaaaactaaaaattcactaacatttttttttaataaaaattttgtttgtcaaccttgaaccggccaccttagaaggccacctctgttttgcactccactgggggatattgggtttggggggaatgcaatttttta

SEQ ID NO: 80038 - DNA, 1660 bp, Glycine max
  Clone ID: PAT_MRT3847_43289C.1
gggggggagtgttgagtccgtggtggcatcaaaatctgtgtgaagcaaatgacccaacagtctgagaactccaccaccaccaccaagaagaagaagaagcaatgcaacaaccagcaatgacaaaagcaaagtcagacagcgacaacaacaacagcagtggcatgggtatgctcctggtgttattcccccaagacaaatcctcaacctcaacctcaaacaccgacattaaacccatgttcaacttcccttccccctccaaatctctcttctccaaagcacaatccactatctctatttgcctccttctcctcttcacaacgctcctcctttttactctctccaccctcccaaacgcccttcccacccctccccctccccctcccactcctaaacccaccccacaccacttcgcgctccaacgcatgggcactctccaccgaagaggcaccaaatccatgaccgacctcctcatctgccacgtggcagaggaaacaccactcgaagacttccgactcttcctccgcctcctccaccgttcttccctcacttcctcatccgacgtcgttttcctcttcccttcaccttcctcttccctcaaattcacccccgttattcaacaagagaacaccgcattctcttctttgctacacctccacgcgcacctcaactccacgcgctggcgccaacaccccaaatcctccttcgacccaaatcgcttcatctccaaacctcaactgcaacaaaaacaacaaagagaacccctgtggggtcccaaaacaagaactaacttaaacagttcccgtgactcactgagttacggatcggtgctgagttttgacgccaccgaacttgacccggagaactcgctctcgggtttcctcgacaaagtcccactcactctccggcgatgggcgtgttacccgatgctactcggccgagtcagacgcagcttcaaacacgtcatgctcgccgacgtgaaaagtctcttgattttcaaagacccgctcggccgagtcaggaatcggagccccgactcggtcgttctctttaccaaaacggaaaaacacgggaagagaactcagcgtgcggtcgtctcatccgttataatgggtggcgctcgcggcgtaagaagactctccggcacggcggtggtggagatcgtccgcgccgcgacgcagcacaagaagaagaagaactcggtgaccgagtcggctgtactgagtcaactcgttggcgggagcgagtttgtgttgaaaaataagaacgttaatttgatagcttcttccgagtcaataccagaggtaacaactgcaagtgcttcttcttctgtttcaaagacgtcgttttcggattctgcgatggttcaacgtggtgtgagtaatcacgaccttaattatgtcatcatgaggcaaatttgttcgtctgtggtggattcttctgtctatagcgattgttagttaatagttaggataataataaataagaaaaataataaaacctttagggaaaaaaataataataatgataaggaaattcatgttattattatttatttatttatttacggaagtttcgcattagtctgaccaattttgttcctacttctgtatatactcataactcattcatcttggaattacatttttgtattcttcattgg

SEQ ID NO: 80039 - DNA, 291 bp, Glycine max
  Clone ID: PAT_MRT3847_4328C.1
cacccctccgagcggatgaaactttacgacagaaagaggaatgatgcagaataaatactctccattaatatgtaattggataggaatctcatgcacaagatgacatcaactactggcaggagaaaagaatggccaaagacgcaaaagtatgagcttgaactgttcatgcacatacaccacggatattgaacaaccgacctatactgttgattatcggatcctgcaacaatggtaaacgcacgctattatcgctagagacctgtgatgactcatatgatgctgaagcatcta

SEQ ID NO: 80040 - DNA, 353 bp, Glycine max
  Clone ID: PAT_MRT3847_43290C.1
gagagttaaattgccttaaattgtgaataaccatgaggaagggcttcattccaaatacatgagactgggcatccattatgctgtgctggtggtagcacaagaaattctggtgcttatttgcaagagcctgatctaccagctgagttggatgtacaaataatcaatggaacctacttatttcaacacacattcagcaaccatgccttaaggggtcgtttataagttgacagacgccacatggcataacgcatctaatgaaaagtcatgggcggtgcagtgatggtcaaacccataagaatcacagataccagattcgttcatgagcatgacactattcttagctttttacgagg

SEQ ID NO: 80041 - DNA, 561 bp, Glycine max
  Clone ID: PAT_MRT3847_43291C.1
caaaaccaaaaaaacggccttttggaaaacaaacccaggggctcctggcggggacatcggggcccccccaaaagagggaaaaaaagggaaaattttttttaaagggagacaaaaaaagcggccaatctggccttcttggacggggaacaaataaaaaaacttgtggggggggccaaaaaaaaaaaaaaatggggcctctgccaagaaaaaaaggatttttttggccaaaaaaaggggacccccgaaacacccaagaaatccacacccgggggatttggggggggcccccggggataaaaaaaccccccccccctgggaaaaaaaaattatcttggcggggggggccccaaaaagggattttttcggggggctgggaaaagaggggacccctccaaaacccacctttttaaccccccccactggaaaaagccggggggggggggagcttttttgccaaaaaaaaaaaccacttcctggagggggggaagacccccccccccccccggggaaagaaaataagcaaccccttgtaaaaattggggggggaagaccccggggggc

SEQ ID NO: 80042 - DNA, 366 bp, Glycine max
  Clone ID: PAT_MRT3847_43292C.1
aaagcaataagttttgggggtggcttatttaagtcaatgacaaatatgccttaaaaatggcttttctgtaatggatgctccaactcattggtgcagtaaacaattggggggattctaataggatctaagggaaaaaggccaggaaaactggaactattcctattccttgggtcaacttttcaggctctcaactgggactatatcaagccttgccctaagagttacagggtgaataaatagatgagcggacaattttttcaccactttcatgccgcttgaaaaaaaaatgtgtaaggaactatttggttttggaaccttttagttccccaccaattgaaaagcttaaagatgggtgggtgcttatgg

SEQ ID NO: 80043 - DNA, 152 bp, Glycine max
  Clone ID: PAT_MRT3847_43293C.1
aactcaaaaacacttcttatgaatcttcttattcttgattccagtgcgctcaccactgatggtatgctgatcccctacacctactctctttatccctcccaaatcacatcctaaaacctccgataatgccaacaccacatcctcaagaaact

SEQ ID NO: 80044 - DNA, 520 bp, Glycine max
  Clone ID: PAT_MRT3847_43294C.1
gggtcattctagacaaaaaaaattatcatgtgaagataacatctaatttttatgaaaacaaattttttattacgcatacagataaaaataaaaaccttgtatgaacaattgctctcacattctataaggtgcatctagtggtggtggtagtggtgtggcaatggaaatgattcattttcaaatgtaggaagtgtggtttttttctaaaactaaattaaatttacagaattttttttcttgattttgaaaataagttaaaaataatttgtttcattttttttcaaacatgttttattttaaaaattacatattgacaatgcataatttgaattttttcttaattaaaagtaaaactagaaaatgaaaacgagaaatgaaatagaagatgaaaaaaatagtttagacgtgtaggaccttagagttgcatgattaggagcactagcagatagttggagtcccaagccttttctgagactgcagagactatctagagttggtgttacatggtgaatctcagatg

SEQ ID NO: 80045 - DNA, 137 bp, Glycine max
  Clone ID: PAT_MRT3847_43295C.1
gaagaacgccttttactttgtttttaccccctagtgttacaattatcgcattcgtacccttctgaagtctatcgcagccgcacccttgtgacggcttatggaagccgtacccttgtgggaggttcttgaagacgaca

SEQ ID NO: 80046 - DNA, 325 bp, Glycine max
  Clone ID: PAT_MRT3847_43296C.1
gctagtctgcccgcaggacgcacgcatacgatcccttggatgaattccaaggccacattttcaagaaatagggatgcatatatgttcatatctgaattgcaatcatttgatggcttattaggcctatcctgaagccacaggaaatgagatcggaattcctgcgcgaattgcaagttcacattttcaagatataacgacgcacaaatggtcatatatgacttggaattatctgttcccttatcatgcctattctgtagccaaacgaaatgagatcggtattcctagcggaattacaattccacattgtcaagatacaaggatgcac

SEQ ID NO: 80047 - DNA, 167 bp, Glycine max
  unsure (1)..(167): unsure at all n locations
  Clone ID: PAT_MRT3847_43297C.1
gtctgtgaaagntcacttaancaacactcagaatggtcctgctatgctcccagtgcagcattttgttcagagcngncntgnatgccangncgggtatttggataaaaacncctggcgnagngaggggnatccannagncancttggtcgatacatnatnggnacnaa

SEQ ID NO: 80048 - DNA, 329 bp, Glycine max
  unsure (1)..(329): unsure at all n locations
  Clone ID: PAT_MRT3847_43298C.1
ctacaaaaattccaaataaacccaccctttttaccacccaaacccacaaccccaaacggcgggcttttttaaatnnaccaacctttaaaaccaccataaaaaaatnnaaacaccaaagacattaacacctcgaaaaacacccccaaaaaaatcctacgacctccattccacccgacactaaccaccacaatccaacccctgaaatgtactccccgatcttaacaaacaacttcaatgctggtaaataccctccaaaccatcttcaaaaaacactaaccgccctgcaccatttactgccctcaaaccaaacggacccaaactccgactcc

SEQ ID NO: 80049 - DNA, 240 bp, Glycine max
  Clone ID: PAT_MRT3847_43299C.1
ccgcgctttgctgtactatgatagtgtgagtggcagcttttgtatacatgatatgaatatgatgattattgatatgattatgcgtacagattcttagctcaggtagcatcactatgacagattgacttgtctagcaccaatttctggtattactgttgtctgagttgctcagagagttctttgacagaaggtagattggttctagaaccccagctgataggctgaggagttggcctctat

SEQ ID NO: 80050 - DNA, 528 bp, Glycine max
  Clone ID: PAT_MRT3847_4329C.1
cttcaaaaagggagtataattacctcgtgcctaaggatgtctactctaaacctatcccgtgttatgatactgctacatgacatgggcttcggttgtcagatgcgctcggtaacccctcacacttgcgtctccggatgagtttaaggtgggttcgctgatccaacccaaagttaaatttctcctcgcgggagaacgtctggactcgctatgtactatccgatctgatcagaacctacatatggtgctgccaatatcatccgtgacaccaatcctaccacttgtgtgagctctctgaaggcgaagatagctctggtggctttggctacacagctgccacagttggagccgctattagaggacacgaagccctcctcacactgagacagtatcgacgtgctcagctgaccgactacttcgccgcttgcttcttacttgaatttgtcactgggggatgtgaagcccacgcatacctattggctcgtggctaccgattctcgagagcccttaatgttcacattacgatggatt

SEQ ID NO: 80051 - DNA, 151 bp, Glycine max
  Clone ID: PAT_MRT3847_432C.1
aattccacatccgacccacacgtacgccaatgagcaccacattgtaagattcgctagtgatgcacttactattgcaagtgatgctaggatggacaacgttgagagtagtataatttcaaatatattatccatggactttcatgcctcatat

SEQ ID NO: 80052 - DNA, 253 bp, Glycine max
  Clone ID: PAT_MRT3847_43300C.1
ttgggaggagtgtgtaaacctgagaaaagtcatgtcattacaaacaatgaatcgcccaaattttgtgaatgtgaaataatatattcttagaatagtgatatcgttgtcctttgtatttgagtacatggaatgctacctataccatcttatgtgagattgggaaaaactattgcttgaatactgaattataaattgttgatttcaagttttccaaggtcgtgcttacatgctccagcgtggatacttccatcgt

SEQ ID NO: 80053 - DNA, 585 bp, Glycine max
  Clone ID: PAT_MRT3847_43301C.1
ggctcgaggcaaacagctgttagacttgaaagaggatcaccaaaacataaaggaagaaagttgcaaaacctttgaagagaaaaattccttgatgaaaagattttgggacctgggtgaagagaaaagtaaattggaagaagaaatctgcattatgattcacgataccatagcacaatccaatctttctctgctttaccagaacattgtccttgaaaaactccaggcacttaaagagctaagcaaagatcttgatagactttgttcagtaaatactgaccttgaggagaaactaaaaataatgatgggcaaattggaagatgtacaaatggaaaactcagatcttaaagagtccttgatagtgtcaagcaatgaactaaaattagttcaatccgttaatgatcaattaaattgtcagattaggaatggaaaggaattgttgtctcaaaaggaaaatgagattttggaagcagcaaagatgtttagcactttacatgatgagaaaacagaattgcaaagattggtggaagatctgaagagcaagtatgatgggagccagggtgatactttgagaccaagctagtcaaa

SEQ ID NO: 80054 - DNA, 412 bp, Glycine max
  Clone ID: PAT_MRT3847_43302C.1
acagccgtccggggatgggtttttttttccactgttaaggggaggtttaaggggggcaccacaaacaccctgaaatccttgtggggtaaggtggccataaccgccgaaaccctaaggaccgggtaagatattttggatgcagttaaaaaaatcggggtcgaagcggtttttttaccagccgtggttaaaaagaccattgccgaagttaaaatgaagattaattttttggttgcagatttttccagcaggactaaaaaaatttcagggccatttaaggatgtcattgatgcaaggggacgggaccgggttattttggcggtgtgaatgctttttttggcatttttgggatcttaattttaaatattggggttgcagggcctggattccttttgggtcatggtcggtgggattc

SEQ ID NO: 80055 - DNA, 420 bp, Glycine max
  Clone ID: PAT_MRT3847_43303C.1
gccacgcgtacgactgcgattgctataacggtgaaggttactacgatgggagtattgaagagcgccgtcaggaactgctattgcgatgaatagactagacaccagcggcagatgtgcaaacatgaggctggggaatacatgaggaccatgttaaaggttctgagccacatgcacaacagctggtgcgttcactgcgacataaaactgcagaacatactcatattcggtgacggaggcttcaaacttgcggaaagtggacttgcgagggaggcagagcataaacaggagaagagtgaatgcatgacgactacaaaggttatggctgcctatcaagccaccgcgaaatagtgcaaatcgcctaacgatatatgccctaagggatgtaaaattgtgaatatggtgaccaggataccgatgtgg

SEQ ID NO: 80056 - DNA, 496 bp, Glycine max
  Clone ID: PAT_MRT3847_43304C.1
gtcttaaggctacatgctcgccctttcagattttattctctcaagggtatgggatgaaaaaatattctcagtttaacaattctaaaactcccaaattcataggcaaatcgccccatattatattcacccagaaaaccacacatacgtaattttctaggttgatttatgctgactggaacggtggattccataagcttcaatgaaccccgggggaaaaacaggctcacttacagctttaacagcaacttttgccaccgccaaaacattgaccggaggtgccaaaagaggcccaacaaggggcatctggttcaaaggtttagcatctgggagaaccatttgcaatggagatccaattacacccaggggcttttctctgctcccaacactttgagacccataaataaatcctgccctcagaattactcctacatatgggaataaggtccggagctctgtttcaaaaactctctgcatcaattaacacactatatataag

SEQ ID NO: 80057 - DNA, 360 bp, Glycine max
  Clone ID: PAT_MRT3847_43306C.1
aaaaatatgaatttttagaaaaaaaaaaaaaaaaaaataaaataaagaaaaaatgcataaaaaaagaaagttattaaattagacggaatatttaaatatagaggggggggtgttataatggatccaagttttcttacccttgcttgcgacggcgtaattcttttatagtgtaacctaattttatttcaaggcccgacatttaacaacgggatgtactggcaaaatctttgggttacccatcttaatgatgttgcgtgatatcccccttttaccagctggtttattaggaaaaaggccgggaccgatcgcctttccaaatggttgctcaccctgattggaaaatgggaggctccctgttta

SEQ ID NO: 80058 - DNA, 1124 bp, Glycine max
  Clone ID: PAT_MRT3847_43307C.1
gaacatgccatgaagcgaggcgcacctattattgctgaatacttgggaggtgctgttaactgtgatgcttatcacatgactgatccaaggtctgatggacttggtgtgtctacatgcattcagagcagccttgaagatgcgggtgtgtcaccagaggaggtcaactacataaatgcacatgcaacttccactcttgctggagacttggcagagatcaatgctattaaaaaggttttcaaggacacttctggaatcaaaattaatgcaaccaagtctatgatagggcactgccttggtgcagctgggggtttggaagccattgccacagtgaaagccataacaacaggatggctgcatccaacaatcaatcaatttaacccagaacctgcagttgattttgatacagtggcaaatgtcaagcagcagcatgaaatcaacgttggtaagattctaaataattcaataactaaagtgccccccacatgatacaggccatgatttggacagctaattggtgattcttttttatttcagccatttcaaattcatttggattcggtggacacaactctgtggtagcattttctgctttcaggccttgattgcccagcttagcttgtctgaactttatgtagaacacgggtttaagttaattgaaattttgttctctctacatcattgaggctatttattctatctgagttcgtcatatataaaagctgtaggcctgtagttgttcattttgtgcctaattgtgacttgacaattagctataagactgttttgttgtagaacattttgaatatagctcgaagatttcattatttggaggtatgcagcagcggatagaatgtcaaaactcaaattcttaagcattcttccttattgtagcatcaggggtttttttctcgagccgaatcggctcgagctttgccgctgttgttgttgctgcaccaccgaacaacttcccctgtaaatcgcgtttcgtttgtgcaaggttttaaaagatggctgatgctgaggacattcaacctcttgttgatgataatggaactggaatggtcaaggctggttttgcaggtgatgatgctcctagggccgggttacccaacattattgggaga

SEQ ID NO: 80059 - DNA, 440 bp, Glycine max
  Clone ID: PAT_MRT3847_43308C.1
ggccaaatcagcctggagaaaaattgtggaatctcacacgtggcaaaccttaacaacctcattgtcgctagctacttcaaaaccccaaattttggtcactcgtattcattcctccgatagcacaaacttacccagtgggtgaggtgatccaaattggaactttccattcccattttgtatattttcttgttcccctcacaccacactcaatttttcggctctctctctctctctttttttttgtcggataaaataaacagaaagaagaagaaaagaaaaagaaataattaaaaatgagagagtatgagtaggagtagtagctagctggatatagctggaagacctactccctcaagaagcgtttcacaatcttcacgcttggttccaacacctgtctctcccatacatcggagcctgacgtcagcaccccccgaaacgcc

SEQ ID NO: 80060 - DNA, 233 bp, Glycine max
  Clone ID: PAT_MRT3847_43309C.1
gaacttacataatctactaccaatcaacatcaaagcaagttcacaaaattcagtgcgtcctacattgaccctttagcccctactactacactaactcgcctttcttgttcattataaatcacattcccaaagcgaccaactacaacacaacccttcaatggcattcatcaacactttcttcacccaaacctccttcaactcccactctctctacaaaaccttttatacccatt

SEQ ID NO: 80061 - DNA, 381 bp, Glycine max
  unsure (1)..(381): unsure at all n locations
  Clone ID: PAT_MRT3847_4330C.1
tggggtgtcagtcttatnantgatctgctgcacctggtggagatattcctatgggtgctgacatggctgctgctgttgcttgacctatactttaacaagttgactatgcttgtggtatatcactaacttcaacttttggttgcttctttcttattaggcgctctgccagagatgtaagctttaatcatgtaagttttagtgatgttaggtttcatgaatcccgaataaagccttcttagttccatgtgaatcctcatagatgatggatcttgagattaatgtaattttgattctgctgggctctttaaataaatgttatccacttataattatacacggcggtcgggccctagtgattctcgtcgaccctgtttttttttt

SEQ ID NO: 80062 - DNA, 1715 bp, Glycine max
  Clone ID: PAT_MRT3847_43310C.1
ttgtcagtgaccatagcagaagaagctgtgatgtcaaacgcagcctgcggtccggtcacggtccgaccacgcgtactcatatacaatcagttccgctcgagaaggagactgtgtgaatgaaggaacacaacacatacttacagacatacatactctctcaatttctctctcttcttactttttctctccaaaccttacatgcacaaagttgtgtatgtgttcccatggaatttgcttgcttagactaatcaaccaagttttgcattttgtgtaaccaaaactctctctcttttttttttttcttctgggttggcaaagtcaacatgcaagaacaagattttttttaggctggttgatggtttgagttccaaaaaatttaactttttgttgaataatttgggttggtgaaggggtgttatgaagaacgaagagcaggctcgtagtttgtttggaatttcactctctgacagacccagatggcagcaattcctcatttgttcatcagggttcttctttggatatcttgttaacggcatctgtgaggaatatgtgtataacaggctccatttcagctatggttggtacttcacatttgttcaagggtttgtgtacctgtgtctgatttacctccaaggcttcacaagcaagcaaatggtgaatccatggaaaacctatgtgaagctctctgctgtgcttatgggttctcatggcctaacaaaggggtctttggcttttctcaactaccctgcacaaatcatgttcaaatccacaaaggttctgccagtgatgataatgggtgccttcataccgggtctgagaaggaagtatccgctgcatgaatatatatctgcaatacttcttgtagttggtttgatcttgttcacactagcagaatgcacagacatctccaaatttcagtatgattggtgttattatgatttctggagcattggtcatggattctttcctgggaaatcttcaagaagcaatatttaccatgaaccctgagaccacacagatggagatgctcttttgctcaactgtggtgggtttgcctttcttaatcccacctatgcttttcacaggagaattattcaaagcatggacttcatgttcacagcatccctatgtgtatggagtgctagtctttgaagcaatggccacattcataggccaagtttctgtcctctcccttattgcgatctttggtgctgccaccacagccatgataacaacggcaagaaaggcagtgacattgctattgtcatacttgatatttacaaaaccattaacagaacagcatgggagtggactactactcatagctatggggatcacattgaagatgctgcctgatagcaaattcactagcaccaagaccaagagggtcttaacctcttctgcaaggaacattggtgcaaaatctactaatgatgaagagttggggactctgccaaattctggagaaaatgatgaaaggaggcctttggtctagcttattaataatgtgttctcaatgcaatttttatttttgaagtcattattttataaaattcatgctttctttgtcgttttcgtatcacgttaaaggaaaaaaggaaataatttgatgttcaattagcattaattgtatacaggattatttttttaatgcaaggccatagattttaatttaaataagaaaacatcttacaataaaaacccataggcacaac

SEQ ID NO: 80063 - DNA, 193 bp, Glycine max
  Clone ID: PAT_MRT3847_43311C.1
aacacctagtgcattcattatgcttaccatatgtgagagtggagcagaattacacataagcactgacttgatcgggctctgttcaagctttgtgatctctgctgcaatatctattacttcctagctttttgatcccaacagcgttggtgtgaaccacagcatcctcatcactaacatttccttacgttccatg

SEQ ID NO: 80064 - DNA, 255 bp, Glycine max
  Clone ID: PAT_MRT3847_43312C.1
agcggcttttcttaggcgcaaagtatgaagtgttgttgaaggtcgaatgcagtttatgcagggtagtcacaatgcacttcatgcaatgaagttcactgatagctcatatattggatcgggtctcgtataaaatcgttattcaatgtcggaatgagtagtttatggtgtatgactaatgagatttcgggttcaacagtagggggaatattatgtgaggaataagtatgcatgatagactgctgctgaataaatcaa

SEQ ID NO: 80065 - DNA, 484 bp, Glycine max
  Clone ID: PAT_MRT3847_43313C.1
tacggctgcgagaagacgacagaagggggctgctgcttctttttcttcttctttttttctctctctctttcgcagcttcgagatcggggacgagccagcgatggcgaaatcaagcgccgacgacggcgagctccggcgagcttgcgacgccgcaattgaggacccgaggcagaagatcgtgatggcgctgcgcgtcgccaagagtcacggcatctttggaaaatcttcctctaagcttggtcgcatggccaagcccagggttctcgctctctccattgttggtgacgacgtggtgtttcctgcagcgaaatcgaaggggctgaggacatcggcttttcttcgagttttgaagtattctacgggaggagttcttgaacctgcaaaactatacaagctaaagcacctgtcaaaagtggaagttgtagcaaatgatcccagtggatgtacatttactcttggattttgataccttaggagccagagt

SEQ ID NO: 80066 - DNA, 442 bp, Glycine max
  Clone ID: PAT_MRT3847_43314C.1
acggaataacaaagagaacaaaaacttttttggggtctgctgtttgtccgtgttcagcgtagcggatcaaaatttagaacccccaatgacttccattagaaagaaagcaacaaacatatttcaagaccaacattacctttgaaaaggtatttgcgattaacagccaagaacagggaatatcttttaacacttctcgtgttgaatctgttctacaggcaaggttggtaacaaagccacagcctcaccatcaatcacaagaaggtcaccattcttgaaacaccttgtcttaaactttgcaagatatcgatttttattttctctcagattagttgcttgcacttcaccaataatctgatctccaatatagaccgggaacttaaaattcaagttttgagatacatacacagctccaggaaaatgtgatgagatgatatgaggaaag

SEQ ID NO: 80067 - DNA, 475 bp, Glycine max
  Clone ID: PAT_MRT3847_43315C.1
ggaaagactaaactatttagtttcgaggattaaaacctccttacaagttactaatctgaattcttctctattttattcattcctcaactttccttttatatactgtcttcatattacattcctaacaaattatttagcaaaccagtaacaaactagtagtgaacctaacaacctctatatggttgtaactaactattatggtagtgttttttctaagctgaaccagcgtggtgctcctcttggcctactgctgtattttcttcctaacattccctaacccatcaaaaacaccttgccttaaggtgttgagtgcagaaaacagaacctagatcccaaatgaaagtgggtgtagaaattagtgcttgaagattgttgcgaagacagagccatttgagagtgacgaagatggcgaaaaggagaaggagggaggaggaggaggaagggtttggtggaccatcgtgtggcgaagaaaggg

SEQ ID NO: 80068 - DNA, 301 bp, Glycine max
  unsure (1)..(301): unsure at all n locations
  Clone ID: PAT_MRT3847_43316C.1
gaaatggagtctcgcttttgttgcccaggctggagcgaagtctcttagtttcctccccacggtttcgggcactaaaccccgaagcaggcaagctgagcatttttatccccatttttcaaaggaatgactagaagtcagggtttgcccaaggtcaaacaactagctggtgtgcnnnaaaggtaagaatatgtggaagcccccatgttattccttccgctacacctccctccagagacagggctggccagcatcgcacgggacaggaaattgaaatggctcccggtaaggcagcgagcctgcc

SEQ ID NO: 80069 - DNA, 267 bp, Glycine max
  Clone ID: PAT_MRT3847_43317C.1
cctcgagccgaatcggctcgagtgaaaatgttgcatatcctttgatttctagccatttcaaattctttggcaaaacatatctgacgttttgttttttccattattattgtgttgtaggaaattgtagtatactgctctctacaaaggttatccattgatgcaaggactattgtgctgccgcaaactatacacttctaataatttgatgttttacttttttgccaaatattgtgctgcagcaaactatacacatactatgttgttgcc

SEQ ID NO: 80070 - DNA, 573 bp, Glycine max
  unsure (1)..(573): unsure at all n locations
  Clone ID: PAT_MRT3847_43318C.1
atttgttaaccaggtaaagcgatgtgcagaaatgtcaagaaagctacgattcttcgaggatcaaatcaataaagctggtctaatgtcttctccttcagtcttgcaaacagatatttatctggaggatttagagatacaacttgctgagcatgaacatgagctaattgaaatgaactctaacagtgagaaacttcggcaatcatataatgaactcctggagttcaagattgtattacaaaaggcatgtcgttttcttgtttcaagtcatggcaatgctttttcagaagagagagaactggaggagaatgtttctcaaatggagactatattgagacaccatttttgtttgagcaggaaatgaggcatgcaccatcagatcaatctggtttaagatttatcagtgggataatttgtaaatccaaagttcttaagtttgaaaggatgttgtttcgtgccacaagaagcaatatgcttttcaatcatgcactagccgatgaacaatcatggatcctatttcaactgagatggttgagaaaattgnggtttgttgggtttttctctggggagcaagca

SEQ ID NO: 80071 - DNA, 466 bp, Glycine max
  Clone ID: PAT_MRT3847_43319C.1
tgagcatcttctagctatctcgatcgaactgtccaaggtcctgtcaccaccaatggtcaacctactagtacctacaatggctgtcgtacaaaaagcaacaaatgctaacatcatggctgccgccgccaaagcacataccacataattcggttgtggcaccatagtgctacaatgccgccgttgataacgaatagataagcgaagttggtattttggtttacaagagaagccagcaaaggtactagacgatgtaccaaccaggccaacgtacgggtgtggcattgagaaagccacgtagccgattggggtagcgccatgggtaggtcaatcggggttacttcgtacgatattaatctcaagcgtgagagtacaaggagggggaagcggttccgcattttgggtactttgtagcaggtaaatgtaagcaacggttaaccagtgagagagggcaaccaacgtggtaggt

SEQ ID NO: 80072 - DNA, 213 bp, Glycine max
  unsure (1)..(213): unsure at all n locations
  Clone ID: PAT_MRT3847_4331C.1
attttagtttgacctggtggcactgtgaaattttttacactataaatacacaagaaaatgtcataatgttgtggtgactaaggtttgtcacttacactaaaagcttcttaactggttnttcaaacctatggcatcgtatagtgtgtcaaaaataaaatctaatatatatttactacattttacataattaagaagtacttaacttgtgatttt

SEQ ID NO: 80073 - DNA, 464 bp, Glycine max
  Clone ID: PAT_MRT3847_43320C.1
cccatttgtttgtgcttacatcggcatctacagacatggcgacggtgctggatgaattatgcaggaacaaatgctactgtatagaagatacgagggacttgatactatagttaatgaggcgtgaatgcagagactttgatctatgaatggatgagatactcaagtatggaccctactaccaccatataagcgatgagcatttgaaaaactctgtgcccgaaatgtaagatagagagtctgatgggccactaaagctggccagatacttgctgaggatttcagtgagagtgctttaactaccaatgatagccttaatgttcaccagatgagtgtcaagttcatgactgcagatgacactcgtgcaatcttgaatattcctgatggaacgggtgatctgacatgtgtaaatcgcttacttatggttctttcacataaagacgatgagaattaatttgcaaggatga

SEQ ID NO: 80074 - DNA, 164 bp, Glycine max
  Clone ID: PAT_MRT3847_43321C.1
ggaaaaccatgaaagttttttatttataggaatctggagtacaaaagccccaatttcttttttataattttgatttacattcacaaagaaataagtttgatgctcatgatgacttggccacattattaatgcttccaaggattgaagtgcatgccagagtcaag

SEQ ID NO: 80075 - DNA, 109 bp, Glycine max
  unsure (1)..(109): unsure at all n locations
  Clone ID: PAT_MRT3847_43322C.1
ttgggcnnngagtggtgtgnctcgtgatagacagataatgatggtcaagggtggtcttttgaaggagtgtgntgattggtcaacagtaggggagttaatggcactgaag

SEQ ID NO: 80076 - DNA, 302 bp, Glycine max
  unsure (1)..(302): unsure at all n locations
  Clone ID: PAT_MRT3847_43323C.1
aggagagngatngtnaagcaacaaagaagntangaagantanagcnngaanatannangncngnaanagangncaagaanngngtngatngaaagatatnttacggaaggagtatagggnnngatgnananaannnnnantttgagantnnaaagatggaanancgcganngaagnanngnntntntagatgaatnagnangtgagtagaaagnngagtagaanngntgtcatntcannngtngnnagnggnntngtagaaaantnntggtnagnnnnagagnntgtntgangtnaaagnnn

SEQ ID NO: 80077 - DNA, 493 bp, Glycine max
  Clone ID: PAT_MRT3847_43324C.1
ctgcttggggggggggggggggggggggggggggggggggggggggggggggggggggggggggggggggggggggggggggggggggtttaaatccaaatgggcccaaattttgggggtttcaggagttcaaaaaaactttaaagggggcccttaaaaaccccttttaaaggggttagggccaaatgaaaattttggggaagttcccaaacccctttgaaggccttaatgggttaaaaggcccaaaaggaaaaatagaatttggccaaaaaatccctttttaaagggcccggggaaaaatttaaccccaaagtaagagggaccccccagggaaaaaatgggggttagggcccgttttgaacaagccccagaaaaagccccctttttaaacccccctggcgtaaaaggcccggaattactgggggaagaaacccgtacgttaactggaaatagttccccaagttgcggttttaaacccgccccaaaagaaacc

SEQ ID NO: 80078 - DNA, 374 bp, Glycine max
  Clone ID: PAT_MRT3847_43325C.1
aacacctctagcttgcctctccttcatcttgtcctcaaaaatcctgcactttgtcaccagctgattaaaatccgtgatctgcatataactaaccgcttgttggatctccaaccgaagcccattctcaaactgagcacataaatcttcctcattccgagcatcttggtattgaggccaacactgcagaagctcattgaacttagccgtgtactccccaacagacatgtttccttgcttcaaatccagaaattccctcgccttcctcttcctgagatctcgtggaaagtaattctccaggaatttgtccttgaaagcattccaaggaatcacgcctccacgtgcgacaaatgaagcttcacaaactccaccaattc

SEQ ID NO: 80079 - DNA, 296 bp, Glycine max
  Clone ID: PAT_MRT3847_43326C.1
gcttgaacatcatagattcaaatccatccccatgccccattaggggagtctcgtgcattgaggtaccctctttttaatggctattgatcccaaccataatcatatgttggatgtttttttgtgacctatttaactagcagctgaccagaagtagatcaactccaatgtctccttataactgccctctgttttgaaaatatacattataatcagaaagtgtatcttttttggatcttgccatggttcgtaggaagtgcaaaccaatgccatctaattgtatgcagtgaatagtgata

SEQ ID NO: 80080 - DNA, 663 bp, Glycine max
  Clone ID: PAT_MRT3847_43327C.1
ccacgcgtccgaaagtctcgagcatatcaacttgagcccatgggcttgtcaaagtgcaatccaccaatttctgccctccacgtgcgataatgagtcaacagtctttctatgttttatttatttaaattcttttttagaaattaatttgaacacttgaagcttatctaatatatcctattttaaatgtgacaaaatttgattttccttgattatgaaaatttgggattccattttttattttcttaaacacgttttgatcactgatttattttaccgtttaatcacacatatattgattttattcatggtaatcacattaagttacatttatgttttttgtcttcaaagaccatattttcttccctataaatacaagtcttactaactcagtttgatgcaccaacattttctcttctctcttattcttgctttctctattctttcttctctattcctaggtttgggtttgaattttcaccctttctagtttttgtagccttagcttgactgagaggttcatgttgtatcctgggagatttgcatgggataccgcaaatgaatcctttagggaagtgttctcacatgcctcgaaaagactttatctatgaccttcagcaccatttctaacaatctaaaggattcattattggctgaagacatgga

SEQ ID NO: 80081 - DNA, 4085 bp, Glycine max
  Clone ID: PAT_MRT3847_43328C.1
tacggctgcgagaagacgaaggaagggggcagaagaccaaggaggttgggcaggatattcagagcaaggcacaggatacaagggaggcagctgcaagggatgcaagggaggcagctgcaagggatgcaagggaagctgctgcaagggatgcaaaggtggaggcaagggatgtaaagagaacaacagtgacagcaacaaccgcaaccgcatgatgagtaattctgatattagagggagcattaatgtgttgttgtgatgtggtttatatggggaaattaaataaatgatgtatgtacctcttgcctatgtaggtttgtgtgttttgttttgttgtctggaggcacctgcaacaggaactccccctgctgcgggtcaggcctcgacacacaatacccccaactaacaataattccttcacttgcagaacttagttctctgttgcatcatcatcatcttcattagtgttagccctaaacttcaccttcaaccatgaccacagtgccaccacacagtgtccaagtgcacacaacaacacaccgctacgaagccggcgtcgtcccgccggctcgttttgaggcgccgcgttacgaagccggcatcaaggcgccctcttccatttaccattccgagagaggtccgacgacctctcaggttctcgcagttgtcgccggccttccggtcggcggcatcctcctgctcctggcaggactgaccctggctggaactctcaccgggctggtggtggcaacaccgctcttcatcatcttcagcccggtgctgattccggccacggtcgcaattggcctggccgtggccgggttcctgacgtcgggagtctttgggctcacggcgctgtcgtccttctcctggatcctgaactacatccgggagacccagccggcgtcggagaatctggccgctgcggcgaagcaccatctggcggaggcggcggagtacgtggggcagaagaccaaagaagtagggcagaaaaccaaggaagttgggcaggatattcagagcaaggcacaagatacaagggaagcaggctgcaagagatgcaagatgatggcaagggaagccagctgcaagagatgcaagggatgcaaaggtcggagtcgagagatgggcaaagaccaacggtgacagcaataatccaaccatgaccacagtgccaccacacagtgtccaagtgcacacaacaacacaccgctacgaagccggcgtcgtcccgccggctcgttttgaggcgccgcgttacgaagccggcatcaaggcgccctcttccatttaccattccgagagaggtccgacgacctctcaggttctcgcagttgtcgccggccttccggtcggcggcatcctcctgctcctggcaggactgaccctggctggaactctcaccgggctggtggtggcaacaccgctcttcatcatcttcagcccggtgctgattccggccacggtcgcaattggcctggccgtggccgggttcctgacgtcgggagtctttgggctcacggcgctgtcgtccttctcctggatcctgaactacatccgggagacccagccggcgtcggagaatctggccgctgcggcgaagcaccatctggcggaggcggcggagtacgtggggcagaagaccaaagaagtagggcagaaaaccaaggaagttgggcaggatattcagagcaaggcacaagatacaagggaagcagctgcaagagatgcaagagatgcaagggaagcagctgcaagagatgcaagggatgcaaaggtggaggcgagagatgtaaagagaacaacagtgacagcaacaaccgcaaccgcatgaacgtgatgagtattaatgtgttgttatgaacttatgatgttggtttatgtggggaaataaatgatgtatgtacctcttcttgcctatgtagtaggtttgggtgttttgttgtctagctttgcttatttagtaattagtagaagggacgttcgttcgtgtctcataaaaaggggtactaccactctggcaatgtgatttgtatttgatgaattcaatgtcccacgaacaattccttcacttgcagcactgttgcatcatcatcttcattgcaaaaccctaaacttcaccttcaaccatgaccacacaagtaccaccacacagtgtccaagtccacacaacaacacaccgctacgaagctggcgtcgtcccccccggagcccgtttcgaaccgccgcgttatgaagccggcgtcaaagcgccctccatttaccattccgagagaggtccaacgacttcccaggtcctcgccgtcctcgccggcctcccggtcggtggcatcctgctcctcctggcgggattgaccctggcaggaaccctcaccggactggcagttgccacgccgctcttcgtcctcttcagcccggtgctggttccagccacggtcgccatcggcctggccgtggccgggttcctgacgtcgggggccttcgggctcacggcgctgtcttccttctcctggatcctgaactacatccgggagacccagccagcctcggagaacctcgccgccgccgcgaagcatcacctcgccgaggcggcggagtacgtggggcagaagacgaaggaagtggggcagaagaccaaggaggttgggcaggatattcagagcaaggcacaggatacaagggaggcagctgcaagggatgcaagggaggcagctgcaagggatgcaagggaagctgctgcaagggatgcaaaggtggaggcaagggatgtaaagagaacaacagtgacagcaacaaccgcaaccgcatgatgagtaattctgatattagagggagcattaatgtgttgttgtgatgtggtttatatggggaaattaaataaatgatgtatgtacctcttgcctatgtaggtttgtgtgttttgttttgttgtctagctttggttattaagtagtagggacgttcgttcgtgtctcaaaaaaaggggtactaccactctgtagtgtatatggatgctggaaatcaatgtgttttgtatttgttcacttccattgttgaattcaatgtcaaatgtgttttgcgttggttatgtgtaaaattactatctttctcgtccgatgatcaaagttttaagcaacaaaaccaagggtgaaacctaaactgtgctaagttgacacaacaacacaccgctacgaagcctggcgtcgtcccccccggagcccgtttcgaaccgccgcgttatgaagccggcgtcaaagcgccctccatttaccattccgagagaggtccaacgacttcccaggtcctcgccgtcctcgccggcctcccggtcggtggcatcctgctcctcctggcgggattgaccctggcaggaaccctcaccggactggcagttgccacgccgctcttcgtcctcttcagcccggtgctggttccagccacggtcgccatcggcctggccgtggccgggttcctgacgtcgggggccttcgggctcacggcgctgtcttccttctcctggatcctgaactacatccgggagacccagccagcctcggagaacctcgccgccgccgcgaagcatcacctcgccgaggcggcggagtacgtggggcagaagacgaaggaagtggggcagaagaccaaggaggttgggcaggatattcagagcaaggcacaggatacaagggaggcagctgcaagggatgcaagggaggcagctgcaagggatgcaagggaagctgctgcaagggatgcaaaggtggaggcaagggatgtaaagagaacaacagtgacagcaacaaccgcaaccgcatgatgagtaattctgatattagagggagcattaatgtgttgttgtgatgtggtttatatggggaaattaaataaatgatgtatgtacctcttgcctatgtaggtttgtgtgttttgttttgttgtctagctttggttattaagtagtagggacgttcgttcgtgtctcaaaaaaaggggtactaccactctgtagtgtatatggatgctggaaatcaatgtgttttgtatttgttcacttccattgttgaattcaatgtcaaatgtgttttgcg

SEQ ID NO: 80082 - DNA, 376 bp, Glycine max
  Clone ID: PAT_MRT3847_43329C.1
gtgaagtcgcagcccgggacgcgctattgcatccttgaactgccccaaatgagttggagtgaaagcacagatacacaacccacactataccgatgccttctgctccttccaagctctactcagatgacatgagcctgctcgttgtgacagatagagaccacccctttcttatggagcactttgccctttcccttctgcgagttcctctctcaactactggcttttctcaagaggatacctgctcctaggggcgggttaaccagggcatgggacctcgccaccggatgcaactgctcgcggattacgtttaccattcctctagccgacaagaaccatggcttcatcaatggttcaagagtccgagcttgattccaat

SEQ ID NO: 80083 - DNA, 116 bp, Glycine max
  Clone ID: PAT_MRT3847_4332C.1
gaatttttgattccacaaaggaaaaatatcgacaatatttgggagaagaaattatcatcataccaacgagatgctatgcaagtcaaattctgcggagttagcaacttaacctatac

SEQ ID NO: 80084 - DNA, 834 bp, Glycine max
  Clone ID: PAT_MRT3847_43330C.1
ggctcgagcccattcttcattctagccattcgaattcccaatctaaaaccctaataccttcaaagaacgaagtagtggatcagtgatggcacctaaggcagagaagaagccagcggagaagaagcccgcggaggagaagaagtcgacggtgggagacaaggctccggcggagaagaagccgaaggccggaaagaagcttccgaaggagggaggagccggcggagaaggggggaagaagaaaaagaggaacaagaagagcgtggagacgtacaagatatacatattcaaggtactgaagcaggtccaccctgacattggtatctcaagcaaggccatgggaatcatgaacagcttcatcaacgacatcttcgagaagcttgctcaggaatcttccagacttgcccgctacaacaagaagcccaccatcacttcaagggaaatccagaccgcggtcaggcttgtgcttcccggtgaattggccaagcacgccgtttctgagggtaccaaggccgtcaccaagttcaccagctcatgaaccgactattatttggattttgtttctggttgcacacacaaatctgttctatgtatctggagacttatgtttggattttgatcagtaattgtgcatgaacgttgtagtggtgctgatatagttagtatattcttggtatggtacatggagtgggctgtttcagtattaatgcatttaagattctctaaaaaaaaaggaaaatctaccaaagtatgaaaaggagctagaacttaaagtagccaaagcacaactggaggaaccttaagaaggatgctctcggggcaatggaaactcaaaaa

SEQ ID NO: 80085 - DNA, 810 bp, Glycine max
  Clone ID: PAT_MRT3847_43331C.1
tcatcggcacgctgcggcgcggcctgatgcgcatcctccgcgccaccgatccgcaagcttccggcgaagccagagaaagaaaaaaagaagtaaaaactaaataagacaacttcacccactcttcattctatcaattccaatcaccaattcaaaacccttcttcccttggaacaaattgagagatcgtgatggcaccaaaggcggagaagaagcccgcagaggagaagaagtccacggtgggagacaaggctccggcggagaagaagccaaaggccggaaagaagcttccgaaggagggaggcgccggcggagaagggaagaagaagaagaggaacaagaagagcgtggagacatacaagatctacatcttcaaggttctgaagcaggttcaccctgacattggtatctcaagcaaggccatgggaatcatgaacagcttcatcaacgacatcttcgagaagcttgcccaggaatcttctagacttgcccgctacaacaagaaacccaccatcacttcgagggaaattcagaccgcggtcaggcttgtgctgcccggtgaattggctaagcacgccgtctctgagggtaccaaggccgtcaccaagtttactagctcttaaactgttgtttatgggcttgttgcacgcccaagtctgttctatgtatctggacacctatgttcagattttaatcaattgtaggggtggtgatatagtatagtgtagcatattgttggtacggtacattgaattgctgttgagaattaatacatttgagattctctaacttattcgcttatgcaatttcgaa

SEQ ID NO: 80086 - DNA, 372 bp, Glycine max
  Clone ID: PAT_MRT3847_43332C.1
atctacacatgcatccttaatgaatttattgaatttaccaagtaagggtacatgctaaccatctacctgtcgaccgtgccacaggcataaatccatatcatgcctgcaaaaggacactacttcttcctctttacaaactaataggtggtaatcaaagggggagagccaaagcctggattatgatcctctaaaaacatcaattgaatacctggcatgaatacgccttggaagcctgctctagatatacaccaagagcctacggtgacgagcccttggaaatgtagacaaaaagcacgccctgagtgctgcatgcgcttttgatctctagaaaaatcagccacgggctccaaggatatcaccatcttacccaca

SEQ ID NO: 80087 - DNA, 767 bp, Glycine max
  Clone ID: PAT_MRT3847_43333C.1
ccacgcgtccggttgtctttagcctattccaattcgcaattcccaattcgaaacccttattcctttcaaagaaccaaattgagtgatcgtgatggcaccaaaggcagagaagaagccagcggagaagaagcccgcggaggagaagaagtccacggtgggagacaaggctccggcggagaagaagccaaaggccggaaagaagcttccgaaggagggaggcgccggcggagaagggaagaagaagaagagaaacaagaagagcgtggagacatacaagatctacatcttcaaggttctgaagcaggtccaccctgacattggtatctcaagcaaggccatgggaatcatgaacagcttcatcaacgacatcttcgagaagcttgcccaggaatcttctagacttgcccgttacaacaagaagcccaccatcacttcaagggaaattcagaccgcggtcaggcttgtgctgcccggtgaattggccaagcacgccgtctctgagggtaccaaggctgtcaccaagttcactagctcttgaactgactattatgccccttcgcttcgatctaggtgtctctgttaggaatatgttttatgttgaagtgttggtttattttttctttttggtgaaagcaatttgtaagtgaagaatatgggatttgttgatccttctttgtatggaattagttgctaatacagagacgtatattattccgaaaaaaaaaaaaaaaaaaaaaaaaaaaaaagcggccgctctagaggatcca

SEQ ID NO: 80088 - DNA, 1148 bp, Glycine max
  Clone ID: PAT_MRT3847_43334C.1
ggtgaatcagtgatggcacctaaggcagagaagaagccagcggagaagaagccggtggaggagaagaagtcgacggtgggagacaaggctccggcggagaagaagccgaaggccggaaagaagcttccgaaggagggaggagccggcggagaaggggggaagaagaaaaagaggaacaagaagagcgtggagacatacaagatatacatattcaaggttctgaagcaggtccaccctgacattggtatctcaagcaaggccatgggaatcatgaacagcttcatcaacgacatcttcgagaagcttgctcaggaatcttccagacttgcccgctacaacaagaagcccaaccatcgcttcaaacatttctcattcacaactttacccactcttcattctagcaattcgaattcccaatccaaaaccctaataccttcaaagaacctagtagtgaatcagtgatggcacctaaggcagagaagaagccagcggagaagaagccggtggaggagaagaagtcgacggtgggagacaaggctccggcggagaagaagccgaaggccggaaagaagcttccgaaggagggaggagccggcggagaaggggggaagaagaaaaagaggaacaagaagagcgtggagacatacaagatatacatattcaaggttctgaagcaggtccaccctgacattggtatctcaagcaaggccatgggaatcatgaacagcttcatcaacgacatcttcgagaagcttgctcaggaatcttccagacttgcccgctacaacaagaagcccaccatcacttcaagggagatccagaccgcggtcaggcttgtgctgcccggtgaactggccaagcacgccgtttctgagggtaccaaggccgtcaccaagttcaccagctcttgaacaaaatatcttaactttgtttacctcgctcttgttttgcttcatgtgtatctgttagatctagcgaccctatgtttaggtttgaactggtagctttttggtttttaatttgtaagtgaagaattaggattgggttgatcctctgtgtatggaattggtagaattgatcatataggagcaatttgataaaaggaatggttgtttatgaactcatgattctctatcttcgctctaaaa

SEQ ID NO: 80089 - DNA, 352 bp, Glycine max
  unsure (1)..(352): unsure at all n locations
  Clone ID: PAT_MRT3847_43335C.1
cccacgcatccactaattccatcaatcattttctaacattatacacgcatatactanattcgtgtaattcgaccaacactctgtccaaattgctactctttaaatcagatccgcgacacccaccccaccaaaaccttgcacaacccatccactacacttgactcatgacgatccagccactttcatcctaggaacatcatattgctttaatagcttaaacatattgaaaaatgaatcttagatctcacacttagctatcgaatgtatgatcgtgatgacatttacatgcactctaggacttacacgattatcgtcccccataatactggacatgaacgaagaatttatcaac

SEQ ID NO: 80090 - DNA, 610 bp, Glycine max
  unsure (1)..(610): unsure at all n locations
  Clone ID: PAT_MRT3847_43336C.1
aacatgggacggttcaagaatagaaggaagaagaaaagtgtcgagactttcacgctccaccaatcctagttcacaatgactatcgagaatacatgatttgcctacctttgagtctaagcctcttccttcaacatgatctttctcactttcgtatacttgactaataactctcacttaggtccaagaattgtaacgattcaattctaaggttgcctacttgatactaactgggtgctaattagataagcaatacaaattactccatacttctgtaagtttgttcaccttaaggtaatcttcacacatatatactcatgtcaccctataactttgcacttgaacttgaggtttcgattgttgtttacaatatctaactctataactaggacactagtcatatcatcggtttcctattcaagctctaactactaagctagttctaacgtttaaaactaaactcacaacaagattcttgagaantttatccatctcttttattccggattcatctncaaagatccttacaatgtatcaaactaacagtaatgtctcccaaatattatggtgaacaccatggntatctattctaatcacatataggattaatctt

SEQ ID NO: 80091 - DNA, 906 bp, Glycine max
  Clone ID: PAT_MRT3847_43337C.1
aggcgtcagacagctgcaaaaagagtacagaatgggactcagaacttcaatccctcttttgctttaccaaattccaatttccaattcaaaaccctaactccgttcgaagcaccaaatcgtgatggcaccaaaggcagagaagaagccagcagagaagaagcccgcggaggagaagaaatcgacggtgggagacaaggctccggcggagaagaagccaaaggccggaaagaagcttccgaaggagggaggcgccggcggagaagggaagaagaagaagagaaacaagaagagcgtggagacatacaagatctacatcttcaaggttctgaagcaggttcaccctgacattggtatctcaagcaaggccatgggaatcatgaacagcttcatcaacgacatcttcgagaagcttgcccaggaatcttctagacttgcccgctacaacaagaaacccaccatcacttcgagggaaattcagaccgcggtcaggcttgtgctgcccggtgaattggccaagcacgccgtttctgagggtacgaaggctgtcaccaagttcactagctcttgaattagctatcttatcgctttccaaagactcttttctgtcccaatttgagattttaatcagtagtagactttttttttttgtttgataggatttgtaattgaaagaatggtcctgggttgatccttttgtgtattgaagtggcaagatgtattgattatataggaacgcagtattgtttagtattatactttcaagaatctccaatcggccattcgttaataattgttttttcggatatttgtttgcttgaactttccagttagttattaatagtgtgcaaatcttttgaaaactgtaacatttatcgtataggaatcattttccctaaaaaaaaaaaa

SEQ ID NO: 80092 - DNA, 765 bp, Glycine max
  Clone ID: PAT_MRT3847_43338C.1
cgcaattcaaaactctcactccgttataagcaccaaatcctgatggcaccaaaggcagagaagaagccagcggagaagaagcccgcagaggagaagaagtccacggtgggagacaaggctccggcggagaagaagccaaaggccggaaagaagcttccgaaggagggaggcgccggcggcgaagggaagaagaagaagagaaacaagaagagcgtggagacatacaagatctacatcttcaaggttctgaagcaggttcaccctgacattggtatctcaagcaaggccatgggaatcatgaacagcttcatcaacgacatcttcgagaagcttgcccaggaatcttctagacttgcccgctacaacaagaagcccaccatcacttcaagggaaattcagaccgcggtcaggcttgtgctgcccggtgaattggccaagcacgccgtttcggagggtaccaaggccgtcaccaagttcactagctcttgaacaaaatatctttgcctggctcttgtttttcttcatgtgtttctgttagatctagcgacctatgcttagatttgaacagttaacttttttattattatttgtaattgaagtattgggattaggttcatcctctgtgtatggaaatggtagaatcgatcgtataggggtaatttgatacatggaatggctgttttgactattttatgtactcgtgattgtctctctaacttcgttcgaggtcgatattcctttttaaaaatgtttatttgtatgccc

SEQ ID NO: 80093 - DNA, 492 bp, Glycine max
  Clone ID: PAT_MRT3847_43339C.1
ctgcttgggggggggggggggggaatagactaaatgaaataggggaggagaggatgggacgagaataacggcgtgtcagggtcacaaggcaaaagagaatagtgagggtaaaatagacgaagataaaggggcgtctttgtaagacaaatgtggcctgtaacggccaagatgaacgagcaaacggtgaggcggtgctggccaaccctggcgagggtggcagatgaattcaaaccttggccagccaatttgtaacgcacagaagacaaagcagtaactaagtttaatgcaagagtgccacttagcgttcagggagcagaagtggccatagggcagggtgaatccaggcaatcttgctaagcttgggcgagtttcctttaaggccagtatttgggccctaacgatattgttgacaactagcttggcatatgattgtggtatgcaaacgtaagaacccgtgtcaatgacccgcgcagacgtgtaaagggcttgggg

SEQ ID NO: 80094 - DNA, 387 bp, Glycine max
  Clone ID: PAT_MRT3847_4333C.1
aatagccttcatagcttccatacaatccctagagaagataccacagtctttgagctcttcaggacggtttgactttcatataaagctgcctgctcctgcagcttctgagcgcagggctatgttgaagcatgaaatacagaggcgtcagttgcaatgtgatgatgacatcctgcttgatgtggctgtaaaatgtgatggttatgatggttatgatctggaaatattagttgacagaactgtccatgctgctgtttgccgttttctgccatctaatgctgccatttatgagcatgagagtcctgctttattaagggaggatttctctcaggcaatgcttgattttcttccagttgcaatgcgtgatatcacaaaatcagcttttgatga

SEQ ID NO: 80095 - DNA, 275 bp, Glycine max
  Clone ID: PAT_MRT3847_43340C.1
ggctcgaggctagagccaaaattctctgatcacatgtctattgataagtgctgatctgctaccggggacagggacacgagcaaaagcacctacaagatacactatccaagacaacgaagacgatcatgtccacaaaacgcactagagctccggtattccagaaagagaagggtcgactgtttacctggctaagagcgacaacggagcacatggtatacgaccaagaatatgggacgcttccattgtagaccacagtgaaaagactacgcatcatt

SEQ ID NO: 80096 - DNA, 433 bp, Glycine max
  Clone ID: PAT_MRT3847_43341C.1
caactgtcaactccgatcaccaaccacctttaccaacacactcaacaggatcttgggcacgtagctacccaaccaactctcgccaatttcgtttccaccaacagggcggcctcgacaagcaaatatcccgaagcacctcacaggcagaccaaccggccttccaccaggacatcaacaccacagacctatcatcaacatgtccgtcgaagctgccaccgcccagatggcaaacactactctcaacgagcctacttccaccgctgagggcgcctccgtcggcgccggcggtgacaagccgatcaacgcgtctcagaacgaggccgtgatcgccagcgccgctgagggtaggagactgtacattggaaacctcgcctacgcgaccaccgagggagagttgaaggacttcttcaaggactaccttgttgagaccacc

SEQ ID NO: 80097 - DNA, 869 bp, Glycine max
  Clone ID: PAT_MRT3847_43342C.1
atgtccaaggtcagcatgttgcatgtaactaatcaagtcagatctctctactctaatattatgtatggcacatgctagacaacatggatggaacctcctgccacggttcctcttggagtgatggctaccccgaaaaaaaattacatcataaaaatgtgtatatattttcttaatttgctcccctaatcacataattgactaccccaaaaaatttattatcaaataaattagtgttagagaatgtgttttaacattttccttcttatattgcccctctatcacttaatttatttagaaaaaggaaagaataaaaaaaccaatttttttttaatgttatttaaaattatattttatttaatttatatgtggccccctcataaaatttaagctacctcggcccctgctggcagcgctgggcattcaaggttacttttggcaatttaccatggtcttcaaaaagcttggaaagatggattttgtgactctgattcagctatggcgttggagctttattcaaaagcatcgtgacatttttctccgacactctactttgattaagctgattcgtgagcttatgaatatggattagaaagttcgattgcaacacactctcaaggaagctaatgcctgcgcatattagttagccaagtatgaaacaactcatgaagatgtcttcctcaaactggacaaactgttccacacagatttctcctttatgcttgcagacataatgggagtcatgcatattagatctagctgtttcagctttcgttttttttgtgcctttctttctctttctctttctcatgtatcaaaaagagcaaatacggtttcactggttgtggagtgagaagagatataaaggaaat

SEQ ID NO: 80098 - DNA, 569 bp, Glycine max
  Clone ID: PAT_MRT3847_43343C.1
ctttttttttttttttttttttttttttttttttttttttttttttttttttttttttttttttttttttttttttaaaaaccccaacttaaaaaaaaaaattttcctaaaaaaccaaaacatatccaaaaccccccctccaaaagggattacttatttaaaagggggagaaacccccccctaggaaaaagggaaaaagaaacccgtttgtaaaacacgggttataaaaccccaaaaaccctaacacagaggcaaccccctaaacccttgtccttaagcatgcttaaaaaagtctttatcataccccattacccaactaaaaacaagcgcttaaaaccaaccaattttcccaaatagtcaaaagctttggggaaaaaaaaaaagggcttaccttcttgttcccccagcagttaaaaaacggaaacaaatttttacaggcccagggcccagggccccccattaaaacttttcccctaaaaaagggaacaaaccttttttatccccccaattccaaaaaaaacatacaagcccaaaaagaacgggattttatttaacccccttggcccacc

SEQ ID NO: 80099 - DNA, 572 bp, Glycine max
  Clone ID: PAT_MRT3847_43344C.1
cgcttctccccttataaattgatcaaatactagaaaaaatcaattaaagtgaagaccaatatcatcattcaaaacagaaatctaaattaaaaggttgttgttggttgtagcaattaaaggaaagaggaacaaaatgtgaaactaaaagaagaaatgaaaataacaacttatctcgtcatgatgatcaacattggtgccggcaaacctccaacaaagtccaaagtgacgagtttgacgaacaagagaaaagaaaatcactaattggagtagctttgagaaataataaccccaaaggccgaaaatgacataatgcgtaatctaggttcaattttttatttgaattttagaatattggggactaagagtgctttcaggaaattggggctcattagttttatggatttttagttctttgagttgtggtggagttgggaaaagtttgagattcacagcaaagggttttttattttttattttttcaagttgcttctctacttttgtttggccatgacattcttccattgcgagaagtcgacatcggcaaccgtggctgtaaggtagcactttggaag

SEQ ID NO: 80100 - DNA, 2469 bp, Glycine max
  Clone ID: PAT_MRT3847_43346C.1
tcgacccccacctctgcaacacatagcagagattattctaatcttccctcttctctctccttctatttatccttccctccataacagtaacaaccaccaccacctctgcaacacaacacacataacacgtaacaaagagaatgagagcgctaaattcgcacgtgctcctcgtagatcttcactcccaccatcacgtgcccacctcaaccctctcctacctcagaaactcccgcttcatatcatccctccgtcgacgctccccaagaaccggaatccgatgtacggcgtcgccggagattcgccgcccctccgatcgcttctacggctcctcgccgtcgacgtcgcgcccggaggacctcaacctcttcctggaactgctccctctgaagatgcgaagggaactctatcgccaccgcgaaatcggaggcctcatagagattgtcatggatttgggaagaaaacctctcgccaggttcccttccggtgattgggtcatctctgaacaacccatagcgcaagaggatttacgccatgccatttccaaggttggtgagttttctgatgacaacaggtcaggtattgataggtctttgcatcggataagcgcgattcggaatcggaaaatgcaaatcattgggcttacttgtcgggtgggtcgagctgtgggtggcagtgctgaaattatacgtgatttggttgaggatggaggttctatcttggtcattggacctcctggagttggcaaaacaaccttaatcagagagattgctaggatgctggctgatgagttcaggaagcgtgttgtaatagtggatacatctaatgaaattggaggtgatggagatgttcctcatgcaggaataggcagggccaggaggatgcaagttccaaatgtgaatatgcagcataatgttatgattgaagcagttgaaaatcacatgcctgaaaccattattattgatgaaattggaacggagcttgaggcattggcagccagtactattgctcaaagaggagttcaattggttggaacggcacatggaatgaccattgaaaacataataaaaaatccttatcttcagattcttgttggtggcatagagagcgtaacccttggggatgaggaggccaggaagcgcaaagtgcagaagacaattctcgaaaggaaaggaccccctacattttcatgtgcggttgaaatgatatctaaaactgaatgccgtgttcatcatagattagatgcaactgtggatgccattttggcaggaaaacctccattatttgaaatccgtcaatgggatgattctgacaacgagttgccaaaatatgctccattgcccgaagaaaatcttggagaaacttctgacttaactaacaataatatcacgagttctgacaatgaacctagtgaggatgataaagatcacccacgtacttggtccacgaaatggagtaccagtggacctgtgatgacgaggagttcaccaatgcaagtttatacttacaagattcttgaagctgatctgctacaagtggccaaggtaatggggcttgaagatgtaatagatgtgactgatgacattggaactgctgaagcaattctagcatccagttctgagatacgacaaaacccatggatccgtggtgtggcaaagttccatcacgtacctgtatttgttatcaagtccaataccatggcacaaatggtcaaggcagtgcgcatgatccttgggctagaatcctttggccctacaccaaagaagccattaaatgaatgcttggatattgaaattgaggacgatgaaccaaaacgaaaaccatctttggaagagattgatgccttggaggaggtccggcttgcaatagagtacattgtgattcctggtggagaagctgtggaacttcttcctagacgttctgaaattattgcccggcagcttgaactcgttcaaagttatcagttggctgctgaaaagtcaggtaccgatcagaatcccaggttgcaaattcttccattgaggctaaatacaaaaaaagcctctaaatctactgttgcccgcaagaaaacaagtcctacctcaatgtctactggtgacagcggcaatggcaccagtgttaccaggcttcctattttgcctgaataattcaattctttccccaattctaacgattcacttcactggtttgtacatgtatgatgtatgtaacatgtacagtcatacaagtggtgtaaataatttattcatagcctaagagcttgtatctcaattggggtgtgacatttatgacggaagtttgatcctccgccaagctaccccttcttgtaccaaggtatatatattgaaaaaatcaatctacataaaatgtaatatatcattattttactcctcccaaaaaaaaaaaaaaaaaaaaaaaaaaaaaaaaaaaaaaaaaaaagaaaaaaaaaaaaaaaaaaaggggggggccccc

SEQ ID NO: 80101 - DNA, 365 bp, Glycine max
  unsure (1)..(365): unsure at all n locations
  Clone ID: PAT_MRT3847_43347C.1
ggcnnncaccgaggctatttcanatatttttggattccccgtcaaccccaaatgcgcaacctgttgtgtttcatgaccaacggcaccttccaccctcaaaaccttctcacttttctccaataagaacccatctccacctccaatgaaaaatcctccctctctttcccctgcctatgaagaactcgccaagtgttattgttctgacagaatgatcttcttgccttatgttctcttgtaccgatctgtaatccccttgtacttgacctgataatctctcttatattatggttattatcctttttctcttatcaagaatctcaactacttttccaattactatttttttgaatattattattctctat

SEQ ID NO: 80102 - DNA, 244 bp, Glycine max
  Clone ID: PAT_MRT3847_43348C.1
aactgttattaaacttgaaatcgatacaatttttataaactttcttttcaacataaattttagatggggtagcatttaactttaaagtctgggtttattaaagagttggtgcgcgaaccaattttttccggaatatattaaaaggaatctttttaaaagaaagggttacatttcccactttgtctattaaaatttccaccccctcaattttgttggcggtttttttttttattggtggcccttg

SEQ ID NO: 80103 - DNA, 541 bp, Glycine max
  Clone ID: PAT_MRT3847_43349C.1
agggattcttattaatttcaaatctcatcatttccatccactcgggagggggaaaaactatttttatcctttggacccatacctccccccataacctttttacaagatcaaaacattccaagtttttttctccaaccgagtcatcccatctgactcgggcagggcaactcaaatcccaaccccacccgggtcactttttccggcccccactttaatctccaccgttcataaccccccggggggttcaaccctgaccccagcagctcaaggacatcactttcctcaaaaaggcgtgggcttgcctcaccctattctccacgtgggagctcccccccaccgagccggccacgttaaatcccaccaccccggaaagaggcccgagatctgacagggctccccccgaaaaaaggcggctcccgttgggggggatggaggggagccccctcttgcacttggggccgggatcgggggggccctgccccaccgccaccggtgccgccatccaaacacggtttaaggaacccatatttttctcctcttt

SEQ ID NO: 80104 - DNA, 310 bp, Glycine max
  Clone ID: PAT_MRT3847_4334C.1
gttgatttgagactccgcggatgaccctcattgactacccaaaaccgaagggaattaacttcgatgaaacttaggtgcataatataatttaaatgttccagattaatttgccaaaccattaatgcttttataggcgaagcgcattggaggtccggaagtggtgaactggtgcatacaaaaaccctgccacagacctttatctaaagatgttgatagtttgtcaccaaaccccttgatgcatagaaaaatagaatttctctctgagataaccccttttacagtggcagcagcccaaattaaaaagttgggg

SEQ ID NO: 80105 - DNA, 301 bp, Glycine max
  Clone ID: PAT_MRT3847_43350C.1
accgcggaaatagacccggggggaaacctacttttgttttgaccaaattttccaaccaataaatgtccttgctggggtggtttaaaagccaaaatcagcggtttttaaaaaattaccataaattaagggcgaaaggccccccccccaccaattcgtagcttatgatgttctaaacatttaacaacggggagaaacttttgaaaacgaaacagggttataattaactaacccctcttatttagggcatattagtaacattccggcccccagctggtgttttttttatttccacaaaatgttt

SEQ ID NO: 80106 - DNA, 517 bp, Glycine max
  unsure (1)..(517): unsure at all n locations
  Clone ID: PAT_MRT3847_43351C.1
attttccagcaagccaagctacacttcggctctcgtacgcggctttcttccgtttccgccgccgatggcgactgcggcggcgctcttttctcgcctccgccgctcgcggccgtcctcctccctctccctcctctctcctccacgtgtcctctcctctcctctccctcctccgcttcccgctcccgcatcacctgactctccaaccctcgcctttctcgacgcgttccgctcacgcgctttgtcctctcacatttccgacaatcgagaaccggagctgaactcgttcggtgtcgactcaccgcttaactcggagcttctgaaagtgactgctgatactagtggcggcggcgaagacgacgccgtttttcccgttcgcgccgcgatttcgatgctcgagtcgtttcacgatctttctggatttccgcggtggntaactataatctcatctactttggctctcagaattggtgttctttggcctttgatttatcacttcacaagcttaaaaccattggag

SEQ ID NO: 80107 - DNA, 325 bp, Glycine max
  Clone ID: PAT_MRT3847_43352C.1
ggctgatttatgtgcttgcagtcgtgagaagatgatagaaggggactttaactagaaaaagccagggcccgcaatcccggtccgcgtccgtgaactcgaactgaacaacaactaactaactactacgctgctggtgaagaagactatatcgaagagcctggatggtgaggtccctgaggcggatgaggtggcggtgtcggagctctagatgacaaagtatacgactgaagatgatcgtgttgatagtggtactttctcgttgaatgcgatgagtaagacttcggtgaaggcgactgagcatcgtaagaagtatgctgaggttgtg

SEQ ID NO: 80108 - DNA, 200 bp, Glycine max
  Clone ID: PAT_MRT3847_43353C.1
gtcgacggcgcgtccgcccacgcgtccgggaaaacttaagccattccttgaccgacagtttcgaacatgatcaagatgctcggatccatatgggcatgtcgtggtcaacgattacagacccagctgtcagtagatcggctggtgtcaccaaagctgtactattcataacacccatttctcgtggcgtgcacagtgccaac

SEQ ID NO: 80109 - DNA, 499 bp, Glycine max
  Clone ID: PAT_MRT3847_43354C.1
gctgaaatcatgttggtctgtctgtaacaaaacttttttactattaatttagttctaaagcattcgattcaaaatattgtagccttgaatattttcatcactggatcaaagaattcattccaattgttgtctccatagctgaaatggaaagaagggttgcaattatcggggcaggaacaagtggccttgttgcctgcaaataccttttagagtttggatttaatccaattgtctttgaagttgaggatggtgttggaggactatggagacatactatagagtccaccaagctccaaaataagaaacaaatgtaccaattcctggattttgcatggccttcttcagttaaagaagataatcctagtcacgagcaagtgctagattatcttaactcctatgctgaacatttttctctcattccttacattagattcaactccaaagtcattgatatagattatgttggtggagagtctagtgaagaaatgaaatcatggga

SEQ ID NO: 80110 - DNA, 203 bp, Glycine max
  Clone ID: PAT_MRT3847_43355C.1
ggggcgtccgtttttttattttcttgattttccttcgctaaagaactaaatcctcgtcctgcataaaccattattcaaacaacatccgccttctttgttgtttataggacctaccaagggagaatgtgcgcgggggacacgtctcctcctgcttaaaaggggggcttcctaaacatattacttttggaaggactcagaagccc

SEQ ID NO: 80111 - DNA, 718 bp, Glycine max
  Clone ID: PAT_MRT3847_43356C.1
aaattaaaaaagtaaaatcttaatggagaagtcatagcttacaaagtgtggcaagcacaagcgtcagtttctgagagtagcaggcctctgactgctcttggccctgacagctgtggtgacccacactggtcactctgcactgcacactgcactttccagtgacacaggactgcagactgcctggagcccgttcctggggcagtgaacagatcaggtctatgaggtccaacaatgtagtccgttcccctccacactcatttttctccggtgacgaagaggtggacattctttggagactgcagcatctgtgccgcccgctccacaccaaccacagccgccagcctctgggcatcatacttggaatacagcacggtgcacgtccacgtggcctcctctcctctgctggtggctctcagcatgttacagacctcactgtagaagtgagggtacgttggcagttcatagaatatcaggttcctgatgccttttattgtgtaccttttgtagaaatggaagcgttctgtgaggagcagaaactgcttctctccttgcagaaagaagtgtcgagccctggagatcccagacttctgcgtatactcgcagatgtgtgtgaagttcagctcttctttcttgaagtaatttcggagacgcacaagtcaaagtaggaggggacatagatgagtgtgtgagacatgacagcatcccggtactgaggcaa

SEQ ID NO: 80112 - DNA, 219 bp, Glycine max
  Clone ID: PAT_MRT3847_43357C.1
tcatttataaaaaaatggtgcattgggaaatcattaaacaagcttgagtattacaaccactactacaggaagtttcaacttttttaatgatgtgctggcacataattcgaaatttagatcgtgttaaaaattttgcgctgataaccgattgcatttgaacttccccttccccttattttattagaatttattgcaatgtttcagccaacaagcggagca

SEQ ID NO: 80113 - DNA, 314 bp, Glycine max
  unsure (1)..(314): unsure at all n locations
  Clone ID: PAT_MRT3847_43358C.1
gattcccntanttatttcggcggactatttttgaatgggaaaaaccaaanaancnttancnaactnaacaatgtaaaataaattaanangaaccctcnatttgtgcttttcaattttctaccccttttctttctttgcgttgatttaattaatactatcaactaagcccttttctgtttgcaatctcgaactattagttcttcttccccacatgtttttccaccaattcaagaaattatgcttgagttccgtgctaacaaaatgtttcttgacgaaaaaataattcttccccatacacttaaaccacttttttc

SEQ ID NO: 80114 - DNA, 389 bp, Glycine max
  unsure (1)..(389): unsure at all n locations
  Clone ID: PAT_MRT3847_43359C.1
annnnatttttttttttttttttttttttggttttttttttttggggggggtgtttttttttttttttccccccccaaaaccctccaaaaaatcaacccttcggggatccccggggggggccacgggtttacccaggtggggggaacaaaacttagcccccccaattggtttggggggggggggggcccccggggcaaaaggggggccaaagggggttcaaaaagggcccttgcccggcgcgggggggggaaactggaaccccaaagagggccacaatgcccactccccaaggggagggtcttttctctggggcccaaaaagggggggcaaggttaggggggtggaacccccccccggggttcccaccctgtggggggggcaggctttt

SEQ ID NO: 80115 - DNA, 157 bp, Glycine max
  Clone ID: PAT_MRT3847_4335C.1
actgggagaggtgatccctttgtgctgactgaaacgagtgggccagacagttgctagtgaggaaggctcacagatgtagactctaaccacttgcgcgctgatcgaagggctctgatctaggtgcatgacatgatctggcaccccctacggatctggc

SEQ ID NO: 80116 - DNA, 149 bp, Glycine max
  Clone ID: PAT_MRT3847_43360C.1
ggactgggatggcggatgcgtggggaatggtgcggcggcgcgcctatggttttgcgcggttcatatgggaagacacgctctacacacaccaaggtcttccttatgctggtacgcatgtcgaccaatcgaggaccttattctatgactgg

SEQ ID NO: 80117 - DNA, 1556 bp, Glycine max
  unsure (1)..(1556): unsure at all n locations
  Clone ID: PAT_MRT3847_43361C.1
catgactgcatgtacatccatcaagatccacattaagcaagttattcttagattcagaacaggaatattggtgagtgaagaagaattaagaagagaagcaagaatagtgtcataggatgtatgtgactaggcctttgtctctgtataagaaatctgcagatgctctctcattgcctccacctgagggccccaattctggtattttggtgatccaagatgaagatttggtgccaacctcttgttttgggttgggagagttccatgaagtgaaggagttgcctttccctcaaaatctaaaccttgagttgttctatagatcaggcatttcactgaatagaaccactcactaccaccatgttgccttcattccagttcttaaccagcccttgtcttccaacaaatactatgtgataaatctcagtgggaaaaaaagaggggaggcatacattaactcaaagggggaagatttggacacattctgtttctacaatgctgtatctgatgtaccactacatccaatagttatcaatgacacatatcaagagtttgagatatttcctagaagaagcaaagttactttcaggagtggtttttcagctaaatctgttgccccagatgggataccctccaagatttttgagtacaaggtggaaagtgagtgcttcaacttcaagtgattctagcctaggagaagcatcaggtgtgaatgaaaccctccgtgccagcaagccagagttccaattctccttagcaaaaaagagttcagatagtgttgttgtgggaaaatggtattgccccttcatgtttatcaaggagggaactcacaaaacattgaaggaagaaatgagaaagtcaatgttttatgagatgacactggagcagaaatgggagcaaatcttttcatgtgagaatgagtatggaatgggaaacactgtgaatgtggatgttgtggttcaaaaggaagtggttgtaattgctggctgggaagcagtgattaatgagatggatattgctgaaggttttgtgtggtttaatagtgtcaacaatgttggagaaaagagtagtgtgggattgagcactgcagtagttgagagaatgaagtgggagcaggaaagggtagggtggaatggaggaatagagaagcaaattagagttaagaaagtggaagaatttgaaggcacaaatgggtggaagaaatttggatgttttgtgttggttgagacttttatactaaaaacattggacggaagcatagtactaacccatgctttcaaacaccatgatcaactcaggagtaaatgggaatgaagatttctggaattggttttagaccaagcaaaactcgtccaaatttgtttgcaagtgtatatcccgtaggtctttgtgaaagaaaagaatgacttatcttgtagtatgcttccaattttgtaagattttgttgactaagtttgttcattcattcagttttttcagtgtnaatcattttgatattgcataaagattataaggataaactgtcgagatcattcttcaaaaaaaaaaaaaaaaaaaaaaaa

SEQ ID NO: 80118 - DNA, 397 bp, Glycine max
  unsure (1)..(397): unsure at all n locations
  Clone ID: PAT_MRT3847_43362C.1
atggtgtangcgtcggaacctgtttccatgcggctgtcgttgatgcatctcggggtcgccctcgtcgtaatccttatctcgggcctaccggactgagtccctgcgcctcatgtagtgacggtgtgcttcctaagagatcgtacgaaacgctcggcgactcctgtggccgcactcgtcccagcggtgcgcgggttcgtttcgcaccggaaacctaataagggccctgtcgtacttatttgcaagattctcgcccgcttcttccgtgtacgcgaccgtttattcttcgcgctctcttctgagtccgtcttcgggtccgtgaaactctctcgccatagaccgcggaggcgacgacttagagtctaaataggaaacggagaattatcccgcggcttccccc

SEQ ID NO: 80119 - DNA, 230 bp, Glycine max
  Clone ID: PAT_MRT3847_43363C.1
gttatgctaggtcaatataactttaagagaccaaaatatgttcaaaggttgtgtctacttttcatacttcaaatttatgtatcttaatttgaaagtaatggaatggttgaaagatagagtgttcaaatatggttcacagttagcactttcgcagtttttagtctttctgttttcttcacttgccttctttgttttgttgttgtttttgaaagatcattctctttgtatct

SEQ ID NO: 80120 - DNA, 462 bp, Glycine max
  Clone ID: PAT_MRT3847_43364C.1
gggaaaaaaaaaaccccccatttggaaaaaaaaaaggggtaccttgggggggggggggcaaacagggattatcttcccccagaaaaaagggctataacaaccaaaccggccggggggaccagccaagaccaaaaaagttttttacccaaccggggccaacaaaaaaaacccaaacctcgtttaacccccccggggggcaaaaaggggcctggctttctatttatggggggggcaaaaccataaaaaaaaacggccccccctggctaatttggccgggggggaaaaaatccgggaaaaaagggcccccttcttcccaaaaacaggaaaataaggggcggaaaaaaaaattttaaccccccccccaggaaaggcctttaactccccagtttcagaaagacccccccaggcaaagttttaacacttttttggggaaacccaaaattggtttttcgttttgggggg

SEQ ID NO: 80121 - DNA, 317 bp, Glycine max
  Clone ID: PAT_MRT3847_43365C.1
aaatggtaattaaagaatatgggctgcatattataggatcgtgtatgtgtgttatttacatttagataggcttaatataagtgggcgaatttagcgaggctcattaggctcccaataaaacagtgatataagctgaatgagcaaacatcaatttgacccattaggagataatggaaaggtgtatatgttcgatcattcattatggatctatgtatttctagatatgatgtaatatgtatgatactcatatggtattctatatggcttgctataattccaaccatcatccccaattccatacctccacctctcctcgt

SEQ ID NO: 80122 - DNA, 328 bp, Glycine max
  Clone ID: PAT_MRT3847_43366C.1
ggggaaggggaaccgggtcccatagaaaaaaaactttggggggttttcaaaggccccctggggaggaacttttcccccctatgggttccccataaaaagcccccttaagggggggggtgggccctttgggggtttgttaaagccccaaaaaattcccccccttttaaaaaaaaaaaccctacccaattttttttcccccaatacaaagggggggggacccctttgggctttattctttgaacaagagattttttcggagcaaatccaagggccttttttcttaatcccggaaaattaaagggggcttttttaaaaaggaataaagccg

SEQ ID NO: 80123 - DNA, 641 bp, Glycine max
  Clone ID: PAT_MRT3847_43367C.1
caggagataagaagatactgaaaaaaattaagaatttgggtgaggggtttgatcgccctaacgagggatcccaagtgaaagtgatatatttgtgtaaaggggaagatggtatgattattgagagcaaaggatcagaggaagaaccttttgagttcacaactcaagaagaacaggtacctgagggtctagaaagagcaataatgacaatgaagaaaggagagcaagctctggtaactgtggatgctgaatatttgtgcgactataataattcaaagggaaacacagctaataataaagtcctttattatgaagttgagttggttgatttcgttaaggaaaaaccattttggaaaatggatacacaagagaaaatagaagcttgtgagaggaagaagcatgatggaaatctgctgttcaaggttgaaaatttcaggcacgcatccaagaaatatgaaaaggctgtaaaatacattgagtttgatcactcattcagtgaagatgagaagtgtcgtgctaataccttacatttatcctgtaatttgaacaatgctgcctgtaaacttaaattgggggagtacattgaagcttcaagactatgcacaaaggtcctagaacaagaccctttaaatataaaggctctt

SEQ ID NO: 80124 - DNA, 271 bp, Glycine max
  Clone ID: PAT_MRT3847_43368C.1
ggctagcctcaaggttgcatttttggctgcagtgctcagcgtggctgtggtgagtgcacccatggcacatgcagctatcacgtgcgggcaggtgacgaatagcctgatcaattgcattggtttcttccttaacggaagaacgccgtcgaagggatgctgcatcggagtgaagagcctgaatgccgacatcaagaccaccgtcgaccgccatacggtgtgcaactgcctcaagtcgtccgtcagccaaatctcctgcttcaaaacacacaac

SEQ ID NO: 80125 - DNA, 548 bp, Glycine max
  Clone ID: PAT_MRT3847_43369C.1
tttttccgttctaacctacctctttttcttctctctcaacaacttcaccttcttcctcctcgatcatgtctcacttcaagggcaagtaccatgatgagcttatcgccaatgctgcgtacattggcactcctggaaagggtattcttgctgctgatgagtcaacagggacaattggcaagcgtttggccagcatcagtgtagagaacattgaatccaacaggcgagctcttagggagctgcttttcactgctcctggtgttcttcaatatctcagtggtgtcatcctctttgaggaaaccctctaccagagcacagctgcaggtacgctcgacagttttgagtatcataattggtttgtatcattaattgatgagcattgcatcattgggtttgaatgcgttgattgatattatgttcatcaaggttttaaattgtggtcacactgcatgctgattattgatatttcagaaaattgcatcctatatgtgctggtgttattgcaattaggggttttgacttgaaaacccttacattgcatctgcatattc

SEQ ID NO: 80126 - DNA, 962 bp, Glycine max
  Clone ID: PAT_MRT3847_4336C.1
caaggacgaaaataatatttatccatatttataatcagagtaaagatcatattgcatttttccttgttagcaacattgttagggcaaatctgaaattgttgtggaagcagaaatgattatatgggaatttggtaagtatgattcatcaaaaaattgttggctggggatttttttagagcaaacttgatgaaacgcactatacaaagccctcttattaaggaccctcattcagaatcatgcaaatcagtggcattagcacaagcacatagcagagaatcatgacgtttgtgtgaaggcaaaagcccaagcttatccttgatttccgaaagcaactcggagcaagtgtgcaaatgactggactcttctgactcttcaatcagagaaaataccttatcaaagagaaattccataacttgctcgtcactttggaacttatccttgagcagattacacaattcaacagcagaacttaaatgcttattccaaatgcaatacaagatgattctgcagcaagcatcattccaatagtctgtatcatccaattccttaagtagcagaagcaacctatccaactctccctcggaatgagtgtgctcaatgagactcgtaacttcttttgcctccagcttgtgtccagattgcttgatttcctcataaataactagagcctcagacaatttcccatgtgatgcaagtactgagacaagaaaacccttgatttggttcaagctctttggtggtatcaatggatctaagaataaattttttgctttctccaactgtccgcaagcagcataagcatttacaagtgccatgaaaatttgctttgtagctacgattccagattgcttcagttcttcataatacttcactatatcctcttcagtttcagagttgctaatcaggtagctgaaagtctgtgaatcaggctttacatcagcacattgcatgtgcacaagaac

SEQ ID NO: 80127 - DNA, 2152 bp, Glycine max
  unsure (1)..(2152): unsure at all n locations
  Clone ID: PAT_MRT3847_43370C.1
gcatgttccatgatgagcttattgccaatgctgcttacattggcactcctggaaagggtattcttgctgctgatgagtcaacagggacaattggcaagcgtttggccagcatcagtgtagagaatgttgaatccaacaggcgtgctcttagggagctgcttttcaccgctcccggtgctcttaaatatctcagtggtgtcatcctctttgaggaaactctctaccagagcacagctgcaggtactctcaacagttttgagtatcttaattggtttgaatcataaatcgatgagcattgcatcattgggtttgaacatgcattgattaatattatgttgatctaggttttaaattgtggtcactgcatggtgattcttgatattgtagaaatttgcatcctaatgaagcaggtgttattgcaattggggtttttgacttaaaatttgcgtctacatattcttttttaaaaccatgtttgccaacatggttttttcccgctttaattttcctttgtgccaaacttagattctttgaatgttgttggtgcaattctccagtcaaaagcttcactagtaatccatttaattctctgatcagaattggagtttcacctcagtaatctgcataataaagatgtgtattcaaggtgaatctctaattttgatcagataacaacaccttatctaagttatgttcttatcctcttggggttgccaatatgcttttactcttgtgtggttgtctttgtatgaatgaagatggatgatattggcattgctgttacactgacaatggtttgaatggattctatgcaggcaagccctttgtggaagtcttgaaggaggctggtgtgcttcctggcatcaaaaaggttgacaagggcacagttgagcttgctggcactaatggagaaaccaccactcagggtctagatggccttggtcagcgttgcgccaagtactatgaagccggtgcacgttttgccaagtggcgtgctgtgctgaagattggtcccaacgagccatctgagctggctatccatgagaatgcctatggcttggccagatacgctgtcatatgccaggagaatggcctggttcccattgttgagcctgagatccttgttgatggatctcatgacattcacaagtgtgctgccgtcaccgagcgtgtccttgcagcatgctacaaggctttgaatgatcaccacgtccttcttgagggtaccctattgaagccaaacatggtcacccccggatccaattctgctaaggtttcccctcaggtggttgcggagcacactgttagagcccttcagagaaccgtgcctgctgcagttcctgctatcgttttcttgtctggtgggcagagtgaggaggaggcatccgttaacctcaatgccattaaccaggtcaatggaaagaagccatggtcactctctttctcctttggaagggcacttcaacagagcacccttaaggcatggagtggaaaagaggagaatgtgaagaaggctcaggaagcccttttggtaagagccaaggccaactcagaggcaactctgggaacctacaagggtaactcaaagcttgctgatggtgcctcagagagcctccatgttgaggactacaagtactgatcaatctaagtgcgggtaggaatcggtattttatgggtacaaccgaattttcttgttaatgagtattgtgcttcgactcttcccagaataataatcgtttggaattttgctttttgtttttcctagtgttccttcatatcaattttagtaattcggtgtattggtcaaacctgtgcaaacaggggaggggatgtaactttgttttcttgatagacaccaccaccttgctgttaacgaggctttgtgtttattttgcaattatctttctttgtgttttcatatttaaaaaacaaagaaagataattgcaaaataaacacaaagcntcgttaacagcaaggtggtggtgtctatcaagaaaacaaagttacatcccctcccctgtttgcacaggtttgaccaatacaccgaattactaaaattgatatgaaggaacactaggaaaaacaaaaagcaaaattccaaacgattattattcttgttaatgagtattgtgcttcgactcttcccagaat

SEQ ID NO: 80128 - DNA, 415 bp, Glycine max
  Clone ID: PAT_MRT3847_43371C.1
cttaacgtgtgcaaaatgtgtacgtgaggaattaacaccaggccctgcacagtaactgggaagatagcaaactgctgtgagacgaggacatgacttgctatattgaccataatgattcttttatcaaccgcgcctactcaacaggattgatggagaggacctaactcgatcccaagccagatctatttggatactagccatttgaacatggggggaacggagccattaatggctatactagagccttagaccccgaattgtacagggaaatatctttacttttcctgaactggtccagatcaggattatgcatatatatttacctgtgaagaaacggaatcctttagctcaagcttagacttaggaggcccgatcaccctatgatctaggtggcaagcattacaagggaccctgc

SEQ ID NO: 80129 - DNA, 1692 bp, Glycine max
  Clone ID: PAT_MRT3847_43372C.1
cagagacgcacccaaaaccaaaccataaccgaggtcgacgcttcgcgagtgcgcatcctaagacccacgtcttttttgttgtcgtggcctcaacgcaacatcattatcactgtcactataaaaaccctacttggctcttttcttcacttgttcactttcttccaacctctaacctacctctttttcttctctctcaacaacttcaccttcttcctcctcgatcatgtctcacttcaagggcaagtaccatgatgagcttatcgccaatgctgcgtacattggcactcctggaaagggtattcttgctgctgatgagtcaacagggacaattggcaagcgtttggccagcatcagtgtagagaacattgaatccaacaggcgagctcttagggagctgcttttcactgctcctggtgttcttcaatatctcagtggtgtcatcctctttgaggaaaccctctaccagagcacagctgcaggcaagccctttgtgaatgtcttgaaggaagctggtgtgcttcctggcatcaaggttgacaagggcacagtcgagcttgctggaactaatggagaaaccaccactcagggtctagatggccttggtcagcgttgtgccaagtactacgaagctggtgcacgttttgccaaatggcgtgcagtgctgaagattggtcccaacgagccatctgagctgtctatccatgagaacgcctatggcttggctagatacgctgtcatatgccaggagaatggcctggttcccattgttgagcctgagatccttgttgatggacctcatgacattcacaagtgtgccgccgtcaccgagcgtgtccttgcagcatgctacaaggctttgaatgatcaccatgtccttcttgagggtaccctattgaagccaaacatggtcacccctggatcccaatctgctaaggtttcccctcaggtggttgccgagcacactgtcagagcccttcagagaaccgtgcctgctgcagttcctgctgtcgttttcttgtctggtggccagagtgaggaggaggcatccgtcaacctcaacgccattaaccaggtcaatgggaagaagccatggtcactctctttctcctttggaagggcacttcaacagagcacccttaaggcatggggcggaaaagaagagaatgtgaagaaggctcaggaagcccttttggtaagagccaaggctaactcagaggcaactctgggaacctacaagggtaactcacagcttgctgatggtgcctcagagagcctccatgtttcgaactacagctactgatcaatcgaagttggtgttgtttgaagagactagtgcgagtaggaatcggtattatgggtacaacaaccgaatttcttgttgataagtattattgtggtttgactcttcccagaataatcgtttggaattttgctttttgttttcctagtgttccttttatgtcaattttagtaattcagtgtatttggtcaaacctgtgcaacagggaagggaatgtaactttgttttcttgaaagacaccaccgtgctgtgaatgaggctttgtgtttatttttgcgattatctgtctttgttttcatatttatgtctatcatcggtaatttcaacatcgagcatgtctcggatattggacatgggttgaatagaagatggattatgcaccgcatttgaga

SEQ ID NO: 80130 - DNA, 190 bp, Glycine max
  Clone ID: PAT_MRT3847_43373C.1
gaaaagaaaacgttacttgatgtacattatcatagacagacagctcagccaggcgagcttacatataccgcctacgaccgcactctcctatctattgtactatcaccaacatctactaagaccctacatacctccagtcatggaccaaaaaagaaggggaggcaaaataaacatcagaggaaagagctcc

SEQ ID NO: 80131 - DNA, 624 bp, Glycine max
  unsure (1)..(624): unsure at all n locations
  Clone ID: PAT_MRT3847_43374C.1
cccacgcgtccgctaacccaattgaaagcatccttctaccacctctctctctcacatcataatacctcaaaggacaatcattatttcacaaaggtcttccaaagaagactttcttcacagagccaaaaaatttggagagagaagggaagaaaaaaaaaagaaaaaaaaatattcattttttttttatcattaagcaaaggtagtagacaaggcaagcacactacttattgttgttcattgtgaaatcatcatcatcatgggttgctcagcctcaagaaccatcaccatagtggccaacaacaataaccaattagaggatccatcttctgcttctcttgcttcttctttctcttcctcttctgcctcacacaaatccattaactctacttcttcaccagcagcagcaccagttagaagaagagctctttctctcccaatgcctcttgttcatcaccctcccatcaaaaagggtgacacacaccaccttgtctccctcacctccaccacctatggctcccttctcctcattgaccaaaaagacccaaacttgacccaaaaaaaccaaccccgcctcaccaaaacctcaaaccaaactgacccagcacactcactctncccagactc

SEQ ID NO: 80132 - DNA, 223 bp, Glycine max
  Clone ID: PAT_MRT3847_43375C.1
gaaagttaataaatttttcaaaattaagaatatacaattaatgagagagattcttttatttctagaagtcacacaagtttcatccaattattgctttaaagaaattaaacatccagttttccaaatacaaacttaaatgaatttttttaaattagataagacaaaatgttcataaaacacttatatacttttttccccattagtttgcaccaattattcaaac

SEQ ID NO: 80133 - DNA, 1028 bp, Glycine max
  Clone ID: PAT_MRT3847_43376C.1
gtgaatgagaatatagccatagagactttcatcttcccaaaagccatgaaatggaaatcaaaagtttcgaaataagtaaattatttaaagtatattcttaaaatttgaattaagttataaatttctattttttacaattatttttcattttaaaactattgggagaaaacataagtctcatatcggctagagataaggccaagatagaatgagtatataagtgaaggacaagtctcaccctataagttaacttttgaggttaagaggctcaaacccacattttaagaactatttaagtttttcgtaaaaggttcagcaactttgctaatgttttgaaaagcatataaatgaagggatgattagggagactgctgaagcattccaatcacagggaacatgcaaaattctaaagtaaatttgactaaatttaattatgcagttgtgaaaataggtataacagtgtaagcttggctgcgtaaatagaaactttcacaatatttaaaaaaatgcagtatgcattaacctgaaccgctcctttacacacgatgtcttcacaaagcttgtcagagttgcgaaccagattgctaagtgcacctgctgcatttgccttagtcttgtcttcctctgccatttgtaacaaatttgccaattgaggaatagatctcctcagctcttcatacaacaagtcattgtggtaggccgcgtttccaatagcaaaacaagcaaatttccgtgttcgtttgtttggatcagaacatctttcaataaggataccaacaatttgatgtcttgcaagtgaactataaaaataggcgctatgacgacacatgtttccaagagcactgcaagctttggcacgcatattgggatcctcgtgcaaaagaaaatctttcaagaactccaaaatagaagcacctttaatgtactcatagaatcccttgtccatgcgagcaagatcagaaataatcataagagcatccaatttgacctcttttggggccaaacagtcaaacaacttccggctcgag

SEQ ID NO: 80134 - DNA, 751 bp, Glycine max
  unsure (1)..(751): unsure at all n locations
  Clone ID: PAT_MRT3847_43377C.1
ccacgcgtccgcacgtaacgctggacgctggttgcccccaaaaatagcgtctggttttggcgggaagcagggagagaggaaaggaaagtagcgaaaaatggcgaacaagctcatcaaccagatgggattgcccaaatccattgttaatatcttcactgctcgcaacattatcaccgccaaggatgcattatctcacactgaatttgagttgatggaattgctggacgttgggaaggaagaagtaacatccgcaatggctcatgttagtgaagtcgtgtgtccaccgtgccaaactgcattacttctgttggagcagcgagtactcaatgagagtttggccggtcatctttccactcgtttgaaaggtttggatgaagccttgtgcggtggtataccgtttggtgttttgacagagttggttggtccagcaggaattggcaaaactcagttttgcttgaagctctcactgctggcttcattgcccacaaattgtggaggcttagatggccgtgtgatatatatcgatgttgaatccaaatttaggtcaaaaagattgatagagattggaataaacagttttcctgagatatttctcaagaagggaatgngcacaggaggtatgcagatggccggtagaattctgattttgcatcctacatcactttctgaattcgctgagagtttgcaccagatcagagtatcactcctccaacaacagtgaaattgctcatcattgatagcatggctgctc

SEQ ID NO: 80135 - DNA, 232 bp, Glycine max
  unsure (1)..(232): unsure at all n locations
  Clone ID: PAT_MRT3847_43378C.1
tagccagcccannanaattgaccaacactaatttccaaaaaaaagtagatgagaatttcccaggtccactgactaccaccacaaccacaccattctcaccacagcctaaagcccactgctcatttggcatcatcatatcaacaacaaataccaattnnngcattgatgcccaggaccacgcctcttttaccggatgggttggtggctataatgcctctnntcttttctcttt

SEQ ID NO: 80136 - DNA, 537 bp, Glycine max
  unsure (1)..(537): unsure at all n locations
  Clone ID: PAT_MRT3847_43379C.1
acatcactgcaagagaaggacttctcagancatgaaaccagcagacgagcttctcgagaatccagccttccaattcttaaacgagttggcacgggaagcttagtagtatgcttctatatttgtcttctcaaggctgacaacaaaattagttattggtccttgccattggtggttgtaattataaatgcagttttatatttattttctgtacatctttaaaggggggaagaaaaaaaaacttagatattttttgccatatccctgcattacatgcccttgctgtaaagttattttttcatttctttttcttagcattcaattgtaaaatattcattaagtaaggggcaagggatgtttttaggattaagtgagcttgccttgtattttcttttttgcctctttgttttgtccttttggtccattgaagcgctcttatttgatttggggggccaagctcactgtacccaaattttgactttgtaaggtcacagtgaggtgaacatttagtgtggtggtgaatgggctgtttcctattcc

SEQ ID NO: 80137 - DNA, 313 bp, Glycine max
  unsure (1)..(313): unsure at all n locations
  Clone ID: PAT_MRT3847_4337C.1
gtcgcangcacgcgtacgtaagctcggaattaattccggannggtacctgcaggcgtaccagctttccctatagtgagtcgtattagagcttggcgtaatcatggtcatagctgtttcctgtgtgaaattgttatccgctcacaattccanacaacatacgagggnangantccgaggncaagancangnnntntgtggtntcnantgagntccnaattaggctggaaannangancctcnggatggncnagcgtnnanggnctnntaantnggttntattcgtgcacgtngaccgantntanncgnaanggg

SEQ ID NO: 80138 - DNA, 392 bp, Glycine max
  Clone ID: PAT_MRT3847_43380C.1
ggggaaaaaggggcccttattttttaaagccccaaaaaaaaaaaacacctctccgaaacccttaacaagaacgggggaacacaaagggaaaaaaaaaaaaaggaaacctggggccccttttgaaccccttttttttccttttaaatggatggggccagccttattgggggaaagggaaagaacccccggatggtgtcccgggggtttagaaacctaaagggcccggcttcccccttggggcccccaaagaaaacccccccttgggccccaaagaacccaaaaaagggggatccccgcccttataagtttcctcctgccgggggtttggaaaaaaccggctttgggagggaaagaatctggggacccctaaaaaataaattttccccaggggg

SEQ ID NO: 80139 - DNA, 223 bp, Glycine max
  Clone ID: PAT_MRT3847_43381C.1
gacccacgcgtccggcacattgcttttgggggttatcacaaatattaatcccagacgagagatgtctttgagggaggtttatgaataactgctggagatattgggacgtggatacctggtggttgaatcaaaattattgataggaagaagaatatttttaatggggcacaaggcgatttcattgctcctgagaagattgtaaatgtttaccccaaatgtaaat

SEQ ID NO: 80140 - DNA, 371 bp, Glycine max
  Clone ID: PAT_MRT3847_43382C.1
aataatacctgaaggtttttaaccttaatttttttcttgggtcaaccgataccttccttaacagtaccaacaggagtcctggctttacttaatcataccaagggattaaatggcatggtacaacttccaagcctttttcttgggattgattcccccaccaccatttattccaccaccaaggggtttttaattttaaaaaccacgctcctttaccttccccaaaaactggagaataattaactttccaggctaacgcttaaggaaaaatcggccaaaaccacccagttggcacaccaaaacctactctatttggacattcatccttggttggatcctggctaatgcggctgaaccagctggttcacttaggt

SEQ ID NO: 80141 - DNA, 494 bp, Glycine max
  Clone ID: PAT_MRT3847_43383C.1
gtgggggcaaagacaatctacaatggattagaaacaacaaatttgtggaagaaaatgtattttgtacgagattttatacacaaagtttggttgcaaaacaggcaaaagcttgacattaagatgcacatctcaatttatccgtggagtgcaatctctcaagtaaaagctgtgtgtgtttcccagttacttcaccttttcaaggttagtccattcattgacaatgacaaagggaggcaaactggggtttttgtcacaccatgtcgccatatggctttaaattcaactagtcgtggttattttggtgccattcattgagttgtatgctttgcagtgtgggatgtgctactcaacaatcaatggcaaagaacaaaccattgccctcaatctccgagacatctcgagtccaactagcttcctcatgcagctatgcaatgcaagtgatcatgaatgagaaccaccagtctttgcccatgtcagctactcactgagtttga

SEQ ID NO: 80142 - DNA, 194 bp, Glycine max
  unsure (1)..(194): unsure at all n locations
  Clone ID: PAT_MRT3847_43384C.1
tttcaccagccnacgaaccccancncnnccgancacanagccnnntgangnnnnctncnacaacccncngnntacncnnacnngcntacctntgcantnnntncnnntcaannnanncnnctncatcnntntntnnnctnncncntngntnnnctctngcattntntntngngnacanncttcnttttggnngt

SEQ ID NO: 80143 - DNA, 281 bp, Glycine max
  Clone ID: PAT_MRT3847_43385C.1
gccatgtgtgcttctcatgaacaacatttgaggggccaggaactagaagcactgctgcagcaggtcctgctgagccagctcctgaatcagcaaaacacgcctgtcatgaaagctgtaacgaccaaacccctgttgttgacatgttgaactctactagggccaataacttcgcaaacattatcaaccttagacaatgggccgagggctatctcaaactgaccactggggcgcagctgtataacggccagcatattgctgtgcacaacatcagcgcaggggaa

SEQ ID NO: 80144 - DNA, 222 bp, Glycine max
  Clone ID: PAT_MRT3847_43386C.1
atcgataattcgggcgcggcgaggtgcgggcgccttttttttttatcaatctatgtcaacgtcacatcgacgctacataattccgcgagctaatggtggatgttgtgaacgattactccacaactggtaatttcatttaattatttcacatatggtgttgtcggaaacttgccaagaatacaataataacatttatgatgggggaactttaactattaactt

SEQ ID NO: 80145 - DNA, 749 bp, Glycine max
  Clone ID: PAT_MRT3847_43387C.1
gtgtggatggattggatggatatccatccatgaaaaaagtgttaatggatggatcggagagatttttttatcaaatggatcagatccattaaataatatttaatggatcattttgatttgatccattaggatacgaattaggattgatccgatccatccatttgtcacccctaagtttgatttcagaaggtccttatcctttacttcataattatataacctattctaacagtcctccatagatgggatgcaaggtaaaaaacctggctgtcatggttttttctcaagttgtcccatcacctaagtgatttatatgttgatgtgtaatgtttacaaatcatggttcaattaatttgaactcttgtctttcatttgcagaaaaaacagaactaatctccttatcaatctctgtctttatcttcttcactgctatatatcacatacttttttttttgccagaccttggtttgtagatatgttacttttattttcacaacacattggacacacgcataatgcgtattttattcatctgattctcagataatattattatattatagatattggcaccatccactctaaccaatgctgatgaaaccagcttccctatttccaccaggctttcacggatatatacctaagcatcaataatgtaataataaaatcttcctttctgttcctattaccattgaactcaatccaattcaatcattcaatcttaggttcaatcctaacccaagcgtccg

SEQ ID NO: 80146 - DNA, 166 bp, Glycine max
  unsure (1)..(166): unsure at all n locations
  Clone ID: PAT_MRT3847_43388C.1
gtgttcggccnnatcnggtcacccttcgtgttcttgnggtactttnctcctttgccantgcnatgatcagtattcnaacttccaggatttagcaanttnctatggctaattcccgangaggatgtggatgatacatcatntccagtanaantttggaatggtgtna

SEQ ID NO: 80147 - DNA, 1193 bp, Glycine max
  Clone ID: PAT_MRT3847_43389C.1
ttttccttcgcgtggggttttagattgagaggattatctttttgctgaaaatccatggcgttatcctcttttgcctccaaaggttgttatggatagatagatagatagaacgctgctttgagtttcctcaactcaagaatggctgccaacgactcgtccaccgagattgatactaagaagctttcgaattgttggggaaatgctcaaatgccctttgcactccccactctcctctcttcaccaccccaacacctccacacatcattcaccactgccgctgacaattttttcagatttctacactcccttgcttctcataactctttcctcaacaaaattctctctctcccctccgaatttcacaccctttgcgtgcagattgggaagcaaaggaacgtgaggttggtttctggtcataatttcgctgccgttttgcctggggattcggtggcagggctggtggtggcgaatggggttctgaatttcttgaacatttacaacactttgctcattgtcaggcttgttttgacatggtttcccaacactcctccttccattgttagtcctctcagcaccatatgtgacccatacctgaacatattccgtggacttattccccctctgggaggaacgctggatctctctcccatcctagcattcttggtcctaaatgccttcaccagcactgcttctgcactccctgctgagcttccagtcacagaacaatccaaacaaggccttgcagcaccattgcactccactaaccttactacttcacagaagaaatggttgacacggtttcaagggaacaggtcaaggacatctggtgctgatgctaaatagaacatgggagagtttatttgtgcctctgtgtctgtttattaatttagatacgttccatcccgattatgatagttctattctaggcaacacaatttttgagcttatgattccagagattttagagttatggagtttgctgttgaaagctcaaggctcaagcttccacagtcctattgtgttttttcttttaatcctatggtcttcttagtcaataaacttaaggtccttatttaaattggggactggattggattacagaataatcatactagtaattcaattaaattttgtcggtctccattttagttaaacaaaaagaaagaccctcaggaatgaaaggattatatttt

SEQ ID NO: 80148 - DNA, 274 bp, Glycine max
  Clone ID: PAT_MRT3847_4338C.1
cgaaaaaaatggtggcagcaatagcatacgaggagagtcgccgcaagacagtggaggagaacaagaagaggattgaagccctcaatcttcccctcatctctcaagctcttcagaaatcatccccttctcccaaatcttcaccgctgaagcagacaaaacatcgcgccattcagaaagatgtggttgtcgtcataaggtcaagtcgtgtggcaaacttgccatctcctgtttacaaagaaatagttattgatcgcgtgacaatgcctagaagaag

SEQ ID NO: 80149 - DNA, 1121 bp, Glycine max
  unsure (1)..(1121): unsure at all n locations
  Clone ID: PAT_MRT3847_43390C.1
ttttccttgaaaatccataccatgcgctagcgttatcctctttggcctccaaaggttgttatagatagaacagaacgcagaacgcagaacgcaggtttgagtttccttaactgaagcgaactaaaatgggtgcgaacgctaacgacttgtccactgagatagattgtactaagaaggtttccaattgttggggaaatggtcaaataccctttgcacttccttttctcacactccccaattccaacttcaccactctcctctcttcaccacctcaactactccacacatcattcaccactgccgctgacaattttttcagatttgtacactccctcgcttctcagaaccccttcctcaacaaagttctctctctccccgccgaatttcacaccttatgcgtgcagattcggaagcaaaggaacgtggggttggtgtctagtcataatttcgctgccgttttgcccgggggttcggtggcagggctagtggtggctaacggggttctcaatttcttgaacatttacaacactttgctcattgttaggcttgttttgacatggtttcccaacactcctccttccattgttaaccccctcagcaccatatgtgacccatacctgaacatattccgtggacttattccccctctgggaggaaccctggatctctctcccattctagcattcttggtcctaaatgcattcaccagcactgctgctgcactccctgccgagcttncagtcacagaacaatcaaaaccccacgcggcagcgccattgccctctactacttcacagaagaaatggatgagacggtttcaagggaacaggtcaaggacatctggtgatgatgctaaatagaacatgggagagtttatttgtgcctctgtatctgtttattaatttagatacgttgctattgttccatcttgattatgatagttctattctaggcaacacaaattttgagctaatgattccagagattgtagagttatggagttttctgtggaaagctcaaggctcaaactaccacagtcacaatttattttgtttttatttttttaaaagaaaaaaaaaaaaaaaaaaaaaaaggggaaaaagtgtagaaaattctaaagg

SEQ ID NO: 80150 - DNA, 470 bp, Glycine max
  Clone ID: PAT_MRT3847_43391C.1
cggctgcgagaagacgacagaagggaccctaactaagtgtttagccactcatgaccattgaggggctctgtcgtggtgtgttcgtagccgcgctcagcacaacaccccctcgctcaacacaacaccccctcgctctcagcgcgtgtagatcgcgcttagtgcgcgtgttgcagggttagcgcgtgcttctgttggatcgcgggcttagcatgtgtgttgggctgggcctactccagattttcttcttttcttcaattttttggcttttttgcttgttacacctctagtttttatatctgcagctaaaattcaacgaaacatcaattctttaatatttaagcacaaataattgctaaataattatttttaaagataattttgcttgattttatactatcaaaatacaattatttagcagttatcaatacttgatagtttaaaagttttaaatgaatataaaaggggaaaat

SEQ ID NO: 80151 - DNA, 303 bp, Glycine max
  Clone ID: PAT_MRT3847_43392C.1
tcgcaaatcgttagaacttgaaaattctgaacactctcactcagacagctattaatagggtatcgatcatcacgtacgaatagtgtacatcttacgcaccaaatatacgacagtacaccaaaagcacattattgcccgatcgacgtgcatccgccatagatgctcctatcttacatacgcctgcatgctaccacacagcgcttacatgccctaccataatatcaattcattagccatcacttctcaacgttcacactttgcaaacccttacattacccaaacaaatcgtcttgcagcacaaaa

SEQ ID NO: 80152 - DNA, 346 bp, Glycine max
  Clone ID: PAT_MRT3847_43393C.1
tgttcctcgacatgtgtgtctggcggtgaggaatgatgaggagcttgggaggttgttgggtggggttactattgctcatggtggagttttacccagcatcaaccctgtcctgctgccgaagaagactggcaaggagggggtggagcccaagagtccgaagaaggcggctaagtccccaaagaaggcttaaatctgtgctctgggactgttagccgtagaagtcttaaagttgtgctcttaggctgttagctgtagatatatggcgtggatcagctggtctatgcattgtggtttctggtatttgactgtattccatgtttctatggtttagtgttaacatatgttt

SEQ ID NO: 80153 - DNA, 398 bp, Glycine max
  Clone ID: PAT_MRT3847_43394C.1
ctttgtcggctgcgggaagacgacagatggggacactatgatatacaacacaccaaacatgcatcgggaagaccactgatatgaaagtgatcgaccaaaaagaaagatagatctagatagatccacagggagctactgagagagacaacgctcaagacgaggatagcgaagatctgacgtgtctctcaggagacacagctgatcagggatggtaggctaccacaggctattgacaagctaattgaacaagagcgaaaactgaaagggggctcatgggggagaacgtatcctttacgttatcgttcgaacaacaccacctattgacagaagaaactccaacggttacctaccttaccggaaaagtatcgcatgcgatcgaggctagctatcccaagatc

SEQ ID NO: 80154 - DNA, 374 bp, Glycine max
  unsure (1)..(374): unsure at all n locations
  Clone ID: PAT_MRT3847_43395C.1
acgagggacaagctgacgcaggtgcacgacacgatctggtgctgccggtctggctcggcggctgacacgcangctgtcgcggacattgtgcactaccagctcgggatgtacgggatccagaacggggcgccgccgacgacgcatgtggccgcggcgatgttccaggagctgtgctacaacaataaggacaggttaagtgctggactgatcattgctggctgggacgagcgccacggcgggcaggtgtactcgatccccctcggcgctcgctgcacaagcagtcgtatgcgatcggcggctccggatcgacgtacatctacggatactgcgacgcgaactggcaggagggcttcgaggaggcggcagcggtggat

SEQ ID NO: 80155 - DNA, 192 bp, Glycine max
  Clone ID: PAT_MRT3847_43396C.1
accggaccggagttccgggctacgacgtacgcgtctgctcactcgtactacaagtcaggagtcagtgacaatgctattcctcgcttagcatggccacggggaccattcacatgacagaggctaccgttcatgagggtggtctcactatggccgacgagcatattggtgagcaccgtgccatgacatgcactg

SEQ ID NO: 80156 - DNA, 738 bp, Glycine max
  unsure (1)..(738): unsure at all n locations
  Clone ID: PAT_MRT3847_43397C.1
ccacgcgtccgtaagggtttggttttgaagtgccaacacgcttctgctatgctgcctatgcatagaatattagatatgaaaaattgtagagatgagaagttttttttgtcattatattatttttagatattcttttgtcatcatattatgtttagatatttccttgttatcattaggttatgtttaaatatttaatttaattgtaagtagagtgaaatagaatataaaaaaatacagtgaaataggacaaattttgccattttattttttaaaatatttttatgatggtatgaaattaaaaataaaaaaatagtctcgattcatatgcttatactgggaaaaaaaagagaaagaaaagttttagatgaaaaaaataaaatgtatttttaacatgttccattgtattttagtttattttaaacaattcaaataatataatctaatattatttcattttaaaaaaaattaacataattttaaaacttctaatttttttatcgaagttaataagactctggaggaattttttataaaaccttctaaaacattttttttataaaaaatatttttcaaaaaataaacaaaaatagacatatgacaatggaatgtggggggtaattggtggggccatttagtaaaattttttggagatgctgaattaggaggattgggtaattatggggtgctttagntgaaaaaggttaaaaaaagactatatgtacatgtgaaacttactta

SEQ ID NO: 80157 - DNA, 412 bp, Glycine max
  Clone ID: PAT_MRT3847_43398C.1
ggcaagcgctaccactccacgcgaagagttcgtgtacatggcgaatctggcggagcaggccgagcgctacgacgagatggtggagttcatggagaaggtctccggcaacgccgagaactaggagctgaccgtggaggagcataaccagctctgcgtcacctacaagaacaggatcaggacatcgcgcgcctgctggcgcataatatcctgaatcgagcagaatgaggagagccagggcaacgaggaccacggtcccgtcatccgcagctaccgatcacagatcaaggccgagctctgacacatcgtggacggtatcctgtaactcattgaacgcacctagatcactacatccgctacgggacattagggtaatataccgtttatgaagggacactactacaggtcattgtca

SEQ ID NO: 80158 - DNA, 1046 bp, Glycine max
  unsure (1)..(1046): unsure at all n locations
  Clone ID: PAT_MRT3847_43399C.1
gaaaagtgtaacgataagtaggtaatatatttgtatttaccgaaaatgagatgtattttttctaactgcgttcctactttactctattacagagctcattcacctcttcatttcaaaacatacagcctgtaacaacggacaagtaactcaatacacaataatctgtgctacatgttggctgaccatacagatacggtgggtgcaccactgtgcccctgtctgttctacgacgataaagcctgctgcggtggcacaaggtattccggaaacagactagtgtcttggatgaaattaaagaatcaacacccaacatgtagcaccgattattgtaatttggattatgttcgtctttctcacacaatctgggaacaacacacacaaaccattcccttttctcgctccggcaatgaccacccaagcttccaccttcgccgtcgccgttccctccgtcacaacccccttccgcagccaccggaatcccttcgttgttcgagcccaagcggaaccttcagataaatccgttgaaattatgaggaaattctcagagcaatatgctcgtaaatcaggaacatacttttgtgttgacaaaggagtcacttctgttgttatcaaggggttggctgaccataaagatacgttgggtgcaccactgtgcccttgccggcattatgatgataaagctgctgaggttgcacaaggattttggaattgcccttgtgttcccatgagagagaggaaggaatgccactgcatgctatttctcactcctgataatgattttgctggcaatgaacagactatcaccttggatgaaattaaagaatcaacagccaacatgtaacagattattgtgtattgagttactgttaaatttttacgggctgtatgctttgaaagacaagtgaaaagaaaggtgtaacgatatgtaggtaatatatttgtatttaccgaaaatcagatgtaatttttctaactgcatttctatcttactctgtatcacaaatctcattcacctcttcatttctttttttttttctcnagggggg

SEQ ID NO: 80159 - DNA, 442 bp, Glycine max
  Clone ID: PAT_MRT3847_4339C.1
ggctcgagctcgagccgttgaaaatggcggcaaccactgccccaaaacctgcgttcaccgccctcccttcttcatcatcatcatcttcccagaagccctttctgcgtctcgccctccaatttccctccctcccaaacagttcctatcactcccaacgcccttctctcaaaatctccagcgccctctccgatgcaaccgcgaaaaccaccaccgccgccgccgccgaagattttgtctcccgattcggcctggaggagccccgcaagggcgccgacatcctcgtggaggcgctggagcggcagggcgtgacggacgtgttcgcctaccccggtggtgcttccatggagatccaccaggcactcacccgctccgcctccatccgcaacgtcctcccccgccacgagcagggtggcgtcttcgccgccgagggctacgcccgttc

SEQ ID NO: 80160 - DNA, 464 bp, Glycine max
  Clone ID: PAT_MRT3847_433C.1
gtgacacgctcagagtccaaacccgcacctgtacaacagcctgtcgtacaacaagccgttgtacaacctcctcccaccctttcccccgtcaaaagttttgacccctttttcgacccccaaccggtcacccagagggtggtccaacccccccctcagcctgtgtacaaccccccaccccaacaatattaccccccacagcccattgtacagcagccagttgtacagcaacaacaaccggggcctaaccccttcttccagcccgcagtgaccaatggccccagccaatgggtcacttttggaaacgccgtaccgttcgcgccttctcagggaactttggcgggaaattacgtcaaccagccacaagtacagcagaggccaaacaccgacctcgccggtctcgtatccctcgtcaagacacagacaaaagacgaagtcgagaggagaaaaaaagacgaagacggaag

SEQ ID NO: 80161 - DNA, 240 bp, Glycine max
  Clone ID: PAT_MRT3847_43400C.1
cagcggcgattaattggaattgacacaaataccagtggcattgagtagaacagtaacatcatctccactatcactacaacaatcagttatagaggattacctcaacggaactacctcggcttgctaccagtgcctgtctctcactccttaccacggaaccctacgcatataccccgtgcttatatgtatccttcaataacgcccgtgccttagttactcttgccagaagacgaattggat

SEQ ID NO: 80162 - DNA, 566 bp, Glycine max
  Clone ID: PAT_MRT3847_43401C.1
atccccacgataaacatgcacctataatcgataaaaggagcatcaagggcattgtgtttgatatgataatcggtgcatccgaaacgtctagtaatgtgattgaatgggccatttcagaacttgtgcggcatccaagagtgatggaaaatcttcaaaacgagctaaaagatgtagttggaataaacaaaatggtggacgagaatgatttagcaaaattaagctatttagatatggttgtgaaggagaccctaaggctacaccctgttgtgcccctactagcccctcatgaatccatggaagatattgtgattgaaggttactacatcaagaagaagtcacgagttataataaatgcatgggctatagggagagaccctaaagtgtggtctgaaaatgctgaagtgttctatccagaaagatttatgaatagcaatatcgattttaagggacaagactttcaacttataccatttgggtctggtcgtagaagctgcccaggaattgtaatggggttgaccacagttaagttggttttgacccaattggttcactgcttcaagtgggaa

SEQ ID NO: 80163 - DNA, 1476 bp, Glycine max
  Clone ID: PAT_MRT3847_43402C.1
tacggctgcgagaagacgacagaaggggagcttaatttgtgccacaactcagaaaggaaagctttgaggtttcttccgcattttagagtggtgagaggatggtgggtgttatttcgttggtaacagggatggctggtcctagtgggtttggatcagcttccactgcagaacaggttactgatggaattgatgccagcaacctcactgcaattatcacaggaggagcaagtggtataggcttggagacagcaagagtgttggctcttcgaaaggtccatgtgatcattgcagttcggaacatggtgtctgcaaaggaggctaaacaacaaatactagaggagaatgagtctgcacgagtggacgtaatgaagctcgacctttgctcagtgaattctattacatcatttgtggacaacttcatagctcttgatcttcctctcaacattttaataaacaatgctggagtaatgttctgcccattcaagctctcagaggatggcattgagatgcaatttgcaacaaaccatcttggtcatttccacttgacaaacctgcttcttgacaaaatgcaacaaactgcaaaagccactggaatagagggcaggatcataaatctgtcatcaattgcccataactacacttatagaaaggggattagatttaataagatcaatgaacgaaaaggttatggtaacaagaaggcgtatgggcagtccaagttagcaaacatattacatacaaatgagctttctcgtcgcctgcaggaagagggtgtgaatatcacagccaactcggtccatccaggagtgataatgactcctcttatgagacactcatcttaccttatgcatttcttaaaggtcttcaccttttacatatggaagaacgtcccccagggagcagccacgacatgctatgttgctctccacccaagcgtgaaaggtgtaactgggaagtactttgtggattgcaatcaatgcaaaccaagttcacacgccaaaaacaaacagcttgcaaagaaactctgggatttcagtaacgatttgatcaaatcaatttcgaaagcttgagtgcacttgcagctaggtggttttctccttagggaaattaaaagccttcgttgtggtcaccagtttatgaaaactagctcgttatgcaataaaaagcacgttacagttatagttataatttgtcgttgtctgaggatgtttccaaacattttattccccactgaaccaccaggaggtgtttcatttcttttcatccaaacatttctgtatcaaacgtttcgtttcatccataagttagttgtgtagttacaatcaaataaaattgtttgcaatttactggcgtaaaaaaaaaaaaaaaaaaaaaaaaaaaaaaaaaaaaaaaaaaaaaaaaaaaaaaaaaaaaaaaaaaaaaaaaaaaaaaaaaaaaaaaaaaaaaaaaaaaaaaaaaaaaaaaaaaaaaaaaaaa

SEQ ID NO: 80164 - DNA, 724 bp, Glycine max
  Clone ID: PAT_MRT3847_43403C.1
agagagagagaacaacaccttgtggcagttcttcataaatatctgttgagaaggacaaaggaagagaccattgggcatcttatgatggggaaggaagataacattgtgtttcgtgcaatgagtgatgtgcaaaaacgtgtttacaggagaatgttacagcttcctgacattcaatgccttataaataagaacctgccttgcaattcggctcgagctcttactcaagtcgaatgttgcaagaggatagtaccagatggagctatatggccttacctgcatagagataaccctgatggttgtgattcatgcccgttttgccttgtccttccatgccttgtcaagctccaacagataagcaaccaccttgagctgattaagccaaatcccaaagatgatccagacaaacaaaataaagatgcagagtttgctgctgcagtctttggccctgatattgatttagtgggggggaatacacaaaatgaaagcttcatgggtctcagtgatgtgacacattgtggaaaaatgcgagcacttgaaaaactattgtactcatggttttcacagggtgacaaagttcttttgtttagctattctgtaaggatgctggacatactggagaaatttctcatacgataaggctactgcttctcaagacttgatggctccactccaactaatttacgtcaatctctggttgatgatttcaactcaagtccaagcaaac

SEQ ID NO: 80165 - DNA, 478 bp, Glycine max
  unsure (1)..(478): unsure at all n locations
  Clone ID: PAT_MRT3847_43404C.1
cccaccccacccctctctttttttttttttttttttttttttttttttttttttaaaccgacaaagggaaacttacaaccggggtagtttaaaaaaaaaaaattttccataaatgtttggaaaaaggcaagttctttaatggctgcttctcaagggggggggaaaaatcaaattgcagctaacacaggtgtttattcaaaaaaaaatacaaaaaaaaaccgcaaaccctttttattgaaaggaattgcatgacatccaaaggaaaaaaaaagggcggaaaaaaaaagtcttaccccaaaacttggcaaaaggcgaaaaaattttctcaatcaaacaaatggggggacttaaggaaaagggccttttgaaaccaaaaaaaaaccacctgtttaatgctttaaccattaaagggagggagggaaaaaatgcccccccggtttaaaaaagggcgaggggttaaaaatttttncaattttgg

SEQ ID NO: 80166 - DNA, 372 bp, Glycine max
  Clone ID: PAT_MRT3847_43405C.1
ggctcgagctcaaaccaggcgtgaactaaaaaaatgagaaaacccctctatctatttttatctgtcgtgccgtctccagtgaccaatcaaacgccgtgtgcgatgctgctgctattgacgcgccgagggctcatactgtggacctgcaaccaccttagttgcgtcctgaggggatcacaatcgaccccatatccggtctgcctctgtaggagggtccggtgctgactgcttatgtacgcgcacctgtggcgatcttgtggaggacctccactccttgctttctttgcccgcatcacggtgctcacttgacgtgcattgctcccgcgcagccgagttgcccttgcacccaaaacccctccggattgcggattt

SEQ ID NO: 80167 - DNA, 348 bp, Glycine max
  unsure (1)..(348): unsure at all n locations
  Clone ID: PAT_MRT3847_43406C.1
ctcgttctctgaaattttaattgacctttcccccctcattgcgaatctctatcaattgctcacgcatccgctcattattcaccctctgataagaaaccggcatcaaacggcccaacttgagaagaagccggcttgtcgangtgaaggtatcgatggaacgaggatcccagaagatgaagcagataataaaggacaacgtgtgagacctacaagattcacatcgtcaaagtgttgaagcaagttcatcccgacatctggatcttcatcaaggctatagggatcatgaacaatttcataaacgacatcttcgagaaactctctcaagagtcatcacgtctcgctaggtac

SEQ ID NO: 80168 - DNA, 586 bp, Glycine max
  Clone ID: PAT_MRT3847_43407C.1
ctaatacagtataatttaatatggccaggtgcttgctttaagggtatgtttgacccaacttattttttacttaaaaagttacttttaaatttaagttagaaactagagcataaaaaataggtaaaagttgtttggtaatttttaataattataaaatatataagttgtttggtacttttaaatttttaagttagaaactagagcataaaaaaataggtaaaactagagtatattcataaaataaaagaaaaatatataatgaaaaggtatatatgaatttaaattgtggaaaattattttctttatataattactttaataattataaaataaataaaatattaagataaaaatattttaaaaaaattattttacaaagtcaaaattactttaattattagaattttatgtaaacgatgatatacaaataatatataatagtaaagaaatttaaatattaaataaaaataatcatgtgcttaagttattatatattggttttttagggggaagttattatatattggtattcaatttacttaatacaaacctaacttccagttgcaagtatacttttttgtttttg

SEQ ID NO: 80169 - DNA, 268 bp, Glycine max
  Clone ID: PAT_MRT3847_43408C.1
ttttggcgcaccgcgtcacgtggcgctttagcatgcaaagcttgtcctgggtcccacaccgcgcttaacgtgttacgcgtggccagctctggcggccaaacagaaacttccctcacttcttctcactctgcgccgtatatgcttcagctcctcactcacactcaccaccacccactctccgcgcgtcacttatcttcttctaaccactaaccactataatttcaataatattctcttccaatttaagcaaaataaagtaaaacattgt

SEQ ID NO: 80170 - DNA, 797 bp, Glycine max
  unsure (1)..(797): unsure at all n locations
  Clone ID: PAT_MRT3847_43409C.1
ggttcccatttgcgtatcatccaaaggacgaaaactgcttcaaggagcaaccataaaggcaaatgcaatagttgcgcaagatggttcaggaaactacaaaacagtttctgaagccatcgaggcagcttcaggaacaacaaggtttgtgatttatgttaaggaaggggtttataaggagaagattaacaccaacaaggatggtatcaccttgattggagatggaaaatactctactcttattgttggagatgacagtgttgccaagggtgctatcttacctgactccgccacatttagttagttctcttttcttcaacttcatgcactttttcaacgcattgcattgcgcatcagtagcttgaagttgcaatttgtgattgtaacttcagttgttgcaatctataattgcatatttgttgtctgatttgacatgctttgacttgcaaatcacattctcaattagcttacttttttaataaaaaaaattacatgctactaaaatcactaatcaaaattacagtttgacttggtctacagttaattaaaaacagattcatcatgttaataataagttttgtaaataattcattttgaaaaaaatgtgtgcaaaagtgactcatatgagtcaatcagcccatatatacacacacatatnaaagagtttgtaaatataaaacctctaggacccaaactaaaccatgactgctgtaaccttttagataaactttttttcctgaacatgtaagataaaaaaagattaattaaaatttttctaatttttataaaaattcattttt

SEQ ID NO: 80171 - DNA, 648 bp, Glycine max
  Clone ID: PAT_MRT3847_4340C.1
ggtccggaattacccgcgtcgacccacgcgtccgtgaaagtgcagctgataaggttgaatggattaaaaagataagccaagttatacaagcaaagggaggacagattaggacatctgatggtggccctacaatgaggcatagcctctctgatggttccttggttagtttctgtggcttaaaggtgttcatcacacgtgttgcatttttttatggtgcattcattagacttgtatattaaagtcagttcttagaatttagattgtacctcatttaaccatttaatataagtttactaatcttgtgattttttttattcatagtttttacgccaattgatttctacataattcactcttcttttttgggctctttaaaaaccattgtttctatataattatattttttttgttattgtgtgctattagggtgttggttaaaaaattaaaatagaaactattagataaaatgatgaaatccaaaaatgcatttgatactgttggaaataatgttacttaacgtttgtaggaaatagtagattcagtcacatgataaaatgcatttatagtgtgtttggttctccgtttcctcacaccaaacatgcattgatttcaaagcttcctctcacatacttttctgttcaacggact

SEQ ID NO: 80172 - DNA, 177 bp, Glycine max
  Clone ID: PAT_MRT3847_43410C.1
cacaaagcgggttactgtctggtcaagctaccatgtgtctctctctttcttaacgcctccttgccagaagataaaatggcccaagaaactctgctattcacatgtgaatcagtgaacgaggggcaaccctgacaagctctgtgaccagatctcccaagctcagctcgatgcatgctt

SEQ ID NO: 80173 - DNA, 1092 bp, Glycine max
  Clone ID: PAT_MRT3847_43411C.1
attcccgcggtcgacccacgcgtccgtgagcaattgaacaagcaaagaaggctccttgaacaggacaaaacaaaacaaactggtcttgttgtgttgagcctaattgctatcaatattcaatattttatactattctttattcttattcttccagttatatggtaaggataggttgtggatatcgttggatatgcttcatatcttcttttttatcagtgcccattgattttttttttccaagtcactatcttgtggttttctttctttctgttgtggccaagttgggttggataattggattctttggtgtctgtgtatgtgactgtgaaaaggatgtgtctttgatgatgatgatgatggggtgcttttgctagcttcactttcttcttcctgtgtatgtgatcaaaattcatctagtggaattttgtaaatttttctttgcatgtttctgaattttgttgtgattctgggttttcgaaaaaaggtggtgtttgatggttgcgggggcgtggcttttgtttttgcttgatcactagtcaatttttttgttgaattcagaggggtgtcaatgaaattgatagtattttccattggttgtgttgtgtttctttatctttttaaggatattttgttctacttagtagagattgttgggttatggggtttgctttccatgtattaagttttctgatatgacgattatgatctgtttcaacctatagcaaataaggttactaatataaccgatggagtgaatttggggggaagttttcctgtgatttcactttttttcttagggttgaccaatatggcattaaaattgaagtttcaatgaataacttggttacaaagaaaattgcttctatgtggctcaaatttcagtacccttcacgattggttgctttgagctttcttttattcttgattgggattccaatccatcctttgttgtttccttgcccaattttgttatattgttaaaactcaaatatattgtattgcttgccacaagatcagtgcacattgttgatctattgaagaatattttataatataggcattctttatggactataatggcatatgacttaa

SEQ ID NO: 80174 - DNA, 555 bp, Glycine max
  Clone ID: PAT_MRT3847_43412C.1
gggcagcaaaggtttttagccaatgaaaacagagaaaaacagaggctctgcttccaagggcaaggtgagaaagaaaatggaaacatacataatcaaggtgttaaatttcttgaccaaaaaaggtgaagtctacaaggcagagccacccttggaccttaaggaagccttttccaagtttgctggaggagagaatcaaatgaagaaggatcagcttcttcggttcatggtggaacaccagggagaaaataatattagcaccatggaggatttggataaaatagttgaaaagtttttgcaactgggaaattcttgttctagcaccaaaactagctccacaagaattgtagatgtttataggaaacaaggattgagtctcaatgacttcatcgattttctgattcttgatgatttcaacggtcccttgaaagacaaggtacatcatgatatgaatgctcccttgtcacattatttcatgtatacgggacacaattcctatctgactgggaatcaacttaccagtgagagcagtgacgagccaatcattgaggctttgaa

SEQ ID NO: 80175 - DNA, 368 bp, Glycine max
  Clone ID: PAT_MRT3847_43413C.1
tttattttttttatttttttgagcgaaggtcgattgaattatataattaattatccgtaacattttttgcaggggtaattacaacaacattcactctagttaacaaaagtgactacaccgtgtggccgggaattctttccaatgcgggtgttcctcctttttcaaccaccggcttggttctccaaaccggtgcctccaccacaatcgccgtacccgcgtcttggggtggccgtttctggggcagaacactctgtttcgaagactccaccggcaaattctcctgcgacaccggcgactgcggcttcagcaagcttgagtgctccggaaacggttccgcgcctcctgccacccttgccgagttcaccctc

SEQ ID NO: 80176 - DNA, 775 bp, Glycine max
  unsure (1)..(775): unsure at all n locations
  Clone ID: PAT_MRT3847_43414C.1
ggcggtttgtacggcggtggctcgggctttcgggaccgagcggccctgcggacggtctctcgaggcaatctcccctcccctgaccctgatccgtccggggcgagccccttggaagcgcgcagacttggttctcaaccctggcggactacttttaaggggtgtgtcaggaggttttggactagaggaggttccaccgaaatgtcggagaagtcaggccagagcacaaaagccaaggatgggaagaagtatgcaacactcagtttgtttaacacttacaaaggaaagtccttggaaacacagaagactacagttgcagctcgacatgggttacaaagtcttggaaaagttggtatttcacggcgaatgcccccacctgctaaccttccaagtctcaaagcagagaacaaaggcaatgatcctaatgtgaatattgtgcccaaagatgggacaggatgggcatcgaaacaagagcaacatgaagaagaaaaagcaccagaagtgtcaccagcacagcccaaacctggggttgcagctcccccagaagtagcacctgctcccaaatcatgggccagtaacaagcaaggaatccaagtgaatagtcaatttcagcaggaatttcccagtctgcaggcagctggagatcaggaaaaaaaagaaaaggaagcanatgatgaaaactatggacctggacccagtttacgccctncaaatgttgcttgctggagagatggtggtaagtctgctgggtcaccctcctctgatcaggatgaaaagc

SEQ ID NO: 80177 - DNA, 550 bp, Glycine max
  Clone ID: PAT_MRT3847_43415C.1
cattgataataaaattgtaatttagtaacaatagaatgtaattttttgtttgtcaagctgaatttgatgtccctgaagcatctgatctgaggacacaaaagaaaatacttcagactgtgagggagcggtggagacaattcaagtctgatttgacgtcgaaatgggcacttgcagccaacaaggaaagtgttgacgacactgtatgcgaaaagtacaacattagcaaggagaagtgggcccaattttgtcagacccacaaagaccctttgtgggagatgtgcgaaaaatggcacaagccatccagaagcaaaacactacccctcacatgttgtcttgtgggggttatcaatatttagaaaacaagttgatggatgaaaagagaaagaagaaattggaggaagttgctaaatccggaatcactgacaccatgattgatccttcatctgccatcaaacgacatgtgaaatggaagatggtccgcaccaagaaaactgggcaaatgacgtctgatgcagcacaggaaattgctaacaagattgattcgttggag

SEQ ID NO: 80178 - DNA, 334 bp, Glycine max
  unsure (1)..(334): unsure at all n locations
  Clone ID: PAT_MRT3847_43416C.1
atacgcaaaaggccacacaanaaaaggacattagaaagaaagtccgggagcaaccacaagagggaggagaccctccatgtgggagggcacacacgagaggagcacaaaggagaacaccatggagagcacaaaggagaacacaaaggagaacaccatggagagcacaaaggggaacacaaaggacaacaacaacatggggagcacaaggagggactagcggctaagatcaaggacaagatccatggagatggccatgacaagggtgagaaaaagaagaagaaagacaagaagaagaaggagcagggagatgaccatcatggccatagcaccagca

SEQ ID NO: 80179 - DNA, 174 bp, Glycine max
  Clone ID: PAT_MRT3847_43417C.1
attggtttattccattgttggttccatactgcagttatatatttgtaattgtccaactttcattcgaggggagccgaagtcattcatcatcggtgccaggtcacattcaacttaatgctacggtatgttgacctggcgcaagaactgctacgaatgaaggaatgaaatacatgt

SEQ ID NO: 80180 - DNA, 316 bp, Glycine max
  Clone ID: PAT_MRT3847_43418C.1
gaccaccatgcggtattttacatgttcacaacgttagcattaaaaccggtgtgatctggataagaccgccatcaatcagtcccaacgtttgccaacaccaccaacaggtcttcactccatgatccggtatggtgagattcattaagagtatagatgacgagatttagaccgtcacggatttttatgtcttttgcagacttcttggcataaattttggatggagtcagacgtgacacaatattaagggtgtctggttgacctgtttttttaattttaatttcaatagaaatacggcctcctgataagattgtgtttg

SEQ ID NO: 80181 - DNA, 1530 bp, Glycine max
  Clone ID: PAT_MRT3847_43419C.1
gtttaaaaaaaaattttgcatagaaagaatgaaattgaatgggccgtggtgggccgcgcagcacataatagcgtgtggtggtcggagagaagaacgggatggagtgcgcggcgaaggggagcggaggaaggtgcggcggcagcggcggcggcggcgccgcggcgctcggcgcccgcggcggggccggcgcctgcggctcccgcgctcccccgagtccccgcgcgcgctgccacgccctcgcgtgcggctcgctccctcaccagttggcacactggagtcgtcacaaacacgagtgcgataggttgcaacagcaattgaagagtgtcgaagtcctcaataattttcccttcactttctctcgcgaatccacgtttcaggtttgtgtgaagcaggaaactaggtgttcattttttagcaagagaggccttcatcaagtgggaatgtggatgcatgaatgccattgtggagcatcatctacttcatttgattgtttagggttaaacaatggttgggatctcccaagtagtttatgtccctgttgtgagcctagctctccggtatcagagcagttgcattgttggagagactactataagtggagatgcatcccgctagactcgcctgttgctttgcttcttcaatggccacttacaatatatcatgctgctcgacttgttggaattacagccttgaatcctgaaatcagtgataagttgtacattcattaccttggacctgagaaagagttgctacaacttgctgtgtttggagaattactggcactcttccccggtgtacgaattcatatagaacttgttggacctgcaattcctcctcaaaggggatggtgagatgattcacatttctaagtatccttgttgcaatgaagacgaatgtgaatgcaaaataggaagtaaaaatacattcttagaaacacaatctggtatcacttccactttgacattgcaactttggcaaggattctatcatgatcgatatagagatattgttaaggattcctttcctcggctaataattgctccaaatggtggcattgctgcttattccagttggttaccaagtattgagttaattaaaaagattgatgtcccagttgtttttactgattattgtgaagaagcttgtcatcttgcagccaattgcattaagactgtaactggaagtcctcttaaattgcctgttcagttaaatcctttcagacagcccatggctgtggaagacagcgtgctgttgcttccctgctactcgaattgttatctttttgggatgtaaagagaatactcataatatcttcagccactatatagtcagaacaactaagctaattgtatcaaaagcaaatgattgctttatcaaatatgaatgaaagaaatagttggtaaataacaatagcaagctttgcaaatatgtttccctgaaccaatacagacctgtgtgttgggtcatttgcatcacgtgctactgccgcttcaatcattctaaacatttcactctgcttaaaaaaaaaaa

SEQ ID NO: 80182 - DNA, 271 bp, Glycine max
  unsure (1)..(271): unsure at all n locations
  Clone ID: PAT_MRT3847_4341C.1
cgagcaatttgagctcagtgcttgcttcctactgtatttgactaaattctcatgttattcttttgtcaaattcctaaagagcttttcngttcgtcaaattggtcaaactcctaaagagcttttcgattttgcatttttcgattagagttgacttgaacaattccatctgattattgacatatcacttctttctttattatgctctatttatccccttgtaactgtgagtttagataggtcatagccttgatattgatacaccaaaaagaaa

SEQ ID NO: 80183 - DNA, 733 bp, Glycine max
  Clone ID: PAT_MRT3847_43420C.1
ggggagcggaggatgttgcggcggcgccgcaacaagactctgcgctcgctgcgaatccgttgattattgctctctctctcaccagattgcacactggaatcgtcacaaacacgagtgtgataggttgcaacagcaattgaaaagtgttgaagtcctcaacgattttcccttcactttctctcgcgaatccacgtttcaggtttgtgtgaagcaggaaactaggtgttcatttttgagcaagagaggtcttcatcaagtggaaatgtggatgcatgaatgcgcttgtggggcatcctctgcttcatttgattgtttagggtttcttcatatttccttcattttctgaaatatcagttatgagttcctttttgaaaaatccagtgattaagccatatataatacatctaatgattattcagttacaacttacaaccttttcagctagtttattagtttagagcaaacttaagctgaaatttattttttgcattaaacaatggttgggatctcccaagtaatttatgtctctgttgtgagcctagctctccggtatcagagcagttgcattgttggagagactactataagtggagatgcatcccgctagactcgcctgttgctttgcttcttcaatgggacctgagaaagagctgctacaacttgctgtgtttggagaattactggcactcttccccggtgtacgaaatcatatagaacttgttggacctgcaat

SEQ ID NO: 80184 - DNA, 590 bp, Glycine max
  unsure (1)..(590): unsure at all n locations
  Clone ID: PAT_MRT3847_43421C.1
gtttgtcaaatgattccaatgtagatgccactgtttcaaacaataagataacagacattgtgaccggtgatgtatcagaagtctgtactggcaaagaaggtctgtctgaaaaaaatggcaattcagatccactgccaaatcaagtgtcttctgatcctttgatgtcagcacctgattctcaatctgatcttagtggcttattattaacagaacttagatcaagaatattactggtttttgagtccttagctaaggatgctgacatagggaagattgtgnnttnattttnaacatgtgcttgaaagattcgcatgacactaccatccaccactctgtggatgcccanccttctgacgctacntgtgatagggaaggataatcctggaagatgctggcttaaaccttgaaaaggaagtcatttcatccccanccaaccccaaaggatatgtngcanataacttcagatttgggaagctgccattnctcngattcatgacttttgntatttgttccntggcnagggaagccatgacnttccatgacgatgttttcttctgatgggaaantgaaatgaaggcaaaagaattgaa

SEQ ID NO: 80185 - DNA, 331 bp, Glycine max
  Clone ID: PAT_MRT3847_43422C.1
ggggccgtgcagcacataatagcgtgtggtggtcggagagaagaacgggatggagtgcgcggcgaaggggagcggaggaaggtgcggcggcagcggcagcggcggtgccacaagactctgcgctcgctgcgaagccgttgcatattgctctctctctcaccagattgcacactggagtcgtcacaaacacgagtgcgataggttgcaacagcaggtgaagagtgtcgaagtcctcaataattttcccttcactttctctcgcgaatccacgtttcaggtttgtgtgaagcaggaaactaggtgttcattttttagcaagagaggccttcat

SEQ ID NO: 80186 - DNA, 1942 bp, Glycine max
  unsure (1)..(1942): unsure at all n locations
  Clone ID: PAT_MRT3847_43423C.1
acgaccacacgccctctcacaaacgaaaagcacaaaaacaaaacctcttttaaaactcgaccaacacaaagttgtggttcagatccaatctcccttccttctgcacaacacggcaaacaagggcgattcaaataataaaccattccattgcactcacccaccatcaatcaccttcttctttcatatatatcatttcctcgacttttgcaagttatagtgcaatttcgctcacatgagattatactacatagcaagcactgtcataaaatatacagggttactttatataagtggactatttataaatccaatacaaggttgaaattctaggattaatattcatgttggcggtgtcacctttgaggagcacaagagatgaagggcaaggagagatgatggagagtttctcgattggaaccgatgattttgctgacctttcagaagggaacttgcttgaaagcatcaacttcgatgatctcttcatgggaatcaatgacgatgaagatgtcttgccggatctggagatggaccctgagatgcttgctgagttctccctcagtactgaggaatcagatatggcctcatcatcagtttcagtggaaaataacaacaaatctgcagataacaacaacaacaatgatgggaataatatagttactactgagacacaagatgaggttattgatatagaattcaaatattcttctgatttgccttctagtcgaggggaggagaccataaaaacgtaagtcgaagccttctcaacgctcttcccttgcatgttagattattatgcgcatgcttgcttcctatttcacatctagcaaaaattaaacggggagagaagactatatatataatttttggaactttatttgttcatgtgctatgtcgagccaagaagggtagcccttttgtgtggaatatgtgagtgcattcagggtttgatggaggtaatagtaattgaagtttatcacccgccataacattgggagccacctccaaaaatatcgatagcacaggaagcttttcctagcgcgtgaagctgaaaccgcaaggtggactctaaaggaaacaattgttggcagcagcaggtgtaggaagaggcaccactctcatgggcgccgccggctgcaccgcctcaagagccttcattttggcaccaactggttcataacgcactaatcccaggaacagcttgttttccacaacttctgacaccaacgagatttggaagtccccctgtgcccggcatcccaccccatgccatgtacaaagcagatcacgacattggcctccctggtccccttttcgacttttatccgtcaaaggagtgcatagatgcagctattggagatgttttatcaaagccttggctgcctctacctattggacttaaggctccagcgcttgatagtgtgatgagtgaattacaaagacaaggaattccaaacattccaccctctagtgcttgaaaccaacccttcatggaagaggttcttccctttcatatggtgtccattaaaggccacttaaccctaattcgacgacttctcatccattagatgttgcatgcattgcgtatatgttacatctaagctactatgtcagtgattcatatctttcttcttttgctttgccagtaaaaggaaaagaagaaaaaacttttaagccttttttctaattttcatgtgctataatgtattagttaatggtttcaagtcgtggtcattgtagccattttgtatatgtacggttgtaaaggcagttatttttaatagctgtatgagctgaggaaatcctaataaaggactttgataaaataaaaaattaacctatatacttctatttattacgttcgcacccttaaaaggaccgaaacttacccaaaaannnnnnnnnnnnnnnnnnnnnnnnnnnnnnnnnnnnnnnnnnnnnnnnn

SEQ ID NO: 80187 - DNA, 404 bp, Glycine max
  Clone ID: PAT_MRT3847_43424C.1
tagatcgcgggcgtacgttcgcgatcggccggccttttttttttttttgttgaaataatgaggctatacttgacaagaatgataacatatgaatgtgttaataaatcagacagaggaaggagttaatcaagtaaaactggcattgacttggaactactaaatattaccatactaaccaggacttataaccattataatacggtacgaatgatgcttgcactgagcatcagatgcatcactgcgtgtccagatcatgacgaatgaaagaatgctaattccaaacgggcacactttatatactagacatatctgtgaatgccaacattctagctttaatctcaatgcactaagtgctcagctgaggttaccatgaagactgatccttctaaataacactacatact

SEQ ID NO: 80188 - DNA, 369 bp, Glycine max
  Clone ID: PAT_MRT3847_43425C.1
gtggtaggcaagtaccaatgtaatgtcatatttgagactctgtgggtcaatttggtatggaagtttgtggaaaaaaaaaaaaaaaacaaaaaaaaaaaaaaaaaaaaaaaaaaaacaaaaaaaaaaaaaacataaaaaaaaaaaaaaaaaaaaagactaaaatgcatagattccaagatgtcaaacgcttacgtacacaatcatagaacttaatacatgataataataagccctaatttcaagtcattggacaccgaacaacaccgttaaaacagtaaataacggagacaaccctaacttaaatacatccgatatcatgcactttacctagttgcaataataaccaaatgtcaatacttcacaagccat

SEQ ID NO: 80189 - DNA, 336 bp, Glycine max
  Clone ID: PAT_MRT3847_43426C.1
tgcactcgatcaaacacacaatgttaaataatgtcgggattctcgccattgacgtctacttccctgccggttgcggtcaacaagaagcattggatactcatgatggtaccattcaagggaattattccattggacttggtcaacactgcatgtacattctgtaccgaattaaaagatgtcatctcaatgagtctgacagtggttacttatgttcttgagaagaatgggattgatcctaaacaaatcggccgtcttgaagacgtaagcgagaccgttattgacaaaagcaaatccatcaagacattctatattattcgaagatctgcatcaggaatg

SEQ ID NO: 80190 - DNA, 607 bp, Glycine max
  Clone ID: PAT_MRT3847_43427C.1
tttaggaagtattttaataattggggtagttgcattatatttttattatggatctaattcaggagataataattctgatttatgtaattgtattatggatactactattaatcatacaattacaggaacaaataaatcaactttatctagaatatcggaaaaagatattaattttatacaagaatttttagtaggtggtatgccagatatgggtgattcatttttaactaaagtatctgaagaaaatattaaaactatgaaagattctatagcagaaggtattaaatcaaattataatatatctaaacatttactacaaattcaacgtcaagtaggagatatagatactaaacaaactctgttaggttctttattgaaattttggccagaacttaaaaaagttaatcaatctttaattaaaatgtatagaattgttgagcaaataataaatggaaaatatgaataaaaataataaattaattattatcaaataaaaaaaaatatttcaattattataaaaattaaaataaacaactagatttaaaaatatttaatttttaagtaaataatcaatattaaaataatcaaaatttatgataaaattatt

SEQ ID NO: 80191 - DNA, 391 bp, Glycine max
  Clone ID: PAT_MRT3847_43428C.1
acatataaaaccttagctttttttaatttagaattgtctggataaacataatcttttgggagacgacttgtacaaaagtcctattactatttgaaacttgtggtttcacttgatacgaaaaattcctaaaggacagtatacaagacgtaaactcgaacacatctacataagaatcataggtaatgcttgttcaataacatgcatttcaaacttcgtggacagatagagatcacgaagcagcttgcagttagcggtgtagttgccacccgtcttaactcgtttccatcagcatcggcaaccaatccaccactcaagaattagctgacatagtcaactggcaataacttggttttccatctagggactgcagaaactgaaaaccaaaattatg

SEQ ID NO: 80192 - DNA, 2745 bp, Glycine max
  Clone ID: PAT_MRT3847_43429C.1
gaaggaaggaagaattaaaggtgcctcttctcagacagaagaaaattagaagcagaggtccacctcaatcccatccaaattccgctgccatttccaagggttactagttatgtaaggaaggaagaagcagagcgaagcggtgacagacagaagaaaatgggaagcagaggtccacctcaatcccatccaaattccgctgccatttccaagggttacaacttcgcttccacttgggaacagaatgctcctctgacagagcagcaacaattcgcgattgtatcgctttctcacgccgtttctgagcgaccgttgcctctcaagttggctcaagaaaatgcgtcggtacaagacaatgccttgtctgttaaaacgaaggatagttcttttgatgactctggtactattgagactgttatggtcaataccaatcagttctacaaatggtttacggatcttgaatctgccatgaaatcagagacagaagagaagtatcaacattacgtgaacactctaacagatcgcatacagacatgtgatgaaattctccaacaggttgatgacaccctagacttgttcaacgagctacagttgcagcatcaagcagtagctacaaagactaaaacgctccatgatgcatgtgacaggctgctacaagagaaacaaagactaattgattttgctgaagcacttcgtagtaaactcaattactttgatgaactggagaatgttgctaccaatttttattctccaaacatgaacgttggaaatgaaaactttcttccacttctcaaacgacttgatgaatgcatctcgtatgttgaaaacaatccacagtatgcagaatctagtgtttacttgcttaaatttcggcaactccagtctcgagcgttgggcatgatgcgttctcatgtacttgctgttcttaaaggtgcctcttctcaggtccaggaagcaatccgtggaagtgggggtggcaaagcatctatctctgagggagtagaggcatccgtgatatatgttcggttcaaggcagcagcaagtgagcttaagccactacttgaagagattgaaagcaggtcttcaaggagagaatatggtcagattctggcagaatgccacagactatactgtgagcaacgcctctctttgataagagctatagttcagcggcgaatatctgagtttgccaagaaagagtctttgccatcgttgactagatcaggatgtgcatatctcatacaggtctgtcaacttgaacatcaactttttgatcattttttcccagcttcttcaaaggatatttctagtttagctccattaatggatcctctgtcaacatatctgtatgatacactgcgtcccaaacttgttcatgaaacaaatattgattttctttgtgagcttgttgatatacttaaaatggaagtcctgggggaacagcatagtaggaggagtgaatcactagctggtcttcgtcctacatttgagagaattttagcagatgttcatgagcggttaacatttcgtgctcggactcatatacgggatgagatagcaaattacattccaactaatgaagacttggactaccctgaaaagctaaagaaatctgctgaaagtacttctgagatcaatcctgctgatgacaacccagatatttttaaaacatggtatccacccctggagaaaactctatcatgtctttcaaagttgtatcgttgtttagagtctgcagttttcacgggcttagcacaggaagtagtggaagtttgctcagcatctattcagaaagcaagcaaattaattgcaaagagatcatcacaaatggacggacagctcttccttataaagcatcttttaattttaagggagcagattgctcctttcaatattgaattttcagtcacacaaaaggagcttgatttctctcatttgctggagcatctacgaagacttctaagaggtcaagcctctctatttgaatggtcaagatcaacttcattggcgaggacactgtctccaagagttttagaaaatcaaattgacacaaagaaggagctggaaaagagccttaaagccacttgtgaggagttcatcatgtcagttactaagcttgttgtggatcctttgctttcattcgttacaaaggttacagcagttaaagttgcattatcatcaggtggtcagaatcaaaagctagagtcagttatggccaaacctctgaaggatcaggcttttgctactccagataaggtggctgaacttgttcaaaaggtcaggaatgctattcaggagcaactgccgggggtgattgataggatgaagctttatttacagaattcatcaacaagaacaatacttttcaagccaataaagacaaatattattgaagcccatacccaagttcaatccctactacaatcagaatacacgagtgaagagatccagatcattaatctgaaatccatacaggatctgcaaaatgagcttgataattttctctagtttgtatgtaaaggccactggataatttcctgtccattttttcccagctggagaatcttgaacaagacttgattacatgcattctagataattttgaagaattattagcaagagatagcagagttgtggttttgttgaggacgatctatatacccttttcttttctaacagtggtggatatttttgttgtactttttttcattagtcccaacaaaccctatatttgcccattcttccgct

SEQ ID NO: 80193 - DNA, 1162 bp, Glycine max
  Clone ID: PAT_MRT3847_4342C.1
caattattcccccattctttcccaccttgctcccaattattccacaaaatttccctcaattatttctcaccatcatcaccccctttccttctctcaagaaaaaaaaaagttaatttcttgaacccaatggcttcagagacagaggtgccggatattatttcctctgttttcgaaaggtttcaacaaaacagagacatgtctctgtttctgcccttcctcttcggcttctctgacgccaccccaggacgaaatagcgacgacccagatcacgaaactgctcccacagaagccccacaacgtcaaagaataatcttggtgaaccccttgactcagggcatggtggtgatcgacggtggttcgagcctcgaggctctgtttcgcgaattcaccaacggaaaaggtggtcgaccaccggcttctaaggagtccattgaggccttgccgagtgtggaaattggagaaggtaacgaagattcggagtgtgtggtttgtttggaggagtttggggttggtggggtggcaaaggagatgccatgtaagcataggtttcatggtaattgtattgagaagtggttggggatgcatgggtcttgccctgtgtgtaggtatgagatgcctgtggaggagattgattgggggaagaagagggaggaggaaggtggtgagaggagaaggagtgatggtggtgaagtttgggttagtttttctttcaataggagtagtagaagaaaccaagatcatgatcaagctgattctggtgattcaaatgatgatgatggttcttcatcaagtcatggagatggtgctgctgaagagagttagagaaggttttttttcttttttgtgtttttctggtagatcaaggttttaaattgcggtcacagttatggttttgttgcggtcggtctttgatgttgcaggaaactacagacaaatgcagtcgatgttgttggaattgaggtcgtggtggtgactccaaaaacattgattttgtggccaaaattgtgatcgttttttaaaatcttggggtagagtgttgtcggttttcaagttggggaggactggaaaatatgtacaggcaaaaatgcacaaaattgttattatatcttgtggtgataaataaaaatgatgattttttgctcttataaaaaaaaaaaggata

SEQ ID NO: 80194 - DNA, 443 bp, Glycine max
  Clone ID: PAT_MRT3847_43430C.1
acgagatcgttcccaaatgaaggccatagtccggacatcgctcttactatgctcatctgtgtacatagcaaccagcctttttggttttttcttatttggggacaatacactagatgatatacttgccaactttgatggggatctaggagttccttatggctcatttcttactgatatagttagagtgagctatggcattcacctaatccttgtgttcccaattgtgttttactcgcttcgcctcaacatagatggtcttatgtttcctcatgccattcctcttgcctttgacacccagagattctattttggtgaccacagttctcatggcttttatctttgttggagccaattttgttcccagcatctgggatgccttccaattcataggagccacagctgcaatttctgctggatacatttttccagctgctattgctctt

SEQ ID NO: 80195 - DNA, 670 bp, Glycine max
  Clone ID: PAT_MRT3847_43431C.1
ggaaagctccagagagttggcagcaccactgctagtgctgagaaagagtggcgagcaagagaataataatggggtggagagtacattttgccaagagttcaagagggtaagctccatggcggctccaatggtggctgtcacggtgtcgcagtaccttctacaagttgtgtctttgatgatggtgggacatcttgggatactggtctccttctctggagttgctattgctacctcttttgctgaagtcaccggatttagtgtccttttgggaatgtccggtgcattggaaactttatgtgggcaaacctatggtgcggaggagtataggaagtttggaaactacatttggtgtgcgattgtgactctgacattggtttgtctcccgatatctctggtgtggatattcactgataaaatactcatgctgtttagtcaagaccctgaaatttctcatgcagctcgtgagtactgcatataccttattccagctctatttggtcatgctgttcttcaagctctcactcgctacttccagactcagagtatgatctttcccatggttttcagctcaatcaccgcactgtgtttgcatgttcctatttgttggggtctggtttttaagttgggactgggacacgttggagctgcattagccattggagtctcgtat

SEQ ID NO: 80196 - DNA, 344 bp, Glycine max
  unsure (1)..(344): unsure at all n locations
  Clone ID: PAT_MRT3847_43432C.1
ntnntagaatagtggatnnnnngggttgnaggttgtaannnntgttaanttnattaatggantgattttatgantnaanaaattaagtatttagatntgnntnataananaggtntaagttatgttttgtgtaaanaanttgngattatanatgtatttggtatttntagttatanatattatntgntggaaagtggatagtagttgaaagatgggnngggaaaggaatgntttatttttttatgtaaatnttgttgatgnttnnttgggtgaaattnatttgntngaannnaaaaatatgnttaatatnttttaattgtaaaaaaaaaaaaaaaaaaaaaaaa

SEQ ID NO: 80197 - DNA, 362 bp, Glycine max
  Clone ID: PAT_MRT3847_43433C.1
ttctgtatagcgcacgagctcaatttttttttttcttttgactgttaacctcccgtgggggttaatatcgagccaaacatttataccaaacttagcaaagacgtgaacttttgcccagggcggataaacataaaactccccaaggatgccttgtaaccaaggatagcggacattattattgggtaaagtttgttcaacaaaaattctttttagttgttgatctttttcccaaaggagtgaattggacctgaaacatcacggatgatccccaagtgccaccccacgaatggccacacctgcactggacattggccttgcaaacaattccactggatggtacatctattaattaccctgggctt

SEQ ID NO: 80198 - DNA, 481 bp, Glycine max
  Clone ID: PAT_MRT3847_43434C.1
ggctccacagcggagtacaccaccactgtccactggtacactcttggcattttccctttcttttttcatttttatttttaaatcccactctcattttcccttccacttttccaattccttcacttcacactctcacactcacagacacagtctctctaatctaatggatgcaaagtctgctgaagctgttgttcccttagaaccattgaagtatcagacatggttcttgaaagtttcgatccactgtgaaggttgcaggaggaaagttaagaaggttctacagagcattgatggtgtttttaccacaacggttgacccgcaacagcaaaaagtaaccgtcactggaagcgttggagttgagacgctcataaggaaactggtcaaagccggaaaacacgccgagatttggccggagaatctcgccgccgggaagggaaagaactccggcaaagacaagaagcagcagcagcagcagaagaag

SEQ ID NO: 80199 - DNA, 1069 bp, Glycine max
  Clone ID: PAT_MRT3847_43435C.1
cgcgtccggagaaatagacttgggaatcattgctgatgttgttgaggcactaattggtgcctttattagcacagaagatgaaaaggctgctttatcgtttattaattggattggtatcaatgttgacaccaacattatgccgtatgagaatgagaggcacattagcattattgccccagaggagcttgtaaaagccaaacttttaaaatcccggctgaactactcgtttaaagacccttatcttttagtagaggctctcacccatagttctggcaaacggccagaaattcggacatgttatgagcgactagagtttcttggggacgcagtgttggactatgtcatcactatgcatttctacaaggaatattctaatgacaaattctcagcagaatttttcactaacatgaggtctatttctgtgaacaatgagtgttacgcactgtcagccattaaagccaagctggatgaacacatactctgtgactcggtagtaaaaaataacattgcccagacaatggaaggtgttaagaacttatctttggaatcaacttttggatgggagctagaaacatatttctgtcaggtgctggcagatgttatagaatctatagcaggagcgatttttgttgattcagggtacaagaaggaggttgttttccaaagcataaagccccttttggaaccccttgttacacctgaaacagcaaggagacatcctattagtgagttgcacgaactatgccaaaaaaaaggctacaaaatgaaagtatatccccccgtccgcgtcaacggtgaaacttcagttacaattgaggtgaaaaccaacgggatcacttacaagaataatcctcctgctaaagcatctaataacgatacagctcgtaaactggctgccaaggatgttttaaaacaaattaagatttgcaagtctcttggctaattgatgttttacgcccataggaatgctcaaataggatgccctgttcctaaagtcattatggtatattggtatatcaaggtcaactaatacgactaaaaatgttgtggtatatgacattttcattac

SEQ ID NO: 80200 - DNA, 280 bp, Glycine max
  unsure (1)..(280): unsure at all n locations
  Clone ID: PAT_MRT3847_43436C.1
ccccattctcctcttctactctttctctgatgataacttcanaacaatatctcacangctgaaggcttctttatcacaagtcctcactctctaccacctcntttgcngaacactgagaggcaattcagccgttgagtgcaacgaccgagggcattctttacaccgaatctngagtctccgttganctctcanacgttgtgaagaaccctcatcttcaagagatcaacgaacttttcccgtntgatccctacaaccctgcnaggganacactggaagggng

SEQ ID NO: 80201 - DNA, 333 bp, Glycine max
  Clone ID: PAT_MRT3847_43437C.1
gcctgatcgaggcatctgcccagaatcacccaccctgaaccaggttttgatcagtgagacagaggagggagaacacacacacacacacacacacgttaaactaacagtctttattagtaagaagacatggctcaaccgagactcaacggggatctgaataataaccagcatggtcacggtgcatcaacagcagcaccagtgggcggcggttcaaacgcatcagtattagcagctatggattgccatgcaggacccggccacagacattgccattatgcagcattagatgatgatgtacccgcagcattacatgccctacgctcactcacatta

SEQ ID NO: 80202 - DNA, 255 bp, Glycine max
  unsure (1)..(255): unsure at all n locations
  Clone ID: PAT_MRT3847_43438C.1
gctgtatcaagaagcgaggtgcattgtgtccttgactttgtatctacacattcatatgtngcgttttgtgtgagatggaattatatctctgaagaatgaatgaataattcttgtatttcctggaatgtagttagtaacgcgtacttataagattgnaatnaatatcctncctttctcnagggntcanggcccgttcnaaaancnccccatnncagcgggggananctnntnaccangngganaaaagggggggnt

SEQ ID NO: 80203 - DNA, 392 bp, Glycine max
  Clone ID: PAT_MRT3847_43439C.1
aaaaaacaaaaaacaataaaatttttctttttttggcgtaacaaaaaaaaggaattgggggatttcaccctttctcccccccaaataagggggaggggaccaaaaatttttaaaacccccagatgcccaaacccttaaaacaagggcccttttatgcttaattatgggctgggtccgggtcccgggccccgcctttttggaatatgaacgccccccaaagggggacctgggaaaagaaaaatatagttctccatgggaccccgtatttacaatactttggacaaaagaaaaccattaatggtttaaacaaccaatggggtcatgccccctaaaagccgcaaatttgatcttgttttaggccccaattcaaatgaaggaatttcctcctgggg

SEQ ID NO: 80204 - DNA, 714 bp, Glycine max
  Clone ID: PAT_MRT3847_4343C.1
cccacgcgtccggttgattttgaaaaaaaaaaaaaaaaaaaaaaaaaaaaaaaaaaaaaaaaaaaaaaaaaaaaaaaaaaaaaaaaaaaaaaaaaaaaaaaaaaaaaaaaaaaaaaaaaaataaaaaaaaaaaaaaaaaaaaaaaaaaaaaaaaaaaaaaaaaaaaaaaaagggggggggccgtttaaaaggatcaaattttatatacccggggttggaaaataaaactttttttatggggccccaaaaaaaaaataaacgggccggtttttaaaaacgtgggaatgggaaaaaccgggggttaaccaaaataaatcccttgaagaaaaaatcccttttgccaatttgggaaaaaataaaaaaggccccaaaaaatcgcctttcaaaaaaattccccaccctaaatggaaaagggaaccccccttaaaagggacaaaaaagcccgggggtgggggtgtatacccccaatggaactcttaaaattttccaaacccttaaccgccggtcttttcctttattttccttttttattaacaaatattggcggtttttccccgaaaaatttaaaaagggggggctctttttaaagggtcaataataaaaggtttaaaaaggacctttttcccctaaaaaaaaattttaatataaggggtaagtggactcaactgagaggggggccccacttcccccccataaaaaaaagagagttttttt

SEQ ID NO: 80205 - DNA, 264 bp, Glycine max
  Clone ID: PAT_MRT3847_43440C.1
ctacagccgactaaacctcgataataggacttgggtttgagggaatgagacgagttcgaatttgaccgtgtcgatctttatctcattgcacctctgaggatgactgtaaggtcagtgctttaaccttttcgtgtttcagacgagcagacctaagagtccaaacctcatcaccaggacaacgggggatggtgcacctaagtgacagctacttccactcgacagaaactttcttcttgatccgctactgatacgtcccctgaacat

SEQ ID NO: 80206 - DNA, 851 bp, Glycine max
  Clone ID: PAT_MRT3847_43441C.1
ggggagggaagaagtctaatgatctgcaacaattgtggcatgcaaagctgtaatgatgaacaatatactaaaatagcaaagggtccccatcagaatgcgtcttctaaaactataaaattttctcgagacacattctcctacattatgctatgctaatgagagattgagaaatatctccaaagcatggaaaaaaataggttgagggtaaggatactcgcttccactaaaaagagccacatccaatacacaaattgccgttaagaacacaaactttacaatgaaacaattttgacaagggtaaaaagaggtcaatcaacaagttcaaaatcactgaacagccaatttcttcttggccacccaactccttctggtggaatccaatgcctccaacatcatttcattaagttcatcaatccaatgctgatagtgtgcctcaatttcatcaagtttaaactgtagcccaagatcaataatgtcctcttctgttgatgacacataagaacaactatttgtagggttctcaacattaatggacgttccaagaactgaccctgagttctttgggaattcatttatcacaactccttctccaaaacaatattctgctggttgcaatttacagtcctcaaaatatgcacccccaatctcaagttcagacatggaattacttaagctttcagaacttacatcagcattggaatcatgacaattgtcatttttcatagaagtgttttcaacaatcatctcagaagctctagatccttgtgaatatcgatcttccaatttaaccagactagaagaattacaatcaccctcaaaagtagcattgctatcatttttggaaacgctgc

SEQ ID NO: 80207 - DNA, 344 bp, Glycine max
  Clone ID: PAT_MRT3847_43442C.1
accactcctccataacgatgcgagggtccaatcaaaagtgagagagagagaatggagagattggaagaaatggtagggatgggcgtgacaatgccagtgtaatacggttgggattttgcataggactgggactcaaccctcctcacactctttatagggatcaagacggcattgccatccatcaagatatttataaggacgctcctgatccttccaattgcccttatcgcactcatagctctctgactatcattcaatcaaattccaatctggcaacatttgttagatacatgatcccattaagtcattaagtttgaattcggagaccttcaatggattgcctt

SEQ ID NO: 80208 - DNA, 500 bp, Glycine max
  Clone ID: PAT_MRT3847_43443C.1
ttaggctcaggctgcaaatgatcttttactgtttggaaaatatgccaaaggcaaccctttctctgaggtgcaaccacaaatgcataaaaatcctgacactatttttgaagatccagcaaatgatcccattgtccctgtgactgtggctccaaaacattatttattcaattctaaacatccagatatgaaacatatgcatggtgaaaattggaacaacactgtacttgtagatggtaatgctggtgccaagttccaagtaggaatagcaacgttcccaagtattggtatgaatttagtgatggaaaaaattgaagaggaaattcctttgccccctggaactgagttaacagaaatattggacactgagctcccacctgaagatattggaaatgcgttgcagcttttagagttttgcagagtgtttggaaaggctcttgatctcaagaagggagaagctgaagccatcttaagagaattagtgcgtaaacaaaatttgcgtc

SEQ ID NO: 80209 - DNA, 593 bp, Glycine max
  Clone ID: PAT_MRT3847_43444C.1
aagcagggagggatgaggttcacgatcaacggtttccgttacttcaacttggttttgatcaccaacgtcgcgggtgcaggggatatcgtgaagacgagcgtgaaagggtcgaagactgggtggatgagcatgagccgcaactggggtcagaactggcaatcaaacgctgttctggttggtcagtcactctccttcagggtcacagccagtgaccgacgcacctccacctcctggaacctcgtacccgccaattggcaatttggtcaaacattcaccggcaaaaatttcaaagtctaattactatgtttcatggccttttttttttttttttttttacctctgtagttttgaatttaccttgggatgtggatataagggaaacggcgagaaaaaaaaatggtgggaaagtaatgttgtggtagtgattagtcaaactttttgacttttttcgttgtcttggtatacgagtttgaagttttatagtaggattctaggaaaatggagggaaactttatgtaacgggctgaagtggcttcaaatgcatgagcccgcagctatgtttcttatcttagtatatttatatatattgtatg

SEQ ID NO: 80210 - DNA, 384 bp, Glycine max
  Clone ID: PAT_MRT3847_43445C.1
taatggaaatatcttatctcattttatttataataactgaatcaatacaagaagggacaaagttaaaaacatgtctacatagcatcttgacactcttgttaggcaatgagcaacaagattgacttgacgattaataaacttaagagaaaagttttgaaatacactaagatttcttttgcagctcctaagaatactaccatacttgttcaaaactttttgagagaacaaagagtcaatgacgacatgcttgcagtcagattcgaagataatgttgtcgagcttcgaatcagagacccaagaaattgctgtgtggaggggcattgcctctgcttcttgagctgttggagagctgtggtagtgagctgaaaattacggacgcgtggg

SEQ ID NO: 80211 - DNA, 555 bp, Glycine max
  Clone ID: PAT_MRT3847_43446C.1
gcttgaccttgccagcagatttgccgtgctagcatgtgtgcacgtcctccttcttgggggggggggggggggggggggggggggggggggggggggggggggaaactaaaaagggtgaggggagggataagcaaaacaataagttagaaaaaagggtgagcccctgagagagctgatgctgtgtgatagttgataaacagcgcacaggaaatgaaaagggttaccgtaaacaagcaaatagtgtaggtgacttttagggaaatagggtagagaagtgcaagcgtaaaacgtaaagctaattggcggattatggttaagttgggcggacaaaagcggtgcgggtgcgggtgccggtgggtgcgggtacggttagttgttttaaagctacagctaattagtccgtgtggtggggctgctaaagtgaccagatcagtggtaatgcgagtgtgtatccggaattcgaaaatacgtataccatcacgtgctttaaggtcagcgctgtgagtgaggctggccttggtacggcgaccaggttattagaaagtgactagaaca

SEQ ID NO: 80212 - DNA, 254 bp, Glycine max
  Clone ID: PAT_MRT3847_43447C.1
cccacacgtccgaccaaacttccggtaaatggatacactcttactcataatgtccttcctgtcaatttacaataccaacgtctctctcccttgactatgacgcatgcagtcaacagcagggtcttctgctttgtgaacccaggacacaccaccgcctttatcatcctcgcatgtatgtccaactattaatgaaaagaacaccacttgtggacctatatcgaaagagagcaggccctagctcactgatgtgtaga

SEQ ID NO: 80213 - DNA, 265 bp, Glycine max
  Clone ID: PAT_MRT3847_43448C.1
gggattcgcgtttactgatctcaagtttttcacctcactgtcgtaaccaaatgattggtataattcaagattatgtaccaatttattcattctgatatcatcattattactatttatattataaatataattaatgtatttaatgataatttttttcgatattgccaatttgtgattttaaccttagaaatttaatatatattaaaaaggtctttcattctaaaggattcaaacttacttacactttcatgctaatttataccta

SEQ ID NO: 80214 - DNA, 116 bp, Glycine max
  Clone ID: PAT_MRT3847_43449C.1
aaagcagggaagaaaactacctttaactgatggatactatgttatgtattcccccccaaatatcaaacataggatccatgaggtaaagcagggaaaaaaactacctttctggagcc

SEQ ID NO: 80215 - DNA, 930 bp, Glycine max
  Clone ID: PAT_MRT3847_4344C.1
attaaggaaaataaataaaaccaacaatactcatgaaatgagttcatgtacaatatctgtatatacatggaatatcaatgtaaaatatgtacataaactaagcctgatcagtgcgctgcctgcgtctgcacataacgtatactaaatggtcctgtgtgacactcctggccaatctgaaacattttttgatcacctcatgtgtcgatgagccaggcgtgaccacccctagactcagatggcactccaaccgctcaacaatgttatcacaaacttcttatcactgcatgtctgggctcctccgcagatgtcgacgatgctcctggctccgtcacgcgagggatatccgtctgcggggcctgagggacgactcggggttgcggggcgtgaccatgaggcaaaggatctactgcgtggcctggtgtcatgaaaggatgagagatgcgaaagaaccattcgatgtagtcactggaacacgcccctagcaccacgcacacctcacctacaggtacgatatgaccctcgtagtgcatccacctgtcgtgtatatcatcatacgagacccatgaatcgacaggtggagcaggaatggctggcgtgtaaccaaactgccgcacgaccttctccggtcggtaatacacagcaacaagcccccagtgcaagagaccggctcgagccgatctgacgtggaagtcctggacttcccgatgctccccatacaggatccaacagacatctgaaattcggagtcggttcaggcgctccctatacgacggcgtgcgaatgctcttcacggtcttcttcgtcgcaatccacctgcacgcacgcggagaagcctcgtcgtagtcctaatcagcggtggactccgcaactgagggaaaatgctcgtaaatccagcactgcagcagtgtgatgtaaccgctaagctgtcga

SEQ ID NO: 80216 - DNA, 181 bp, Glycine max
  Clone ID: PAT_MRT3847_43450C.1
gcctcctgccaataataaccttgccaactggcataaccctgacagaaagatcttgttaccataaactctcttacaccaatctaagattccacaatacttaaccatagaagtgcccagacactatacgtataacccattgattcttaacaacaaaccacaagatttttccagatatgagaca

SEQ ID NO: 80217 - DNA, 198 bp, Glycine max
  Clone ID: PAT_MRT3847_43451C.1
cgcatgcacgcgtgctaggcattcggctcgagcatttattgctgcaattgcttgacttggtccgtcaagagtttcttgttcgcggttcttggcaactgttcgagttgtattcggtagtttgatggacatgatctgtggtttctgtgtggctggtgaagtgtccttttgtggtggctatatcggtgtagacccagcctc

SEQ ID NO: 80218 - DNA, 385 bp, Glycine max
  Clone ID: PAT_MRT3847_43452C.1
attaagacagaggggttattgtggagtacttgggaagggtggcttacgttgctcataacgataatgaggcccaagagaaagatttggtggagggaaattcttccttcgatattaaatgctcctctagattggaaatagtttcctctacaaaagctcaattcgctagtggaaaaaccttcaaatatgacatactgggggctggttcacagacttcagaagattttcctgagaaggaagatcaagaggaacccattacgactgagtgccagattgagacaaagaatagctcctcaatataatgagggtcaggctcagatggaaacatatgtgcttaaattgtctcttgatgatgtagcaactcctaaaggttccatgtgggatctta

SEQ ID NO: 80219 - DNA, 256 bp, Glycine max
  Clone ID: PAT_MRT3847_43453C.1
aaaccaaaaacctttattaattccattcggaggtggcaattccaattccttttcccatttcccccgcgccaaaatggttggccctttaacaccttggggggagggaggggggtcacaaatggatcttaagagtaaaaatgtgctttacccacataaaatagccctactccgatgactaatcttcaatgtgttatcaccgcgtatactgtcacgagcccggaaacacttttgacaaccaccagtgcttctacttctt

SEQ ID NO: 80220 - DNA, 402 bp, Glycine max
  unsure (1)..(402): unsure at all n locations
  Clone ID: PAT_MRT3847_43454C.1
aatanttagtnccgcggcacgcccctttttcatttgtggggtcttgttaaaagctgggcgccatattcaccacccattcattatccctcggttataatctctgtttatactttaaaactatacttttaaaataaaacaaaataataaaataaaaatacagtatataattcattctcaatacttaaaaaataaaaacaaaatgaaaattttataattaaaaataaaactactttttttaaaataaaatatcaaattccctcaccttcttattccagcgtctactactacaattttaggatttttttgcaaaagacaaacacatcttttcactttttctagcaaaaatccattctttcatacatcatctatttgctctcatatatatttaatcctaatcttctt

SEQ ID NO: 80221 - DNA, 686 bp, Glycine max
  Clone ID: PAT_MRT3847_43455C.1
atgaagcagtgacgtagcaggaatctcctcctagtgaaaagagtagaaaattttgtttggagcactctccaacagcaaatccttgacaagtcttacttcaatgggtcgttaaagccaattaacacttcacttccacttattctctttaccaactgtcacacgatgacttattccaatgaaaggtgggcggtctttaggtggtttgaagagagcacagtcaccagcaataattttgcgaccatccttataaaaccaatcaactgaagacttcaacgaagaagaagaagaagaagaagaagaagaagaagaagaaaaatcaacggttacactagagtgggcacgcgtgggggatttccacatgtgccgagtcctccttttcctctccacacctcgatcccaccttcaaacccaacgactaccatcaattccccaaccacgaacctcaaaacgcaccgtttcgacctccgcgaaaccctagatctgcatccgaaaaccctaacgcgaaaacatcctccgccaaaaatagcaacaattaaaattcggaagctctatcagggcccgaaatcgaacgcgaatcggaacgcggcgatgaaaagcgaaatttcttagccgccttacgatcttgcgagaagggaaatgcgtgcgatgcgaagcggacgcgtgggtcgacccgggaatccggaccg

SEQ ID NO: 80222 - DNA, 415 bp, Glycine max
  unsure (1)..(415): unsure at all n locations
  Clone ID: PAT_MRT3847_43456C.1
ggaattcccgggtccgaccccacgcccgtccgtaccggtctggctgatgaatacctacatgaagggggatttcacacccaactaactaagaaaagtcnttccatgagccccgccaaataatgatgagcaccatcnttctttgctctctnttctcttttgggtgccttcaccacctcatantcctaccttcagnccatcgcnntgatttcgtgccctcgataatgaatgggtaaccctcttgaaaataggtggcacaatatnntatatcttgtcagacactaacagcatttggtggaataaagagccagtccccaacgggaaatgaaaagatgnccctctcatctgtgtgtgcaatctcgcaatgaagctcgacaaaagggattgggaaccaatnncatctcgtccccattatcga

SEQ ID NO: 80223 - DNA, 672 bp, Glycine max
  Clone ID: PAT_MRT3847_43457C.1
cacgcgtccgtttttttaatctctctctctctctctctaaaaacactcttcttcgcatttcccttctcgcaagatcgtaaggcggctaagaaatttcgcgtttcaatcgcggtgtttcgattcgtgttcgattctggtcctgatagagcttccgaatcttaattattactgttttggcgaaggatgttttcgcgttagggttttcgggtgcggatctagggtttcgcggaggtcgaaacggtgccgtttgaggttcgtggttggggaattgatggtagccgttgggtttcaaggtgggatcgatgtgtggagtggaaaaggaggactcggcacatgtggaaatcccccacgcgtggccactctagtgtaaccgttgatttttcttcttcgtcgtcgtcgacgacttcaggtgattcgttctataaggatggcggcaaaattagtgctgttgactgtgctctcttcaaaccacataaagactgtccacctttcattggaataattcgttgtgttacccattgaagtaagacttggcaaggatttgctgttggagagtgctccaaacgaaattttctactcctttcacaaggccgagattcctgctacgtcactgcttcatcctttgtaaggtgcatttcttccaaaggtgttgagcttcatcagggatttcgt

SEQ ID NO: 80224 - DNA, 875 bp, Glycine max
  Clone ID: PAT_MRT3847_43458C.1
cccccccgcccccctctctctctctctttctttaactctcttactctctctgtctagaatgcctctattctcctctgtcggtcacacagcgatagaaagataatagagaatagaaagcattcataggcgccaatagcgtgtgtgtgtgtgtgtgagagagagagagagagagagtacacaaagcagagagacaagtttgtgtttttctacttttccattttttgggggagagagatctgattcttcaccataagtgtcattgctttgccttgcttctcactcagcaaagttaaaacaagaagggcattgcatttttattgccatttcaatcccatacaaaaagcaaccccaattcacttattcaccccattgtcctaaaacttcactcttttctctgctaagagaaaagaaaataaaaaaccaaaatggttgaatctcagcccaagttcttcatccccgactcgatcaatggagtgaatttcgacgtggcggcgcagattaagatggtgtgggaagtgatcaaggcgccattgatcgtgccactgctgaacctcgcagtgtacatttccctagcgatggcactcatgctcttcatggagagggtgtacatgggcattgtcatcatcctcgttaagctcttctggaagaagccccaccagcgctacaagttcgagccactccaagacgacgaggaactcgggaactctaattaccccgtcgtgcttgtgcagattccaatgttcaatgaaaaagaggtgtacaaggtgtcgattggagcagcttgcaatctttcatggcctgtggatcgtctcgtgattcaagtgctcgatgattctactgaccctaccgtcaagcaaatggtggagatggaatgc

SEQ ID NO: 80225 - DNA, 4090 bp, Glycine max
  Clone ID: PAT_MRT3847_43459C.1
ctttctctctctctctttctctctttctctctgtctagaatgcctctattcttcctctgtcggtcacacacatgcgatagatagataatagagaagagaagcattcataggcgccaattgtgagtgagagagaagtttctgttttttctacttttccatttttttgggagactgctattgagagagagagagatctgattcttcaccataactgtgcattgctttgcttctctcactcagcacaagttgacaagaagggcattgccatttcaatcccatacaaaaaagcacacaccccaattcagcaccattttcctaatagcttcactcttttctctcgctaagagaagaaagcaagaaagaaaaagccaaaatggttgaatctcagcccaagttcttcatcccggactcaatcaacggagtgaatttcgacgtagcggcgcagattaagatggtgtgggaagtgatgaaggcgccactgatcgtgcctctgctgaacctggcagtgtacattagcctagccatggcgctcatgctcttcatggagagggtctacatgggcattgtcatcatcctcgtcaagctcttctggaagaagccacaccagcgctacaagttcgagccactccaagacgacgaggaactcggcaactctaattaccccgtcgtgcttgtccagattccaatgttcaatgagaaagaggtgtacaaggtgtcgattggagcagcttgtaatctttcatggcctgcggatcgtctcgtcatccaagtgcttgatgattctactgaccctacccgtcaagcaaatggtggagatggaatgccagagatgggcaagtaagggcataaacatagtgtaccaaatcagagaaacaagaggagggtacaaagcgggtgctctaaaagaaggcctaaaacgtaactatgtgaaacactgtgagtacgtggcaattttcgatgcagatttcaggccagagccagattttctcagacgttccattcctttcttggtgggcaaccccgacattgctcttgttcaagctcgttggagatttgtgaattctgacgagtgcttattgacaagaatgcaagagatgtccctggattaccatttcacagtagagcaagaagttggatcagccactcatgctttgcttcggtttcaatggaaactgtctggtatttggagaatagctgctatcaacgaatgctgggtagggtggaatgacagtataacagttgaagatatggatcttggcttttcgtgctaagtttttagggaatgagaagtatttttgccatggtgacctccagtcgaaaattggggctttccagttctttgaaatccttcagattccagcagcacagatgttcatgtggtcctgctaatttgttccgcaaaatggtgatggagattgtgagaaacaagaaagttacgttttggaagaaagtgtatgttatatacagcttattcttgtgatcgcaaaatcatcgaccacatggtcaccttcttcttctactgtgttgtgattccccttacaatcctggtcccagaggttcatgttccaatctggggagctgtttatctaccttctgtcatcaccattctcaattcagttggaacaccaaggtccattcaccttctgttctattggatcctctttgagaatgtgatgtctttgcaccgtaccaaggcaacatttataggtctcttagagtatgggagggctaatgaatgggttgtgactgaaaaacttggtgactctgtcaataataataagaataaatcaggagatgctgccaagaagaataatgccatcaaggccacccccaaaaagactcgatccaaatttgttgaaagacttaatttactggagttgggatttgctgccttcctcttcgtatgtggatgctatgattatgttcatgggaaacacaactacttcatctatctcttccttcagaccttaacattctcaattgtaggatttggctacgttggcaccatcgtgtaaacctcgttgagccaaatttctcaagttacttaagtttcatcaatgttgtgtccatatttttctagtttctcctaaaaaaaatacatcaaaagaggctgatttcttcaagcaacaaactctgtaccaaatcatctacagctagtttagctcaaataattttcaattcggaaagaaaaaaaaagtcctttccaaaatttcattgtcatccatcatcaagaagatacaaatcatcacaggcaaagtgctgttattactagaattgcattacacaggcttaagggcagctatgaagatgtaccaaaaacaaaaagtggttaaattagagccttagacatgaagtagagtcagtgtgattttgtttactgcagctatgtagaagtatccaatagttatatatttcgtgagtcctttatttgtttaggtttgcttagtctgagccaaaataatttggtggataaaaatgcgcttcaattcatgttatttgtcattttttcaccaaggaatgaattttatttcccataatgtggtggataaaaatgcgcttctaattcatgttatttgtcattttttcaccaagaaatgaattttatttaccatagatgcaataatttgctgctttctttgacatcttgtcggtgtggagaactaaagagtaaaataaaggcatccttctatatttcaccaattgtttcttctcgtttattttgctcccataccattagcaacactgtgttagatactcagatcccccctcttttgtctatgccattcccccagctgggaagggtgtactggaatcagagtgtagctgtggggtgcagattgattactattcttgtgttggccttttcaggatgggcaagtgcaagggttgtgggcagataggaagaatgggaacaacaaatgggtcaatgagttcttatgaattttcgttgatgttgtctactgttgtttctttttgggattgtatgttccgtaaaatgaggtattcctacagacctgagtgggtgtagtggttagaacgtaactttagtactagtctcaatactttaactaaatagagtatattagcataacaatttagggaaaggggagaaattataaacaaaaaaaatgtatacagctttaaagaaattctcttgaaggataggagttctcaaaagttattttttttaagtatttatatagatagtgggttctatggataacatggcatgtaataaagggcaacgcttgagaaaggcaaagaagaagcaggtgaaagatgagttggatagactgaaacaggctgagaagaaaaagaggcgcttggaaaaagcactggctacttctgccgccattatttctgaactggagaaaaagaaacagaaaaagaaagaagagcagcagaggctcgacgaagagggcgctgctattgctgaggctgttgctctgcatgtgctacttggggaagactcggacgagtcgtgtaaggttgtgatcgatgacggtgggtgcaagacctggaactgcaaccgaactctcggcatctccttgggtggagaaagtgcttgcttccctcatctagatggtggcagatggtcttttgaaagagtgggttgggtctctgatgcatacagatatggttgcaagtggggtgctgctgaaaatggtgaatggtcattctcatcagagccttttgaaaagaatgtgcatggaccattatatgaaggtgcaggatggggacctgcaaatttctctgctgatctcattgcagctcaagcagtttcatcactgcagattgctgaggaggcagatgaagataggattctcttttaagtttttgattaagggcatgctgaggtgatagaagaataactgtttgtggtggtgactggatgaagtcttttgctatttttattgaagatttatatgcgtgtatatatattataattataattatgagtcttgtccatgtcaaacactttctgctccagttgtgattgaacgtgtaacatagtgtgaccatgttttattattgatcatcttttaactgtgtgttaatgtgaggcttctaaaaaaaaaaagggcgcccg

SEQ ID NO: 80226 - DNA, 151 bp, Glycine max
  Clone ID: PAT_MRT3847_4345C.1
aggaaagagtggtcaaggttcaccgcgtgtgaaaatagaaggaactccattacagatacgttatatattaatttgacactgccacattcctattctacccagttcaaatgggagcgcttttggggattattccggtaatttcaccgttatt

SEQ ID NO: 80227 - DNA, 751 bp, Glycine max
  Clone ID: PAT_MRT3847_43460C.1
ccggaattcccgggtcgaagcaagttagatcaaagatctgaatcgagatcggagaagaggaagaagaagaagaagagtatgggaacgacggtggcgggtctagcgccgggtctgtcacggaagctgaagaaggttctagaatctcggatcgatacgccagacctcttgtcttcgctcaacacgctctcttccttctacgatgacaacactcctcaggcgcgtcgcaacctccgatccaccatcgagaagcgcgccctctccatcaaccgcgaattcctcgacgcttcccacgccgcgcagctggccttggatagcgtggagaacgaggtcgatgcgctcgctgagtgctgtgacaggatagcaaaggctttgaatagttgtagtgctagcaccgctgacattatcggcaccacagagaggctcaaacaagagcttgaaactactacacaaagacaagagattgtagcatgtttcttacgtgattatcagctctcccctgaagagataaatgcacttagagaagaagagctgaatgaaaactttttcaaggcattatctcatgtccaagagatttatgccaattgcaaagtgttgcttaggacacatcatcagcgtgctggtttagagctgatggatatgatggcctgtgtatcaagaaggagcttatgagcgcctatgcaggtgggttcaggctgaatgtcgaaaattgggtgacactgacaatcctgaagttagtgagctttctgaaact

SEQ ID NO: 80228 - DNA, 400 bp, Glycine max
  Clone ID: PAT_MRT3847_43461C.1
aaaagagattattggggaaataccacaacaccaatccttcgtttgttcaaaccgaaacaacacggcggcgggcggttcctttctttctctgggaaggcgtcctaacacaacaccacaattccccacaggggtgggcacaaattgaatatagggatcacagacacagagagagaacacacgagttataattgggtaaacagctcaaaggatacactttgatattctgctgacatatgctgggtgcacaattgaaagcagacacgatttggctttcaaaaatacacggctgctattagataaggcctctagatgaaccactggatagttcagctgctagaaaaacacacaaagctgtccccgaaaaaatatagagggggcgcatcaatgaacacctcgtaga

SEQ ID NO: 80229 - DNA, 407 bp, Glycine max
  Clone ID: PAT_MRT3847_43462C.1
gggcccggggcgggaaacgttgggcggactcctgacatagtcacacgaactggaggatccggatcataggaagaaacctgatgctggaatgcgcgagcacaccgatctactgtatttgctggcgtagatgtgacgacctgtcctgccggtggaatcacgagcccgggcgggaaccattgggcctattacttcgaattgataacaaacttgctgcatctgggtcatgactataatcctgatactgacatgtgcctcatgaaaatagcgagtgaacagaatgggagctcactgcttaggagcgtaacgtgcttgagaatgttcaccgttgggcttgtggacgtactactgctctactagataggatgagggataccgatgatgatgaacttcatgacagacactatgat

SEQ ID NO: 80230 - DNA, 830 bp, Glycine max
  unsure (1)..(830): unsure at all n locations
  Clone ID: PAT_MRT3847_43463C.1
attgatgcagactaacaggganttctgcttctgcanggaatatccctaantntanncatntaccattgaagagtttcctcangtcacattccactggagaaggtccaagctgtncacacttccaaaaagccncatcnaccgcctnaagacattatagatgcagatggttgttggactggttccctnangnncgacntgttnaaanattggggantgnatntccatctgccnttaangccctnancnggtcncgcacttgtggtccaaaagacctnnctcctgcatattgattcanggcntgatggaggctgntnnncttccaccatcnaaccaatttctgnggtnccgaatccccntgtattcatcctcaccaacattaatcttgtcttcaataggtttgggnttntggngatattccacctncngacaatcttccttcaatgnggaagttngcacgntganattgtntttgggtcctcattcnaccaaatggngngatcgaagtnctgtccgtcttgttaacatcccgggaanccnactttgtnaaaaattctttncctaaatttgaatcacnctaccactttcgaatcttaaatnacaagtcttatgatcntantaggattacnaccttacatgcctnantggggaaagcccctnattgggccgttgcctggcttgtccaatgtnttaccttgccgctggggggncncgggaatngactctncctgngctttggggaactgctcaaatcatcggtccaacattgtgttgggatctcacccgggaatttcattgccctcccntccgctgtttcccaatntccctgtttc

SEQ ID NO: 80231 - DNA, 408 bp, Glycine max
  unsure (1)..(408): unsure at all n locations
  Clone ID: PAT_MRT3847_43464C.1
ctcggccaccaccctatngccncccttttttttttatcctctttcttaaaaggacaagggcaaatccgggactttaataacaaaaagggggaatacaatctcttacaatataaccaattcgcaaactctacccccccataaaacaggaattttatcaacaaaaccacccaactcaaataaaggcaactaacaaaactctgagggcatggaaaatatactccaaaaattatatataccctgatctgacccctaaaaggtgtcaaaaaaacggtccgagtggaactaaaaaattgcatatagctccataaataggggaaacgagatttcctaaaaccacctaaaaatatcagaaaacactttaaaacccccaaaaactactccaataccaacaaaagccactcttaaaaa

SEQ ID NO: 80232 - DNA, 793 bp, Glycine max
  Clone ID: PAT_MRT3847_43465C.1
ccatagtaatgtatgccattgccaatactactttacttcattcgcataccacgttctaatgtctattacaaataacctttcatttctagaaaaaggggactcattgtaccttctaagttctaaatatacacattgcctcaatgatacatcaagtcgagttttgacttctagtagcaaattagcaatctggtcaccaagtttcatcttccacgttcaatttttctttcatcccaaaagccaagtctgatgcccatttcctctgatggcttccatggacacaaatcaaacaagccaactctagcaattatgttgcatcttttatgcaagttattttatcacattatatgcagtcaatagagctatacattctccttgcattttattatacaaaggcagaatgcgagaggcatctttatatggaaatatttcagcagcatggatggattcaaaatttggaccctgaatttttcaggacactggattgtcagtgacaatagaaggaatattttcttgagaatatgtcaaactattcaaacaggatggttttgctgcaccatagtaaaagtaagccatgacttttgaccactcttctgcattgcgaatggctttatcacggaacaaaatcttgcctgctttagtaaagataatttctgggaatattgatacttgaagtgcagcaaccagttcagtctcaacaacagcatcaatcgcaacacatcttggtgagggcaacctgcagttccatatgatatgcacagccttctctagttcatcccgaattttttcattctcc

SEQ ID NO: 80233 - DNA, 277 bp, Glycine max
  unsure (1)..(277): unsure at all n locations
  Clone ID: PAT_MRT3847_43466C.1
gccgctcgagccggcctggccggngactcaatattaggccagcatgtctccctcacctgagctaagagaataggattctacacaattagaggtctttctcttgtctagagcttccctgggtgcctatagtattgaatgtacaacagcattgaatcagatattggaagcacaagctcaactcaactttgttggaaagcaccaccctaaggcttgatgaaatgcattgacgcttcaattaaccaatccaaaggcactactagttttggtattgcatccc

SEQ ID NO: 80234 - DNA, 292 bp, Glycine max
  unsure (1)..(292): unsure at all n locations
  Clone ID: PAT_MRT3847_43467C.1
caagcctctactatactgcttcagcttctgcttctagaaaattcagtgntgaancatgggnttcggctacnctctccggtagccaaaccagncctttcaggcaaatggggaaaggcttctctganttntntggcttccgaaggctcatcaaggccttcnttcctntcntggaaaatctcagaaggntttcaatccgtnaatggcttacagacctnatgcagtttggaancagtggagggtacaagaagggtgtgacggagcaaaactgaaaggttgccattaaccgggttgg

SEQ ID NO: 80235 - DNA, 970 bp, Glycine max
  Clone ID: PAT_MRT3847_43468C.1
attcatcatcatttcaatgaaagcgagaactctctgatggaaggatacaataaggtaagaaaattttattttggtgactataattaaggtaagcatttagttttagagcaacatgtgacacttatgatagtattaacatttcctggtgacgaaaacagatgctctctattgagaaaacaacaggcaaaatatgttacctcttgagcgcaaggcagctttcaattacatggggaaacagcaccttgtattggtcctggaaacccatccaagtcgagttttgaagaagctgctgagctgagaacgatttgctggctagaaatcaagggcagcataaacagttgaatattatctccaaaaacattgtagggagcgtactcgttaccatcagaggtgtgggtagaggtttggaatcagaaatcacaaagcactgtttacatacgttgacgttgcaaaataaatggcaaagccttttgtcatcattgccattgtaaacctgaagatgaagaatggtcggagattgagttggggagtttctacagcgattcaaatgtgcctcaaggaagccaaaggtgggctcatagttgatggaattgaaataaggcccaaacctaactgttagtaaaagcctccacatatgggccgtgaggcccgtaacgtgttatatattttatccagtgtaaccctagcaattgcatagcataacgtggatcctgggttgtgttgctcccgtgtcgactcttgtttattgtacataaaacgatcgatagtgtcgacttcgttcactttggttttttcaatcgcagtgatgataaatgtgaatcccagctcattatgaggccttgtcttaaggtctgggaatagaatcctccacttctatctgagcttctctctactctccaattagggttagcccgccagtactgctttagttttaggaggatgtggctcaatttctaacttcttcaaaaaa

SEQ ID NO: 80236 - DNA, 330 bp, Glycine max
  unsure (1)..(330): unsure at all n locations
  Clone ID: PAT_MRT3847_43469C.1
gggaaaacgcccgaaggggggcacggaagccnaccaccgcaagcggaggggggagagcccaacggagagaccgaagccgcaacgcgaacaccggaagggagcgagggcaccagcgccgccgcaaccgcaacaaccggcggccgccaaggcggaagaacacaacaaaggagggggggggcgccgnagacaccgaccccgaggaccaaccaaacagggcggcgacagagaaggccccagcgaccgcgaaaaaaccggcgaagccgcacgcacagccgacgcacggcaaaccgcaacgaagngccacaggcacgcgcggagacgcgccggccc

SEQ ID NO: 80237 - DNA, 252 bp, Glycine max
  Clone ID: PAT_MRT3847_4346C.1
cgtatatcgagcgggaggcatacaaacgggctgtgcagtaacccctactcatggatgagattactaactggctctcttagagccgacctctccttgaggccaagctgaacaattcgaatttatgccttgaggaattcacttcgctttctcatggtatcttatcagcctggtcttgagagcacttttatacactatatccctattttaagtgcctcttaccttgctctgtgttaacattgtgagagcaatgat

SEQ ID NO: 80238 - DNA, 291 bp, Glycine max
  unsure (1)..(291): unsure at all n locations
  Clone ID: PAT_MRT3847_43470C.1
ttcncgcanacnnagcnngctcngantncngctcnacgccanncnccacntnaacnncacaagctnnntncccanccaactangnnncaacncnnacnncnnnaaannatngnctnacnccannncnnnncgnctgcaagtgcagccccncnagnnncccccccncggnnnaagggnnccgnnagcnggccaatnnngnntgngntgggggngnnccgnngnnggngnctgntgtgggnggttctggtngggngngggngggnanccgnagcangtcnctgnngagntnnn

SEQ ID NO: 80239 - DNA, 575 bp, Glycine max
  Clone ID: PAT_MRT3847_43471C.1
cccacgcgtccgtacggctgcgagaagacgacagaagggaggaggaaacggcaggatatggttgggtcgggcatggagaccttactctcgtgttgtttttgccttctcaataatgtcagatatcattgcccctgaaggttggaatgatttcaacgacccttcaagagatcagactatcttctacggagaatacaattgcttggggcctggggctaatacgaacttcagggcaccttatgtacagaaattaaatgaaacacaagctttggcattcctcaacacaagttttattgatggcgaccaatggttggaaacttccaaataagcttagcttcgcatacctgaatccatttcctatttgttaattccttttccattcatacaaatgggaaataagtacacaaaataaacaaatggggaaaatagattatagacataattcattgaattgtgtatactttaaagtgacgaattatcaagagttgtaatttattataaatcctttatatctttcatgttatgtgctgtcccgaacaatttattgaatactttaaagtgacaatttattgaatagt

SEQ ID NO: 80240 - DNA, 388 bp, Glycine max
  Clone ID: PAT_MRT3847_43472C.1
tccacgcgtgcgattttgagacttaaattacacatacatcactggagatattgatcttcatttaattaattacatacaccatactcaaagaattttaagcattcatctctgaaaatatgggaaactgttgtgagccggcatcatcaatggagtgggacggcgaagattggagtgatttgacgacgtccaagaagacaatatcaagcaaggtgtttgacgaaactcatgctaatgctgatcatggtcatgagttgagtttagggaaagtgcaaaaggagaagtttatgggagcgctaagagcttctcttgatgccaattatggtaaggcaaagataaagatttcaaagaaagagttggaagaattattggagaagcaacaagaacaaga

SEQ ID NO: 80241 - DNA, 603 bp, Glycine max
  Clone ID: PAT_MRT3847_43473C.1
atatcacctgtatcgaaacttaatattaaaaacagatatgtgtgctttcactgagaagctttacgtgttaatgaggatgtcttgctgagcatttcattcaaacattcctcggtacacattcctcaacaccgcttcgagaccgacgcattccacctggaacaaagcacctgcactcatttccatgatctgatttctaccccacgaatcctaccctcctagtcctagcttcacagctcatggtgttgaggcgtgtgtcttgtggccagcttcaactgagcgactcagagctggctgatgccggacttgtgacggctcatgcgcatctgttcatcgccgatcctcagttcctgatgctcaaatcgggactgctgaaaacgatctgctgaacacattaaaaccaatggatggacacaaatggactggctagttaagccgccttcgatgaattgcctacaactattaggaaggagttattaagatcgattgcttaaaatcgattgcaataaagcgtgatacactattctagttgctccaaataaattggtaccagaaaacaatgtcctgatacatatgtggattatattgtgtgaattatatagtagc

SEQ ID NO: 80242 - DNA, 647 bp, Glycine max
  Clone ID: PAT_MRT3847_43474C.1
aacattaacttatttgttgtgtgtgctgatgcttaaccttttcttttcattctaattgactttcctccccaaaatttagagtaaatttgccttgaaccatatgctctcctagaatctaaacaaggtatcaagagataatcatttaagtttagggttcaattcatgacaaaaatcattcagcttatagaaggagaaaaagatacagttatcattcaaggtgagctatttggtcaaaagagcttgtgtatatacaaatcatggccttcatcaagttctaagctatacatatcattctagaattcagaaattcatgcaaagatcattactcacaattagtcgttcactcacagagtaaggtcaaactctcaccggtttttggttcaagctttttctttcacaatcagtctgtctattgactaacaattctactgtaagttcacactcttgttctttctttgttcaacatgcatattcgttcaaattcatcaaaagaaacacaaatctcatcttaagcatgcattcaatttaaaacaaggcatacatccatttcacaaaataaataaactacttcattgccataccaacaaagttaagttaaactgttccagatgctttaggatgagcaactacactactcatgcaaaaac

SEQ ID NO: 80243 - DNA, 294 bp, Glycine max
  Clone ID: PAT_MRT3847_43475C.1
tgtgaacctcgggagcgttttattctggtggggcaagcccctaggcagattggagcttgcgtatctggcatcgagagttggggttcctgtgggcctctggcatgaggccttattgtgcgggcccacgttatggtgcgtcttttcttcatgttgaattatgattgcgcaccgggggagtgggaataccaggcccgtccggacccagttacttacggccctaaatgaaggatccgccggccacaaacaaccgtagattgccactttggaccacatacactcctccgcgtgaaataa

SEQ ID NO: 80244 - DNA, 566 bp, Glycine max
  Clone ID: PAT_MRT3847_43476C.1
aggaagataaacagatcacagcataaacaaacacaagataaataaataaaattaaaagaaaaaaattgctaacctctttaatatatttaacccataagtattcaaataaaataatcataatttgtaatcttagacttttccttagaccttaaaatttttatctatgtatagcttgtttgggatgacggtgagataaactaaaatcaattatcaaatcacggcggatgtgaagcaacatatagttgctttgaaaaaatcatggtgacaccatgatttttgagatagtcaccatgattttaaatggtatccaaacatgctagtagttggtctatcttaccttgtaaaataacgatcatttgagtctttaactccccattaatcgttattatgggtatttgtatccatactttctgattgctaagttattctctattattagtgtgggttgatagttatagacgattgggagatgcatgagtatgaagatggttgaagtcttaataggtcgacatctaacgagtgagatacaactttcaatcaaatataatcaatcgatattttttata

SEQ ID NO: 80245 - DNA, 608 bp, Glycine max
  Clone ID: PAT_MRT3847_43477C.1
cacgcgtccggttctgttctgttccttttctaaacccacacaacatcgtgtccttttcttctcttcgatccactacgtgcctgttcctctgcttcaggcacatactcctgcaggttaaatggcaaggatcaaacctcaggctctgctacagcaaagcaaaaggaagaagggtccttcaaggataagcgccgcgactgttatattttatttcttgattcttgccttgcttgggtttttcctgtttgcttcgtacagacattggtccagcaggtcaagattgcaatcagaagatcacttgtcagtctccgagtcaaactactattttttggtagggtgaaaatacttttgtggactccaagaaatctgagctgcctggatatgctgtaagttttttccagactaccagtaattccttgtttttcaaccttttctagtcaagggtttgtttggtagaagaaaatattttctattttcatttcttgttttcacaaataattacaaaaatgccaaattgttttctatttgtttactcttttcaaagattcataaaggaaacaagtaaaaataaggtgagattttgtaattacctgtgaaaacaaatatgtttt

SEQ ID NO: 80246 - DNA, 356 bp, Glycine max
  Clone ID: PAT_MRT3847_43478C.1
ggcgggaaaggtttcggtcatttcttttttccttgctttttcttgctagaattgttcaattcggctcctatattcttgggaattttgtaattttttttttatatattaatttaacgcggattgtggaaattactactgatacacctgtgtttctgtctgtaatttgttattcatagaattttgtgaatagtgctgttataatcgaaaatactgatcatttgtggcttaggaaacttgtttttttttttgttttttttttgttttgtcacttggtaatttgctagtgcttctcaattattgaatttgagtccaacaatggtggcagagaaatgtcactttcaagagaacatggtaac

SEQ ID NO: 80247 - DNA, 698 bp, Glycine max
  Clone ID: PAT_MRT3847_43479C.1
ccacgcgtccggatccacccactggaaagttacaactagaaagcgctttcgtgggcccctcttacaagctggacgccttggcttggcttttcaaatgggaggaatatccaacttttttgttctctctctgtctgttcaaccatcaccatcatcattcacctgttagctcctgaatctgctgttgaatcaagaataatctagtgttgagttattttggtggagtattagagccatagagacgatgcctattgtcactaaagatatggattctgcattccaaactgcaggagcaaacccaggcttagaagtttggtgtattgagaaccagcggttggtttcggtgtcaaattcaagccatggaaaattctatactggaagtgcatacttagtcttgaatgcagtctttccaaaaattggccctcctcagtatgacatacattattggttgggaaatgaagcaaagaaggtagactcaagcttggcatcaggcacttgaactggatgctcgtgtagtatacagggaaattcaagcctatactatacattacttccttgtatcctttcttttttaattgtcttgcttgttgtgataataatatattactgttaattttctgccagtaaagatttttaggctgtatatacccttagtcctttttcctcaattggttcctcattctttttactcacaaagtggg

SEQ ID NO: 80248 - DNA, 631 bp, Glycine max
  Clone ID: PAT_MRT3847_4347C.1
ttttttttttttttttttttttttttgttttttggggaaaatttacaaaatattacaagattgccgtgtcaacggaaaactgaaatgtaaatgtttgactgaaaaatcaccgggggggaaacaaaaaaaaaaaaaaatctttcttctacatttttttaccctcaacggagggggactcatattcaatggaacagcaacaaactcaaagcagaaacactgtattcagatttcccaactcatctcacttttcaatctttcttgcacctttctaccactaacattctattttaaacaaatttagattccagaattttagataaaggaagcaaaaaatggttccaaaaataaacaaagaggtaaagagagaaactagaggttggaagcagagtgaacaaccttattctgtcttcctcctgagagccaaagcaaagtccttttagcaaaagatggcgccctagcttgagaagaatccatactataacaactcgtggttttcttcatcataatcgaactcagtccctcttccattctcccactttccaatatccatctcagacatagtactccttgtatcaaacttgcaattcttgcccttcaaatcatcatcatcagcactaccagaagcagcagc

SEQ ID NO: 80249 - DNA, 195 bp, Glycine max
  Clone ID: PAT_MRT3847_43480C.1
gcctatacgaacctaattcattatttcagggttattaattagaacccaagggaagaaggcgggtaggtggaaaccaaaaatggcaatggaaggtttttttggacaccaaatatttttactttcattttttggctggaaggataaaaaaatggtatggttcaaccttaaacttatttggatggaactggtaatagc

SEQ ID NO: 80250 - DNA, 681 bp, Glycine max
  Clone ID: PAT_MRT3847_43481C.1
gctgaagctgttttgaagtactgcatattagttcatctggataacaattttgacaaattcaatcttctcatcttcatgttgcagaaacttttctcacttatagatcaaacatcggtgccggacaaccctgattccttgcaaaatcatgaggttttactccctggccacctgattacactttatctcaaggaaaaactggaagattggctgcaaaagggaaaaaggcttcttctggatgagattgataaaaaaagcaagaaatttgatttcagtgacattgttcaggttaagaaagtcatggataaaaattcaccaaagcaagtcagtacagcagttgaaaatatgttgaaaactggaagattggttacacaaacgggtctagatctgcagcagagggcaggttatacagttcaggctgaaaggctaaattttttacgttttgtatcacattttcgtgccgttcatcgaggggcctcatttgcaggacttcgtaccacaactgtgcggaagctgttacctgaatcttggggttttctttgccctgtgcacacacctgatggagagccctgtggattgttgaatcatatgacttgcactagtaggataacgtcattctttgattcttcaggaaacgtgaaagattattttaaaataaaaatgtccatcctaaatgttttattg

SEQ ID NO: 80251 - DNA, 197 bp, Glycine max
  Clone ID: PAT_MRT3847_43482C.1
ggctcgagctagttctagatcgcgagcggccgccctttttttttgtttgacttttagtttggcattgttatgtgttttttttttgatatgtctgtctgccgattcggtttttgatttatctgtcccattgttctttgtgattctaacgccaagaagagttcgcccgcgctctctccgaccaacaaccacatgcccct

SEQ ID NO: 80252 - DNA, 539 bp, Glycine max
  Clone ID: PAT_MRT3847_43483C.1
aaggggggccggccccaaaaaaccaaaaaggtagggtaattttttcgccccccccattttttaaccctacccggttttattttccctaaccaatttttgttttcggaggaaggaaaaagcgcggggaaagaaaccggcggataaaccaattaatcaacccagggcaatggggttccaacctccaaaaaaaagggcccctcaaaacggggcccacccaaaaaaaacaaaagaagggttggggatttaccgggggggggcaggactaaggaacacccccgggccccattatccacagaagggggggggccccgggtcatttgaaaattcctttggactataacacagggggcccatttcaccccaaaacgggttcctaaccaaccaactggaaacgggttgggctttggaaaaaagccttactcaaggccggggtgggaaaaccaagggggggttcaacattggggaaacccgaaccagacaccgggggttaaaaaaaagacacccccgaaaaagccaaagggaggaatttgacccgacaa

SEQ ID NO: 80253 - DNA, 555 bp, Glycine max
  Clone ID: PAT_MRT3847_43484C.1
cccggctgcgagcccacgaccgtccgagagggggggcgagaagaccacgtaagcgtacggctgcgagaagacgacagaaggggggggtagcgcagagaaagaactagaactagggtttcatctttgccatcagtaaacgacaatgatttacgacgttaactctcctcttttccgatccttcctcagccagaagggaggctcctctgataagaggaaatcggacgaacagaagccaaaagagcagaaacccaaagccagcgagaacaaacctataatgactgagtgataacagctgagctgcattcagttgtagaatgaaaataggtggtaggtattgtatttggtgctaaactaagatctttttggctgtgttctgaagtatatgccggcgatgttggtctttgttattgtaatggtttgattttggatatggttataacgaaaacttataatggacacaagttgaacttgatgcacgcatgacacatgcaatgaagtcactcgtttaaaagttgtttgaaaaaaaaaaaaaaaaaaaaaaaaaatatcctacca

SEQ ID NO: 80254 - DNA, 388 bp, Glycine max
  unsure (1)..(388): unsure at all n locations
  Clone ID: PAT_MRT3847_43485C.1
tccggagtagcgcagagaaagaactagaactagggtttcatctttgccatcagtaaacgacaatgatttacgacgttaactctcntcttttccgatccttcctcagccagaagggaggctcctctgataagaggttttccccccctctatttctctcttgtcaatcgttggggaaatcggacgaacagaagccaaaagagcagaaacccaaagccagcgagaacaaacctataatgactgagtgataacagctgagctgcattcagntgtagaatgaaaataggtggtaggtattgaatttggtgctaaactaagatctttttggctgtgttctgaagtatatgccgacgatggtggtctttgttattgtaatggtttgattttggat

SEQ ID NO: 80255 - DNA, 2431 bp, Glycine max
  Clone ID: PAT_MRT3847_43487C.1
aaaaatgaagatatttttccaacaatataataagctgtcaacaatatacaactttatacatggtagtatatcaaaactatgtctagaaagaataaaaaaatcaaaatacaaatgccatttggagacatgtacgaaactagtcatacaagagttcaacaaagagacatttaaaaatgaagatgctctcccaagaatataataattgtgaacaatatacaactttatacatgatagtatatcaaaatcacgcctcaaaaaactaatcaaaatgcaactgctaaccacagattccgctacttttccaatgatctcctcacatgagaaccttcaacctagaagaattctttcaatgaccaggaatcaaggcacttttttggactctcaaaagatattttggtttataaattatagtatatacaatagactcaatattaagaggcttgtttcaaatgggaggtaaaattaaaaggaaaactttttgctgtgaacttatgtagattgaaaagagtctaaacaaagctaaacagaatgggaaaaaccaaaaaatgtaattaacacttctatctccctgttgtcaccattgaaactgtcaaatcatttgacacatcaaggccttcgctataagattctccatcatcaagtatcctcatggaagtagtgagcaaaggttgcttaggcaaaggtagagctgttgattcacttcccagcatcaacaacacagatgacatgtttggtctacgagatgctgaatcttgcacgcataacatccctatttgtatgaacctcaacgctttagtcttaggaattgaatcaccaagggaaggatcaacaagctccattactctctgctcactccaaaggtgccaggcatatccaatgagacttgagtcatctgtgtcacgaaagcttgtgttcttgcggccactcataatctcaagtagcaatacaccaaaactatagacatcagatttgattgaaaacagaccttccattgcatattctggggacatataaccatatgtaccaaccactctgtttgtgttggcttcattttggtttcccccaaatattctggccaagccaaagtctgaaatttttggattcatgctttcatccaacaaaatgttgcttgcttttaaatcacgatgaattattctaagtctagaatcccggtgcagataaagtagccctcttgcaatgccctcgattatttcaaagcgttttgcccaatctagttgtgtttgcttcaccggatcaaataaaaagcagtccaagcttttgtttggcaagtactcatataccagtatcttttcttccccttgaatgcaacaccccaatagtctaaccagatttctatgttgcagtttggctatgagcaccatttcattcttgaactcctctaaaccttggctagactttcttgaaagcctcttgacagctacttcctctccccctggaattttccccttgtagacaggaccaaatcccccttgtccaagcttattttcgtccgagaaattgtttgttgctgctagaatgcagctaaaatggaacaatggaagttctgctccacttagttgattcccttccaagcctaactcacctgaaatttctgataagcctgtacttctcgttagatcaaaggctggtatttcgctattgttgttgaaaccagaagctgaggaaactttaggttttctcttaaacctccataccagcaatacaacgattccaatgcagatcagccctaccacaacagctaatattatccaaattttggtctttttccccccatcgcctaaatcagcatcggcaagacggatgtggagtaaacttccaagattattttgagagtgttgaacatcaactaactctccataccaaatcatgcacccgattccaatagtatatgaataagcagtacaagaagtattctgcagacaatacctctgacaatccgcatcaccaacaaaattctccaaccgtgcgaaatccggaaacttggtacacctttgctccaagaaaccatcttctccaacactcacctcacgatcagctccagaagaactattattagcacttctctcagcctcagccttcagtggagtcctcctcccacacccccttgtccaattcctattattccactcctcccaatgcattggctcaaacccttccatgcaactacaaaaaggagaattacccgtatcacacactgcaaaactaccacaaaagttatacttctcacagtcatcaaaaggctcaaactgtgtcctattccattgtttcccatctgcatccaacacgaacttcttctcaaacccatcccaagttatctgaaacctcactttttcagggctattccatttgtatgtaaaatattcctctcctttagtgtctgtgatgactgtaaagccaaatagagagcttc

SEQ ID NO: 80256 - DNA, 376 bp, Glycine max
  Clone ID: PAT_MRT3847_43488C.1
attattcctttgtttaaacttattttttgtttttttatacttttaaacctttcattacgagaccgacctattgcatttatatatttgcttaagagcaaagggcaacgcacgcctttaatggggggggggggcccaccccaccctaattggccaaaaaaggaattaacttctcagggtatcaaaaaaacccactcaaactgactgtttgcccggctggactggtaaaaaattagagggggggcgggaccagccaaaaattgtagcccccagatctaaaaaaaaacatgtttttcactcccaaaaacgggagtccttaggcccctgggacaaaaaaaacggcggacacaatgggggccaccggggtgaataaaaatat

SEQ ID NO: 80257 - DNA, 516 bp, Glycine max
  unsure (1)..(516): unsure at all n locations
  Clone ID: PAT_MRT3847_43489C.1
acgagctccggcgaggaatatgctgattgcaaaatcaactggtccacaactacggtgaccgactgcaaataaccaaaaaaacaaatggaagatagtgaccacagacggaggcagcgcagacggcaagacagctgccaggatccacttgtcgaccagaatgtgagaagaaggaagatgaaattaggtcaccagaagaagtccagaaccaactgtttggccatgtggtcaaaatactgattctttttccacgtgttttaattagaaaatacataacagacaaattaaaaaaaccatttataacaaaaaaaacccacagccgtttatttattagacacacatggactgcacacaatacttgtccacaatgccaaagttggattgacttgtgcacgctagaagttgtcgttctgttaccccctttctcacatacagctctaagtttcctttgttatgagtacagaactatcacatcctctaccacatgcattntatttgtctgttccccttaattggatt

SEQ ID NO: 80258 - DNA, 913 bp, Glycine max
  Clone ID: PAT_MRT3847_4348C.1
tcctcgcgtccgtacggctgcgagaagacgacagaagggggagtacgagtacattgaagaagatatctttaacaagagcagtctccttctggagttgaatccggttcacaagaaggttccggttcttgttcatgcccagaaacccatcgctgagtcattcatcatccttgaatacattgatgaaacatggaagaagtatccattgttacctcacaatccttatcaaagagcacttgctcgattttgggcttattcggcggagcaaaagcttatggatgcagcatggattgctatgtgtaccagcggggatgaccaacaaaaggctgtgaaagtaggcagagaactaatggagaaaatagaagaagagattaaggggaagaaattttttggaggggacaatattgggtaccttgacattgcactaggatggatctcttactggattcctgtttgggaggaagttggatcgatgctgataatagaaccattgaaatttccagccatcactgcatggatgaccaattttctcagccaccctgtgatcaaggacaacttgcccccaagagacaagatgcttgtttactacagcagtcgcagaaaggcactttcttcaacttttctgggctggttcaaggtttaatttagatctattccttcctctatatgtttcttatatggtccacgtacatgtgataggcccagatattggattggcttaatagaatacgaataggagggaatcatactggctaagtttgtctgttgggttttttggctattacagaccccctctggatgtatcactactatatatatggtacattacaacccgacagtcccaagattataaattttatttgttctgttatgtataattaataagtaatattataaaataaaaaaggttttatat

SEQ ID NO: 80259 - DNA, 381 bp, Glycine max
  Clone ID: PAT_MRT3847_43490C.1
aggagattgctaacgagctttttcctttattgctagcgtacacggacgtctttatggtgcgggttctaagctttgaaaacgctcgggctgccatcgacatccaaaactgaaccctaatccaaagacatagtcatctcttacaacccctacctctctggttgtattgcgcttgacagatacgaccacactaacaacaaactccacatgcttcctctacttccacggatgaccacttttgcgtcgaatcgcgcttgtacttatcactccaacgatatctcaacatgtcgtgctcagaagccaacataatagccatctacctacacttgagactgataccacacgaccctatacgtgatgactacaaagacggttggaccaccc

SEQ ID NO: 80260 - DNA, 487 bp, Glycine max
  Clone ID: PAT_MRT3847_43491C.1
ctcagttgtaaggagacaatctccttggacagccacacgataatacttattctcttgagttgttcccgctaattctcctttcgtgctaccatacaattattgttctttcttctgtgttcaaccaatttggtttggcctgccaaagtgcctacatcctaagctgactgctaggtattacggtccctacttggtgctgataaaggttgaggtagtggctttccaacttcaattgccaaaacatgcttgaattcaccctgtcttccttgtgttgcaattgaagcgagctgtgggtcaacaacatctagtggaggcagaactacagcaggagttacagctagatcctattatttacttgccagctaaggtttttgctgagagtgtggtcatgcagaaggatgagcagatacctcaagtcctaattaaattaaatggcaaggaaaaactgaggaagaggcggcatggaagatgtacaagtcattcaggacta

SEQ ID NO: 80261 - DNA, 184 bp, Glycine max
  Clone ID: PAT_MRT3847_43492C.1
tgaattcaaatatgatgcctttccattctcttatccatagcccgagctcccaattgacattgccattccctcagatgttcacttgggactaagtagactggtataaaatacgcctatgagggtgcgaaacatgcagaagcatttttgcggatgctagtgctttccttcgacagaaaaataagga

SEQ ID NO: 80262 - DNA, 404 bp, Glycine max
  Clone ID: PAT_MRT3847_43493C.1
aattttcttttccttggtgaggcttggcagtgaaaatagattgggatgcttgaagcccctagggaaaagtaatatccttctctgcgataagaggaagcccaccacctcagaaaacagaaaacagagtgagtgagtgtgttgtgtaatatggataaaagctgtcatccctctagcaatactagtataagcacatcctctgctgccaaccccaacaacaatagcagggatcaatatcttcgccatctcaacaagctctctcaaaagatctccaaacccatcattaagaaacccgtctttgatcctcctcaggcccaagtcccaaacaatcaggtgcagcatcagccgccggtgtacaacatcaacaagaacgacttccgtgatgtggttcagaaactgacgggctc

SEQ ID NO: 80263 - DNA, 339 bp, Glycine max
  Clone ID: PAT_MRT3847_43494C.1
tgtttgtataatgaggagtgctagcaacacactcctcctaacacacaccctatcattgcttgaaatttattgaaaattacaaaatcatgagagagggacattaaagatgatgtaggacccactatcttttataatttccaagaagagaatgtgttcaaaatagtggagtggtggcatttctgttgtataattgtaagagatttatgagaaattttctgtatcttctaagagaattgttttggttaataattgcagaaacaatagtgctttgttgaaaaacatattttcaaaaaaaaccgggacagggtttgataaaaaaaaaaaaaaaaggggggcccc

SEQ ID NO: 80264 - DNA, 558 bp, Glycine max
  unsure (1)..(558): unsure at all n locations
  Clone ID: PAT_MRT3847_43495C.1
atacagttcactctcagtctttgccttgcatccattgtacctgagagtacaggcactttctaagaacatacccgaggcgatcaagaaagagattgaaaaggcaaagcagcaactagatgggaaggatgttgattatgaggctacaatggctactaaactctcaattgctaagaaagtttttgctcaagagaaagatttgatacttaattcaagttcctttaaggagttcttttctgagaatgagggttggttgaaaccctatgctgctttctgtttcctgcgggacttctttgaaacatcagatcgcactcaatggggtcattttgctcattactcagaagataagctagagaaacttgtatccaaggacagcctgcattatgagataatttgcttccactactatgttcaataccatttacatttacaattatcagaagctgcagaatatgcaagaaagaagggagtgatactaaagggagatcttcctattgnggttgacagaaacagtgtggatacctgggtgtatccaaatttgttccgaatgaacacttctac

SEQ ID NO: 80265 - DNA, 1152 bp, Glycine max
  Clone ID: PAT_MRT3847_43496C.1
cagagataatcacccagctactttcaaccttgttggaccactctaaattagtttaataatacaacactttgtacagaataatactattaggaagggggatatgcttgagctggttgtaaaaaaattttgacagtaaatcttagataacagttcaaaaagttacaagtaaacaaaagtgccatactttcaaccgcattagacatgacctgaaggaggtataccttctgaaagagtgatgaatcattcatttgggaaagtgaaattagtgatacccagcaagagtttgtttgaactccaaataatgaggagggtacccaggggaattagatcagcatctccaacagatcaactgcacgtgctaatcgaataatgctgttgcatgaattttccatcaaaaccaggagaacagtgttaagtcctcaacaggacagttttagtgcagaaagcaattcattggtccttcacccgttggtcaaaggaacaatttaacattctcaagcaacctcaggagaagaatctcttgccctatgattgtcttcctcttcatcatcttcatcataatcagtggaagcaggttgtccattaagatccacattaataccattcaactttctgacaaactgtcccctcacgcgaggccgcctttcagcgagccgttttctgttgacatacctaattttcttatcaaagcagcgctctttccttttctgtctaaacttcatcaatgctgcctctctcctatcaactttacttatttgtacttcacatgaacttgaacttcctaatgatggccaagaattagtagaaatctgaccaggttgtaagcaaatgttcattggataatatgggaaatttgtcatcccattcgcatgaggaggacattggggaagatgattgtactgtgcaatcatagaagaaccagcatgaatctgcaggtcctggatattcttttgatacaattgtgccgatgatggcatcataacgtgattaacaactcctgaaatataatatggataagcatgttgagcaggcacagaaccgtgacttccatttcttggatgcaccactccctgagaatgttcttccttgtaatgcttttgctgtgaaacttccatcgatgcaggtggagtacaagatctctcaatagagaaa

SEQ ID NO: 80266 - DNA, 1010 bp, Glycine max
  Clone ID: PAT_MRT3847_43497C.1
tgcttcttctaaaaaccccactctgttatctcaacctaaacctcccaaacaccccatccatggcgggagcaacaggcagaaccctcttcaccctctccctctcttcctcctcttccctcacgcgcctctctctcatccccaagcgcgtcccactccccaaacccctccccctcttccgccgcttccgccctctctgctccgtctccgccgccgcgccggaagctgccgacgcgaagcactcaatactcctcgagaggctccggtcccgacacctccgtgacgccgcgaaggccgcccccgaaccgaggaagaaggagaaggtcgccgccgcagccgcagccgccgccgccgccgccgaagcgaaggagaagaagaaggcggttgcgagcttcgaggagctgggactgagtgaggaggtcatgggggctgttagggaaatgggaattgaagttcccactgagatacagagcattggcatccctgccgttttggaagagaagagcgtcgttttggggtcgcacactggctctggcaaaaccctcgcttacttgcttccccttgctcagttgttaagacgggacgaacaattgaatggaatactgttgaagcccaggcgtccacgagctgttgtgctgtgtcctacgagggagttatccgagcaggtttttcgagttgcaaaatcgataagccatcatgcacgattcaggtgtaccatggtaagtggtggtggccggcttaggcctcaggaggattcacttaataaccccattgatgtggtagttggtacccctggcagggttcttcaacatattgaggagggaaatatggtatatggtgacatcaaatacttggttttggatgaggcggacacaatgtttgatcggggctttggtcctgatatacgtaaatttataggcccattaaaaaatcgtgctttaaaaacctgtggcctaagttttcagaccatttttgtaactgcaaccattacaaaagcttggcaaaaatctgat

SEQ ID NO: 80267 - DNA, 112 bp, Glycine max
  unsure (1)..(112): unsure at all n locations
  Clone ID: PAT_MRT3847_43498C.1
tgagtgctttacggacanctggattaagaatgtacggtttctaggggcntcgnaatntcaatccttggatactatgttgaganctggcatagattttcattctaaggtatcc

SEQ ID NO: 80268 - DNA, 328 bp, Glycine max
  unsure (1)..(328): unsure at all n locations
  Clone ID: PAT_MRT3847_43499C.1
aatcaacttcgttacaatgtgtccaaaggcatctccatcgatatcaaaccttgacaaaaggggttcggatggctttgatcagatananaaccactatgatcgattcaaaagaaatcaagtccccctacttgaatggctattattgtgaatagcaacaatgaaaagccatttggtgggggctaataatattaccaacaatgaaaagccaaagccaccacgtcgtaattggggtggtagatcatcggtttcaattaagttgtgtcaactaggtgtaagtatacaactacttaggtttgntctgattttttcccttttagtgctacatact

SEQ ID NO: 80269 - DNA, 170 bp, Glycine max
  Clone ID: PAT_MRT3847_4349C.1
accacactaggcatctctgaatggcaatataatataagctttgtacacagtgcaattaagtttcttcgttgcgctttctagagctagctagagattattccatctctctgagctgctcgtcgatgatgctcggtggaaccagcggtacgatgtgcagctccagcttcatg

SEQ ID NO: 80270 - DNA, 614 bp, Glycine max
  Clone ID: PAT_MRT3847_434C.1
ttttttttttttttttttttttttttttttttttttttttttttttttttttttttttttttttttcacccaaaaagcataaaccaaaaaccccttcatggaaaaaaggggcttaaaccacatggacccatcaaagggcctaaaacccaaaaaaaccccagaccctaaaaaatcctttttttgaaaaacccattaagcgaaaaagcaaagctaaaacctttttttaatccaccccctaagggcgacccaaaaaaaaattccaacctaaataaaaaaaaaaaaaaacaaggggttcataaaaccaaatttcatatattaaaggatcatcgggacccccacccccccccccaagaggacaaaaaacttcacaaaactaaccctaaaaccactctacccaccaaattttaacttcctaccccctttttaaaccgaagcctttttggggggaaactttacactcttgggtttaacacccttaacgggggcttttttaaaaggcgctatttttttcgttgccggtttcgaaaaaaaagctgttttcttccctgggaaagcccgggccaacccccttaaacccttggggggcttcgctttgggctttgccgggggctggg

SEQ ID NO: 80271 - DNA, 536 bp, Glycine max
  Clone ID: PAT_MRT3847_43500C.1
cgtttttgttagactatatattatcccatggtgtctagtggttctgatgctgatcgaaataaattttaatcaaatgattacgaacattataatgttattagtcaatgtcacgcatgtttaacttatgtttttaaggttacccaattgggttacacacatgaaagaaggatagacttggggttgatatagtcgagttttagaaaacatatatatgtaagtcaaatgaaaattgtttcatatttactaattacaaataatattgtttttctttctgtataatagcatcactaaggttaaaagctaaaacctcatgcaaatttactcaaacttcctcactaagtagttaaatgatattgatgtaatgactaatattatactatttttttgtttttcatttgaacataattattgatttaccatgaagatttaagttaattgattgagatgtctatgaattattataaattttttaatatttgagtttatttttaatggataaaaaaagtcactaacttcgttatcaattagagccagca

SEQ ID NO: 80272 - DNA, 133 bp, Glycine max
  Clone ID: PAT_MRT3847_43501C.1
ttttgttttttcattaaacccgtatatgacttataaaaccggggttaagctcaacagagagtggctaaccgctctaatatctcagagaaaacaattctatgatcccatactctagctctttttactatctgta

SEQ ID NO: 80273 - DNA, 120 bp, Glycine max
  Clone ID: PAT_MRT3847_43502C.1
attgacactatcagagacaaacccatccgggacaatctactcctatcatgacactagcgccatggtcgaagcaaagtctcgaaccgtgggcaacaccgagcgaactggatgccaagccgt

SEQ ID NO: 80274 - DNA, 247 bp, Glycine max
  Clone ID: PAT_MRT3847_43503C.1
gcccccttacgaagccttggaattgggcttgggagcatttccccgtgcccagacagacccatagagcgcacgtactcagtcatgagatcctgtcctctagatgtgtcgttgcgtgtcttcctgatgctcacactgagcgcgttctctttcttatgcggattacacgccatcttaggatcctcttgctctcttttatcagggctctttattcagccaacggagctgattgtgcccctgcgaatcatgc

SEQ ID NO: 80275 - DNA, 448 bp, Glycine max
  Clone ID: PAT_MRT3847_43504C.1
ggccggccttttttttcttttgtgttttttgcataaaaaattatgtgcctgtgaaaacatttgtatgaggatccctatccaaccctggacagggggtccttgtcacaatactaaacatgtggatatctatggaaaaagaggccacctccttaggcctgacttaccttatacttcccagatacaaaatattcatctataagtccgttcataattgtgcactggtatcgattcaatgggccaatcattcctagagcatgcaatatgacccgataggtctggcctgcttgctgcctaaatttcattcctctttagtactattacaccttgcctctaagggaaaagtactgcatgcgacagacctttctggggaaatggcggcgcattgtccgcatgacacaatttcgttaagctgccagagcatattaacctgcatttcgttgaccttgaa

SEQ ID NO: 80276 - DNA, 478 bp, Glycine max
  Clone ID: PAT_MRT3847_43505C.1
agaaaaaatttccccctgggtgcccgaaccaacaaaagttacaaaattccccccccatcttgccaaaaaaattttagaaaaaagggggggggatgcttggggggggctcattgataattaagggagggggggcacatttaaaataacctttttttttaccccaaaaaaacccctgttagggggatgaatttgtaactaccaaaaaaaaaccatatccaagttttggggggccccggggttaccttttaagaaagggggggttattgttggcaatcaaaaaacccccccccccccagaaaatatttttttttttgcccccgcccccaacaaattttttaaagggggggggggccctgtacttccttaccccttatttttgggggccctggttccgaggggggggggggggccgtataaaaagggggcctccccctaaagcggcgggatggggaaatcgttttcaccatgtccccccccg

SEQ ID NO: 80277 - DNA, 137 bp, Glycine max
  unsure (1)..(137): unsure at all n locations
  Clone ID: PAT_MRT3847_43506C.1
aaanaaatcatgcggtgtagatttttctaaaaaaatatgggttcattgtatcatttttatggtttaaaaccatttcacgtctggcaaaatagatattaaaaataccgggaaaaaataaaaagcaccctctttcttac

SEQ ID NO: 80278 - DNA, 516 bp, Glycine max
  unsure (1)..(516): unsure at all n locations
  Clone ID: PAT_MRT3847_43507C.1
gggtctctctaaaaatctctaaacactgcgaaagcttcnagagttgcgcaaactccccctccatttctgagttcagacttaaataggggggcttgtgggggcgtgtgcgcttagcgtgaatctgggccgctaagcgtgcgttantgagttttgagttagcgcgcgtgttctcnctcagtagatggggtcaagtggggcgcttagggggaggagacctcgctcagtgagcatgcgcaactcatccttcttccagagtcttcctcgtgctcagccgcgacagtgtgncgctcatttnaaatcgtgtcaaggggcaatgcgttaacgagcctttttttttttacttttatcggggaaaacgagccggttaaaaatctaaaatcaacaccccgcgtaactttcttgcgttttaaagaactacggagggttgaggtccttatcncgattgaggagacgtangagcaaaaggccccacttttgtgnagcccaaaaaaaaaaaaaaaaaaaaaaaaanaaaaa

SEQ ID NO: 80279 - DNA, 886 bp, Glycine max
  Clone ID: PAT_MRT3847_43508C.1
aaaataatcacattccggccgttgcttgcagactatcccaaaccaaaaccaatgctcagaataaaaagaaaaaataacctctgattctccctttattttctgaattgcccctcttaagtctcaaccttctttgtctcctctctctctctttctctccttcctctctggccatgattggaagtaaagatcgttctgctgactttgaaggtgagaactccaggagcaagctttcaaggcacaattttgaggccaacaaggagtacccagatgaaaaaggtgttgaatttctgagggattcatcagaagtgggtggttgtggtggcagctcagggttgcaagagttgaccctcagctacctttgtgacaacccaaaattcaatcttgctgagaaagagattcctggtaaaagcttgttggagaaaatgagccacaaaggtaaagaggttgtggtatgtgagaattcatatcaagatgggaaatgggtggaaagagatttcctcagcctgagtgagccaagagaagattcttcaaagagatcccttgaggaagttgttgagagagagagtaatagggagaagaagccaaaattagagattctcaacctctctcttgctttgcctgatgtgtcactttccctcacagcctcaaacgccttgcaaaacggtggtgatcatcaacaacaagttaggactaatccttgcagccatcatccactactcacacttcatattccaatgactacactgcagcttctttgtcttactcttattcccaccctttctctcacaacccaagttgttcactcacccacatttaactgatatgtttgattactcagtgagccaagatgaccaaatttggactgtggagagggaactaatggctc

SEQ ID NO: 80280 - DNA, 728 bp, Glycine max
  unsure (1)..(728): unsure at all n locations
  Clone ID: PAT_MRT3847_43509C.1
nnnnnnnnnnnnnnnnnnnntattttttttttttttttttggaggggtacgtgaccgagcatggaataaagtatcaacccaaatatatatcatgttatctgttaaattgagttattatacaggaatccctactaaaatggacatcgcactacctcttacgaaaaaagagtaaccttagtgcaagcaccccaacaaaatacacaattcaaaatacatggcagccaatcacgaccagctggcagtgatagcactaccttaaattatcattccctcatctatgcgtagaattattagacaagcaaaacaacactgcacaatgcggtccccgccgacaagatgcgatctccagcacatacaggcacattccacacgagcgatacatacaatacaccccctcaaaaaccaacaaacaatcaaataaactacaaaccggatatcaaactcaatccttgctggttgaagtaggtctctgggcacccgggggggcggttggcctagggaaattataatcaaattgcatgccagcaaagcgcggggcctccacataggggctctgagacgaaaaatcaggacttgaagatttgggtgatgtactaggagaagtatcattgccagtttcacttccattcaacttgtgtactgccttatttggtacactttcattctcgtttccattggctgatttaaccctctggaagattttaccaagagtttttcggacgcgaggg

SEQ ID NO: 80281 - DNA, 312 bp, Glycine max
  Clone ID: PAT_MRT3847_4350C.1
tgttgctagggataattttattttatataaaaatgtgttcttcagagcccaggactgctgcagtggttagagggacctgccctccgtaggtctagtcactcctcctcttcccacatgcgttcagaacctagactagaaaagcaaggaggaaatcagagcaagagcttcaaacccttgccaatccagatattttgtgacctctggggtcacgtataaggtcagcgtttctggtcccgccggaatcgcactgcagctgtgattggggtcgaacagcctcataaacattcttcagcattttggatcattttctcc

SEQ ID NO: 80282 - DNA, 574 bp, Glycine max
  unsure (1)..(574): unsure at all n locations
  Clone ID: PAT_MRT3847_43510C.1
acgaggaactagtctcgagtttttttttttttttttttttttttttttttttttttttttttttttttggcatatctaaacttttaaaaaaccctttaatttttgcttattttgaaaacatgccctccctaccctgatttgaataggggaatttccgggtccctgttccttttttttatttttttagaaaaaaacaaaaattggaagaaggttaaaccttaatttttataaaaagcaaggggctgggggaacttcatgaaactaaaattccctcacatttttgttctcattattatggggtggccacattttcctttgcctgtggagcaattttttctccatcacttccaggttcactgccaggaactcccaggcttaacagcacttcctcccactttttagcaggccccttccaggaaagatcttgagccatgcagttccttattatttcttggaaagctcgagttccatagactgcaaggggccttttgacagtctttgctatagcattcacattagcttgatcccaagcattccattaaacactgaaagcgccgatttggaattcantgaa

SEQ ID NO: 80283 - DNA, 451 bp, Glycine max
  Clone ID: PAT_MRT3847_43511C.1
cctactcgtccgcccacgcgtccgggttaagcggtgagatttgcgaatctgagaaatggcggattcttctcgggaggagaacgtttacatggcgaaattggcggagcaggccgagcgttacgaggagatggttgagttcatggagaaggttgcaaagactgtggaggttgaggagttgacggtggaggagaggaatctcctctctgtggcttacaagaacgtgattggtgcgaggagggcttcgtggaggatcatatcctacattgagcacaaggaggagagcaggggcaatgaggaccacgtggccattataaaggagtacaagggcaaaattgagttcaagaccggtgcagacaggaaagaggtctgaaaaagtactttgcttgcttacaaatccgctcaggatatagctactgctgacttggccccactcaccccattaggttgggac

SEQ ID NO: 80284 - DNA, 507 bp, Glycine max
  Clone ID: PAT_MRT3847_43513C.1
gatccacatctcaaatcaaaagccgaatattctaatttcaccgcttcgaaatccattctttattgccaaaattttgaaaccctaatatcccaatttcgctggtgatctttccaaagcgtcatcaaaccaaacaatttttcgtcatatctgtctccgcaaggagagtcgctttgacgggaagcaaggatttccgctgcaattggaatcgtcggatcaattcgtcatgaagtttctggagtgttctgccttagaacggcttaacgatttcttgggtaatttgaatctgggagaacgtactatcaaaggatgccttgaagcctatagttgcaaacatgctggatcggataaaaaactctctatcagtttggagacagagattcttgattatcttgggaaatcatccgacactgattcctcctcaccagatcaaaccttattaaccagaaacagccgaaagacattggctaacctggctccaaccctgtatcacaagaatcccgataatga

SEQ ID NO: 80285 - DNA, 494 bp, Glycine max
  Clone ID: PAT_MRT3847_43514C.1
agagaacttcccataaatccaacagagaaacattgagaagagataatgggtctatttatgaatcttctattgaatcttgtgattgtaaagctaccagttctgtctcaagtgtggtaccaaaggaggcgtttatgagacagaagtcaagaaatagcaatgattctgtgttggaggaagaaatttcaaatgtcaattctggtggctttgaagtttatattaacagatttgatgcatcaaaaaacacaacccatgaggatgacaaccatcaaagtcaatatggaaatgtatcagtaacaagacacaaatatggacgcccaagtgtgtcaagtgcttcaaacaatgataacactgtagatgaatttgaaacagagatcactgctagaggtgtaaatgtagtcaaagggggaaattatcattctgatgaagcagcaaaatacaaacgcccttctgaaacaacaatcaaaggaagcatgaaagctaaaaagatattacat

SEQ ID NO: 80286 - DNA, 737 bp, Glycine max
  unsure (1)..(737): unsure at all n locations
  Clone ID: PAT_MRT3847_43515C.1
aattcggctcgaggcagagaattctatttaatacttgttgaatttctattcataagaatagtgacagttactatttttctgttttaatggttctctattcaacaataggttggaatgtcaagctatgggataattttactctgaataggaaaaaggaaaaaagaaaagtagaaagaagtcttttattttaaaacacagttcagtcatgtaataagctcagtcaaatatattcacacatttgatcttgattcagtatttatcattcgaagacatggtttctagtaattcgattgagacatattaatcaaacttttcaaaactattgagttctttcctttttttcatattatgttctgttcactcagcatttggtgctattttctctttagattttcctccttgaggttcaatctggtcatgtagatctaaataataacttatttgtaccaactaataactttagagaatcattttccattcccttgatgcatttgctccttatttcctctttgatgatgtgtttggaatgctgtgccaaggggcttttagtttgtaaagctatttgcaactggaactataataaatcacccattttttagtataaacttttgtagcatacggccattgatatgctgagaaagctctatttccaggtatctgattttgnttcatctgtatttgagaatgctgtaaacgtcttctattttatggtctacaaaatccttttatattattaa

SEQ ID NO: 80287 - DNA, 1345 bp, Glycine max
  Clone ID: PAT_MRT3847_43516C.1
ggaacgtcaaccaacctcaatttcaatctcatccacatcctaaaatctcaaatcaaaaatcgattcttcgaatttcaccgcttcgaaaccctttctttatcgccagaaaattttcaaaccctaaaatccgaatttcgctgatgatctttcctaatcgtcatcataccaaacaatttttcttcatatctgtctccgggagagtcgctttgacgggaaacaagggttttcgctgcaattctaatcggtcaaattggaatcgtcggatcaatttgtcatgaagttcctggagtgttctgctttagatcggcttaatgatttcttgggtaatttgaatctgggagaacgtactatcaaaggatgccttgaagcttatagttgcaaacatgctggatcggataaaaaactctccatcagtttggagacagagattcttgattatcttgggaaatcatccgacactgattcctcctcaccagatcaaaccttcttaaccagaaccagccgaaagacattggtttacctggttctaaccctgtatcacatgtatcccgattatgacttcagtgcagttaaggctcaccagtttttcacagaggaatcacgggacagctttaagcagatttttgatacctacatgcatgaagcttccaaggaatgggctgaaactgttgggggtgcttctttgctggacaccttgttcaaggcccttgatgaggtggtgaagttagtggattgtgatatttacggttatgtccctgattttgaagcagatccattactagagagtggaggaacaatatggtcctttaatttcttgttttacaatagaaagcttaagcggattgtatcttttcgattcagttgttttagtaacttgattgctgacggactgcttattgatgatatacacaatgagtacgatgaagagatatttgctgacatggatatatgagtcgcttctacctcgattagttagcatatgaagacttctgatcctcccatgtgtagttctgtaatataagatggtttcagatgcgtagttctgtatatcaaagaccgtttcagtgtggcctgagtcgtagatatagcatatgtatccgatccgtatcaatatagtagatttaacatctgtatcttcctcctatgcacatcgtaggtttggattctgtatcatactcgactgttaggacacacctctggtgtaatattatcaaaaaacatatttgaaattggtagagtattgttacattcatctgaaaatgatgcttcttttcctccgtaattttgtttccggagggttaaggcaagggtgccccgagccacacagaatttttgatcaatagtt

SEQ ID NO: 80288 - DNA, 418 bp, Glycine max
  Clone ID: PAT_MRT3847_43517C.1
gcaaaatctgcagcagtagaaaactctaggaaaatatttaataccatgctgcatcataatgttatgtcttggactgctctcatctctggatatgtgcaaagcagacaagaacaggaagccatcaaattgttttgtaacatgcttcatggtcatgttacaccaaattgcttcacattctccagcgtcctcaaggcttgtgcaagtcttcctgattttggcatcggcaaacaacttcatggccagacaattaagctaggactttccactattaattgtgtggggaattctcttattaacatgtatgcaaggtctggaactatggaatgtgctcgaaaagctttcaacatcttatttgagaagaatttgatttcgtacaatacagcagctgatgcaaatgcgaaaagcctggattctgatg

SEQ ID NO: 80289 - DNA, 314 bp, Glycine max
  Clone ID: PAT_MRT3847_43518C.1
gccaaacatacggcctcacattcttttacctataatatgaccacacttcacaaaccgcaagggctgctacacacaccatgcgtaactcatctctacctgataacatatgttctgaaatacaatttcttccatgtatcatacccttatatatgctcctctcagctcttcctattacctcttacttatggatctttaccatctcaatctaccaattccatcacaattctcaatacttctttcatacccgattactccttcctctaatagatttccccaatagctaacaactagatctccaatttactaatcttata

SEQ ID NO: 80290 - DNA, 154 bp, Glycine max
  unsure (1)..(154): unsure at all n locations
  Clone ID: PAT_MRT3847_43519C.1
aattcggctcgagagcaagttctctggtaggtcanagaatttttttatatattggaggcaccacctgaggtgggttgttactcataggggggacaactcttacaatttctggaaggaaaaacgcaacactgtttacagtgccagatttagcttt

SEQ ID NO: 80291 - DNA, 792 bp, Glycine max
  Clone ID: PAT_MRT3847_4351C.1
cccacgcgtccgtacggctgcgagaagacgacagaagggggagtacgagtacattgaagaagatatctttaacaagagcagtctccttctggagttgaatccggttcacaagaaggttccggttcttgttcatgcccagaaacccatcgctgagtcattcatcatccttgaatacattgatgaaacatggaagaagtatccattgttacctcacaatccttatcaaagagcacttgctcgattttgggcaacctgtgttgaacaaaagcttgggaaggctggatgggtagcaatgtctaccagcggcgatgaacaagaagaggctgtgaaagtagccagagaaataatagagaagatagaagaagagattaaggggaagaatttttttggaggggagaatataggataccttgatattgcacttggatggatctcttactggcttcctatttgggaggaagttggatcgatacagataattgacccattgaaatttccagccatcactgcatggatcaccaattttcttagccatcctgtgatcaaggacaacttgcccccaagagacaagatgcttgtttacttccacagtcgcagaactgcgctttcttcaacttttcagggctgattcaagttttaatttggatctatatgtttcttatggtccatgtgatataataagaatatcagggaatcatactagctaagtttctgtgctattattttctgagattgtggattttatttagacgtttgtttggttaagttttcaataataaattatgtcttttt

SEQ ID NO: 80292 - DNA, 279 bp, Glycine max
  Clone ID: PAT_MRT3847_43520C.1
ggctcgaggtgagacttagagctcattacctggaccacaggagcaagaaacactgcgaggaggggactgttaacatataagctcctatcttctaccaaagcacaaacagaagctataactccgagggattaacgaggcagactacatcgctaagcaagatgaaatggcaggagactggaacgggaaagagcgccgtacccaatagccggagaggacagctctccgataacaaaaaaacagccagggctacctgcaagggcaaccaccaactatgtacta

SEQ ID NO: 80293 - DNA, 468 bp, Glycine max
  Clone ID: PAT_MRT3847_43521C.1
aaaaggaaactgggggttaaaaattttttaccccccaaagggtgggggaggaacactatttttgcattcaaaaatttaatcaaaacccaattgatcgcctatgggtgaaatctaaaaggaaagggggtttatttagtcctaaacagagttaaaaacattggccacaaagcacaaatccaaaacttaaaaacaggattttccgaagcagtttgaaggggagcattatatcagttcctaactacaaatttaaattttttttcacaggggcagcatttatgatgtccacaaactccggtttggggggggcccccccaaccaaaaatccattaacatgggggtggggggccaattttttggagtttcctccatttacaaaacctccatagataatttttaaagaggcagcaactttagcactcaaattgtgatgaacccatttcctaaaataagaatggaccttttgagcct

SEQ ID NO: 80294 - DNA, 177 bp, Glycine max
  Clone ID: PAT_MRT3847_43522C.1
tttcttgtttctgaattccaagtatcaactagttttcttctgcttatagaatctgctttcttcaaatttctaaaagaaacttctcggccaaattattacagagctttgtatggcgtcaaaagttcttcctatattttcggaatgttaccttaattcatcatgctatgcacactgccc

SEQ ID NO: 80295 - DNA, 368 bp, Glycine max
  Clone ID: PAT_MRT3847_43523C.1
gtgcatgagaaaactttcctcttgtatttaatggagctctaaatccgtaacaaactacgacaccaaaggcctacgaaattggattactatcattttgttgaagagaaaaacacattatcggggcatgactttataaaaagataatatgacttttactgctgcatacttcaacttagatgaggggaaaccgagatgggaaagaatcctgggtcccacaaaccacagaaaagctcccaaaaaccctacaatggatgagtgtagagaacaagaccagcttcaaccagcaatagtcataatggaaaataactccagcggtgccaagatggaagaaaacggcatatgtagcaggaacagctggaaaaagaaaa

SEQ ID NO: 80296 - DNA, 407 bp, Glycine max
  Clone ID: PAT_MRT3847_43524C.1
tgcgatcttcgaagaagcgtgagagctcaaacacacaacaacaccacctgcctctggctgagacaaccttaactccggtcgctctccggttctttccaagttccatccacgggttttgtgttttccgcacgagtgacggaaacaaagagaaagctcaaattgcacgtgcctatctctcttctcaagtaaactttctccatttcttcttcgatcttgtgcaaattttggagttttgtttccccttgttggttctctggaaattaagtgttcggagctctgtggtttttgttgtggctggattaagaagaagaagaatgtggggatttggtggtagatattactggggaagaaaagtggcttgtgagagagctgatgggatagttgtggtgttcgcgtggatgtcaagc

SEQ ID NO: 80297 - DNA, 1081 bp, Glycine max
  Clone ID: PAT_MRT3847_43525C.1
ggtgagtctagtcaatttctttttaaactctgcgatgctaaatttagcggtgtcactcacctgaatttctcttttttgtgatctttggggcctttatcaatgccacatctctttctttctctcttgatctcattttgtgatctttggggcctttatcaatgccacacctaaatttagcaatgtcactcacctgaaattaagtgtgtattctttcttttgcgaattttttttcagagttgatttgacgtaacccaaaatcgtgtttaatgttttgaggcaatttctttgtttgctacatcaatggggtttctttaaacaatagttttggaattttcgttttaaattgtttgcctattggctacattgtttggttttacattgtctggttcttctttattcaagaacgcatcatcttgtacaagatttgcacgaactcagagcgagagcaacaggaggaattgtctactttccgcaaccagatatgttctgaagggtaatccctatgacctggaatgcaactcacttagcaagtcttgcttcagttaaaaacggatagtatatctttttcctaatctggtattcttgctagagttaaaaacagatagcatatcttttgattatgtttccgttaatgtaagaaatcgatcaagcacaaatggaacaattacacaagaaaattgaggatgacttagaggtctcaagattggcaatgcatctggaaagaagtggatatcaatgactaatgaggagaaggttaaatactatgatatagcctcagaaaaacgtatagaatttgatagagcaatggcaaaatttaacaataaaatggaaagtgggggagtttgacgaaattggtgggtaaagcctccttatttttctgtattcattttttcttatgattctgccgtcattttctctgggttgcatattgcaagtgtttgtattgcttcaaatgctgggaagcttagggtggctctttgagaatactctatttcttttgatggagttttgcatccattgagaaattggaatttaacatttaattgttcaaaagtggagggaaaatgggtaaatagatgat

SEQ ID NO: 80298 - DNA, 3408 bp, Glycine max
  Clone ID: PAT_MRT3847_43526C.1
acacacaaaaagtactttcttgagtattatccattgtcctatttgtctctaacctttatagtagttgattttgaatatgtgaggaaatttctctcacaggcaccctttattgctttcaaataacacatatatacaatacaaaagctaggtgagagacagcttgataggacaagacacactgttgtcttctgaaccaagtaaaacagaaaatctatgcaaccatgcactcaaagatacacataaatttaagactccccctcaagctggagcatataaatcatatgcaccaagcttgagacatatagactgaaatatctgcgagttgatcattaaaattaaagaactcaatagaaatcaagttggacagtgattgctaacgaataaaatgacaatcaatctctatgtgcttaaaagttttataaaatagttaactaaaaaaaatttatagataaggatggctaacactgcatctcaatatttgtcataaatctcatagtcaccagtcctgatacatatcgcctaaccttgaggtctcattaagttctgcatcaaaataccaagagactgatctatagaaccaatgaacacacctccaaacttttggaactgaacttttgatataacgaaatttatttaagactccattcgcctaattattcataggagtttgcattatttacctgaatgactcaagagataattaattttcatagactataatgattacctgaatgtgtactaagaaatgactcaaaaatctctcttggactggattgatatcatactcaagtttgctgatctctagatttgtgtccctagggttttagcaaagtctaccattttgtttgcctatttcgataaaaaaatccctagcatacttcctttgacagaacacaaaaccatatcctctatgcatggggacaatcagcccaaatctgcatcacaatactccagatttgtgtgtgttatgtttgtcttcatgcagcaatagctgtccaagagttgtcttaacatatcctaaaaccatacgcaaaacttgagtacattgctccaaccgaggattatacataaaaagcctacacacaccaccagaatacgacttatcaggtctcgtaatagttagatcaataaatttacccacatgacgctcatctttgaggaaatcatgattaacttcactctgatataccatgcactttagaatggcagtcataggaccagaaagaagtagatattttagtgtgtctcattgctacattttatcacgaatataactacacaatcaaagcaaggggcgtcaactgcagcttgtaccttaaaacacgaacatgggttgtatggattgaagcacttcactagaaagggttaggtttggttcccctccacaagcaccctgagatccaaacgctgatccgtacgtttcaatcgaaagcgattattgctccatgtatagattaaagaacatctctattctctaacctctctttttcgcgtggttttttggaaaccaaacggattcagaagaaggaaaattctcgctgttgtagaacggaacagaaaccgcggcaattcgttccatgaaagcggaatccacgaagccgcgagagaagcgaagcgagcaaggttggcgcgtgaatgcggttcgggaaacgaatttcgacgagagaatcagagaaactgagaatcggaatccatggatggatcggagaaggaaagagaacgaagcattgaaggttgaatgtgcgatctgcttcggaggattcaatctacgaatagtgtgtctcttccttgagacgcaactttggagccagtagctacagtaagaaggggagaaatttttgaaaaagaaatggatgagaaggaagacttattaccagagatatgatcagaggcacctgagtcaagtatccaaggactgagtctgagactttcaatggattgagaaatacatgttgttgaaaaacctggtacaaataaagattgtacttggttgctggacttctcagatttgagcttcaaatactcctgatattcttcatcagagaacctagactccgatttctctaacttagacaactgtgctactttgtcaggaaagtcatgcaatgaataacagttttcctgagtgtgactcatcctcttgcaataggtgcaatgaggacgtccaccccttccactgtggcctcctctgttgttgcggcctcctcctctcccacaaggtgcaatcatagctgaagtttccatagcatcagtaagattttcatccttcaatgcatgaggcacacgaagaagtctagtgatgagggaatccattggtgaaacttgatctccagcaagaacttgatcacgcacatgatcaaagtctgagtgtagactcctccagatgagaaccatataaaacttgtccagtttcctattcacctcttccaatgaattagccacaaggaaccttttcatctcttccactgcagcccaagccttacctacatgtgcaatcatgtcatggctggtttgcttgggggctataaccttcatgattacatcaaacaagctctgaatatcattgacaaagatcacttgggccttctctcgctttctcatggaagactaggtttgaagcaatgtgaagagcagcctgattatcacaatataacttcatttgcaccactttgcagaatttcaactcttcaagaatttgtttaacccacataagttcacatgtaaccatagtcatagatctgtattcagcctctgcactagatcgagcaacaacaacttgcttcttacttttccaagagataacatttcctccaatagagacgcagtatcctgatgtggatctcctatccatgggacagccagcccaatctgcatcacaattcccagatatttgtgtgttacctttgtcttcataaagcagttccggctcgagagctctctttatgtattatctaagaatacgtataacagcattccaatgatcagcatgggggttttgcataaattgactcaccactccaaccttaaaggaaatatcaagtcttgtaatggtgagataaatgagtttttccacaagtcttctatatctctcggagtaaggataaatttcactttgatttgccatgagcttcagattcggatccatagggctatcaacaggtctacaattctgcatgcctgtctcctccaaaatgtcaagagcatacttcctctgtgagatcacaacaccatctcttgactgagccacctcaataccaaggaagtacttcaaatatcctaggtctttggtctggaaatgactgaataagtgctcctttagctgggcaatcttagtagcatcattccctgtaatcactatatcatcaacatatactatcaaataaacacatttcccaggggatgaatgac

SEQ ID NO: 80299 - DNA, 398 bp, Glycine max
  Clone ID: PAT_MRT3847_43527C.1
cagacgctcattagaaaggttcttgatctactcgtagctttgtgcatatataaatacatgtgcatcaggtgattttttaaggtgaggacgaaagcacttgtcttatataccttataaggccttggttcagttcttgctgccagcaatcgcatgggttgtgggttggagacttgtgaatgaggaaagtggacttaaaattcaatgcttgtggaagttaagagattttaaatgtggggttgaactcattaacaggatctctaatgttgttgaggcttttggccattttccaaatatctacttggagcaaccaaatcaaatcagaacataattattgacagcttccattggaggtttaactattaatgattttattgttgctgcaaagatagattatatta

SEQ ID NO: 80300 - DNA, 392 bp, Glycine max
  Clone ID: PAT_MRT3847_43528C.1
cccaaaaaaacgcaggggcttttggatttattcataaaaaggcacaaagcggggaggaggcctcatacccaaaattggaacccaaaacccctggcgggctaaaaatggaggtccaaaactaccctttctaaaaaaaaaaaaaaaccttgctcctaccaaaaaccatttaaaacaggggggaaattaaaaaaggtgcccaaaaacatcgggccccagaaaattcaggcaagggacaaatctggactttcaaccaccggttttttcccttccaagggggaaagcttccaaagaattctcgggaccactccaaggtttttcaaaaaaaacccgccgccttttcacaaaaaaaaaatttttgggtcaaaaagggggtccctcctttggcgaaaatc

SEQ ID NO: 80301 - DNA, 438 bp, Glycine max
  Clone ID: PAT_MRT3847_43529C.1
ggctcgaggtttattgaggagaataggagcgagaagcgtaacaaaaaggtagtagaggagaaacggtaaacaaacattgagacgaggaatgacttgagcagctgcaataaaaagagggtaactttcttcttcttctttctctccccagagaattcaattaatccaaacatgttcttttgaggttttggtcccggatcagccatgtttcttttcatatttctctcaaccctcgttttaatcgcggttcgagcgaagaagctatggatagcaatcgaagactggttccacgtgtaccagttcttcaaagtcccagaactcaacgaaaccacgcagcataaccacctctacaggaaggtctccctctacttacattccctaccttccatcgaagactctgtcttcgccaacctcatcactggcaaagaagcaaaacgacat

SEQ ID NO: 80302 - DNA, 261 bp, Glycine max
  Clone ID: PAT_MRT3847_4352C.1
ttttttttttttttttttttttttttttttttttggttttatttttttttttttttttttttttccaaccccaattttgttggctgttgctttcaacaaaaaaagaaactcttgatttatgagtttattccccacagaagtttggcctagttttttttgttccttgttttaaccatcctagttaatgggtctctttgacaattaccatcatgtaaatttcatgctaacgtgggacgtttttgtcctcttaaatgatggtgg

SEQ ID NO: 80303 - DNA, 387 bp, Glycine max
  unsure (1)..(387): unsure at all n locations
  Clone ID: PAT_MRT3847_43530C.1
gcgaggaaaccaccggagggggtgcccttttccactggatttttggtattcctggcctctagagaataaggctaccctttggatgatctattttccctaattgcgggcttctacaattatcctccacacatgcatgaatcacccaaaggcaaagttctaccttttttttattctacaaaaggtactaccccaacttcctcactaataaattattcctaatcttgtctagtatatcgactcatctatgcaacattcttttctatggtacattgactttattctgttgacttttgaccgcccaacattctgtcatacaacatcctatgtcctataacggtgtggtaaaatttttccttagtttatagtggtatctntctgtcataacac

SEQ ID NO: 80304 - DNA, 117 bp, Glycine max
  unsure (1)..(117): unsure at all n locations
  Clone ID: PAT_MRT3847_43531C.1
nctggacaagtgggcatgcaatagtggacaaccacgcgtatcagaggcattacaatgtcatgttagaagctgagacggcaaatgcagagccacagctgtgtgcgcatagcagttctg

SEQ ID NO: 80305 - DNA, 506 bp, Glycine max
  Clone ID: PAT_MRT3847_43532C.1
ggctcgagctttgaaggtgcatttgatatgtttttcagtatcataagagaggagggaaattcagatggtggtgttgtggtacaggactgccttgaactgttgaacaatttgcttcgtagcaatgcatccaatcaggtactactaagagagactgtaggacttgactcattgatattgattttgaagctgagaggaagtagtttcacttttaatcaacaaaagacaatcaatctactcagtgcattagaaaccattaaattgttactaaagggaggttctgagtctgatcctgggaaagatatgaataaacagacaaataagactactctggttcagaaaaagatattggaccatttgttaatattaggggttgaaagccaatgggtacctgttcctgttcgctgtgcggcaatgcgatgcattggtgatttgattgctggagattaaagaatcgtgatcttttgctagcaagtttttgagaggagcacacgttgaactgctctgac

SEQ ID NO: 80306 - DNA, 170 bp, Glycine max
  Clone ID: PAT_MRT3847_43533C.1
aaaaaaacattttgcaataaacttttccaaggctaaaattttgcggaaaattgctgggacaaaatttgtttcccaatttctagttcaacataaagtctaaacaggggccccaccgggtaaagttcagagcaaataaaattttaactttgcccccacctttaagaggaaaa

SEQ ID NO: 80307 - DNA, 554 bp, Glycine max
  Clone ID: PAT_MRT3847_43534C.1
ggaaagtgtcatttaaggtaaccataagcccaacattttggcataacatttgaaacaaaaaaatactgacctatcaatttataattatgattatcgatgattaagtagcatgtactcattgtactgtataatgatacaaaacattataagcctaatttcagcttcaatttatatctttatctctttcgtgctttccttcttctggactctgctttttgccatttctttctagaaaccagtttactctttggtttcaattttaactcaggtgagaacttgtaatttggatctctcatacgtgcttgtatgtccttaaaaaactgaatatttagatgtttaggccctccttgtctaagttctgcatattctggtcctgaaacaacattttcaaatgccccaattagaatatctaagtcactcataacctcccacacattgctatacctcccatctggacccttctttaatttcttcaaagcattctcaacagctatcttcctagcttgctttcctggagtcaactcctcgggttcttgttcagctttcaacatctc

SEQ ID NO: 80308 - DNA, 217 bp, Glycine max
  unsure (1)..(217): unsure at all n locations
  Clone ID: PAT_MRT3847_43535C.1
ttctcgagccaattcagagtgcacataatgaacaatttgccancaatctcattagcatgtatatctcttactacctttttcttctcaaatattccattgttgtatccaatgtataattgagtgtgaaagctatatgcagtatctataatagctaaaatgatgatatctatcaggtgtggtgttattctacttgaagttatgatgggaatttatattt

SEQ ID NO: 80309 - DNA, 657 bp, Glycine max
  Clone ID: PAT_MRT3847_43536C.1
ggatgtgtgttggtagcactcttcaaaattgacatcactgccttaggaaattaatcagtcaaccaaaatttaagggagctctgatgattactggctgaggatgatgacattgatcaccagtgggaaaatgcagttcaagagttaccccagtcctttgcctaaaatatactagatttttaattcttaatgtgactgctattgtcgtggaattaaaccttctcatcaaaattcttaagccagtacaccaccgtccgccagcagcccgcctgcttggtgtctggagcacttcttgccagggtgtggcaggtttcctcctccggggagacgggtggtatctccattctcgcgccgcttccctgctggaggttagaaaaggaggtggctatcttcttgtggcaacagatatagctgctaggggagttgaccttccagaaatgcctcacatttacaactttgatctaccaaggactgccatagattatcttcatcgagcagggcgaacttgtagaaaacccttttctgacatcaattgtactgttaccagcattatagttccagatgagcgatttgttctgcagagatatgaaaatgagttgatgtttaactgtgaagagcttgttccataaaccttggctaaacattcacatattttaaaaa

SEQ ID NO: 80310 - DNA, 289 bp, Glycine max
  Clone ID: PAT_MRT3847_43537C.1
ggagaaggtacagccatggattccaggtgtccgtgtccgtcactagctagataaacggcgactagatgatgattatgatctatgaccacaccatgtcattgcgagcttcgattatcacgacgcactcagatatgtgcacccacctgcatgcatcactgatctggtggatactacacctggagattggagagagaggaaatagagcctcgcttctcttgacatcaattaatagggtgtgtctgaagtgtgtgttttagcgtaatgtccttatggagcttctaaggttgtt

SEQ ID NO: 80311 - DNA, 964 bp, Glycine max
  Clone ID: PAT_MRT3847_43538C.1
cttacgctttctcggacgcgtgggcgcaagggggctttcaatctttacactgccttcactgttgcaactgtcatcaatcaatgcatctccaaggtatccgcaattggaaaggaacaatctctgcatattgggcgcaactgctattgaagataaactgcagcaaggtgtgccagaatccattgagtctctaaggactgcaggtattaaagtatgggtcttaactggggacaaacagcaaactgccatatcaattggatacttctcgtagctccttacgagcaacatgaatataattacaattaataccaacaatagagagtcatgtagaaatcgttggccagacgcccttgtcatgtctagaaaagacatgacatttgaccctgacaggacaattctgtaagtagttctggtgctgtttcaactccattagccttgattattgatggtaccagccttgtttatattcttgacagcgagcttgaagaagagctctttcaactagcaaatagatgttctgttgttctctgttgtcgagtggctccgctgcagaaggctgggattgtagcccttgtgaagaataggaccgatgacatgacactagccattggagatggtgctaatgacgtatcaatgatccaaatggctcatgttggagttggaatcagtggacaggagggtcggcaagctgtaatggcttcagattttgcaattgggcagtttaggcttttagttcctctcttattaatacatgggcattggaattaccaacgactgggttacatgataatatacaacttctacagaaatgctatctttgttcttgtcctattttggtatgtgctctttactgctttctctttgacaactgctataaatgaatggagcagcgtgttatattcaataatttactctgcagttccaactaattgaatggggtgttcatgtacactgaataatctacagt

SEQ ID NO: 80312 - DNA, 409 bp, Glycine max
  Clone ID: PAT_MRT3847_43539C.1
atgtgacaatactgagcatcgtctagctatctcgatcgaactgtccaaggtcctgtcaccaatgtgttaggttggaaaggggattacatcactgacggttcatatacataaactaagcctaaacatgcacggacaccgcatgcggcacactaacaataaacaatgaaactattgccccagggcgcacccaggctgcgtgaggtaaatggggcgcaggcgcgtaaagtgcgagcacgatctaaactacaaggtgccgttgggcacagttgtgcggccaatccggcacaatatgcgaattattcggtggccgttgcgtgctaataaaggtaaccatggtttgcagcagcgttgccgggagcggcataaaaaccgccagcaactggcttataacggtcagcactagctgttg

SEQ ID NO: 80313 - DNA, 1403 bp, Glycine max
  unsure (1)..(1403): unsure at all n locations
  Clone ID: PAT_MRT3847_4353C.1
tacggctgcgagaagacgacagaaggggattgaaattaacttttgaaagaagacggaaactatgaagggaggtcgagatggaagatgggaagggaagaagtgaagctgttgagcttttttgcgagtccatttggcaaaagggttgaatgggcattgaaactgaagggtgtggagtatgagtacatagaacaagatatcttcaacaagactagtctccttctccagttgaacccggttcacaagaaggttccggttcttgttcatgcccacaaacccatcgctgagtcattcgtcatcgttgaatacgttgatgaaacatggaagcagtatccactgttgcctcgagacccttatcaaagagcacttgctcgattttgggctaatttcgctgagcaaaagcttttagatgcagcatggattggtatgtatagcagcggggatgagcagcaaaacgctgtgaaagtagccagagaagcaatagagaagatagaagaagagattaaggggaagaaatattttggaggggagaatataggataccttgacattgcacttggatggatctcttactggcttcctatttgggaggaagttggatcgatacagataattgacccattgaaatttccagccatcactgcatggatcaccaattttcttagccatcctgtgatcaaggacaacttgcccccaagagacaagatgcttgtttacttccacagtcgcagaactgcgctttcttcaacttttcagggctgattcaagttttaatttggatctatatgtttcttatggtccatgtgatataataagaatatcagggaatcatactagctaagtctctgtgctattattttctgagattgtggattttatttagactttttcttattaggtagagaagtttgtttggttaagttttcaataataaattatgtctttttttataaattttatttgttctgttatgtataattaataagtaatattataaaataaaaaaggtattatataaataagtctgcaaaattagtacattacaacccgacattgcgtggaccaggggcattcgaaatttgatttgtgaatcagactcttccatggccttacagcttatttcaactggtgtttatatcactcatccccgagcagctttggtgaccaccattcggtcattcatggataaagattggtgcttatccttccagcatactttgagggaaggaaactttgtagctgatggtttagcaaagaaaggggtccatgttactgcttcttttgctttttgatgtttctcctcaggacttgtataattggttatttgctgattctataggtctatccagaaccagacctcgttagttgctggtcttggattcttttgtnngatcaataaatgttaa

SEQ ID NO: 80314 - DNA, 228 bp, Glycine max
  Clone ID: PAT_MRT3847_43540C.1
aaagtaaaaattacatagaggcactctgaagatcaattgccgaggtgaaatcaaattattagagcatgccaaaggcgaaaacattaatacactttactggagcttcctggatgccgcaagcgttaggactttgctgcagtgttaaaaagtatagcacagggaactttactataaatattataccagaagcaaacccacctatttgacagtggacataagacaactatc

SEQ ID NO: 80315 - DNA, 195 bp, Glycine max
  unsure (1)..(195): unsure at all n locations
  Clone ID: PAT_MRT3847_43541C.1
attcattataanaangaaggggacgggcgattatcgttaacgcttttaccatcaaaatacacattattattatcggggcagacgatacttgttcaaaaaaaacacataaacgatatcatatttgctctaaaccaaacaaaaattggatgaatattatcatcacttaaaaaaaaattaccgttttttttgaacata

SEQ ID NO: 80316 - DNA, 1958 bp, Glycine max
  Clone ID: PAT_MRT3847_43542C.1
ccacgcgtccgattattcactcctcaacaaaactctctctctcaatctccttaccttgcaagcaccccacccacacactgtccaacgttaaccgatcaaaaacccatctctgtctacctttgtttgatctcaaagttggctctcacaaaaacgtgaaaaaatttcattcccgtgagattctcctccaccgatgcagattgaatttcaggaatcctgggtgtctacgatacgtttgagacctgagatttgctagtcagttatatttttgagaacagtttagatcttttcttctgcaaagtttgggcactgcataaggtttggcagtgcccatgatggatgccacaaccagcggaaccccaactatccaataccataacatccctgaccagccaattactgccattattgccactccacttccaacatttcaaaggcagcaacgccattgctttggggactccactcctggagagtttcccttgtctgctaatccctccattgtccttcatgttctcactgcatgcaatttggaccctcaagaccttgctaaactagaggcaacatgctccttcttcaggcagccggcaaactttgctccggattcggacttgtccttatctgagctcgccgcactggacatgtgccagaagagagccatattcaagccaatgacaactgaacaacgccaggatttgaagctaaggtgtggaggttcatggaaactggtgctgaggtatttgatggctggagaggcatgttgcaggagggagaaatctcaggctatagcaggtcctggtcacagcattgctgtgacatcaaaagggattgtttattcatttggttccaacagttctggacaacttggacatggcaccactgaggaggaatggcgacctcgaccgataagaactttgcaaggcattcgaattatacaagctgccgctggggctgggaggacaatgttggtaagtgattctggtcaggtttatgcatttggggaagctgagtatggagttcaaggttctaaaactgttgcagctccacagatagtggagtctttgaaaaacatatttgttgtccaagctgcaattggtaactttttcacagctgtgttatcaagagaaggcagggtttatacattttcttggggcagtgatgaaaaacttggtcatcacactgatcaaagtgatgtggaacctcatcccttgttaggtgctcttgaaaacataccagtggtgcaaattgctgctggatattgctatctgctttgtctggcttgtcaacccagtggaatgtcagtgtattctgttgggtgtggcttggggggcaagcttggacatggctcaagaactgatgaagagtaccctcgtttgatcgaacagttcggactgctgaacctccaacccatggtcgttgcagctggtgcttggcatgctgctgtggtgggacgggatggccgtgtttgcacgtggggatgggggcgatatggttgcttggggcatgggaatgaagaatgtgaatcagtacctaaggtggtggaagcattgagcaatgtcaaagctgttcatgttgcaacaggagattacacgacctttgtagtgtctgatgatggtgatgtgtattcatttggctgtggacaatctgctagtcttgggcataatgctgctggaaatgatgagcagggcaacaggcatgcaaaagtgttagatccagagcttgtcacttcactgaaacagatcaatgaagtgttagatccagagcttgtcacttcactgaaacagatcaatgaaagggtggtacagattagtctgaccaattgcaattactggaatgctcatacctttgccctcactgaatcagggaagctgtatgcatttggtgctggagacaaagacagctaggaattgaacttgttgctaaccagactgaaaggggaaatccagaaagggttgaaattg

SEQ ID NO: 80317 - DNA, 1744 bp, Glycine max
  Clone ID: PAT_MRT3847_43543C.1
gaagacgacagaaggggttgggtgtggcttggggggcaagcttggacatggttcaagaactgatgacgagtaccctctcgtttgatcgaacagttcggactgctgaatctccaacctatggtgcttggcatgctgttgtggtgggacgggatgactgtgtttgcacgtggggatgagggcgatatggttgcttggggcatgggagtgatgaatgtgactcagtacctaaggcggtggaagcattgagcaatgtcaaagctattcatgttgtagcaggagattacacaacctttgtagtgtttgatgatggtgatgtgtattcatttggttgtggacaatctgctagtcttgggcataatgctgttggaaatgatgagcagggcaacaggcatgcaaaagtgttagatccagagcttgtcacttcactgaaacagatcaatgaaagggtggtacagattagtctgaccaattgcaattactggaatgctcatacctttgccctcactgaatcagggaagctgtatgcatttggtgctggagacaaaggacagctaggaattgaacttgttgctaaccagactgaaaggggaaatccagaaagggttgaaattgatcttggttaattgtttgtgcctttacacaaccccccccaccccagtcctccacaattctttacaccatgctgtcctctaatttatggtcatcatgcatagcattttagtatttaaattccttgtctattttgtaaatataatcaaaagaatgcatcttgaaggtccaaggtaggtaaacagctaacaagggccttagtagcttctgtcttatggttgttgatatctcatcatcactcttaggctttcatctggttgttgatagttgatacattggtgaaggttcatttatagcctagttgtcttgaattgttttcatagatcatttgcttagatacagattgttaaatttggcattcattcatcatcctaagtcaaaaccctcatggtttggatctactgctggaagtcgctggggtgttgttatgtctcgaaatgctggattcagtaaacaggtggttgaacttgattttctctatccaagtgagggcatccataaacgttgggataaaggttataggattacagcaaccgcagctacattggatcaatctgctcttatattaagtattccgaggcgcaaactcagtgatgaaactcaggaaactctacgtacatcgcaatttcccggcacacatgttaaggaaaaatggtcaaaaaacctttaccttgcctgtttgtgctacggacgcacagtatgctgatttccatgacattttaaagcattttattgacaagcggattatgagttgtcatctgccccaccacaaaagatctttttgtagaaaggaactaattgttgtgccagcagagaaccttattttgttatgttataagaatattgttctgttccctgtccctccccttctattatatgctttactgggatggggaatgttgcagagtaatgaatgttgtttagctttatatgttcctccattatgtttattcaaggttttctattttttctctgcatgctgcgtgcttaattcaactaatattcaatcaggtatgttgctgaggtttttcagatttattatcgccaggacattctagtaataagaagcaattaagcggtatgacatcttctctttaatataatattaaaggtagtgcaggtgagattccaagtt

SEQ ID NO: 80318 - DNA, 1758 bp, Glycine max
  Clone ID: PAT_MRT3847_43544C.1
cttgaggcaacatgctccttcttcaggcagccggcaaactttgctccggatttggacttgtccttatccgagctcgccgcactcgacatgtgccagaagagagccatcttcaagccaatgacaactgaacaacgccaagatttgaagctaaggtgtggaggttcatggaaactggcgctgaggtacttgatggctggagaggcatgttgcaggagggagaagtctcaggctatagcaggtcctggtcacagcattgctgtgacatcaaaaggggttgtttattcatttggttccaacagttctggacaacttggacatggcaccactcacgcgtccgggcgacctcgaccaataagaactttgcaaggcattcgaattatacaagctgctgctggggctgggaggacaatgttggtcagtgattctgggcaggtttatgcatttggaaaggactcatttggggaagctgagtatggagttcaaggttctaaaacggttgcagctccacagatagtggaatctttgaaaaacatatttgttgtccaagctgcaattggtaactttttcacagctgtgttgtcaagagaaggcagggtttatacattttcttggggcagtgatggcaaacttggtcatcacactgatcaaagtgatgtggaacctcatcccttgttaggtgctcttgaaaacataccagtagtgcaaattgctgctggatattgctatctactttgtctggcttgtcaacccagtggaatgtcggtatattctgttgggtgtggtttggggggcaagcttggacatggctcgagaactgatgaaaaataccctcgtttgatcgaacagtttgggctgctgaacctccaacccatggttgttgcagctggtgcttggcatgctgctgtggtggggcgggatggccgtgtttgtacgtggggatggggccgatatggttgcttggggcatgggaatgaagaatgtgaatcagtacctaaggtggtggaagcattgagcaatgtcaaagctgttcatgttgcaacaggagattacacaacctttgtcgtgtctgatgatggtgatgtgtattcatttggctgtggagaatctgctagtcttgggcataatgctgctggaaatgatgagcagggcaacagacatgcaaatgtgttaagtccagagcttgtcacttcactgaagcagatcaatgaacgggtggtacagattagtctaaccaattccatatactggaatgctcatacctttgccctcactgaatcagggaagctgtatgcatttggtgccggagacaaaggacagctaggaattgaacttgttgctaaccagactgaaaggggaaatccagaaagggttgaaattgatcttggttaactgtctgtgtccttacaccccccagtcctccacaattctttacaccatgctgtcctctaatttatggtcatcatgcatagcatttaatatttaaattccttgtctattctgtaaatataatcaaaagaatgcatcttgaaggtccaaggtaaggtaacagctaacaagggccttagtagcttctgtcttatggttgttgatatcatcatcactcttaggctttcatctggttgttgatagttgatacattggtgaaggttcatttatagcctagttgtcttgaattgttttcatagatcatttgcttagatacagtttgttaaatttggtattcattcatcataagtcaaaaccctcatggtttgaatc

SEQ ID NO: 80319 - DNA, 169 bp, Glycine max
  Clone ID: PAT_MRT3847_43545C.1
gaatgttctgatcatatctctcctaggcgcccacagatatgaatctggtagtgtcatagggctccctgggtctggaggcggtagcttttctctttttggaggccatctccatcaaaaagaaccacaggaatcaagttagacaggttttatttcaaactgaaatcagaaa

SEQ ID NO: 80320 - DNA, 196 bp, Glycine max
  Clone ID: PAT_MRT3847_43546C.1
gaaaggttttttttttatggacgacccgaaagtgtaaaacaacggggggcggtttcatattgcaaaaatgcgccgacctcctacttaaaacgcactttcatattagcacatgttccccctaatcacttgcggaaatgaaggatccattggactaggaaatatgggatcacgaacggccaaacaatactgatcatag

SEQ ID NO: 80321 - DNA, 477 bp, Glycine max
  Clone ID: PAT_MRT3847_43547C.1
gaataaaaactacaagaatttattaacacgtagcgcaaaagcaaattaaggcacatgctgcagataactaatcctgtgtattcagcactctgacatatatatctgattgatttaatttcaaacattggaacatatttcttatgacacctagaaactatagcagatagatatgcacataattttgctatatctatcaaacatggcactcttccatctgaacatctttagccttcaaaggctcatactcaccatgatacacttcaaggtgatccgacaaagcagatttgtcaatattctgatggtggtaggacttgcaaacgaaatagagcacggtttgtataacaagttggaaaaggtacaactgagagaacagcaccaaacacaccaccccataaatcgttctatccacagaccccaacttccacccttgtaccaccgttttctttaacagaaactttatcaacccaaaagaaatca

SEQ ID NO: 80322 - DNA, 274 bp, Glycine max
  Clone ID: PAT_MRT3847_43548C.1
ggcgttctcttctttcctcgggcgagtcctcttcacctctgtttacatcctctccgctaaccaagaatgtaatgctcatggagacgatgggggacccacagcaaaagcactcacaccgaagtcagatgcctttgcgcataaagtacattctatagctggctttcaactaccagatctcgatatcaaaattttagctgctggcgctattgctctcaagggcctcagaaggattctttccatacctggcagcgtctatggagcttctcttttagtt

SEQ ID NO: 80323 - DNA, 227 bp, Glycine max
  Clone ID: PAT_MRT3847_43549C.1
tgaacaatgtgtgtttttcggccgtgggaaaaacaccacgggccttatgtatcaggtgcactatctaggcctaagttaaaaggttgtaggcaagtgcttaagaataaaacggattggcctaataaagtaaacggagccaactagtccccaatcttgtgaagcttaagcatcctctttgcaagtttgagaccaacaactcgatgcaactgtaacagctgatcatggac

SEQ ID NO: 80324 - DNA, 266 bp, Glycine max
  Clone ID: PAT_MRT3847_4354C.1
tccacccactcgtccactccatgctattcttttatctacaaactctcatccttattttatatttactctacaccaaaatggtggattttttaatcatacaatttccccaactcaaccctatattctttcataattataacacaaaacatctatctttcataatcatcaaaaccatataacatctttttccacaaactccaaatctttttatccaattatcaaacaaaaccctattatatatataaatcaataataaaactacttat

SEQ ID NO: 80325 - DNA, 325 bp, Glycine max
  Clone ID: PAT_MRT3847_43550C.1
aaatacttggttttattgaaagggttttacaaattacaactgcaatttgaaaccaatagcaacaaacactataatgttcaagaaaaaaggaagacaaataattccaagctaagaagggggtttgcaccaccatccccaaggggggtaacccaattgtttgctaaatcgcaacccccccgagaaaaaatgcttcccggaaaccggggaggcggaaaaaaacccgccgagggcgccgggaaaaaccgcccatcggggtcccgccgcaacccaaaagagggttcccgagcccaatccggcaacggggctaatgacgaggtcatccgtt

SEQ ID NO: 80326 - DNA, 501 bp, Glycine max
  Clone ID: PAT_MRT3847_43551C.1
ttaattccccgctcgaccatctcctagtatgcggccgctgctctatccgttttctgttttttatttttggaccataaattcgggaccaaccttctcccctggttgaggaatagacgttaagcaactcatggtgtcctcacataacctctgttttgagagggactggtttgggcttattaactcaaatggcaagtaactaggagaaaaacctttggcaacctgaggaccttcgctagctatgcaaagggtggtcccaggggccgaagcaaccttgtttcttgggtcgccgccggaaccctagtttacttcctctggatcaaaccctcccagcacctcaagcgcgaaacagccgatattgccgttcttgccgtcttcgaccctgacccttaccgctacgatgagactcggaatccccttcccgatcttcccgcaaccgctctgacatatgtaaactatatcatggtcggaccggccaatccggatgggagtttctttcattag

SEQ ID NO: 80327 - DNA, 256 bp, Glycine max
  Clone ID: PAT_MRT3847_43552C.1
actaataagggaggggttaattttaaatactatccaaccttaggattgcccaaacaagctggggaaactcccatcccaccaacaacataagtagttgctgcctttgcctcagagtcttctgaatctttaacatctttaacaaacaattcacttactagttcgtcggttttcctaagaggatatgcccatcttgcgttaaacaaaaaactgggaaaaatcaaccttattatcttttggtgaagaactaagaacctgg

SEQ ID NO: 80328 - DNA, 407 bp, Glycine max
  Clone ID: PAT_MRT3847_43553C.1
agtcctagtgaaatggcacagggaatcagagcagggaaaatagctgaaggaaatgatgcacattctctttctcttcaagctgttgaaactagacagcaaacacaagtcatcaaagttgtaccacataaccggaaatcagcgacggaatcagcagctagaatttttcaatccattcaagaagagagaaaacaacatgatttagtctagtgctgtttatgcaggtggagttatttgagttgattttgtacagtgcgtcaagtcctgtactttgttgttgtttggtaatatgtatcttgctgttttattctactcttcctttatgtcctttttcttacaacatattcgaatgtagatattgttataactacaatggaatgttaaaattgatcaaatttctcgagccgctc

SEQ ID NO: 80329 - DNA, 474 bp, Glycine max
  Clone ID: PAT_MRT3847_43554C.1
ctcattaggctactagctaaagagcatgaaatactcatcacagtggaagagggttctatcggtggttttggatcacatgtatcacaattcctgagcttatctggtatcctagatgggcctctaaagtggagagcaatgatgcttcctgataggtacattgagcatggatcaccccaagttcagatagaagaagcagggctttcatcaaagcagattgcagccacagtcttgtctcttatggaaaggccaaaacaagctcttctgttcaaataaaaatgctaaatggaataaagatcttcttgacctgggaccttgaagatatatcgaattcttagaagactttttatgttgacattgagaattagaggaagctgtaaataactgcactagcattgttgttcatatcttgatgctcacatattttggattcttaattcatcaatagtgaataaagagatgaatttattcttaaaa

SEQ ID NO: 80330 - DNA, 485 bp, Glycine max
  Clone ID: PAT_MRT3847_43555C.1
cggtgttgtgcctggccgccccaccggttttggcgttgatgcagcggaccctgttggcttcctgctgtgtgttggtgtgcttgctgcatcagccctgtttggttccggtgatgtgggaatcggcccgaacattggttgtgggtgttctagggtggctcgttgcctccctttccctgttgctggacggacaggaaagattcctgagctgttgctgcttagttgggttccggctgctcgcttggcttttgggcttcttgggttgctcgtgctcgtcctggccccgttgcaagtccgtcaggggtgtttcctcagcttgtgctccctggcttgggtccgcatgctcgcctggctttagggctggttgcggtgctggagctggtggtggtgccttttctctctcttgcatgcgtgttgtggtggaggaaggctgcttctgctgcatcatcacatcattgtcgacgctttgatgtattcattgaggctga

SEQ ID NO: 80331 - DNA, 2840 bp, Glycine max
  Clone ID: PAT_MRT3847_43556C.1
ctccagctcgaggcattagcgcacatacgaggtctcttactctctgtatactttcaagtatcttttcccatctctttctctctcactgattggaaattttgagtaaccatggccttctgtggtggtactttcgttaagccaaactattctgcgtccccatgttacaaatatacagctctaagtccataccatggctgcagaaacactctatattgattccataaggggttactcttcttccttttgttaccaaaaaaaaaggccatgattttttcactgatggtgcaatgatggctggctgatgtgtgattgattgtgtttgcctcagttctgtgtgagagtttcagcaagtggctcagctgatgaggagaggactattataaggaaagagaaagttgggtggaagatcaattactcaggagagaaaccagcaacaccattattggacacagtcaaccacccaattcacatgaagaatctgtcaacacaggatcttgagcaacttgcagcagagctgagggcagatattgtacacagtgtgtcagacactggtgggcatcttagctcaagcttgggagtggtggagttatcagtggctttgcatcatgttttcaacacccctgaagacaaaattatatgggatgttggccatcaggcataccctcacaagattctcactggtagaagatccaggatgcacaccattaggaagagttccaggctagcaggctttcctaaaagggatgagagtgttcatgatgcttttgggtgctggcactttgctaaaggaagatctgctgatcttggcatggacatctcgcggaattcctgagcttatctggtatccatcatttccctcgattgggagaatcagggcattgacagcaggccaagcttatgaggcaatgaacaatgcagggttccttgatattctctaacatgatagttgtacttaatgacaacaaacaagtctctttaccaaactgccacacttgatggtccctgcaactccggttggagccctcagtagtgctttttaagcaaaattcaagcaagttctgaattcccgcaaactcagagaagctgcaaaaacccatcacaaagcaaattggaggaacaaacacatcaggttgcaagcaaaagtagatgagtatgcaagaggcatgatcagtgcttctggctctactctttttgaagagcttggcttatactacataggtcctgtggatggtcataacattgaagatctggtcaccatctttgaaaaagtgaaagcaatgcctgccccaggtccagttttgattcatgttgtgacagaaaaagggaagggataccccccagcagaaaaagcagctgatagaatgcacggtgtagttaagtttgatccaaaaacaggccatcagcttaaggccaagtcctctacactttcatacacccagtactttgctgaatctttgataaaggaagctgaaatagacaataagatagtggctattcacgcagcgatgggtggtggtaccggcctaaattatttccataaaaagtttcctgagcgctgtttcgatgtggggatagctgaacaacatgctgtaacatttgcagctggtttagctgcggaagggctcaagccattttgtgccatttattcatcattcttgcaacgcggatatgatcaggtatgtaggtagtccatgatgttgatcttcaaaagctacctgtccgatttgctttggatagggctggtttagttggagcagatggaccaacccattgtggagcatttgatatcacttacatggcatgcctacccaacatggtggttatggctccttctgatgaagctgaactgatgcacatggttgcgaccgcagcagctatagatgatagaccaagctgctttagatttccaaggggaaatggaatcggagccactctgccactcaataacaaaggaaccccacttgagataggaaagggaagaattctggtggaagggagcagagttgccattttgggatatggttctgtggtccaacaatgcagacaagcctcagaaatgcttaaggaactaggcattgatgtgacagttgctgatgctagattttgcaaacctttagatactggtctcattaggctactagctaaagagcatgaaatactcatcacagtggaagagggttctatcggtggttttggatcacatgtatcacaattcctgagcttatcaggtatcctagatgggcctctaaagtggagagcaatgatgcttcctgatagatacattgagcatggatcaccccaagttcagatagaagaagcagggctttcatcaaagcagattgcagccacagtcttgtctcttatggaaaggccaaacgaagctcttctgttcaaataaaaagacaaaatggaacaaggatcttgacctggttccccgaagatgcataaaaaaaatttaagacttttgttggtattgtgctttagaggaagctgtaaataactacactggaattgtcggagtttacatcttgatgctcacatattttggataattggattctcaggtcatcactagtgagtaaagagatgaatttattctgacaactcaaggaaccaatcaaggcatcgtaatgtatcaaaattaattaattatattactgcaattaacacagcacacaagtcttctaaaatcatactgcccaataagcaaaattaaaatacgccactgtctggtagctaaacaatctttccattacattagtcgtgaagttcagcttgtatcacaacttgtgacaatgctggttttctatttttagtaatatgtttcaattttcctatag

SEQ ID NO: 80332 - DNA, 259 bp, Glycine max
  Clone ID: PAT_MRT3847_43557C.1
cttggagaaacagcacaaacatgacctcctgactgagccagacctgggggtcaccatcgatctcatcaatcctgacacctaccgcatcgaccccaatgttcttctagatccagctgatgagaaacttttggaagaggagattcaggcccccaccagctccaagagatcccagcagcacgcgaaggtggtgccatggatgcgaaagacagagtacatctccactgagttcaaccgttatggcatctccaatgagaagcct

SEQ ID NO: 80333 - DNA, 245 bp, Glycine max
  Clone ID: PAT_MRT3847_43558C.1
ctcactcttgcgcaaaatcgtccggcgatccgtgcaagctctagagaccgactccgaacttttgaacaattgagctgcactctactataaacatgtctcccaccaagcccatgttaacagaaactacatatgactatcctcatcctggcagtatagttactagggacattcgtacttactactcttgttgcattcaactagactaatgtgaaaaaaaacccatgctccccctatgatataaaggc

SEQ ID NO: 80334 - DNA, 493 bp, Glycine max
  Clone ID: PAT_MRT3847_43559C.1
ttcataataggatattgtattctaatatggaatgacatgacgatatctcaccccaaaaaaaaaactgagcaatttaattactcttagaactagaatgcacagaatttgtttttacaaatgatatatgggttggtctttacgttgcttgacttctggattatctctagatcatactaaatgtttttttattttttgttctagcttcaagaatgaaaagcaaatctctcaacaacttcccaatatttcttggaattagatctagattctagaaattattttcattgtattactacatttactttcaactgatagccatttcttttcactcatcttttcatggtaacagttgtcaggagccaatgtaacccttgtagaggatagaccagatgtgacacagaagattattcagatatctggtactccagagcaagcagagagagcccagagcttgctccaaggatttattttgagcacacaagaagacgtcccttaa

SEQ ID NO: 80335 - DNA, 253 bp, Glycine max
  Clone ID: PAT_MRT3847_4355C.1
tggaatccctgagccaaatgcagactctagtaagagagaattcgattaacaaggattggatttccagagcagagcttactgacattgtgatctctatccttgggagctctgatgacagagtagtgaagatgaagattttgataactttgaaggatgctgtagaggggattacaggaaactaggagaaagtggctgaatctcaaggaggggataacattatttcctgcttagggagtgactctagcacttcaaa

SEQ ID NO: 80336 - DNA, 200 bp, Glycine max
  Clone ID: PAT_MRT3847_43560C.1
atgtggagatattccgttggagaactcgtctctagaagtttttaagaatgtacttctccctacacttaaattgtacctgacagtctcttcattggctttggaaactaggctgatgacaccatttattatgaggctgttcccctcaagcctgtgcatttaggtgagaattcatgaaaaagttatattgaaatctccacaat

SEQ ID NO: 80337 - DNA, 354 bp, Glycine max
  Clone ID: PAT_MRT3847_43561C.1
tattttactaaggacaacacttttttctcatatcagggatccagaatataatacctcccaacagctagaaaagctggacccattatctgcaacctaaatcaatgtagtctccatacttagtggggagagataaattgatttccgcccaaatactaggatcatctaacataaaccggagtatataaaggaatatgacatccccatgcaattcttgatagaaaaactagcttcctcacatgggtcaaccttgttcttagcgagtgtttggataccaaccacaatcaatttcaggtcccaaaattacaatgaatggtgggaaaatcacaagccacaaagagttaccttgccggaacc

SEQ ID NO: 80338 - DNA, 976 bp, Glycine max
  Clone ID: PAT_MRT3847_43562C.1
accccatgaaaaaacaccacctgagtatctacctcctcctcatgagaaaccaccaccagaatacctacctcctcatgagaaaccgccaccagaataccaacctcctcatgagaaaccaccccatgagaatccaccaccggagcaccaaccacctcatgagaagccaccagagcaccaaccacctcatgagaagccaccaccagagtatgaaccacctcatgagaaaccaccaccagaataccaaccacctcatgagaagccaccaccagaataccaaccacctcatgagaaaccaccaccagaataccaaccacctcatgagaagccaccaccagagcaccaaccacctcatgagaagccaccagagcaccagccacctcatgagaagccaccaccagagtaccaaccacctcatgagaaaccaccaccagaataccaacctcctcaagaaaagccaccacatgaaaaaccaccgccagaataccaacctcctcatgaaaagccaccaccagaacaccaacctccacatgaaaagccaccaccagtgtacccacccccttatgagaaaccaccaccagtgtgtgaacccccttatgagaagccacccccagtggtgtatccacctcctcatgagaaaccacccatttatgagccaccgccattggagaagccaccggtctacaatcccccaccttatggccgctatccaccatccaagaaaaactaataaccacttgcctgcgtcacatgttttggtctactcaaacttagacatgccctttgtcatataaagctttttgtttctgtttaacctctcaagtacaatatgtcccttctgcatgcactacttcttcaaaataaaggctttatgcctatgtataatactctactttaattctcctttcaccatcgatattgtaatgtcaactactagtgtggggttatctatggctataataagtttttctttgtgttt

SEQ ID NO: 80339 - DNA, 1209 bp, Glycine max
  unsure (1)..(1209): unsure at all n locations
  Clone ID: PAT_MRT3847_43563C.1
gcttttctttgccacctcttcagtcttcctcaacaatccaaaccccaaatagcataatcataatcctcaacctcagttttcatttcttatttagtacggtgcccactgaaattttacaacgtataaaatattananatntatttatagccataaaatctacataactaanataacactccaaaatattatttaattaactaccatctattattttttcagtccgaaaaatattcactattttttttaatatgctaagaaacattatgacaagtagcgggacaacattgaaaaggacaatgatggttggtttgttgaagcggggaggccaagtaaaacatcctcttatggttgcgtctctgttctctcctctccactgtcttttcccctgccttcctctgtttttctctgttccatctttgagttgaaaacgatattatcagatatttctctccgtgttactcagcaacacaacttttgttttactcttcccctttgattgaattgtatcatcaaagtttctgtgcttatcaccttgagagtttcatagacgctgtatcgctatatggatgctgagtactctttcttctgtttctgatacgtgtgttttgggtctcttcaaattttggttttctctgtcactttggcttatccctcgggcttcttggattcttacccttcaggaagcttttccttgtctttcccttttttcacctaattgattttttttaaggtagaaattccgaattacaatatttcatttctaggatacaattgttttgggcaatgtccttcaatttaatatttttcaatccactcttattctccttgctttggttacctggatattcctaactaggctaattttatgtttcatgtgttgctcttaatttaacaccttttaatttatatttacttggtagaagaagaaaaaaaaaaggaaagaaatattttgttaccagagaaagaaaaaaaaaatccatttttgtcttccttaagttatccttcaccatgaaatttctcactttcccggtggatttgtgatatcttttcttttacttgagggtttctgtgtttgcgggtcacaagaaaaaaaaaatgaaggaaaagttggattccccagtaattttgcttgaggactatttcaggagctcagattcagaatcaagttcttccaaagagccttcagcggattctgagtctcaagagct

SEQ ID NO: 80340 - DNA, 293 bp, Glycine max
  Clone ID: PAT_MRT3847_43564C.1
tctgtgggggggagaccccatcttttattgacaggctcaaaccatcatcatcttcctctctaactagattaatggcttcatcacctccttcttattccttgactcaccatgaacaactatgcccaagaaaccatccagtttgtgcccttcaagggagatcaacatatcggagtgcaaaaggaatgcttctgactacaggaagagaagaacgtggaacacgggactgtggctttgcacattggactgcctaacacaggaggccatgaccctgatgatgataatgatcatgatgc

SEQ ID NO: 80341 - DNA, 211 bp, Glycine max
  Clone ID: PAT_MRT3847_43565C.1
gccaattattcttaagactctctctttctgtcccattgtgagcattcttactcctggtctcttccgcgagatatccaggaatgcttattccccaattgcttctttacaggccttactgtgcatagcttctgagtgtctttggggctgtggcttaattattaattttaacttcatgggttgaattcgtgggggttccaccattgttggagga

SEQ ID NO: 80342 - DNA, 516 bp, Glycine max
  Clone ID: PAT_MRT3847_43566C.1
cccgcgtccgaacgtggcgtccgctttaatggtgactcggttgctgactcggaaaactcggagcacctgaaggcatacccttcggatcggtgtggtggttcgtttacgccgggatctccttttccctcgtcatcttcgctggaatcatgtcaggtctaaccctaggtctcatgtctctcggcctcgttgacctcgagattcttcaaagcagctgttctccctcctagaagaaacaagcagcggttatacttccggtggttcaaaagcaacaccagctgctagtgactctgcttctgtgtaatgctgctgccatggagataggtaattaaatgaattattgcgatgctccttttcgaattagtttctatttttaagttagaatagtttgaataacatgccttgtttttggaggagaggttattataattccagtggattaatttatgtttcatgcaatgtttttacgagaaattactttggaattacgacttctgtgaaactagctagttgcaaatg

SEQ ID NO: 80343 - DNA, 248 bp, Glycine max
  Clone ID: PAT_MRT3847_43567C.1
gttgagaaggggaaagaaaaaaagaggggccgcaaaaatttttcggaaataacacacacggaacaaatggtgagagcccctcgcccattgcggaaccgggttggaacttcccgaaaaacaggaaccaggcccgtgcgtgctaacaatttttctattgttgggagaccaaaaaagatggggagaagggggggttaaaggtgtaccccgggggagaatattgagggaatcaaaatataaaaaacctgggg

SEQ ID NO: 80344 - DNA, 244 bp, Glycine max
  unsure (1)..(244): unsure at all n locations
  Clone ID: PAT_MRT3847_43568C.1
gcggccgacgcagcgtcttattctctaccctaatcacaagaatctcattttcaaactattgacatatcttcatatctggcccantttctcaggcgaggcagaaattcaaatcgtggtgttagccccacactacaacacctcctaacttgctcatgaacttttcctaacatatagaagaaaatatcctcaacaccactaattaatgtttgaccccccctcatatttttatcattcttatagattc

SEQ ID NO: 80345 - DNA, 161 bp, Glycine max
  Clone ID: PAT_MRT3847_43569C.1
cacggtccctccctctcatcatgatgatgtcttccggtgatatcctcgtaatgatgctacatctatcgacgcttcgttcgcgtctgaccccaccacacaaatgtctctcccaactgcgacagcgacttcatcgactaaatcaaacacacgccctactctaa

SEQ ID NO: 80346 - DNA, 179 bp, Glycine max
  Clone ID: PAT_MRT3847_4356C.1
aaagattttctgcctaagtttatggtaggtgctgtgctaggtgtgcatatctcatccaacctagagatctttaacaacggaccgagtggaagagatctctaggttggatgattttttatttaccactagaaatttagaatctgtaagtactgtactaaatttatttatttactttgaaa

SEQ ID NO: 80347 - DNA, 388 bp, Glycine max
  Clone ID: PAT_MRT3847_43570C.1
cacctacgaagctccaatcggctcgagctcactaccatcccctctatatctctttctttctttctcttcttctccacaccagggcacatttaatcaatatcgcgcacttctaaaatctacaactagaatcaattaaccataaacataacataaaattcaatacacctaacattctgctaccaaagataccttaaccttcaatcattataacaacaagcatattcaaaatgaccttatatctgaacacaacactccgatgcctccgacttctcctaccaatagaaattacgtatatgaccctcactacagcagatcactctacactaaatcatacatcacccaaataccttaaaaaacatttttcatatttattttactcgcttctctt

SEQ ID NO: 80348 - DNA, 344 bp, Glycine max
  Clone ID: PAT_MRT3847_43571C.1
cccaccacacaatcattcttttgctgctcaaggagaaccttctgctactggtccttatgataatttgtgcttttcattcctgcccctcctttgattcccaagtttcatgaagctgccctccacggttcgcacgaggcctttacaagaaatgcttacctttcgtttattgtgtcccgcggagagggagcgaaactcaattggcaaaagcggcgctcccataaagactgggccccaagagaccccaagtgtaatcaaggttttaaaagcccctcccgattcaaaggacagggcttttgtcctaataggcccaacgcccccccggatatcttattcccttagcaaaa

SEQ ID NO: 80349 - DNA, 255 bp, Glycine max
  Clone ID: PAT_MRT3847_43572C.1
cccgggctttatttcactgattagaccatgtttatataaatcgatacacctttatattatcggtcatgatataatctatgaggggcatagacatacgatgtgaatctattagtcaagtggactatcgacatcaatatgagtgaagcatatcacatgacctcttgacgaataaaaatgctaccctcgatccatgcctcataaggcatgataattaccaaaatcatcacgaattcacgataaaccctcatgacatgg

SEQ ID NO: 80350 - DNA, 423 bp, Glycine max
  Clone ID: PAT_MRT3847_43573C.1
catattcttgatcaactgaaatcctgtacctggagcgggcttcatatgaaaatcacgggggattctatcaggctctcctatttttctctagaaaaaaaactggaatatggggcggggggggttctaacatgcagagcaccaccctttcagagcacagctattaaaggtaccaaggcttacgaaacaacaatgggaacctcgtcctatgctgagtcgaccacggggggagatttgggtaaaattgaaatataggctgggcaagaaataggcatagaccaccggcggcctgatttgcgggaggggtttttgctagagcccccggattaattggggccaaaatgctgccctttaactgggcggacttggggcagcgttaacgcacctcccgggttatgggtcctgcctccaaattgaaaaccctgt

SEQ ID NO: 80351 - DNA, 310 bp, Glycine max
  Clone ID: PAT_MRT3847_43574C.1
ggctctcttggaccaaaatttggggttggaggggagcaagaacaagccacaatggcccccaaaggtacaccccagggttgcaaaaaccccgaattgattaggggaattggaaaggacttgagggcgcaaatttaccacaagaagggcctttgggcttttaaggccaaaaatgggggccttttaacttgccaccacccttaacccaaaccttaaacacccgcttaaaaaccacccaaattttaacctgcccattatattaagaaaccccttgttaaccaacacaaacccaaacccgcttaacttaaggctt

SEQ ID NO: 80352 - DNA, 571 bp, Glycine max
  unsure (1)..(571): unsure at all n locations
  Clone ID: PAT_MRT3847_43575C.1
catcagcttacgttgcagtgtggcactgcacaatgtgcaaccttgtgctgagagactaatccattctcatgcactgccactatattctattttgtctctcactgcaccactcttcattaccttaattactcagagagagagagacatgatattcttcaaaatttacatttgatatttttgtatcatacgatccatttgtcctgttaggtaattaattatagtcatagacacaaaattcaacgtggggttgggtttggttgggtcgggcttggtttttcttttctgaatctttacttcagaataatagtttggtgtgatttccattactgttgtcgttgcctcgcagctttcattatgtccttcaactttccgtgactttcaaggtttccaaattgaattactattcttttcggaggttaattttatctattataaacttataaagttttgttttttatttaattcccttccaaatttgaatttaatgtttggtggaagaattttcagattttggttgncatttatctatataaataggtctatctatcgtggagtggtaaggccagagtgg

SEQ ID NO: 80353 - DNA, 349 bp, Glycine max
  Clone ID: PAT_MRT3847_43576C.1
aaaaggccggaaaggcggccaggcaaacaataaaaaaaaacacctggaccacccagggccaaacccaaaaaattattcaaaccgggccggggggcaatttagtgaataaactggagtcaaaacaaaaatggaagggggggggcttaaaaacccaggacccccaaaaagctaggggcccaaaccataaaacaaaattttctcacaactataatagggataacaaacggttttctaaaggacctaatttttggccccccttttttgcttaagaagccttttttaggcggcccccaggggggcgttggtgggggcgtcaaaaacaaaccttatagaatgcttgaaaggcctt

SEQ ID NO: 80354 - DNA, 315 bp, Glycine max
  Clone ID: PAT_MRT3847_43577C.1
acattactaaccaccaatttgtagttgaatgtgatgctaatgggatcttcctattttaacaggattttaccattaacaagagaagttgatgataacctagtccttaagtatcctatggtacggtatactggctgagcactgacgaacccccaatggcacccttaacaccccaagttgaaagctgattgaattagctcgttcccttatttggtgaattggcctgggcaagaaaatgacgtgtgtaagccgatgccattaggccgctggatcaacatgagcccgtgtgactgtggctgcgctagctgcctgggaact

SEQ ID NO: 80355 - DNA, 358 bp, Glycine max
  Clone ID: PAT_MRT3847_43578C.1
tttataaggagcagaaaatatcccaacagcttaaaaaaatttaataggccactccactacccatgtgggcattcatgtacatcacttagaaatataaaatggaccgaggattgaaaactagaatagaaacctagaaaaaacatgggcgtctcacggccaaactacccagccttctaaggttcctcaccatcatgagtgtacggcggactaaaagaaggtgctccttcaatttccatgcattaaaaagatagagaccagagagtgcacgcgagcttcactattttgcattcatatcgatgtacactataaagatacatagacgtcaacggatgaacttttaacggagaggcatacgggg

SEQ ID NO: 80356 - DNA, 108 bp, Glycine max
  Clone ID: PAT_MRT3847_43579C.1
ttcatgaatgagatgaagttttcgtgaagtgtgtggtcatgcgcagggtgtcctaggttccagaaagtgggccgcgtgagggcagtttggaattcaggctcagaagtg

SEQ ID NO: 80357 - DNA, 449 bp, Glycine max
  Clone ID: PAT_MRT3847_4357C.1
ataaaataatattccactttttttcattgttagatatattgcatattcatatttggaataataaacattgatttttttgtaagggggggacaatcacaccctactaaaaactccgactaagggctaagactacttttgggacaaaaccttggaatcgagagatatgaacagtgatgcttaaaagtgggagataatgaattctacacacacagtcattagtcacactaatcctaacccttctaactagatagggaaccccctagggggggctcttggtgggcaccttgaaaaagtccaaagtcaccccacctcgtaacttgtatgtcacataaagaaaactgtgctcttcccgaccgccctttatatactacccacggcttgttttgatccacaaactcaggcattggaccaagggggaaaacacaccttggagcccatggtgtcacaat

SEQ ID NO: 80358 - DNA, 361 bp, Glycine max
  Clone ID: PAT_MRT3847_43580C.1
tagacttatgcaagctcttggtttatttagcaaaaggtttcagcatatatagtaacatgaaagttacacaaggttcatatcaatcaaagagggctaggtcacaatataaacacacatggtcttaatcgttacatcattagtacattttttttttgttctcaattagtattcatataaacatattctagatttgaaaaccttaaattaaagcctgctagtgatgttaatatttctcactttaggcgttttgggtgttgcatctttaggcacaactatactgaggactccattttccacctgtgccttaatctgatccaccttcacattctctggcaattcaatttcccttgagaaacccccc

SEQ ID NO: 80359 - DNA, 405 bp, Glycine max
  Clone ID: PAT_MRT3847_43581C.1
tgcgagaagacgacagaagggatgaacgataacactgaactagctctcacgtttgtgcttgcacttgcacctctccaacgataacaacgacgagcacaagatccagccgaacatttttgtctataattggtggagttgttgctggaattttggggttcacaagcttgaaaggatttgtattttacttccttctcatgatggttacttcacttgggcttgtagccaaagccagattttcaatccactcctactttgactcctcgaatcgagttctacttgatggcttcctaggtggtctaatgtcattcgtgctgttctggacatttgcattcgacattgtacatatattttgacggaggatcgtgcacaaaatgtctctaaagaaggcaattgttggcttctgac

SEQ ID NO: 80360 - DNA, 969 bp, Glycine max
  Clone ID: PAT_MRT3847_43582C.1
agaactaagtaatataattgcttcagtttggtccataaaatttcaggaccggtcttatagcattagcaagtagagcttacaaagtttaaaaactggcaacataatgagagctatccaataacttgatgaagtacatgcattatgtcaagaatcaagataaagaacaattgccttcttaaagcagcaacagaagtcagaagccaacaattgccttctttagagacattttgtgcacgatcctccgtcaaaatatatgtacaatgtcgaatgcaaatgtccagaacagcacgaatgacattagaccacctaggaagccatcaagtagaactcgattcgaggagtcaaagtaggagtggattgaaaatctggctttggctacaagcccaagtgaagtaaccatcatgagaaggaagtaaaatacaaatcctttcaagcttgtgaaccccaaaattccagcaacaactccaccaattatagacaaaaatgttcggctgtaataaataattttcatgttgctttgcatattttcagcattaaaagtgagtaaatcattcactccatcccctggtttcttctttgatgaacccaactcaaaaggtccagccatactatgtgcctgccttgtctactcgaataatatgtaactggatcttgtgctcgagtagacaaggcaggcacatagtatggctgcaccttttgagctgggttcatcaaagaagaaaccacgggatggagcgaatgatctactcacttttaatgctgaaaatatgcaaagcaacatgaaaattatttattacagccgaacatttttgtctataattggtggagttgttgctggaattttggggttcacaagcttgaaaggatttgtattttacttccttctcatgatggttacttcacttgggcttgtagccaaagccagattttcaatccactcctactttgactcctcgaatcgagttctac

SEQ ID NO: 80361 - DNA, 1906 bp, Glycine max
  unsure (1)..(1906): unsure at all n locations
  Clone ID: PAT_MRT3847_43583C.1
ggctcgaggcacagttaagctagcttccattcggtttgatcgttctctctgaacaaccccagccatgggaggaggaaatggacagaaggccaagatggctcgtgagagaaacatggagaaaaataaacctgccaaagttagaggccaacaagaaggccatgaacatccagtgcaaggtgtgcatgcagacattcatatgtaccacatcggaaggaacgctctgcatgctttgagaagcaggatttctgatcccaacaatgtgttgcagagttgggacccaacactggttaatccctgtacttggttccatgttacttgtgactccaacaatcatgtgattcgcttagacttgggcaactctaacgtttctggaactctgggcccggaacttggccagctacagcatctgcagtacttggttaagctagcttccattcggtttgatcgttctctctgaacaaccccagccatgggacctctttctaaagttttgcttctttctttcttactttctctcactcaccaaatagttttctcacaaaggaggaagaatggcatctttcatttcactctctttgttgcttctctttctcaattaccccttcctttccctctcaaccaaccctgaagggaacgctctgcatgctttgagaagcaggatttctgatcccaacaatgtgttgcagagttgggacccaacactggttaatccctgtacttggtttcatgttacttgtgactccaacaatcatgtgattcgcttagacttgggcaactctaacgtttctggaactctgggcccggaacttggccagctacagcatctgcagtacttggagctctacaggaatgagttaacagggaagattcctaaggaacttggtaacttgaaatcacttattagcatggatttgtatgataacaagttggaggggaagattccaaagtcatttggaaagttgaagtcacttaaattcctgcggctgaacaacaacaagttgacaggatccatcccaagagaacttactcgtctcactaatctcaaaatctttgatgtttccaataatgatctctgtggaacaataccagttgaaggcaactttgaatcttttccaatggaaagttttgaaaacaacaggtttagtggtcccgagctgaaaggacttgttccatatgattttggatgctgaagaaagatagaaatcgcattattatcatctaaacagactacaatgaagaggcttagtttacgtagggagggagtatcacaaagggaaaagctggtgttattttcacatcaatatttcctcaccatttttacacttttcttaattaaaaaaaaagaaaagaaaaggaagtgtgaattgaaatctatgtttttcatattttattataaaaaggaagctatgtaagaatgctctcaaaacaattgtatgtaaataacattattgatgtaacccgaatatgaatctaaaaatgtcagatttgcatgtctatttatataataacatgattgtaccgccgctctctgtgtgattatgaaagtaaagagaaacttagaatcataaccaatggaaagttttcataacaacaggtttcctggtcccgagctgaaaggggttgttcgttttgattttggatgcttaagaaacacagaaatcgcattattatcatcttttcagatggcccccaagaggcttagtttacgtagggagtaagggaaaggatggtgggaaattcagaggggtatttcctcaccatttttacacttttattaccctattccagggagtgggagttggaatctacgtctttcttattttattataaaaaaaggaacctatgtaagaatgctctgaaaatccctgtatgtaaataacattattgatgtatgcttnannngaat

SEQ ID NO: 80362 - DNA, 1377 bp, Glycine max
  unsure (1)..(1377): unsure at all n locations
  Clone ID: PAT_MRT3847_43584C.1
ctgatctggagtggctctgtgatggagatgttcatgaaatactggtcgagttggaaggaatgggtggtggcggaaaggttcagctggaggtaaaaccggatgtcatagtcaatgagttgaagagaaaaggtggtggaagataccttttgttttagactttctaaagataaagggttttgattctgcattcagaaaggttattggttctgatatagtacaggccggccaatttgtggaatatgcatttgggcagttaaagtcttttaacaattcatatcttccgaagggccagcagtctgatattaataatgataagtatgacactgaaggtacacgggaactgagtgaatctgtttctatcttcaatatgccttctaatgaagctggtagtcaagaagcctccagagaagattgcgttgaacagaggaactcaaatgaatttcacaaacaggacaatgatactgaaaatggacatgcttctgaatcatcatcaaaagttagtgaggaagagctgtcaaatcaaattttttggaggaattgtgctaatgctagtgactctaggattgcaaacctactgactacagctgtacttgtatagttattttggttgtgatgatagagttttatgttaaaatggctcgagctcgagccgaatcggctcgaggcatttatgttcaatctggtcttgcaattcctggaggcacagatgatacaaatgataaaacaagcggccaacctgctattgctgcatttcagtcttcagttccagaggtcaaagaagcaacacagaatttgatgaggcagactgagtcaattttaggaggtttaatgcttttgactgcaacagtttccaaaataaaagacgaagggctttcttcagaagagaggataatcaaagaagattctgccaatgctggaggcaatgatatacaatattctactaatcagaagtttcctagcacacagaatggattagtgttggatgataaaaaaactgaggagatgaaagaacttttttctactgctgaaagtgccatggaggcttgggcaatgttggccacttcactgggccaacctagtttcattaagtctgaatttgaaaaattatgtttcttagataatgcatccacagacacacaggttgcaatttggcgtgattctgcgcgaagaaggttagtggttgcttttaggggaacagaacagactctatggatggacttaagtactgatctaatgctgtgccagccgggtaacatctgattccaatgtagttgtgacttgtttagtggtttaattggtttaatttttagccataaaaggtgttgttttcaagtcattgtatttgtatttaactagtatctcactgctntgatatag

SEQ ID NO: 80363 - DNA, 423 bp, Glycine max
  Clone ID: PAT_MRT3847_43585C.1
aaaaaaagaaatggtttgaatttctttttaataagaattcccttttggaatttttagttttaaattcccatttaaaaatttttgtttaatttaacgttaccgacgagatcttttttcatttttcgcatggccccggaaatttagagggggggaaaattctcctaatttatggcctaccctcccatctgttttttaaatagggaaatgcttttttccgttggggatagcaatgggttggccactctttggaggtttaatgggaaatgctctggcccaatttttttttatatctttttccgcttttgggtgaagtttatttattttttttaataaaggattccctccaaaagggtttttttttagtgaacggggcccaggaaattaccccttttttttgtaaagacgaaaaaacaattttttttt

SEQ ID NO: 80364 - DNA, 1902 bp, Glycine max
  Clone ID: PAT_MRT3847_43586C.1
aaactattaaggccaagcttaagtctgcttgctagcttcagggttggttgagagggaaaggagggggtggttgagaaagagaagcaacaaagagagggaaacgaaaggtgccatttttcctcctttgtgagcaaattgttttgatttgatccaaataatttgcgtagggaacgctctgcatgctttgagaagcaggctttctgatcccaacaatatgttgcagagttgggacccaacactggttaatccctgtacttggtttcatgttacctgtgactccaacaatcatgtgattcgcttagacttgggcaactctaacgtttctggaactctgggcccagaacttggccagctacagcatctgcagtacttgtatgagttttttcccttgcctgttacagaaaacaatttcatatataaggaggaaaaatggcacctttcgtttccctttctttgttgcttctctttctcaaccaccccctcctttccctctcaactggccctgaagctagcaagcagacttaagcttggccttaatagttttgatttgatccaaataatttgcgtagggaacgctctgcatgctttgagaagcaggctttctgatcccaacaatatgttgcagagttgggacccaacactggttaatccctgtacttggtttcatgttacctgtgactccaacaatcatgtgattcgcttagacttgggcaactctaacgtttctggaactctgggcccagaacttggccagctacagcatctgcagtacttgtatgagttttttcccttgcctgttacagctgagaagttcatatatgagcttctgtgtttaatctgttctttaaacatgtgccttctgacattattcaaacagtgaaattgaacatgataatttttggattttattttgtttgtacttgtacacattatttttgccccaggctagagttaggagactaccaaattatgaactattcccacaatttaatcctatctcacacatgcttggagattatttatgaggaaataatcacttatttttctgaagttctctctagtatccgataaaaatgaagccattatgtctttaaattaagctgaaccaaatgcgaacacaggagcaaatagatgttatatttgtgcctaatcaaatatgtatttaaaattttatttttggggtgggagttagttttgcaaaaatggattatgcataagagatactgaaattcttgattacagggagctctacaggaatgagataacaggaaagattcctaaggaacttggtaacttgaaatcacttattagcatggatttgtatgataacaagttggagggtaaaattccaaaatcatttggaaagttgaagtcacttaaattcttgcggctaaacaacaacaagttgacaggatccatcccaagagaactcactcgtctcactgatctcaaaatctttgatgtttctaataatgatctctgtggaacaataccagttgagggaaactttgaatctttcccaatggaaagttttaaaaacaacaggtttagtggtcccgagctgaaaggacttgttccatatgattttggatgctgaagaaagatagaaatcgcattattatcatctaaacagattgcaatgaagaggcttagtttacgtagggagaaagggaaaggatggtgttattttcagatcaatatttcctcaccatttttacacttttcttaactgaaaaaagggagtatgagttggaatctacgtttttcttattttattataaaaaaaggaagctatgtaagaatgctctgaaaataattgtatgtaaataacattattgatgtatgcttgactcgaatatgaatctaaaaatatcaaacttgcatgtcgatttatataataag

SEQ ID NO: 80365 - DNA, 323 bp, Glycine max
  Clone ID: PAT_MRT3847_43587C.1
gaagcttaatgtacataattggctttttaggcctggcaggccctaactgggggtttatgccactcatggcccttgagggcttacaactggggatgaaataaagaattggcttcaaaacaaagaattttaagagggaagaaaactcaggcttgaagtactgagagggatgcttttagatgggatcattttttcttgggactggctctctatttataggggctgaaatgggcttacgggcctttgtagttgcgcttaaggccacaccttgcgcttagcgcgttcaaaacgcgcgctgggcgctccatgcacccttggcctgtgct

SEQ ID NO: 80366 - DNA, 682 bp, Glycine max
  Clone ID: PAT_MRT3847_43588C.1
cttcatctgtgtccctctgcagatgaatttgtcattctggaagcaaaaccaaccatcatgctgcaaaaggggaaagtttcttaacttttcttctaccataattgattcttacttgctcactcccttatctttctcctcttctctgtcttctcttcctttatgttactgttgcagtttttgtttgttggagctggaccaaataactctggtattttgagtagttattatttaatttttttaaaattaaaacccttttttcggacatctgatactttctcttttattccaagatgttgctgctaaatgctctgctatattatatggtctgggtatttattcatctcttgaaatatccctaattaaacatttctagccttcaaacatggagcaatatagaacactagacaggatatttttcaagtttattattatgaagaaaaatctcatattaattccagaaagcagaagaaggtacacaagaaaatgaaaaacttctattgatttttttttcttttgcaactgttttctgcacaatggccttatatacagtaattcttttggatttgagtcattgggtgttccaattttgaagacatgatatagatttgcaaaaattaaaaaaatgtttctcatctcatttttttagttttaaaaagtaatttttaccataattttataccac

SEQ ID NO: 80367 - DNA, 300 bp, Glycine max
  Clone ID: PAT_MRT3847_43589C.1
attaataatgtttatccattcttattggaatttttttaaaaaatggaccacacggaatagatgcaaaacataatcatcatcaccaccgaaaatttttgcaacggacccagcactaataaaggtgtcataaaactccatgaaacaaaatatactccgccccaaggtgggggaggaaaaggttttaaaaacaatggaatccacatgacagatgaattaaagcctaacacaaaaacaataaggcattggaaaagggacggcttttacttgccctgccgccggagaaaaatgatggacgaaact

SEQ ID NO: 80368 - DNA, 695 bp, Glycine max
  Clone ID: PAT_MRT3847_4358C.1
ggcttgattatgaatgccctgagattgtgggtaacatccaacctgctccaaagaaaataaagtttgaagactgagtgggtaacctgtctcatcatctttaaaagatgatttttctgcatatcctgaaaggtactagagaacttaatcaaagtgaggttgtttttgttacctttcttcccttagatgtgttagagtaaaactgctactgctgttttaggacttagtattagcatttaactattgtcaagcctttgcaattttgggacttaattctgaaaccttgtgttctcagaaatattttatagaagcattatccgtttcttaaaaaaaaaaaaaaaaaaaaaaaaaaaaaaaaaaaaaaaaaaaaaaaaaaaaaaaaaaaaaaaaaaaaaaaaaaaaaaccccaaaaaaaaaaaaaaagggggccccccgacccccattttttttcccttttagggggggtaaatggcccccttggggaaaaaagggaaaaagggtttccctggggaaaattttttccccttcaaaattcccaaaaaaaaaagacccggaaaaaaaaagggaaaacccggggggccctaagggggggcccacccccaattaatggggggggccctattgccccttttcaaaggggaaaactttggcggccattttttttaaaaaatcgcccccccccgggggaagggggtttt

SEQ ID NO: 80369 - DNA, 437 bp, Glycine max
  Clone ID: PAT_MRT3847_43590C.1
ttcatgcgtccgcccacgcgtccgtgttttttgactgtttctttttcccttcctttttggtttctagtcctatctcagccttcctaatttaattgttgccttttctgctttgtctaaattgtcaatcaattgcaaaagccatttatatttgctctattctgtttactcatttgaatgtctgttcagaaatgctgaaagatgcaggtctaaattgattgataaattcatcacaaccctaaattgtcattttctgcttttgttatgttactcaaagtcaacctttaggtgtttggatagatgtatggatatatggtggacatggtcttaactcttaaccatatatctttgcttggttaagtttcactgattgtgccatacaggatttaaggcatattatttcttcctctatgggtttcctcatgtcttttacagggaca

SEQ ID NO: 80370 - DNA, 296 bp, Glycine max
  unsure (1)..(296): unsure at all n locations
  Clone ID: PAT_MRT3847_43591C.1
ggnnnccaaaacaagatacatgtacttgccaaaaatagttaaatgttgttcctcaccttggccaagccttttcggtactaaaaaaccattaaatttacattggaaataccctttggtcaaaatctggttggctttgtggccaaacagagatggtaaggggaattaaaaaaaaaagtttggggcatgaaacgagaaaggaaaagcgattgaaaccacgtgggttagggatttaattaccccctttttttactttctttgaccatttcttaaaggttctttcccaaccaaaaacacgg

SEQ ID NO: 80371 - DNA, 404 bp, Glycine max
  Clone ID: PAT_MRT3847_43592C.1
aaaacaaaaaaaaaaagcttcttcaattactgaaaccaaagggtccaacaaactacacgtttataagctcaaggcctgtcaaaacccaataaaattgcagtttgcgaaactattgttttttataataaagcccctaccctacattgggggaaactcgaaaacctccatttttcaaccaaattattcatggcaagggggaagcatcattgtagcctcaaatgggcggtgagaggatgattgggtaataaacccccgggaggcgggggctgacaccagggacaccccggaaatttggtagcggttcccggaggggtcctaatagagcttaaagaaggggtttacactggttggcccaaacaggcgaaaagcctgttcgatggtgaaatagggcggcatataaaatg

SEQ ID NO: 80372 - DNA, 117 bp, Glycine max
  Clone ID: PAT_MRT3847_43593C.1
ggttcactgattctgcaacgaagttagcccaaacaatactggatttcaacagagaagagctcccgcatttcattcttgcaaactggacaggcttttcacgagggcaaatggaccttt

SEQ ID NO: 80373 - DNA, 624 bp, Glycine max
  Clone ID: PAT_MRT3847_43594C.1
aagattctgaacataagagttcaaagaagagcatctcattggcaggtatggttgaatttattgggttgatcaaggtcaatgtggttaaaggcactaaccttgctatccgtgatgtaatgagtagtgacccttatgtcatcatatctcttggtcaccaatcagtgaagacacgtgtcataaagagtagtttaaatccaatttggaatgaaagcttaatgttgtcaattcctgatcacattccacctcttaaagtgcttgtgtatgacaaagatactttctcaacggatgattttatgggcgaggctgaaattgacatccaacctctagtttcagctgcaaaggcatatgaaaaatcttcaatcaatgagtccatgcagcttggaaaatgggtagcaagtggcgacaacactcttgttaaagatagtatcatctcccttgaagaggggaaggtcaaacaggagatctcagtgagacttcaacatgttgaaagaggagtgttagagattgaactcgaatgtgttcctctaactcaatagttgagatagatgttaagggtcaaaacttagcataacacaatttggagcattatcactatagatgtcctttctctgttctcctttgtac

SEQ ID NO: 80374 - DNA, 242 bp, Glycine max
  Clone ID: PAT_MRT3847_43595C.1
ccgggaaaactccaagtaaacttattcatagcaatagtcttatcctatcatttagtttccccgcctaaacatgaagctattctcgttttctctagcatgtgtttttgtttttgcccttctagcttcttccctggcttcagcagctatcgtggaacacattttcaaagtaaattactaccccatttgatttcttttctctcttcatggttgtttaattatgtaagcaacttagtgctgtctat

SEQ ID NO: 80375 - DNA, 971 bp, Glycine max
  Clone ID: PAT_MRT3847_43596C.1
ctccactcgtacgtaggctaagcactgaggaaagaaagaaaacatgttgatgaaaagagatgttgaaagcggtggggatggcaatgccaatcccaggccactctaccccgccatgcttgagaaccctcaactccgttgggccttcattcgcaaggtctacaccatcctcaccattcagttgctcctcaccatcgccgtcgcctccgtcgtcgtcttcgttcgccccatcgctcttttcttcgtttcctcccccggaggccttgctctttacattgtcctcctcattgctccattgataactgtgtgtccgctttactattaccaccagaaacaccctctgaattacatccttctcttcattttcaccgttacgttagcctttgcggttggattgacttgcgcctttactagcgggagaattattctggaatctgtgatattaactacaatagtggtggtcagcttgactctgtacaccttttgggccgcaaaaagaggacatgatttcaactttttgggcccattcttgttcggagccttgctagttcttatgctctttgcctttatacagcttctgtttcctctgggtaggatttctacgatgatctatggggtcctggcatcaatcatattttctggatacatcatatatgacacaaacaacctcatcaagagatacacctacgatcagtacatatgggcttcggtcgccttgtatttggatgtcatcaacctcttcctttctctgcttactatttttagagccgttaactaaggacataattctagtagcatatattccttgccttggtacatgtgtttgctttaaggagagctagaatgtcatgtcaaaagatacttctttatgaaattatctcttgagtaattccttgtaattgtcatcttgtcgattaaaagatggaattttgcattgaattgcaaatatacatgtcatctttatgcctttcttc

SEQ ID NO: 80376 - DNA, 446 bp, Glycine max
  Clone ID: PAT_MRT3847_43597C.1
aaggggaagtaaagcttagttactacagtttgaaaaaacgccaagcacctttcgctaaacaatcattctgggctgggcccttttcttgtccctggcaccaattcattcctcgaagttttcaccatcaagccacccatatcgatcgatgaatcaaccctcttgatcatcatcatttacaatctccttgaaccaagaaaccgacaaaagttttttttgacctcgccttcctcatcctctccctatccctctcctgaactctactccccgaactcaacaacgcccttattcgaacctgcatgtgggactccgtctccctcaactccagggtgccaccactccgactcctcgtcgaactcgtcgagcctcctctccctaggaccccagccgtagaactggtcgccatgcccccaccgatcaaactcccacctccttgttgttgatttttc

SEQ ID NO: 80377 - DNA, 193 bp, Glycine max
  Clone ID: PAT_MRT3847_43598C.1
agtgaatctacgcacaatatgagcgccttcggcggtaagaattgagcgtgatagacttaaagatggtatgagcgtgggaggcaaccatacacacatataattgacgtgcatcaatggtgtcaggaggatgaaggttcacggcgggaatgtgaattggcacgctttgaagctttatactggcatcgacacctga

SEQ ID NO: 80378 - DNA, 802 bp, Glycine max
  unsure (1)..(802): unsure at all n locations
  Clone ID: PAT_MRT3847_43599C.1
cccacgcgtccgtacggctgcgagaagacgacagaaggggaagcaagcaaacaaagtcataaagtggtggttgagaattttctttttccaaagaaaaacaagcgaacaactcaacgcgttctagttttttttatagacaccttctaaaaaaaactcaaccccaacattctcgtacacttgatccttcttgggttgtcaacaattttccctcttttcattttccattgctgaaaaatcataccttgaaatcgaaagcccctgttttgtttttcttttcgctggtgttgtgagagaaatgtgccctttaaggtttatcttggtgttcttctccgccgtgctggcgggttattttgcgtggaaaacggtgcgttctaacccgatcgaggtgttttccgaggattctgccgatgaagataaatcctccaagaagggagattttgatttcaagaagatgattcagaatggattttggggtttcgttgacatggctagtgggaggtatctgtggaggaatttgaggtcaaccaacaaagacgccgaattgaaaagctcttagggacctaaccctaatcctcttctttaatcacggctctttctttgtttagtgatttgtcttgtggaaacctacgtgtaaattcttgtattcccacttttctttatccttgtttgtgggttcaattcaagaatgtttggtggataaattggccaaaagaatcgtggaattctcatcattatgcagaatattatgtccggcaaaatcgttacctcgcggctattttctcnnnnnnnnnnnnnnnnnnnn

SEQ ID NO: 80379 - DNA, 1282 bp, Glycine max
  Clone ID: PAT_MRT3847_4359C.1
gtatgctctatgttgttcatgttacattcaacttcgtatattgttttgcctcccacaactaaaatcattccctacaaaatccaaatcaatccaaccaatgggttttgggcaccaaaccatcaattcattctctcccacactaaatcaaatactagaattatctaacaatatatatatatcattcccaaaactaaatggcccaatcttgagagcccaaatgttagataacaacaacccgagattgttggagtgaaagaagcatgcagtttgtaatcgcatcgtaaatctgaaacctgtcagaagctaggagtggagcaacactcgaacagaacagtacagttccttcctcaccaacgcacctattaataattacaacagagagaaaataattgctgttacagaagtagttgagttgtgattgggaagtcactgagctgaggtttgaagctaacgttccaattctgtggtcaattatgactacagtccagagtaagggggcagcaatgggaactgccacaactgagaaagcattcaaaagatggggcaggagaaagaaacccatttgtgagatatggccttcctatgatctccctcactgtccttggttctataggccttgcccaactcttgcaaggcagcaaggatattgcaaaggtgaaagatgatcgggagtgggaaataattgaaacaaaaaaagcattatctaagactggaccagtgaatgcatacaatccaaaaaagatttccttggaggatgagctaatggctttgcaacaaaaggtggacattaacagctatgagtacaagaaaattcctaaaccaaacaagggcaatccagactagactagagttgtggacttgaaacaactttcgtcggaatttcccgtgtaccatgctcacaaattaacttttatggaatcaagagccagttaccatcttgaaagtgaagttgttattgccctgcatctttagtgttttgacttttgattatgacattatggaagaggaagttgagatgaattttgaaacttttgcgtatcaaggatcttttagtacgctccagggaacagcaaaaagtacttgcttggttctattttaataagggtgaaaaagtgtaaatgtttcctgtcatgttttagtttatcttttttaccgatcttgcagcgatgtgcacattggatgttataacgataatgctaattgagtcacttttgctgtcaaaacactcaacacgaggttcatttcagtgttcacaagtaaaattgctcgtggcattattgga

SEQ ID NO: 80380 - DNA, 1423 bp, Glycine max
  Clone ID: PAT_MRT3847_435C.1
cggaagaatttctcatcaaagatttcacttgttacctcaagagaaaaatgcctttacagggtcggttgtttctttcagcaaggattctggggtttcatgccaatttgtttggacataaaaccaagtttttcttcctttgggaagatattgaagagatacaagtccaggattctgggtttcatgccaatttgttcggacacaaaaccaagtttttcttcctttgggaagatattgaagagatacaagtgcttcctccatcattggcaacattagggagccctacattggtcatagttctgcgaagaggccgaggtctcgacgcaaggcatggtgcaaagactcaagatgaagaagggagacttagatttcattttcaatcttttgtttcatttagtgctgcctccagagcaataaaggccttgtggagaacaagaatactgaacccctatcagaaagaacaaatttcagaagagcatgaagatcaagaaagatttgtaatcccggaagactctgcatctatcttagaggatgaagaaaaaatgtccagaattttctctgcagaactgccaatcaagatgaaatcagtgatgggaatttttgatggaggaaacctggagcataaaattatgcagagaacaggatgtacgaactatgaaacaacatcatgggaacaagtaaagcatgatgtcttcgagaggcgtgtttcttaccaattcaatcgacacgtgtcagcttttggtggtgaagtcacttgcacacaacaaaagtttccaaatgcaaacactggaggttggactgtgattgaagttatggatcttcacggtgtcccatttgctgatcacttccatattcattttaggtatgaaatagagaaatcctctcttggtgactgtgcttgcaagtgtgatgcttacattggtattatgtggcttaagagctcgaagtttcagcagaggatcaacaggaacataactgcccagtttaaccttcgattgaaggaaatatttgaactggttcagaaagagattttattaatgtctcagaactctcatggataaggatatgttaggcagatagaataaactatatcacgccatagaagtgtttggagatctctaagtttatgactcgtttagtctgtggatttaacggcgggcaaacatgtagcaaattaagaaatcattaaggatcatcatgatctccaaaattcccaagaggtagttaatcctctaatatatcattccccaaaaaaataatcatgatctccaaaaatcttctataactgaattttattaacccttttcttgtaaattgaaacatttaattaagctaagtcaactgaaaaatttagttaagccaagtcaatggatctacgtggtggtattaattggatcgtgtagtaagttctttatttttttgagag

SEQ ID NO: 80381 - DNA, 115 bp, Glycine max
  Clone ID: PAT_MRT3847_43600C.1
acgcgcacacctttctcaacttctattccacatatctagtcctctattattctaactcatcctatggagagggagcgaatgagatcatggagcttcgttcgagcttacgagactc

SEQ ID NO: 80382 - DNA, 482 bp, Glycine max
  Clone ID: PAT_MRT3847_43601C.1
tttccttccttcgctaagacactcaccggcaagaccatatccctataggttgaaagctccgacaccatcgataacggcaggggcaagagccaggacacggagggtatacgcccggaccaggaacggataatatcctccggaaagcaggtagaggacggccgcaccctgaccgactacaacatacagaaggaatcaaccgttcaccttgaactacgcatacgaggaggcatgcagatcttcgagaagaccctcaccggcaagactattaccctagaagttgaaagccgcgacaccatcgacaacggcaaggctaagatccaggacaaggagggaatgcccccagaccagcagaggctgaacttcgacgggaagcacctggaggacggacgcacccttgatgactacaacattcagaaggagtcaactttacacttggcgctgcgtctacgaggtggtatgcagatattcctgaagactcttac

SEQ ID NO: 80383 - DNA, 469 bp, Glycine max
  Clone ID: PAT_MRT3847_43602C.1
tttctacgtgaagctcgacgtcatcgagtggaacacgctgttcaccaactggcgccgcggcgccaaggatccctcggccaacggctccaacgcgaccaacgtcacctatgcggcgatggacccgttcttcgcactggtgcgcttcctgcaatcgggcatggcgccgccggtctcgaacaattggggtttcatcaacaatcccaagttcgacgagctggtgaagaaggcgcgccagaccttcgatcccgccgcgcgtgatgccgcgctcgccgagctgcacgcggcctccgtcgacgacgccgccttcctctacgtcgcccacgacgtcggcccccgcgccatcagcccgaaggtcacaggcgtcgtgcagccgaagagctggttcatcgacttctcgctggtgtcgatgcagtagttcgcgccacacgcacgctgtaccctctccccttgtgggagagggtggcttcgc

SEQ ID NO: 80384 - DNA, 212 bp, Glycine max
  Clone ID: PAT_MRT3847_43603C.1
gtaaaaaaggagcctgaaactttggttctcaatttaatgcatttcggagttttttacgggagtatattctggacaattaccagcgttgaatagtgcagaagaaaaagtggcattattttgtacaaaaaaaaaaagcctcttggtcaaacaagccgaataaaagaagggaaattagtctaagggaaaaaaccggcattcaaatcaaaagagat

SEQ ID NO: 80385 - DNA, 1842 bp, Glycine max
  Clone ID: PAT_MRT3847_43604C.1
cgtaagctccacgcgcggctccaggcgtgcgctcacaaacagacacagagtgcgttcgttgacgacaaacacacacaaacacacaacaaaagctcgccggaaaatctttctccggcgacctggaattccgacgaaggtagttgcggctccttcgtcccgaaactgaggccctcaaagtataaactttggtggtggtgggtaggatctggcggtgtatgatgggatcttgcatatgcccgttggagactccggcgaggttgctttggaccacaagcttcttccgtcataagcttatgatcttctaataattaataattcacgcacacaaacaaacaaacaaacaaacaaaaaacacttcataacaacaacaacaacccttctgaaattctcaacacaagtttcaaaaaacagagtaaaagaaacagagcaaaaacacacacacaaaaacacaaacacagacaccttttaagtattaaggtgtctctttctctccccggaaagtttctccgtcggcggtggtgattgaccggagtgccatggagtctggacggattttctttggtgcctctgcttcaagcggcaacaacatgctctttctcggcaacactgaacttgcttttcgagggagatcgattatgagcatggaggaagcctcgaagaggcgacctttcttcacctcaccggatgaactgtatgatgaagagtattatgagaagcagtcgccggagaagaagcaccgcctcagttccgaacaggtccatctgttggagaagagctttgaggaagagaacaaattggagcctgagaggaagacccagttggctaagaagctgggattgcagcccaggcaggtggctgtgtggtttcagaaccgcagggctcgatggaagaccaagcaacttgaaagggattatgatgttctcaagtcttcatacgataccctactttcatcctatgattcaattatgaaggagaatgagaaactcaaatctgaggtggtatccttaaatgaaaagcttcaagttcaagctaaagaggtgcctgaggaaccattatgtgacaagaaagttgatccaattccagtagatgaagatatggctccgattttcggcacaagggtggaggaccacctgagtagtgggagtgttggaagtgcggtggtggatgagggtagtccacaggtggttgttgacagtgttgattcatacattctagctgacaactatggtggatgtgtgggcccggtcgagagggttcagtcggaggaggaggatgggagtgatgatgggaggagttacttggatgtgtttgtggtatctgaaactgagcaccaaaaccatgaggaaggagagacattgggttggtggactaatatgtattatgttggataaaatggtaatgcagcagtgctttcgaaattagatgcttaattaagaaaacgtaataatattgtataatgtatcatgtgggcgagggaggaaaaagtaaacgcctggattgggtggcttggacccctaggaggagttgaagtgtccttaacccgagtttaataaataaagtctagtagtaatttggtcaatggtgtcttgtgttggttaatggttgtactgccaaaattaaagtaagtatatttcttgttcaagtattaaaacatggttaattagtactatacaaaatttgagctgtatcttttttttttttgaatccaattttcgaaaaccattttgccaacttaatcaaaataaaatcgggggtaaggcccccaaaaaaggcaaagccctccccattgtcttgtaacccgtttcgaatagggcctattagcaaaaattattttccccccct

SEQ ID NO: 80386 - DNA, 761 bp, Glycine max
  Clone ID: PAT_MRT3847_43605C.1
accctgatccatctgaatcccaattacttgacatgtcacactatgatacaatgctggaaactggggctgcatttgcccacccatttggcgaagataatgtggttctggagaaaattgatgatttgattcttaaccgatcatctagtgggttggttcaaggagagtggtgttcaaactcagaaataaacaagacaacaaaggtttcagaagctgaggaagagttctgctcgcaatctggcaatattgatgctgtaaaaccagggccatttggcatcaagcttaaaactctactagctgatattgagaacacaaggaaattcagaactagccagtgcaaatcctttgaaagttggtgacaaaataggattttgccaaaaccactttgaaaatggatccttttttatccatgctaactgaatgagactgtctttatgagattgcgcattgctgttatttaggcctggaagtttggaacagaagattcaagattgtgtttgctcaaagctgagttttgtttccatttctttacactcacagcacaattctttttgttccttttggtacttttttccatgaaaaattttaggattggtttggctaaaaacttactaataaaaaaaacatttaagctgggacatttgtagtttatctgttcatacttacagttgaagcaatcaagctcctagagttgcatatgaattgtataaatcacatactatatctttctattctatttaaataagaaaatatccatggccccc

SEQ ID NO: 80387 - DNA, 275 bp, Glycine max
  Clone ID: PAT_MRT3847_43606C.1
aaactggtcaccacattcgggattgttctcgtactaatggtcggcagcgtcgtagttctcatgcatcggtaaagccctcggtcaatcatatacttgtccctattgaatcctatcatctttttgacccctttggtaggcgtattaagcatgacacacgatttgaatatgaccggattccagctgttgttgagctatgcgttcaagccggtgtagatatcccagaatatccttcacgccgaaggaccaaccccatacggatattagggaggagagta

SEQ ID NO: 80388 - DNA, 368 bp, Glycine max
  Clone ID: PAT_MRT3847_43607C.1
tgtttactgtagcacgaacgacgggctttttgggtctaccattaaagaaccagtgggggggcgatctatagtagaagctttacttttaagtctacgggcttattctcattcaatatgaacggtagttacaccatatgcggaagggctcacaccagctcgaagaaaagcttatcattacgtgtggcagaaaccaaaatagtgatgatataacaagggttgtctataaaaacaaatttcttgggagggcgctcacacaaataaagtggccgggaggtgggcatgcttaatagtgaaaacggcaggtatgagtgcagatagccctgaagctggatgtaaaggaccgacagtacttgtaacagagccaaatg

SEQ ID NO: 80389 - DNA, 698 bp, Glycine max
  unsure (1)..(698): unsure at all n locations
  Clone ID: PAT_MRT3847_43608C.1
ccctctctagaattgtttataggttataggaatgatagatgcagtttttattgttccttacacgagggtcaattagtaatcttattcgtaaaagtagctaggattgtgaaaatcctttacttatgaggacggtactaccttttgcttgacaataattataaatgattctctgtatcatcttttccgtttcgtgaataccgtgacttggttaatgtgacttgtgaactactacaatttacccaaacattttattaagagtgccaaaatacataacatgatgaataaattataaagccttttgcacttctgtaaacaccgcatgtactcagtcctccttggtctcacatctggcaaatttgctaattgtgtatttgtaacagtttttttttttttgtaacttattgtctaaaaatatattggttgaagaactaattaaaattgatttttattcataatataccaaaaaaatcttttactaatggaaaaatgttaggtgctaagatttataacctctatctgatgataggagtactaatatttaaggtaataatatatgcattgaatttctgtatattgaagacttatttattagaccaatattatactgttaattaatggaaaaggaccaaanntntntatatatttgtatatgtatatatatatatatatatatatatagagagaattcaattttttta

SEQ ID NO: 80390 - DNA, 1624 bp, Glycine max
  Clone ID: PAT_MRT3847_43609C.1
ccttcgcgttcgtacggctgcgagaagacgacagaaggggaaacaaaaaccatcaccaaaaaagaaaatgatgctcggagagcaccatcgcgcgaatccaacggttcacgtgccaccgtggccaacccacgacgatccaacggccgagatgtactccgcgtttttaacaaacgacgtcaatgctggtgagtactctccgtactatcttcaagaagcactaacggctctgcagcgttttctgccgtctaacgaaacggacgctgactcggacacggaggctcaacccgacgcggcggtggacgcgtactcgtgcgaccatttccgcatgtacgagttcaaggtccgtcgatgcgcacgtggcaggtcacacgactggacggagtgtccgtacgcgcatcccggcgagaaggctcgacgccgggacccgagaaagttccactactccggcgcggcgtgcccggagtttcgcaagggaaactgcaagaaaggcgacacgtgcgagttcgcgcacggcgttttcgagtgctggctccacccggcgcgctatcggactcagccttgcaaggacggcacgagttgccggcggcgggtgtgcttcttcgcgcacacgccggagcagctgcgcgtcttgccgatgcagagtccgcgtagcgcggcgaactcgtctgagtcctacgatggttcgccgatgagacagatgatgtctccggcggcgttcatgtcctctccggcggcttctctctctcctccggagtctccgccggtgtcgccgtcgatcaacgagatggtggcttctctgcggaatctgcagcttgggaaaatgaaatcgatgcctcaaagtagaaacgtttcggtcggatcaccgggttacggttcgccgagaggatcggtgctccgacccgggttttgcagtcttccaacaacgcccactcagcaaccggttcggtcaggggtgaactgtttcgatttttgggatcagagttgtgaggaggaaccagttatggagagggtggagtcagggaggggtataagggctaagatgtttgagaagctgagcaaggagaattctttggaagggtcgggtacgggttcgggtcaaggaagtggtgctccggatgttgggtgggtctcggagctggttaactgatattattattaatatttaacaatgcagatttattttgggagatgcgagtctgtgtaaatattttttattctatctcgtggtatgttatggtatggtatttgggtaaagactgaagagaagaagtgaaggatctcttttttggggagtttgtcttggaaattcatcaacatcgctctattgatttgggaaattgaaagtatccgaagccttttgtacagttagcttactattgttgttattacgaattactattattattatcatgtgctatgttacttaattaactctatcgtgtctgttattttcacttacttgctaatctcatctcattgatgtacaaatgtataaatatgtaggatccaagaggaatcttgttattcaaaaaaaaaaaaaaaaaaaaaaaaaaaaaaaaaaaaaaaaaaaaaaaaaaaaaaaaaaaaaaaaaaaaaaaaaaaaaaaaaaaaaaaaaggggcggc

SEQ ID NO: 80391 - DNA, 223 bp, Glycine max
  Clone ID: PAT_MRT3847_4360C.1
cctcaagggtgcatttttggctgcagtgctctgcatggctgtggtgagtgcacccatggcacatgcagctatcacgtgcgggcaggtgacgaatagcctgatcaattgcatctgtttcctccagaacggaggaacgccgccgtcgggatgctgcaactgagtgaagagcgtcaatgccgccgccatgaccaccggcgaccgccagacggcgtgcaactgcctt

SEQ ID NO: 80392 - DNA, 300 bp, Glycine max
  Clone ID: PAT_MRT3847_43610C.1
tatgcttagaatctggggcaattaaggatgtagctgcatgttcttttatttttgtgtgttcttcttggtttcccccaaggattcctgtctgctgtaattttcccgtcacggtcttctataaagaagagaacataagtttgaggcttcagtcctcactttgtgctttaaaccatgtgcagtctatgatagcctgagccctttcgctcagtccacgggatgccccaaagcgcttaattaaaactgaacctaactggctcgttgcatttgaaaacattcatacatacacatacgcatgcaggt

SEQ ID NO: 80393 - DNA, 213 bp, Glycine max
  Clone ID: PAT_MRT3847_43611C.1
gaatcgccagacgacaacaaaacatccggtctatcaaaaggcgcgaccgctgcagtagcagtcgcagtgaccatagcgatcatcgccacatgtgctgcactggcatggcacttgtacgctcgccgtctcaagaggcagaacgagatccatgagatagcgccagggacaattttccaccacaagccggcgagtgagctatctgccgaagagctt

SEQ ID NO: 80394 - DNA, 353 bp, Glycine max
  Clone ID: PAT_MRT3847_43612C.1
aaaggaagggaaacgggagcactcctaccctttcctttattttgctctttcactgaaacttaaaagggattcaaactggcaaaaaaacccctgttttttatgaggaaagcaattttttcccccaacactaacagggctggcccacaacaaaaagaggcttaaaattcaagggacaggggttgacctttcacaaaggaaaaaaggtacatttgggtaagggacccggggataaatgattgacccctttgagaaatcatgggggtctttttttttttttttgccttttggtccaacctcttgggaatccttttcaagggcagaaagaacctcccgggcttcaaaaaattcacctt

SEQ ID NO: 80395 - DNA, 421 bp, Glycine max
  Clone ID: PAT_MRT3847_43613C.1
gaaagagactttggtctgcctatgaaacatgaccaaagtgtctgacccgcttacgggaggtaaggaatcttgaaatgtggaccatctagtaagttggacgacccgatatacttgcaggccgcgatgattactgaacttggtcacaaatcgtactcagactaatatagagctgtataggctgagatattttgaaagacaagtggcgcaactgacgcgccatttcaaaaatctgcgcaaacaggattgtctgaggatctctctgctgtgaggatcataacacccggaatgtgtagttaactctcacaacatgatcgatttatttgacattgcctagacctgagcaatgcagaataagatttattagtgagtcgaacacacacacgcttcaccacagtttttatgcaatggagagatttctggg

SEQ ID NO: 80396 - DNA, 337 bp, Glycine max
  Clone ID: PAT_MRT3847_43614C.1
attcatttctcacgtttttgttattggaatcccgttcaagattcgttatccttttgagtgcttctcatcgcacttctgattttcactttggtgtcgttagcacagcttccaccatacacgtatgtaagtggattgggtgatcccaagggaattattgcagagaataggtacgacacgatatgctggaggggtcaactggacttatcattgggatttccataagtgttgtgattggggttggattggcaacttcagcactgttctgtcatagatatcagcggaagcggtcgcaaattggcaagagcagttcgcggatggcacataccataccaatccg

SEQ ID NO: 80397 - DNA, 274 bp, Glycine max
  Clone ID: PAT_MRT3847_43615C.1
aaatcccttgccactcgaactaatcatcatatttaaccactacttgatctaaatttcctagtggggaattcatttcatgtacttacatagtccaggtaccctctccatttcacgcattgttgtcttttcctaacgttattactcaagggatatggatgtttggagtcttcaaaagttggcgaagacagcaccatctaaagcattggtcatcagaatcaacttggtctgtcttgccatctttctggtcgtctatgcaacctttcttctccgtcca

SEQ ID NO: 80398 - DNA, 203 bp, Glycine max
  Clone ID: PAT_MRT3847_43616C.1
gtggaatgcaaatctgtgttaagactctgaccggagagacaatcacccttgaggtggagagctctgacaccattgacaatgttaatgcgaagattcaggacaaagagggtatcccaccagatcaacagaggctgatctttgctggaaagcagcttgatgatggccgtacccttgctgattacaacatccagaaggagtccact

SEQ ID NO: 80399 - DNA, 325 bp, Glycine max
  unsure (1)..(325): unsure at all n locations
  Clone ID: PAT_MRT3847_43617C.1
tggatcctctagagcggccgcnnnnnnnnnnnttnnnnnntttttttttttccttagttgatatagattcattgacatatactccaggaatcttttaaaataaaaatgagtcttatgcgtcaagaatggtcgggatactcattggtgagcaagactgaaatctgtgtcaccagttaaattggtctggacagacattgctgaattattaagttctgagaatttttctagagtaagaaagagcattttaggatatcctgactatagatcttattattgattgtacctttttggtacaaaaaactttattcgaaatcaaggtaatagt

SEQ ID NO: 80400 - DNA, 411 bp, Glycine max
  Clone ID: PAT_MRT3847_43618C.1
ccggaattcggatctaggttagaggcgtgcaccttctccggaggttgggtttatcaagaggttgaactacaggaccggggatggggtataatatatatagaagcctatcacttataaatgccccgaccggaatcaggcaactgacactgaacaagaccacacaaccgcattcatatgcagatccaaggcccacagcacgtacacaaccacagaaggagccgaaatcgaaatccacgcccgaaccacaaccaaatccgcaggacagaatcggtaccagtgcctacagagcaaacgcaagcacaattggagccgaaatcggtatcagaaactgatccatcggtagaccacgcagatcttaaggaaacgacgattcattccaatggaacgtatgccaatccgtctcccactcct

SEQ ID NO: 80401 - DNA, 187 bp, Glycine max
  Clone ID: PAT_MRT3847_43619C.1
gcgcggaagccattcattatttcatatttaggatgaggattcaaacaagcttagctttatacataatcgaccataattgatacatttggtaaaaaactaactaatactggcctgacagcatcattaacttgtcatgagtgtagagaggtgttgaacagcgcaaattcatcaatgtttactaagtaca

SEQ ID NO: 80402 - DNA, 127 bp, Glycine max
  Clone ID: PAT_MRT3847_4361C.1
agacgcccaacaaaccatttgtttgacaaactttcccaaatttattccctcccttcgggggaacaccatcaactgtggagtaaacggcggttgtggacaccttatgtaaaaaatagccccccacaac

SEQ ID NO: 80403 - DNA, 882 bp, Glycine max
  Clone ID: PAT_MRT3847_43620C.1
gaaagctgaaccaaagaagccaagctcagcgcctccatcatccaagcgccataacgactctaggtcttcatatagcagtggtggatatggagatacttacgatggatttggtggcagctttggaatggggggtgggtataggtcaggtggtgcttatggtggtggtaggggtggtgcttatggtggctttggaagtgaatttggtgggtatggaggatatgctggtgagatggggccgtatagaggagatctctccctcgggtatgctggtcgttatggtggaaactttagcagagggtatgatcttggtgggtatggcggtcctagtgagaattatggagcatatggtgcaggtgggggttcttctggcggtggtggtgcctaccaaagtggctatgatggaaacctaggaggtggatatggaggggctagtggtggccccttctatgggagcagtagagcaggatacagtgctggtcgatatcatccttatggaagataagattgcaaacaaagcatttatagtctaggactaatatgtctagcatcaaagctagtttgtgtttggttcgtcaactagattatatattctctttcaaaaaaagaattatcaaggtcactctcatttaccagtacaacatccatttcttgaaggtccaaacaaattttctattccccctcccccgaagtctgctttttgatttatgtaagaactgctgcaaatggttgtattctctgtctcatcatcgttgcttgtaatgcttcttactaccatgttttcttatttatttgatttaattactccaagctggtttgttattctatacatgagaaagacactttctaaacactattagttgaattttatcaaaattataaaaa

SEQ ID NO: 80404 - DNA, 417 bp, Glycine max
  unsure (1)..(417): unsure at all n locations
  Clone ID: PAT_MRT3847_43621C.1
tcggacttttttaccanancaacaacccaccggagactttcatcttcaggtgacgtcagaattttctgaaatggtccgttctcaagggagatagatagagagaatcagagaataagaaaactgaaggttttttttttttgctaaaaaatttctttcttctgaatgctgagcaaatcctattttctcttttaatatgagaagactctttttagcccttcactatcttacggggatacgaaggctctgggatctgagacagatctctattatggattcgaccatgttccctgactttccttcatgagataacacgcgaagtcttaactcggctggggattgttcgcactgaactccatatctggtcttctaaacttgctcacttccacgagtcacaccttaacccgagctaaaggacaa

SEQ ID NO: 80405 - DNA, 1579 bp, Glycine max
  Clone ID: PAT_MRT3847_43622C.1
ccacgcgtccgattgtcttgtctggttctaacatcagccactcacaataaataaaataaaaagggttttacaaaaaaataaacaaagaagtcctatcatatctagggtttctctttctcttttgcattctctctgaattcgtatgccatggagtcacccggtaacgagcatgtggtgggtggcgcagaacccaacgacgtcgttacgcccttttcccacagagaagaaccccacaattcccaacccctcaccggcgacggtgccagtcccggaaagatatttataggtggtttagcgagagaaacgaccattgcccaatttatcaagcactttggtaagtatggtgagatcacggattcggttatcatgaaggacaggaaaactgggcagcctcgtggattcgggtttataacatatgcggatccctctgtggtcgataaagtcattgaggaacctcatatcatcaatggcaaacaagttgagattaagcggacgataccgaggggagctgttggctctaaggattttaggacaaagaaaatttttgtaggtggaattccttcaaatgtgactgaagatgaatttagagacttctttacacgctacggcgaagttaaagatcaccaaataatgcgggaccactctaccaaccgatctcgtggctttgggtttatcacatttgaatctgaagaagcagttgatgatcttctgtccatggggaacaaaattgactttgctggagctcaggtggaaatcaagaaggctgaaccaaagaagccaaactcagcacctccatcatccaagcgctataacgactctaggtcttcatacagcagtggtggatatggagatgcttatgatggatttggtggcagctttggaatggggggtggttataggtcaggtggtgcttatggtggtggtaggggtagtggtgcttatggtggctatgcaagtgaatttggtgggtatggaggatatgctggtgcgatggggccgtatagaggagatccctcccttgggtatgctggtcgttatggaggaagctttagcagagggtatgatcttggtgggtatggcggacctagtgagaattatggagcatatggggcaggtgggggttcttcgggtggtgctggtgctggtgccggtgccggtgcctaccaaagtggctatgatggaaacctgggagggggatatggaggggctagtggaggccccttctatgggagcactagaggaggatacagcgctggtcgatatcatccttatggaagataagattggaaaccaagcatttatagtctaggactaatatgtctagcatcaaagcaggtttgtagtttgtgttttgttcatcagatagattatatactctttcaaaaaaaaaaaattgtcaacgttactttcatttatgagcatacccatttcttgaaagtccaaacaaattttctatttggctccccctttgagtctggtttatgtatgtaagagctgcaaattgtgtagacgggtgtattctcaatcttgttcattgttgcttgtaatgcttctaaaaaaaaaaaaaaaaaaaaaagaa

SEQ ID NO: 80406 - DNA, 292 bp, Glycine max
  Clone ID: PAT_MRT3847_43623C.1
agctggatagcttagtgagaatgacccatccctttcaggcaaatatgcccggcgccaacattggatggatcaatctgaacggacaactgagactattcttacacataaatcgcactcggctcgtgataactacaaaatgataaccagaacgagggaagagaagttgacgaaacaatgggatgtacgaccaagttatggaactacagtaatgccagcgagagtgctatcgctcactgatgtggatccaagccttatgatgcacgataaaagcgtggactggacaagcaatgac

SEQ ID NO: 80407 - DNA, 465 bp, Glycine max
  Clone ID: PAT_MRT3847_43624C.1
tttttccgaaacatcaatgttttccattcatacaacatcagaaatgatttgtttttgatacatatattctcacacaaagcataacaataagttcctgctatatctaacaggttaattacccacccatccaacctaaatacaaagcttaagacattataaaaacagcataaaataaattacacatcataacacagcagagtacatcagaaatttcagtgtagcaataacaagaacaactgaacaggttttgactgcacttgcaaagcaagttatgcttcagttcattatattcaaatgactctaattttcacctggcatttaataaggtaatggttaactcattatttgaagtcatttggtttagatttgctagtaactttccttcatttgaaatcctccttggaaagaaacccggctctttgggttcaaccagttccatctcactccctaacatttgaattaccg

SEQ ID NO: 80408 - DNA, 302 bp, Glycine max
  Clone ID: PAT_MRT3847_43625C.1
gccacgcgtttgtaaaaaaaagaaaatgagtcaaaaaacagagaaaggcagaagcaagaggtgggaaagaggcgggaagaaaaaaatgaagaatcaagtgctggtgggaatatcaaaaaaatggggggcggccggtttaaaggattcatccttattcaccttgtgtaaaactgattaatttttattatgctttacttaaatgcacaaaattgtcgaagcttttacaaaagaattaatgagaaaccctggagacgccctatttttattttgttgtatatatgacacttttgacgatttggctt

SEQ ID NO: 80409 - DNA, 443 bp, Glycine max
  Clone ID: PAT_MRT3847_43626C.1
aattcaaaaaaaccctttccaatgggggggggggccaagtttaggcccaaggggggccacaaatcctttttgctaaaaggggtttggaaccattgtttaaccccaaccccctggggagttggccatccctttaaaggaaattgggttttttaaatacccaattaccctttcccttaaaaggcaggccaaagggggcccccaagggggaaccaagcctttcggactttttttttattttagaaattggaaaacgtattcttaaaaatttacttaagttaattttgttttaaaaaattgataaactaaaatttttaaatttattttatttgacctgaaattcttttgaaaaattttaaaatttaaaacactttgccggaatttgccagaaacatttttaaaattttttaaaaaggtttaaaataaaatattaaacctttttcttt

SEQ ID NO: 80410 - DNA, 280 bp, Glycine max
  unsure (1)..(280): unsure at all n locations
  Clone ID: PAT_MRT3847_43627C.1
aggtggtgtgaatatgttgagagttgttatggggggagatgggganaggaaagttgtgtgtaattgatggtggtgattgatagattaattgagatggttgaaaaggtnaaagtttggggaagagatattanttgatggtgttggtgaagaggaagattnaaanaaaatttaggntaaagaggaaattgttggnnagttggtttnatgggttttaaatatattnattgggagaaaggtgatataaatatatnaatgttggagtagaagaggtaatgagttg

SEQ ID NO: 80411 - DNA, 394 bp, Glycine max
  Clone ID: PAT_MRT3847_43628C.1
tacggctgcgagaagacgacagaaggggatagccttaagggggttaaatacagcttctaaaattgttgtgggttaaataagctaagatattaggaatattttatcatccaacctcacataatatatggaagcagtttaccgggttaatagcagatgtgaagagaaaaagatcgtttaacatgaatcattcaaggaaaacaacaccattgtagcataagtataagaagtgaatcaagtgattaaggaatattaacatcctatctatcaaatccatcctgtttcaactttattttctgataatacttttttattcatagaaattaaaaatattaaagaaaaatttgatagtatatttaatatgttaaaaataaagaccaattagttcattcgtcct

SEQ ID NO: 80412 - DNA, 532 bp, Glycine max
  Clone ID: PAT_MRT3847_43629C.1
cactaacttgattattaacaccaccaatcacttgacaatttacattcaatcaagtacaagacatgagcaaaacactagctatatggttctttctgttgttcagcattctcacgtattcagcttacggaagcacatgcactgaagatactggagattttagaacctccaagccagaacaaaaggagcctaaaccaatgcacggtatgatcatgggatcaagcaaaccttgcagtcaaagaaaatttccagaattgcatgctgccagatatacaaggatttctcggttaggaaaagcagtttatagaggaccaagcaacttaaggccccgcaatgttcggaatgcatcaaactccaattcaatcaaacctccatccttattcatggcggcacttgggcatctggtttttggactgcttttagttccttgcttctatcgaattacttagccctgaatcttcatcttgttaccattaccatggcacccaaaagataatataagtttctcgctactaccacttattattagcacacc

SEQ ID NO: 80413 - DNA, 345 bp, Glycine max
  unsure (1)..(345): unsure at all n locations
  Clone ID: PAT_MRT3847_4362C.1
atctgtgtgtgtgttacatttgttatttgtacttttttttatgatttgaattcaattgtgctttntngnccaaaaggtgggggcgagaagggcaactttttttaatttgttggcgcaccccatttttaaaaaaccccttttttgtggcgaagtaattttcttttttgccggagggggttttttgaaacttttaggggccccccacctggggggtttttttccgcccgggaataaaattgaggttgcgcgatttttccaatttttggtattaaggtcttttttgaaaaaagaggccaaagaaaaagattttttgagcattttggcttagcccccggaaaactcttg

SEQ ID NO: 80414 - DNA, 273 bp, Glycine max
  unsure (1)..(273): unsure at all n locations
  Clone ID: PAT_MRT3847_43630C.1
cccttgggccccgggcagcccgattgccccgaacccgccttttgttgggcgcgagcttggccagggagctcaagcgaaaaaacaagattgggtggttttaaccaacnccgcgttgtggggggggcgcaccctggagaggcggcgccgacctcgccccgaggggcggggggtggtccccccccctggcaaaaagagcttagcgcgcaggagtggaaccgggggaagcgcattggggcgtgtagggagccgggccgggggactcccgcggccctg

SEQ ID NO: 80415 - DNA, 130 bp, Glycine max
  Clone ID: PAT_MRT3847_43631C.1
agaaaggaaggatgggagttgacccggacttacattctttctgacgtgggttcttgtcaatcttatcagctacggcgactctctctacgttgctctacctggcccttgggctcgaattgtgcaagatggg

SEQ ID NO: 80416 - DNA, 431 bp, Glycine max
  Clone ID: PAT_MRT3847_43632C.1
atactgcaggaaacactaaaataattcgcccatatttaaactcgtaccgtgcctcatccacaattgcttatgtgtaccatacccatggttatattatttaaaaaggtcacacatattgtacggttcaattgaacctattaaactgcggttggatagaaaattgcacaactttaaaccacacttgccctctaactgtcatgcaatcttccacaggcagactctattttgtttaccaaaaaaatttaataaacatttatacaaacacctgaagaaatacttcaaagctttcgtttggacaatcgattcacttatctaccgccccgttgccccacttctatattcactatttactggaccatcttaaaagacgctatttaacttactcaaacttcatcttccataataccccggtttttttatatatttggggc

SEQ ID NO: 80417 - DNA, 426 bp, Glycine max
  Clone ID: PAT_MRT3847_43633C.1
ccattattaattccgttagcaaaacttcaaaccccatcttcttctctagagaaagattgatctctggcataggctcaaataaccagatataatggcggtatcggtgaaagtcagcaacatctcttcaactgcaaccgagcaagatttgagggaatttcttgcgtttccgggaaaaatcgaatatattgaaatgcaaagtgataagggaaattcccaagttgcgtatgttaccttcagtaatccagagggggcagaaactgcagttcttctctcgggggcggtggtgtgtggacagtctctaaccatagctttggctccggatcatgctctgcctgcctctgctgcatctgcaacacagactagtaatgctgagagtggcgaatctggtttgagaaaggcagaggatgttgtaaccggcttgctagc

SEQ ID NO: 80418 - DNA, 346 bp, Glycine max
  Clone ID: PAT_MRT3847_43634C.1
ataggaattggtttgatgtatatatatatatcatttgtgattcatgtacaacagtaaacctgtggcacgaaaaactacagtctcctccctcaaaaaaaaaactagactcactgcacacccaaaattgaaaactatggtcacactatcctatatcttccatccaaaatgcaaaccgaataatgaaggcacaattgcccgcttattacctacctaaccttgtaaccatgataataattattattactataggttgaaaacaaattatatttaccccctttgttcctcacaagaagccctagtctttttcaccagcaggtgtttctcttgcaaggaacgttggacttat

SEQ ID NO: 80419 - DNA, 310 bp, Glycine max
  Clone ID: PAT_MRT3847_43635C.1
ttgttttgtagatctgcacatacaacatggccctatgctggacgatgaaggcgtatccataggcataggtactgtgattgcaggaacagctcgtctaacggctgcatttgtgggcactggtggtcatggggaagctgtccttattcttagctggccacaggctgcgtgggcagtttcttttccactcttggctgattagcggaacactctgctatctggtttaagagatactgttggaactgaccgtattctggaactgtatccgggagctgtcaacagcatagtccacgctggtgacctatagattgac

SEQ ID NO: 80420 - DNA, 528 bp, Glycine max
  Clone ID: PAT_MRT3847_43636C.1
gaccgacacaaggagacagtagtgctctatacaaggaagactcgctcttaactgggtgagtgccgataattcggactcacaggggtggctgcccttcctattatgacccacattgataccctactatttcagggattgaacaaacaccaactgccgagcccactggccacctgaatagagcatcaccaaccctatatatggtcctacacatcatattttacttgcttacaacccacgctgctcttacataactgatacaacggactcacccttatgtgggccacctggaaaatgcatataccattggatccaatatccggaatgaatatatgacacacaagcatttatgatgacttataaacacaaatcacgtatagtgtgatacgaaggacacattgtaacatctgtcagtgccatactaacactcacagatgatgcttactatatgactctctttgaaactacagagtatgagcctagtaactcgactgtctcgttgccgcccatccgtgatagaccataagatgc

SEQ ID NO: 80421 - DNA, 178 bp, Glycine max
  Clone ID: PAT_MRT3847_43637C.1
acagaaaaacaaacttatttacactgaatttcttttatcaccattaacaagacagtcaaaaaaacataaagcagagcctgggacactaaagtagtgtttattctcaggtcacaatatatgtttttttgactgtcttgttaatggtgataaaacaaacttatttacaccggacgcgtgg

SEQ ID NO: 80422 - DNA, 783 bp, Glycine max
  Clone ID: PAT_MRT3847_43638C.1
ttcctctccacgaaaacccctaaaaactttcctatctttttatgtcatgaattcatctttatagcttcatcttcacagcatccaaggcttcagttttacagcgttcgtaggttattttttcaggttcagtaactcattcacagaagaagaatccaagcttgtggattagaaggggttcattttgccgattcccaagctatggctgctaagcttcttgcaaacttaattgtaattggtggaggaataatgacaagagcatttgttcaggcatatcgtcaagcactttctaatgcctcaagaaatggtgttgcacaagagacaatacaaaatactatccgcagagctagcaaagggatgacacaacaagaggctcggcagattcttggtgttactgaggaaacttcctgggaggagattgtgaagaaatatggtagtttatttgagaacaataccaagaatgggagtttttacctccaatccaaagttcatcgggccaaggaatgtctggaggctgtccatcaaggcaagaatccgggtaccccttgttgagaacttggtttttctttatcttataataactcttgtgtaatcattttggtttttctgtcatattttgctgattttcgagttgataggatgtatgataattgccaaggcttggtttaggtcatcaatttcgcattagttcaggcaatgccttatgttgagccaaatacaagaggttaatgatgttccaaatatcaagagttcaattgcaaaaaataaatgctatttggtacgtta

SEQ ID NO: 80423 - DNA, 697 bp, Glycine max
  unsure (1)..(697): unsure at all n locations
  Clone ID: PAT_MRT3847_43639C.1
ctactcttctatgttcttttattcctttctctttctgtttgcttcggtgccagctcgttggaacctcaacatagtagaagaatgttgggtgcccaaaaacaagagcaagagaagcctttgaaaaacaaaaccaccgccaaaaaccaaaccaagccaatcaagcccactaatagtatttcctcaacgaaccacaccaaaaccacaaaatcaccccacaacatttcctccaaaaaccaaaccaagccactcaagcctagctccaccaattcagcttccaccgacactgccctcgccaagaagctcaatagtaagatcaagaagctcaacgtcacatcaaaaacctcaccctcaaaacccggtaccagcgtttccatttcaagcaacaagaaaacattggatctcgcgaaaccaactaacaaaacagcaaaagacaccgccaccaacaagcaacccaaaacaacaacaacaacaaacaagaaacaacaaactcagaagaaacctacgaaacaaaaagcaccaccgagttggatcatggaggagctggaagaggaagatgatgatttggtttcagagttcacagatctacccaacaagttccaccggacactcctccccgacctggaacgaatctccaccacttncaaagcctacatcaccaaagccaacaacgaaatgaccaaaggcttcanaccctacg

SEQ ID NO: 80424 - DNA, 620 bp, Glycine max
  Clone ID: PAT_MRT3847_4363C.1
taggacttcggccgcgagctaaatctttggatccacagcatgtgctttacgcttcctgtatatatgtaagatggtcaaaaatcttcaaatacgtttttttacttgtatcaggagctttaaccaagagagagaaggcttcatctcacacaaggagaaccaaatgacatttggtgatcttggctcttcttcactctcttttatgggtccaagcaagctcaattgctcgggaaatactagtatgccatgttcacaggctgagaatgggtttgtcaattccttttctctcttccccgagaaagcggtgcaagagcttcttcaatctccagtccaggggggggatgaccatcttattgagttctttgaagctttaagaactgctgcgaaagctctcaggctaattgcctaagggaaagcttctgctcaagctgaggctgctgaatggaaacgtaaatatgacttggagagggatcggaatctgaactttgaacttgcctagaaatcatgtatagagcatccggctgaacatgaggatgtgaggacaaataaccctcccaaacaacctgttttatgttatgaagctcatggacagtcctgaaaatggtgatcaaggaatggtattt

SEQ ID NO: 80425 - DNA, 504 bp, Glycine max
  Clone ID: PAT_MRT3847_43640C.1
gggggcaaaaccttttttttttgtccaaggaaaaccggggaaaggccctttaaaaaaaaggggggaaaataaatccccattaaaaccatagggcccccctgttttttaaacttaaaaggggtttttgaaaaaaaaaaaacccccccagggaaatttttggttaaaacacctccccaaatttggggcccacccccctttcccctgccgggtgggggaccttccttttcctgggttccccccgaataacccccaacccccgggaacatttttgttttagggggaaaaaaaaggctccccacctccttttttttttcctaaaattcgccacccccaaaaggggggttcccattaacccattggaaaccccgccaaaccccattttaaattttttttttataaaaaaaaaacagttgggaagcaaccttgcccccctggatggggccccccaggttaagggcaaaatttcccaaggcattttgggcccccattttttttttaggcccc

SEQ ID NO: 80426 - DNA, 1540 bp, Glycine max
  Clone ID: PAT_MRT3847_43641C.1
ggtcaggaaaaaaaagtatcttgacatgtattatttggacgttctttatcttcaggcttttcatgaatcgagatcttccgcaattacatatttaattgagtaaatcttaattttttaagagatttacttttgtattaaattgagggttctataaaagttccttttaatactcatcaccgccagttcatcaattatcaaccatagggagtactatattttaatttaattcaagtaaataaataaatcgaattgtaccttctccattaatctttcttgacttctcgtctacgaacagaacaactatgttttcatccaaatcaggaggcatgaaaatgttgttgtcatgatgtagccttatttattgaacaagcttgcaattttacttttttataactttaattattgaattgaatcaaatgaaaataaaataaataaatagaaaggtagctgaatcaatttttcttgccttctcctccaccgtcctccacgtaattctttttccttctatcagctctagcaagcacacagatgagcagaaaacacgtggcgtaaatcgcgtggatcttccaattcgtcttgggcggttgctgcagcaccaccctgtggaacaccgtgacgtagtaatgcagcccaacggcaaagcccacgaagacctgggccaggcccaagaacttggagcccagcccacagtccgtggagaacacgagcacgaggtacatgagaagcagcagcaagtagaagacgtaagcgagagtctgcagcacctgcaggcacagatacgtggactgcgaagtagagtatagaaacctgaggggttcgaagccggtgaagaacgaagtgacacagagaatggtgaagtagaaagagagatagacttggatgaagattagggacatctggagggagaaataggctttgattcttgtgcagaggagagagactaagaggagagggatgagtatgaaggcgctagagataatggtggcgacggtgggtgcgtattttttgccaacgtagggtttgaagcctttggtaatttcgctgttggctttggtgatgtaggctttggaagtggtggagattcgttccaggtcggggaggagtgttcgggggggcctggcgggaagcactgtcaactcggaccatggctggaaatggaaacgctggtaccgggttttgagggtgaggtttttgatgtgacgttgagcttcttgatcttactattgagcttcttggcgagggcagtgtcggtgggttgggtcttggaagctgaattggtggagctaggcttgagtggcttggtttggtttttggaggaaatgttgtggggtgattttgtggttttggtgtggttcgttgaggaaatactattagtgggcttgattggcttggtttggtttttggcggtggttttgtttttcaaaggcttctcttgctcttgtttttgggcacccaacattcttctactatgttgaggttccaacgagctggcaccgaagcaaacagaaagagaaaggaataaaagaacatagaagagtag

SEQ ID NO: 80427 - DNA, 467 bp, Glycine max
  Clone ID: PAT_MRT3847_43642C.1
aaaccaaaccccaaaattaaaattaaaaaagaaaaaaaaaaactctttgtttgtgttctcaacttgttaagctgggtaccagccagccacactgcaatcgccgaaattttccacttccgcgaaacggcgtgtcgttttggaatcagagagttttggtttttgctttcgtaggttttgattggggttacagaatgaacaagtgtttgacagctacaataaaaaaagtgatttatgatatgatggagtttggtgtgaatttgatttgctgattcaacgattaggatcaactgtcactggttttgtgttgagactaaaatgtcaatgtcaggatttgaagggcaatgtagtaatgatgagattagagagaggaggtctgatattgagaactcggaagatgagaggcggcagtcgagaattggaaccttgaagaagaaggcaatgaatgcgtcgtctagaatcactcattt

SEQ ID NO: 80428 - DNA, 348 bp, Glycine max
  Clone ID: PAT_MRT3847_43643C.1
aggggtgtgtaagttcattaacatatacaaatactatgagttgtgttgtgtacttgtgtcaattgggttgtggatgtgggaaatatacgcgaacagagaatgactatgaaatctgctatgtgtgcattggcacttgatgctcttgttcaggataaaatggggcccatggtttaggctgatgtgacttgcaaaccaacacatggtgaatacttttattacggggattaaagcatgctctgtatcttccagcgcttattgccagatactgaatgtgcaaaaggcatgcttctgtggctacctcttaaaccctaggttgcaacaagatgttaactctcctaatgccaaaaa

SEQ ID NO: 80429 - DNA, 274 bp, Glycine max
  Clone ID: PAT_MRT3847_43644C.1
gaagagacgtgacatgcactcctccctaacctcagctttgaattccggtcaggcatatatttttagcatgcttcaaatctacctcccgctgggctccttgtgcaccatactatctccttatcaccatccaacttcactcgaactacaaatatgtatagcctgctgaagcctcgaacactcacattctgatccattcacaagaccatctacatactgcccctttaagctttgaaaccgctcttcaccctttgctgaacgaaaaaacaaagcacct

SEQ ID NO: 80430 - DNA, 238 bp, Glycine max
  Clone ID: PAT_MRT3847_43645C.1
ccaatgccaaagttatcttgtttggttcaatttcccttctttttgatggtgaagaaaacatcagggggaagaggggttgaatcaagttaccaccaacaactttggcaaaattttgggtagaaatgagttagcccagaatttaaaccagaaaccaaaagaccgcatcagaaaacattcacacagctattcaaacgcacatttgagcaatagagggtagacttcatcttgaggaattacc

SEQ ID NO: 80431 - DNA, 346 bp, Glycine max
  Clone ID: PAT_MRT3847_43646C.1
ggggggaaaaaaactttaagggggaatcctttttgattatttttccaaaaccctaacccctggggggtcaaacttgacttttttcctcaaattaaaaaagactcccccaacccttttcccctttcccaaaagggaactttttccccctgggggggaaaaaagagaaaatttaagccctttggaactggtggaaaccgggtccaaaaaaaactttattttttccgcaaaaaaaattcctggaattttcaaaaatcccgctttttaactggaaggtggcccccttttttgggggtaacaaaaaacaaagcttactcctaaggggtcacgggttttttcaaagttttta

SEQ ID NO: 80432 - DNA, 723 bp, Glycine max
  Clone ID: PAT_MRT3847_43647C.1
catgatgaaatgtttcaaatctcttcctataaggagagtagaaaagttcttccccccaaaaaataaaatcttagattgattaaaccacatcctatcctacttacccatattaaaaaaaaaaaaaacatgatctttagtcccttatatgatacactctacataatgagagagacttgagagcttcctatatatacaaaaaagaaaaggcatttaaacccatttgctcaatcactctcttgtgggttttttgagaaaattttccatcactttctcgggaaaatctctgagaaacgacaatgccctcttccaccacctcttcctcatccttcacaacctcttcattcacatgttgctccgcaagttctccttcgaacctggaacgctttcttcaatgtgtcagtcctcatgttccttctcagattctacccaagagctgctttagtgatctaaatcccctctggcagcctcttggtaaggacacaattgaatacttcactctgcaagatctttgggactgctattatgaatggagcgcatatggtgctggtactcctgtgatgttggaggatggtgataccgtgactcagtactatgttccatatctatctgctatccaaatctacaccaacaagtctgttgtcgcttctcgcaatcggagagaggatagtgatggagttgaatttgaaagtgattcatggagtgaggatagttcaagtgataacc

SEQ ID NO: 80433 - DNA, 316 bp, Glycine max
  Clone ID: PAT_MRT3847_43648C.1
cgagtcacgcctgcgtgcagaagacaacagacaacagatagttgaaaacattgggtgccaaacgtttaaccttggtgaagatgtttatatgcgttttaacactcactctgattccttcttgtgactcggaaaggcaaaataatagcctagttatgaatcttaacaaaggattatgccctcaagctgcacacatcatcacagaacatatcaaggttcttttcaaacgccacaagaacactgctttctcctgagtcacgaacatttttcatgactgtgatgatcataagaatgatgcttcactggtgatagacttcac

SEQ ID NO: 80434 - DNA, 229 bp, Glycine max
  Clone ID: PAT_MRT3847_43649C.1
aggaaaacttccgggtgaaaaaagatgtttttatgaatttttgggaaactttaaaggaaggtgggaatttatgggatgggaaaaaagtcaacataaaggaggggggggcaaaggtcttaatttttaaatggcataacttgcgccatcgggtagttgctgaacagtttcaacattttttgcccatggggagcaagtggttcccaattattctaaaagcagtttggaagct

SEQ ID NO: 80435 - DNA, 454 bp, Glycine max
  Clone ID: PAT_MRT3847_4364C.1
ctgttggttgttagatataaattttcagagcgtgatgctcatgagttttcagagtttctttcaccacttcttgattttgcacccgagaagcggccaacagcacagcagtgcctgcaacacccatggctccagggcatagagtctacaccaaatgaaatgagaaatgaatctagtgtggaaaaggtggatgttgggatgagcaatcttcaaatcaaggtgggaaagtgaagagaaaagtatttaacggtcaccactcaaggcccttccttcaccatgaatgactattgattgtaatttgtttttggtttgatcaaatttaataagtcttattttttttattggattaactattacagggatgtaaattagtaaagaattttgtttattcagagataaaaaacacaatttgtgtgtatatttaccacatgatttaaagtgatgatggcattcatcc

SEQ ID NO: 80436 - DNA, 2049 bp, Glycine max
  Clone ID: PAT_MRT3847_43650C.1
cccacgcgtccgtaggatcaagagattgggcttgtatcatggatcatgttattggtggaaaattcaagcttgggaggaagattgggagtggatcgtttggagagctttacttaggtgttaatgtgcaaagtggggaggaagtggctgtcaagctggaatctgtgaaaaccaagcacccacagcttcactatgagtctaaactgtatatgcttcttcaagggggaactggtataccccatctaaaatggtttggagttgagggtgactacaatgtcatggttattgacctccttgggccaagtcttgaagacttgtttaactattgcaatagaaaattatccctgaaaacagttctgatgctggcagatcagctaataaacagagttgagtacatgcactctcggggttttctgcatcgtgatataaagcctgacaactttttaatgggcttaggccgcaaggcaaatcaggtatacataattgattatggcctggcaaaaaagtatcgggatcttcaaactcacaagcatattccatacagggaaaacaaaaatcccacgcaacggctcactggtacgcttcttcctcctctaaccttacatttagcctttctttcttttctatgttctctctatctctcattctcatctcactttcttttctttttcttttcttttcccgaatctgaatttttccctacaaaatccactcatcttgtcctcaaagacagatccgaaagtgtatgtactattttgcgagtctaacaaagcagatgataggaccctttaatctcttctatatttgctcatgtattttttgccagatagtctcccatggcaaggcttgaaagagctggctccttaaaaagcaaaaaatatgacaagataagtgagaagaagatgcttactccaatagaggtcttatgcaagtcatatccattggagtttacatcatacttccactactgccgaacgttgcggtttgaagataagcctgattattcttatcttaggagactatttcgggacctattcatccgagaaggttatcagtttgattatgtatttgattggactatgctgaagtatcctcaaattggatccagttctagagcccgaccaagtgggaaaccagtcataaaccccggacaatcaggagagagaatagaacggccttcagggggtttctcaggtgctgttgaggcatttgcaaggaggaatggctctggacttgttctgcaaagtgagcattctaggcataggtcttcagatgatgtgccatcttccaaagacgtgcaagctgattctgagaggcctcgcagctcttctcgtaatggcagttcttcaaaaaagcctgtcttgtcaagcagccggccaagctcttctggtgagccaagtgaaagccgtactagccgactggtcttaagcagtggccgactatcaacaactcagagacttcaacctggttttgaatccaaaacatctttatctcgggcttcggcaacaagaggtggtcgtgatgatacactcaggagctttgaactcctgtcacttggttcaggaaaaaggaaatgaagaactgtgtggtcagcagatttcttgtttcaagggtcttagttctgccctgatacctttcctttgagatgtctacacatgttgattacatttgtatatttccatccaatgttgggtcctttcaaggctaaaaagctcattgaaacttgttcctgaagatttgacagactcttcttatacttcttctgatgttcttccatgattatttcagcagggactcattcatgaagagatactatgttacttaaggaatttgttaatatatggctacttgtaataaatacattctttatttttctgtcgaaggaaaggagaagcatctgcaaaaatgcttttggatgtaaaaaaaaaaaaaaaggcatattttataccccccccgtctatttggttccaatgtacatttgagggaatgaaattgtcaattgttggctctggttatggataagagaatggaaaggcatcatatttgaattca

SEQ ID NO: 80437 - DNA, 281 bp, Glycine max
  Clone ID: PAT_MRT3847_43651C.1
accacggaaaacctacttgtatataaggggaccatgtggagcacaaacaaggttcgcaaaaaattctttctgaaaaaataaaaagaaatacattatttttccttaaagcgccttatcatattctcagcgaatattggttgttttccttttctgtgctcgggactagggcgagaattcttcagatttccatcccaaggaacttttttaaccccaacacgaagggagaataatgtctctaactttctatgcaaaataaaggggggcctcttctggctacaaaa

SEQ ID NO: 80438 - DNA, 250 bp, Glycine max
  Clone ID: PAT_MRT3847_43652C.1
attatattaattaatatctttatttgtttactttatttgcactttcaaaaaaacaaacgaggatttgtttttcccaaaccgggaaaaattacctttgggcctctcgggtgcctcaacccctaaagggtaaggggggggcagaaacaaaaaatgcctttgtaaatccgggcttggcactaaatccttaaggaaccgctcccgatggaccatggatttaactcccgtttccaaacattttttttttacacat

SEQ ID NO: 80439 - DNA, 685 bp, Glycine max
  unsure (1)..(685): unsure at all n locations
  Clone ID: PAT_MRT3847_43653C.1
annnnnnnngatataaaataattcatcatagtnnnagagaattccagtattaaaaacgaaaatctgtaaactagaccaagagaccagtggcaactaagatagggggacaacaaattctaagtgcattaataggaagagccatttagtaatgcaatgtaaaaaaaatgcacttatactacatctcgattactttatcgaaatatcacaaaaatggtcctgttgaaattttggttctacatagaatttgatggggatcaaccaaaccatgtagccgagaagctgacccaactttataggataagatttggctattgttgttggtgttttattctacttctagactaactttttcaaccaaacttctcttcacaagtcctctggagtacaattcattcgacaacttcgaagcatcctctgctaatccttcataagtaatgccttttatgagagtagtataggtagcctcagtaggtttacatccttttgccaccatatcagccagaaaatctatggcaagactggtctgctgagatttacacagtcccgtaattattgagttataaatgaatgcattgggtctaatagcaaaccttttcaagtaatggaaaaatttcattgcttcacgaacctttccttcacgacttaagccccctactactgaagtgcaagtaatttagatcagggc

SEQ ID NO: 80440 - DNA, 452 bp, Glycine max
  Clone ID: PAT_MRT3847_43654C.1
ctgcttttcatttaaaacaaataacagccccccaccgcgcgaggaaacacaggggatattgtagctgaaaacacccaagccagcctgcaccgttgtcataataatccagtctactgaaagcatgcatatggaactgtgggtccgcggcaaatgaagcagcccctctccatgcaaccattactggatccagtgctctaacctatttttataggtgtgccacaaggtctaataatccgaattccagcttccaggcgttcaactataccggggaaaagagaacctccacccggtacaagaatggaactagccagtctctgttccaacgcttcacccttgtatggtcaccctccttattgaaaccccaaccatctcattctaattctacctgaacaaccgcaattcagttgggattaaaacaatagttccagacattttgaatttttcttaccccc

SEQ ID NO: 80441 - DNA, 463 bp, Glycine max
  Clone ID: PAT_MRT3847_43655C.1
aaaagttttgacaatgatttcatcagttaatcatatggcacatatttagacatgtcatggtcatctgatgacatgacatacatctagacatgtcacattacatgtcattttagagtgattgtctacataacatttaaatttatgagtattgaaaccaaatttctcatatttacacagattaaaaacatatttaaattatttagtaccaaattttgatttctacaggtcttgaatatttacacacaggatgcaatccaagtatcattcaccgtgacataaagacaggaaatattctcctagacatcaatatgagagcaaaagtatcagattttggactctctagattagccgaagaagatttaacccatatatcaagcattgcacgaggaactgttggctacttggatcctgagtactatgcaagtcagcaattgacagaaaagaatgacgtgtatagttttgg

SEQ ID NO: 80442 - DNA, 279 bp, Glycine max
  unsure (1)..(279): unsure at all n locations
  Clone ID: PAT_MRT3847_43656C.1
gnaagaaagttcatccaatctccgaagcccttcaccgcattgcaaccatgtcgagaagaaaggttagagagcccaaggaagaaaacgtnactctgggnccaactgttagngatggnnaacatgtcttngntcgcncgcatctttgcctcttcaatgataccttcattcagtcangatctgtccgggagggaaacacttgtccgcatcacaggtggatgaaggttaggctgncagagagatcgtctccctagctgcctgctnctgcacaggagttgctgc

SEQ ID NO: 80443 - DNA, 272 bp, Glycine max
  Clone ID: PAT_MRT3847_43657C.1
catattattggtggtaaaataactttgaattcaatcaacatgctgttcgattagctatgttcagccaaaaaaacaaacaaataaataaaatccaaggtttcgggttaaactataaggttagaaaaggaaaaaacagatcctcgataaaatctttcaccacttgagaaaaaaatggctaatcacatgttaaaccccatgcaatacatgccccttatgacaattgatgcactattgaagaagccttaaccgaccaccctatcaaacaagggccc

SEQ ID NO: 80444 - DNA, 971 bp, Glycine max
  Clone ID: PAT_MRT3847_43658C.1
ccaacatgcatttttttttcctctagtttttctaacgtttatgacttttctttcccttcttgggtagtcaggtcccgcagcatcgaaaacctggtctggttcaacatgcataggtagttgagtgcagtgattcagattgcttttttggctctttttgctttatttgcactcttcttatcagaaaccaagacaacaagagtttcacgttacttcatcatctctgtatctttgctacttcttgggtacacttcttagcagaaaccaagacaacaagagttgagtatagtgttcttgtaccacagacagcgcagggtgtagcacatcattcctcgatcgagctcgctccaatggcagagacaccaaacaaaggccacatcgtgatggtacctctcatggcacaaggtcacctcatcccatttctcgcactagcaagacaaatccaacaaaacacaagcttcaccatcaccatagccaacacaccccaaaacattcaacaccttcgatctgcactttcttcttctactactcctaatcatcaaatccatcttgctgagttagtacccttcaactctacccaacactccaacaaagacaacaacacacaaaaggctcctctcactgacctattgaaacttggctatgcatcactcacccttgagcctccttttcgctccttgatatcacagatcacagaagaagacggtcaccctccactttgcataatatctgacatgttccttggttgggttaacaatgttgcaaagagcttaggcactaggaacctaaccttcaccactttgtggtgcttatggtatcttggcctatatctctatctggtccaacctccctcataggaaaactgattctgatgagttccatgttccgggattccctcaaaactaccggtttccacaaaacacaactgcatagggtttcttcaagcgggggatggcacccatgactggtcaaga

SEQ ID NO: 80445 - DNA, 298 bp, Glycine max
  Clone ID: PAT_MRT3847_43659C.1
aaaaaaaccaacaaaatgtagaaccctctcaaccaaaaaaaacaacgcagacccaccagaaccctcccacactggattcctacccgcagctcccacagatcaaaatacaccacccctcctacccacgccatcaccaccccttctccgccgacacccccacccccaccgccggcgcacgccgaaaaatcggcgtggccgtcgacctctacgacgagagcgcctacacggtccgctgggccgtgcaaaactacattcgccccgatgacaccgtaatcctgatccacgtcagccctaccaa

SEQ ID NO: 80446 - DNA, 371 bp, Glycine max
  Clone ID: PAT_MRT3847_4365C.1
ggctcgagcgctctctctaaggggttataaggagtgataagatatgaaacagatgagggtgtcaggaaacagtagctgatactgcacagtgtccaagatgatgggtcaaacgcgcagatctgggagaagagaggaagatgaagagcaagatgggacaggatcagaaccagagagcgtgtggctacgcgctcgctattaggggagcgcagatgctgggggagtacactgaattaagagggaacttgaacacaatgatgatgcagtgcctgcagaagctgcctgtgtacaacaacacgtacacctacaactgagacggccacaccttgaagtacgtcgtcgagatcggaatgacttattgtgtatgcgcggat

SEQ ID NO: 80447 - DNA, 678 bp, Glycine max
  unsure (1)..(678): unsure at all n locations
  Clone ID: PAT_MRT3847_43660C.1
tcaagtatgccaccaagtagannnnnaacttaaggcagatgctgaaggtttgaaatgaacattgttttcacagatcaactaccattaataggttaagggacaaaaaacaatgagcatgttttcttgtcatctagaagttagtccagtcctactatacacatcaaatatgaaggcaactagcatgtaaaacaaatgaacaaaagatctctaaaactttgagtagccagcatctatccttctaattctgaaacattttcttctgaataatctacctgcaagggcctttgaaaggcaaaaggagatggcgggggatcgacactcaatgaaccatcaagtactcttactacctcacccatggaaggtctccgacgttcgtccatttgaaggcaccaaaatgcaattcttaatgtgcgctccagttcctctgaattgtaacccccttccattcttttatcaaccacattggctaccctctcttccatccattctttatacgcccacttacaaagcttaacatgatcgtgatcgcaacaccccgttaacaaggttagaactaacttgccaaagtcctctatatccttctcagctgaaaagccacaatatgttgccttgccatctgcaatagcaaacccaaattcagtcaccttggccactaagttttcatccaacataacattt

SEQ ID NO: 80448 - DNA, 709 bp, Glycine max
  unsure (1)..(709): unsure at all n locations
  Clone ID: PAT_MRT3847_43661C.1
aaaccatcaatctgtttctatatttccatagttaaaaaagagtaccaatatcacaattctttcaaacagcaacatcttcgacctgattcagtagttcaattgtgattaccgagagagagagagagagagagagttgactactaaatccttatattttccctatctttttcatgggacataggtcttttttcaagtttttggtatgtaaatagatagcgtgatggaggtttaagatcgcagagcaaagctgaaactcttctttttggttatctcaggtcttttacctttcttggtccttcatagcgctgaaaattgtcgtgataatgcagaagccgcaatatagaaacaggtgaaattctcatcaaatatatcatgaactccttcaaactggtgaacagaaaatccaccaatccatcaatttcggattcatattgctcgtaaacaaaaaatgccataaatgcgatcaccaaacctatgcctatcattttcgtgaacaactctgacaggatcaacttcagaaggtaaagaaaaactgcaatcttgaaaaatgcagaccaattgtccccttgggccagtcctcttatattttgaaaaccccggttccaagatatactgtagtggtaactgaatctttgactgccgtatcaggagatctcaaataagacgtgggtatccttttgtatgtgaaaaccanataactttgatggca

SEQ ID NO: 80449 - DNA, 599 bp, Glycine max
  Clone ID: PAT_MRT3847_43662C.1
cccacgcgtccgatttgcgcattattggagagccaaagcttccatcagtgtttcttcaagtcatctgttgggttctgggggaatacggaacagcagatggaaagtattctgcttcttatatcagtgggaagttatgtgacattgcagaggcatattccaatgatgaaaatgttaaggcttatgcaatttcagcattaacaaaaatttatgcatttgaaatagcagctgggaggaaagtagatatgctatctgagtgtctatcttttattgaagaactattggcatcacactccactgatttgcagcaacgtgcatatgaattgcaagctcttattggtttggatgcccaagctgttgaaacaataatgccccaagatgcaagtggtgaagatattgaggttgataagaatcttgctttcctcaatcaatatgttcagcagtctctggaaaggggtgctctaccctacattccagaggatgagcgcaatggaacagtgaatgtgagcaacttcagaagccaggatcaacatgaatctgcacaacatggtctgagatttgaggcatatgaagttccaaagcctccaatgccatcaaaagtt

SEQ ID NO: 80450 - DNA, 255 bp, Glycine max
  Clone ID: PAT_MRT3847_43663C.1
ctgctaaatcattgctaacaaggtgccaaagtgccatacatactatttcctactatagtaatccaaagggtattaacagtggggaggaatgaaatgtcaaaccctatatccaataggtatattaatccatactaaaggcccaaatatttaccactggaaggttaaaaataatagaaaacccatttcttatatcgccaaaattaccatatggcataaacataaaaggagtgaagttccctacccttcaatggaaat

SEQ ID NO: 80451 - DNA, 453 bp, Glycine max
  Clone ID: PAT_MRT3847_43664C.1
agcgagcacgtgggtccaggcgtgaagtgcagagcggaaccggccagcgtactacgatggcgcgataattctccggaaggtaacggttcttccccagaggaagggtactgggcggaacaagatcgggaagccccacaccgttccgtgcacggtaaccggcgaagtgcgggcgcgtaaccgctgggatgcataacgagcccacggactcacggaaagtggcggttactgactccaagaaagtgcaggcagtacactctgattggacatgtgcatcacctgcttcagcgaatccaccaagaccctgtggtaatcttgcattaaggctactagctgatagcttgataaacacctatggattcctgacaccagaatgctcttaaggagactgcgcctgtgcagatctgccactccacgagcccacatgtcttttcgcaaaaccaacaaggacgactc

SEQ ID NO: 80452 - DNA, 589 bp, Glycine max
  Clone ID: PAT_MRT3847_43665C.1
atttgcagacaatccgcgcgtggcgaacattggctatttggattttggaggctgagtggagcggctgttaggtcctttatgtgctgacttcacagatctatgagtattccttttcaacagaaaatgctcgaaaaatggtgtcttttcaggtttcttaatatatattgaaacatcactttatccaaatctagctagaggcaataaagaccacacataatacagagagagaaattaatatttggatgttaggttgctgagtggtgttcatgttgcctatattattatagtaattgttttatttagatcatcagtatttagcttccagttattcagatccattgatcatatctatcaaattctataaccttaaacttttacctaatgttatactaaagaacttcagcctgcaaaaaaaaaaaaaaaaattatagcatggtagataatatgaggatcttttaatattgttatcttgataacttgtattttttccatcaacaagtattagttgataattatgttaaaatattactaagaaagatttgtgtccgtagtatcttcttatctctttcatctttaaccatggaccaaa

SEQ ID NO: 80453 - DNA, 225 bp, Glycine max
  Clone ID: PAT_MRT3847_43666C.1
tttacttagaatcttgcatttgaattccctcaatttcttgaaacccacgcattttgctcggtttctgcatttacgaatgaacgtggcgatgaattttatgatgaaattgaagatgatatgagaggaattcaagcagagtttaaaacattgcgcaagttggtcagagcccgtatccatagaactgcggttgtggttccattcgaagtttttagcaatgttgagttt

SEQ ID NO: 80454 - DNA, 280 bp, Glycine max
  unsure (1)..(280): unsure at all n locations
  Clone ID: PAT_MRT3847_43667C.1
ggaattcggcacgaggattatcttccacctttcttgttcaacatggtggtagagggattgtgtggactaatgagcaatcgaaaagaattatatatagtgtagagatccataatgagagaagcaatcgaaaagaatcatatatatagtgtagagatccataccttatatatgatttaatgttttgcaatgaaaacatgtaatattgacttctctcaagcttttcacaactaattctttgctctaagaaatcctctcccagactttaaatggagacanaaaa

SEQ ID NO: 80455 - DNA, 443 bp, Glycine max
  Clone ID: PAT_MRT3847_43668C.1
gcaccacgtgaaccgtgtaaatctatgcccacatcaattcaaatttaaatattttaatattcatgccaaagcaacagcaagatcacctaacaaacacatcagacccagataaagaaactaggtttcctaattctctacatttctatgaccaaaccaaccaaccatatacattgctaaaaacgaatcaatacagagagattctgtactcaatctcccttgggtacaaacgattagcaaacaaaatgcaaaccaaaataatcacaccgcataccatctcacgccccaaaaaagttgaaaatttcattggaaaccttgttgatcattcacaaaaatcatttccttgtggtacttggttttttcacgctactgattttgaatccaatgatcctgtagcattgccttctcctgttagcatgttgtttggatcctccattccccatttg

SEQ ID NO: 80456 - DNA, 303 bp, Glycine max
  Clone ID: PAT_MRT3847_43669C.1
cacgcgttcgggcttattacattacaatttgtgcattggctcatgtcctttttcttctttgcttgtcaaaaagggtacggcacatgtatctagcaaatgggttctcaccatctagaaccatggctattggagaatgggaaacccaaggtgttgaccaaggagaatatgcatggccgatactgacacagtatgttctccacgtctttgcgcaagaagtctaacccaactcttggtttccagctttcatgtgccacactcagaagcatcctttttaaatattgcaatgagggttattcttgggta

SEQ ID NO: 80457 - DNA, 604 bp, Glycine max
  unsure (1)..(604): unsure at all n locations
  Clone ID: PAT_MRT3847_4366C.1
ggctcgagctcgagccgaatcggctcgagatggaattgagcctctgttcgtgatttccatggacgcacctcgtaaacagcaggtttcgttgagaggagcaagtgcgaaggagataacaagagacgcgcttcttctgaaggtctctcaggaaagagaacttcgcaattacgcaaaaagagctgcttctgctgcgctcttcattcagagagtatggaggcgcttcaaggtcacaaagatgatttccctgcagcttcagcaggagtgggagatagcggtgaatcattatgctggtgtgatgacagcaaattggatttcaaacgatttgttgagaccatttctgttctttatcacccgtatctcaactcagcatcggaaggtccacagcaagagaatagattctatgaagctgtgctttacaatcctactggaaagcctgaaatcttctgattcagagcttttcttttcttgcatttggtacaactgaagaaagaacaatatggagataccaggcacgacaactgacttctctagttatgcattcttttaattagtgacatcacgagagatatgcaattcnagggctcaagatattactattgtcaca

SEQ ID NO: 80458 - DNA, 472 bp, Glycine max
  unsure (1)..(472): unsure at all n locations
  Clone ID: PAT_MRT3847_43670C.1
ggaattctgcaggcaagtggacagagactgtgactttctggaacacgaaaggatcatggattacagtatgttagtaagtcttcactttcgaagaatgtcgtgtagtaataatatcactccctctaattacaggtccagcactcaaaccccaactaaccatagtaactttaataataaagcccctcgtctttctaaagtaaatgttaatcatcttatagtagatcctagtcgataagttcaatgtaatataaacataccancgcgggctaaatcaacagtacgaaaaagtgatgacactcctcagctggtgtgagaaccaactggggaattatacgagatcatcatctttgtcagaatcatcaacatatgacaaaactatcacattagcaagnanctggagcatactgacgaatgatgtcgatgtgatgcaactggcgtggccgcanggaatccagaggtatacgcaggacgg

SEQ ID NO: 80459 - DNA, 831 bp, Glycine max
  Clone ID: PAT_MRT3847_43671C.1
gtgggaatgcctaatgctggtaaaagcactttactcggggctatatcaaaggctaaacctgctggtggtgactatgccttcactactattaggccaaatttggggaatctaaactatgatgatctctcaataactgtggctgatattcctggacttataaaaggcgcacaccaaaatcgtggactcggacatgcgtttatgcgccacatagaacgcacaaaggttcttgcttatgtggtagacttggctgctgctttaaatggaagaaagggaattccaccatgggaccagctgagagacttaattctagagctagagtaccatcaagatggtttatccaaacgaccatccttgatagttgcaaataagactgatgaggaaggtgcagaagaagtgtataaagagttaaagagaagggtccagggtgttcccatctttcctgtgtgtgctgttttgggggaagggatagcagatcttaaagctggacttaaaatgcttgtcagttctgaaatgtcatctgaactttgcctggatcaaattttgcttgcttagattattattaagagctcctcttgaaactgtaagtcaagatgtccaaacccgaggaaatatagaactgaaaaatgtgatttatgaatgatgttatggccttcagttcctgtgtatatattttttggggggccttaagacaagacttttaaccatcaacagaatattgcatgatttttagttgtgtgaaaaggaaaagagggacatcaaaaaagacattggaggaaattatcaagagaaaaaaaaaaaaaaaaaaaaaaaaactcgagactagttcctggt

SEQ ID NO: 80460 - DNA, 450 bp, Glycine max
  Clone ID: PAT_MRT3847_43672C.1
cgttcttttttttttttttttttttttttttttgtttttttttttttttttttggtgtttgggtttttttttttttttttttttttttttttttttagaaaggggggttttttttttttgagaaaaaaaattgggccccctttgtgtggaaggggaaagcctagagaactcacccccttttttgaaaagagagaaacctggggcgggctggttcaacccgggcccccccctcaaagtagtccccccccaagggcccactgccaatgttttgggaaaaaaaaaaaggggggaaatgggggcgccattcttagagggacgcttttgaaaaaagaaaccaaccatggggggcagatgcttggggatatcccttggaaaaatccacaaccatgtgcccccaaaggggggacacaacacgattgtgttgggtggccaaattttcaagttccgggg

SEQ ID NO: 80461 - DNA, 424 bp, Glycine max
  Clone ID: PAT_MRT3847_43673C.1
gttttattggttaccaatttttgggaattgactgtatcctggcagtcaattaccttcaaaagctgtagttggaaatgtaacatgtggtagtggacgtggaggttcaccaaccagtgctagtattatttctgcagtaaccaattgatcctgaattgtaaacgaacggatacgtacagcacttgggaacgggaagaaaatagctttttttactagaggggatgcttttccagcagcttcactggctgatctttgggtagttaagaatgaaataatgagttgtaacgccactaatcctatgatggcgcgactttttgtgaactgcacaacaacaacatatctgcttgttgagtgaacactgcatatgcgaactaggaagtatattgtattcactaaaacaaagcgctttactatgcgcattgcgtgt

SEQ ID NO: 80462 - DNA, 231 bp, Glycine max
  Clone ID: PAT_MRT3847_43674C.1
cttcactggtgttttcccccaattcccagtcccacatagcttaaaacttaccatctacgattggacaaatacaaatacccttctgcctcgctcaaaacacaaacaagctcgcttctttcttctctcattaacaacatgcagatcttcgtcaagactttgaccggcaagaccatcaccctcgaggtcgagagcagcgacaccatcgacaacgtcaaggccaagatccaagac

SEQ ID NO: 80463 - DNA, 385 bp, Glycine max
  Clone ID: PAT_MRT3847_43675C.1
aaactaaaaattcttttattttttaaatttttatgctgtttaaaggtcggataaaatttcattagaagctatgtgtcaagacaccactatattcctaccatcagaaaggatatataccggggagaggaaaattcaattcagaaaacatgggccgagatgctgactcgttacatgcttataatttgggtgcagcttgaactaggcactgaaaagaaatcctttgttttttcttgaagagaaaaccgcacaatgattgaagaagtgccgatacggctctagaccatgaaaggcaatgttgaatatatgcccttggagccaagagattcaaaccataatagggtgccaacgctgtaagggggaaaacccatgcccatgaacgctgaaa

SEQ ID NO: 80464 - DNA, 110 bp, Glycine max
  Clone ID: PAT_MRT3847_43676C.1
tacgttggtatctctgtgttgtaacccgattcgttacaaaatgttacatggaattagacaggtagctattgaaacaaataggtgagttggttttttcaggagctacctgt

SEQ ID NO: 80465 - DNA, 2245 bp, Glycine max
  Clone ID: PAT_MRT3847_43677C.1
tgggtgaagaaggcaagagtgctgagaaaaagacgggggtaactgtcactggtcaaaccacaggtggtgtgaagtctgtgaaaaagaagattataaagagggttgtgaaacagaaagttgccactaaggcaaaggctactgccatcaaacaaacagacaaatcaggtgaaaaggatgttgctgagaaagtgacatccaatgttactgatcaggatggaaaatctcctactggggttgaaactcctgtaaaaaacttagttgctgaggatatgtctattgggaaaattgatagtgaagagggcaaagataaagaaataaatagttctgaagataaacctcaaaacaagccaaatccaacagtaaatgcagttgtgagtgatccttctgtgaaaacaacaaagaagaagaaaattattaagcgggtacctaaaaagaaggtggtgggtgaggcttctaaatctcttgtatctgaacctaaaaaggatgagaatcaaggacaagatagtacccagagctctggaaagcagactgcagatgcaaataccatagtgaccgaggagaagaaacctgggaaggtagttccgaagaaaaagataaaaacacctgtctctaagaagaaagatgaaactgctgattccaataaaacagaaacactgtctgacaaaaaggatgaagggaacgttgtggcagttcaagcacaagatgacacacagagcactggcaagcagactgccaatgcagataccacagtgacaccagaggtgaagaaaactgggaaggttgtccctaaaaaacaatcaaagacccccacgtctgaaaagcgagacaatacagctgattccagtaaaacagaaacaaagtctgacaaagatgacaaaaaggaagaaagagttactggtgaaaaaagtggggcaaagacagacaagctgaaagcctctgataaagatgttaccaatgtaaaggggaaagtgaaagatggggacaagtcaaaagatgagaaagtaacccaagagagggatggaaaggactagtccaaaagcaaatctagtaaggaagtgaaagacaagaggaagtctaatgaacctcctcgacaccctggatttattcttcaaacaaaatggaccaaagattctaaaatacgttctttgtcattgtcactggattcattgctggattatacagataaagatgttgaagaatcaaatcttgagctttcattgtttgctgaatcattttatgaaatgcttcagtttcaaatgggttctagaattttgacatttcttcagaaactgcgcataaaatttgtgatcaaaagaaatcagaaaaagaggcagagggaagatgagcaagagaaggatgatgtaaaaaaatctcctgttaagcgtcaaaagggaaatgatccttcagtgaagaatgagcccacaaatatggacacgttaaatccaaccctactagatgatgagaaagctgttgctaggaatgataactctagtaataaggaggatgatgtgaagatggaagatggatcagacgaggaagaagaagatccagaagaggatcctgaagagtacgaggaaatggaaaatggtagtccccagcatgaggcatccaatgataaaaatgctgagcaagaggcgaatgcagatactaaatctgaaaatattactaccaatgataaaacagcagatgaaacttctaaagaggagattaaggttaaagatgaggtgcaagaatccaaggccgatctacaggtaaaagaagaaaaggaaggaaaggatgagattaagaaagaaactcctactgctaaggaggttgttgtggacagagaattgttgcaggctttccggttttttgatcgcaatcgtgttgggtacatcagggttgaagatatgagaataattatccataatctggggatgttcttttcgcacagggatgtcaaggaactagtacagagtgcattattggagagcaacactgggagagacgacagaattctttataataagctagtgcggatgagtgatatttgatgccccttgtgtctatttcattgtttacgaaacactggaattgcctgtgttgggacttgggattaatgaaagttgcttttgtaaaattacagttggactttatttgattgttgagagggctggtagtctttcgttttagcgaaagggtaaaacctttcttggcatttacaataggaaaccaagtattttatttacatgttttgaattttttt

SEQ ID NO: 80466 - DNA, 1682 bp, Glycine max
  Clone ID: PAT_MRT3847_43678C.1
ttgtttttgcgtccggagcgtttacgggagcgcttgtttgagagtgagagggacagattaaaggagaaagatcgggaacgattgctagaacgagaactagaaagggaacgtgaaagggatcgcattatggagcggcgcgaaaaggagagggagcgagagcgcaaacgtgcacttgaaactaagcctgaacgaactccagcgagatcctccaaggatccccgtggtacttcaaaagatccccgtggtacttcaaaagatccccgtgggtcgtctttgacaaaggaggggagatctacacgacgggactccccacatcatggagcattacataggcaccattcacctgttaaagaaaaacggagagaatatgtctgcaagatattcccatcccgcttggtagatattgagagggattacctcttattagataagcgatacccccgactctttgtctctcctgaattctccaaggctgttgtgaactggccaaaggaaaaccataaactgtctattcatactcctgtcagttttgagcatgactttgttgaagaagaaagtgccactgagcctagagactcctccaacaagcttttggtgggacaacctccaaattcattacaaggaaatacagtttggaatgctaaaataatcttgatgaatggacttagtaggtctgcgttggaggagctgtcatctgataaaattgtagatgatcgcattcctcatttttgcaatttccttagatttgcggttcttaagaaggatcattctttcatggcagttggtggtccatgggaacctgttgatgggggtgatccatctattgacaataactctttaatcaaaactgccctcagatatgcaaaggatgttattcaacttgacttgcagaattgtcaacattggaatccttctcttgagttacattatgatagaattggcaaagatggtttctttagccacaaggaaatcactgttctttatgttcctgatttgtctgactgcctcccttcgttggatgaatggcgtgacaagtggcttgcccacaagaaagctgtggctgaaaaagagcgtcaactttctttgaaaaaagagaaatcaagagataacaaggaagtatctaaagataaatcagataaaaggaaggattctactccctcaggaaagtcagatgtaaagaaaaaagaaaaggataataatactgttaaggaagaaattgaaggaaaaactggagtgaataacaataacatcgttaaaaatgaaggttctgacattggtgaagaaggcaaaagtgctgaaaaaaagctagctggggaaactgccactggtcaaaccacaggtggtgtgaagtctgtgaaaaagaagattataaagagggttgtgaaacagaaagttgccactaaggcaaatgctgctgccaccaaacaaacagacaaagcaggtgaaaaggatgttgctgaggaagtgacaacatccaatgttactgatcgggatggcaaattttctgtggatcctactggggttcaaactcccgtaaaaaacttagttgctgaggatatgtctattgggaaaattgatggtgaagagggcaaagatacagaaataaatagttctgaagataaacctcaaaacaagccagatccaatagtaaatgcagttgcgagtgatcctgctgtgaaaac

SEQ ID NO: 80467 - DNA, 424 bp, Glycine max
  Clone ID: PAT_MRT3847_43679C.1
ctatttggttccgcttcaaaatcttgaaaaccactctctctctctccctctccggccacttaaccaatccctaacggacgcaaccttctctcttcagctcctctgccggaatccgccaatttggttctgatcatcttctcacagaaattctttggcaaacgatgtaaaaacgattactttagaaaccattctaaaagtgcaagtacctatcgagtccttgagtcattaagtggaatgaatggatcaacggagaagccaataaagtatgtcctttgcactgtgcttagctcttgtgcaaaaactctgaattggcatttgggtatacaaatccatgcatacatgattcgatctggatatgaagataatctgttccttagtagtgcacttggtgatttctatgcaaaatgttttgctattctggatg

SEQ ID NO: 80468 - DNA, 269 bp, Glycine max
  unsure (1)..(269): unsure at all n locations
  Clone ID: PAT_MRT3847_4367C.1
gcacaagtgagtttgttgatcgagaaactagaaacagtgtgatgaaaatgaagggcctgttggttgttcnntnctcaaaaatcnnnncccgggaatacccttcgcctctgcagggactgtgagggatgtttcacctcatgagttcgttggggggtgctcctctctcctgacgcggatcctgtgatgatggattcttccagggtgtactnttatggggtaagctnggggatttaattanntttctccttatcatccttactnttactata

SEQ ID NO: 80469 - DNA, 1763 bp, Glycine max
  Clone ID: PAT_MRT3847_43680C.1
aaacctaaaaaggatgtggagaatcaaggacaggatggtaccctgagctctggcaagcagactgcggatgtaaatactgtagtgactgaggtgaagatacctgggaaggtagttcctaagaaaaaaataaaaacacctgtctctaataagcaagaagaaactgcggattccaataaaacagaaacaccgtctgacaaaaaggatgaagggagtgttgtggcagttcaagcacaagatgacacacagagcactggcaagcagactgccaatgcagataccacagtgacgccagaggtgaagaaaactgggaaggttgtccctaaaaaacaatcaaagacccccatgcctgaaaagcgagacaatgcagataccagtaaaacagaaacaaagtctgacaaagatgataaaaaggaagaaagaggaggaactggtgaaaaaagtggggcaaagacagacaagcagaaagcctctgatgttagcaatgtaaaggggaaagtaaaagagggggacaagtcaaaagatgagaaagtaacaaaagagagggatggaaaggacgaggggttcaaaagcaaatctagtaaggaagtgaaagacaagaggaagtctgatgaacctcctcgtcaccctggatttattcttcaaacaaaatggaccaaagattctaaaatacgttctttgtcattgtcactggattcattgctggattatacagataaagatgttgaagaatcaaatcttgagctttcattgtttgccgaatcattttatgaaatgcttcagtttcaaatgggttctagaattttgacatttcttcagaaactgcgcataaaatttgtgatcaaaagaaatcagaagaagaggcagagggatgatgagcaagagaaggatgacgtaaaaaaatcccctgtaaagcgtcaaaagggagatgatccttctgtgaagagtgagcccacaaatatggacacatcaaatccaacccaagtagatgacgagaaagctgttgttgagaatgaaaactctagtaataaggaggatgatgtgaagatggaagatggatcagacgaggaagaagatccagaagaggatcctgaagagtatgaggaaatggaaaatggtagtccccagcatgaggcatcccatgataataatgctgagcaagaagtgaaagcagatactaaatctgaaaatataactaccaataataaaacaacagatgaaacttctaaagaagagattaaggttaaagatgaggtgcaagaatccaaggctgatgcacaggtaaaagaagaaaaggaaggaaaggacgatactaagaaagaaactcccgctgttaaggaggttgttgtggacagagaattgttgcaggctttccggtttttcgatcgtaatcgtgttgggtacatcagggttgaggatatgagaataattctccataatctggggatgttcttttcgcacagggatgtcaaggaactagtacaaagtgcattattggagagcaacactgggagggatgacagaattctttataataagctagtgcggatgagtgatatttgatgtcccttttgtgtctattttcattatctatggaacactggaattgcctgtgttgggattaatggaagttgcttttgtaaaattacagttggacaggtccggttttgaatttgttttatttgattgttgaaagggatggtagtctttggttttagcgagggtaaaacctttcttggcctttaataaaccaagtattatattta

SEQ ID NO: 80470 - DNA, 751 bp, Glycine max
  unsure (1)..(751): unsure at all n locations
  Clone ID: PAT_MRT3847_43681C.1
ccaatccctaacggacgcaaccttctctcttcagctcctctgccggaatccgccaatttggttctgatcatcttctcacaggtaagctacttctctttcaattccttcttcctcgttcggtttctctttccaattccactctgttagcaatggatgctttgatctcgagctctaactcccgataattgtagtcacggatagccttccttttggccaaggtgattggttggttatctagatcctgagatcattttgcaagccaataatctcatgcagcttcaagggtgtttgctagacatttgtttattaacattcagcagcacaaggttgaggtttacacaagtcatgtaatatggtgcgttttctaagttattttgcctatggtttgatgcagaaattctttggcaaacgatgtaaaaacgattactttagaaaccattctaaaagtgcaagtacctatcgagtccttgagtcattaagtggaatgaatggatcaacggagaagccaataaagtatgtcctttgcactgtgcttagctcttgtgcaaaaactctgaattggcatttgggtatacaaatccatgcatacatganttcgatctggatatgaagataatctgttccttagtagtgcacttgttgatttctatgcaaaatgttttgctattctggatgcaaggaaggtatttagtggcatgaaaaacatgatcagggttcctggacttcacttattactggattctcattaata

SEQ ID NO: 80471 - DNA, 454 bp, Glycine max
  Clone ID: PAT_MRT3847_43682C.1
aatcatggccgaaccattcctatttaatcatcaaatggtggagaaacctccactgatgcgtatggctccgcttaaaatttgcttactgagactcatcaattacacaaggcagggtttgagtgggaacattgatatggaaactggaatggagggtgcctcatatgggacatgcaaatgtgccttgcctggtcttgactacgaggacagaaggcctgttacaacttctaccatggatgggcttttctcatgcaccacaaaagtgcatcgaagcgcattgggtacggctccaatcatttcttggggaaaagtgggtgagatattactggtcaagatcttgtcgcgccccactagggagattcactttaacttctaacgcacttctcagtgtttggggacggactagactctgaatgctgtgttttcctgcccctcactaactctagcagtaccacac

SEQ ID NO: 80472 - DNA, 237 bp, Glycine max
  Clone ID: PAT_MRT3847_43683C.1
gaagcaccattggggtgtacattagttggtttaagtctagtttggagacgtaatcaaaatacttcagtttgggttgagttgaatttaggcttcttttttttttgtcatatctgaactgaagtaacatgatcactaatgagttggttaggtcaagtccaaaaagttaaaaattgttctaaattttctcaaaatttgaaataaaataatacgttaggtcattgaaaaaaaaaaaaaaca

SEQ ID NO: 80473 - DNA, 561 bp, Glycine max
  unsure (1)..(561): unsure at all n locations
  Clone ID: PAT_MRT3847_43684C.1
ggctcgagcgcagttccacaatattctttggttttgcacaatgggtttagaaaggctctttcaaatccaactcaggaaatctagaaatcacaagtatgaaaatcgatgagagcgcattgcgtgtggatcctgtggttgaggaaggagagtgcagaggatgagaggtgagagtttcaactatgagttaatcatatttttagttcctaaataatttgatcatctttagatttattcctcaacttgtaatatacacttcaaattcagttaatcatagttttagttcctaaaaaattgttcatccttagttttagttctcgacttttcattcatgtatttttgaaatactcaaactttatttcctatagctagctctataggggttgaaaacttatgattttagagactagntgggtatttgaaaaatataggaacaaaaaattatgattntaaaaattangggtctaaaaactgagataactcatttttcagaaactaagaacaccgttaactctgcaatcattatgtcagatgagtatctgcatatacatctatatcttctaa

SEQ ID NO: 80474 - DNA, 827 bp, Glycine max
  unsure (1)..(827): unsure at all n locations
  Clone ID: PAT_MRT3847_43685C.1
accccatttacctccacccttcttctctctttgtccctaaactacacaaagtagaagccaaacacaaaacaacaaagtattgatggagagtgacacaaacaccacattttctcactcctcaaatactaccccttcttcccctccccaacaagttcaagttgtcatgatcccttgtgctgcttgcaagattctgaggcgaagatgtgctgagaaatgtgtcttggcaccttatttccctcccactgaacctgccaagtttaccactgcacaccgagtcttcggtgccagcaacatcatcaagttcttgcaggaacttccagagtctcaaagagctgatgcagtggccagcatggtttatgaggctggtgcaagaataagagacccagtgtacggatgtgcaggtgcaatttgccacctccaaaagcaagtcaatgaacttcaagcacagttagcaaaggcacaagctgaggttgtaaacatgcaattccaacaagcgaatctcgtggctctaatttgcatggaaatggcacaaacacaaactccacaggaatcaccacaacaatctgtggacaacttcatttcaagcccttcacacagcagcggctatcaaaacaatctcaatttctttgaggagaacaccaataacctaaactctttgtgggagcctctttggacatgatgaagaaccagacttatacaagacacttcataagtgttagttcccatgacaatcnccntaaggagaagttgaaggaatcaagtagaactaataataaattataanagtataactttggtagctagatttcatgtagttaagttactgc

SEQ ID NO: 80475 - DNA, 275 bp, Glycine max
  Clone ID: PAT_MRT3847_43686C.1
aacctaccataaacaattcctttatttctttataataatcgcgtcctcattacctctctttgggattattaacaaagtgggtgggacaacctcacacatcatctcataaaacctatcttccacatcccttcctaacattacatatcataaaaacttactaattcatcattaatataatctgctaattttaattacttactatcacaataatccttcaccatctatcgcctttttttcttatttttcctctcattttataaaatcaaaacttattt

SEQ ID NO: 80476 - DNA, 274 bp, Glycine max
  unsure (1)..(274): unsure at all n locations
  Clone ID: PAT_MRT3847_43687C.1
ctacacttaaaaaacgattattttttctaattgatgaatcttgtcgttttaaaatatagagattaagancaattttgacccaaaattgagggatgtaaaacacattntgccgtgttgttatttaagagcatgtttggtataattgccttttgagaaataattgtttattctgttacaaggttagaaaaaagcagttattcctccttgaatccnacacacactaagatgatattgttaagcagtcatcgtttggatggaatatagacatcgcaga

SEQ ID NO: 80477 - DNA, 435 bp, Glycine max
  Clone ID: PAT_MRT3847_43688C.1
aaaatcacggggcgacaacttcgacttggggggtctaataaacggttttttaaactttgctctcggacctgatggtggcaatcggaaaaaacaacaccccgggagacacacccgtattaaaacctcctgggctaaagtcgtctcccaggatcaacaaaatcacccttttccttttccccaacccagggaacaatttcgccctcagcacgaggagcccaaatctaaaagtccctacaacccccaaaggggggataaaggtaaaaatggatggcacactgtgggtaaaaacccttcagggcttccacatagggttcaaagggacatctggaacatttataaccgacctgctgttgaccaagaatcctctaatgaggttaaatttggccctgatgtaaacccctaaaaagataaacttgctgatctgtcaagagcttg

SEQ ID NO: 80478 - DNA, 444 bp, Glycine max
  Clone ID: PAT_MRT3847_43689C.1
gttgctggggggaaaaaccttttctaatccgtttcccaaacccccccctgggctttggtctttttaaacaggcctttaaaaaaaaagttttctccgatgtggaatttaaatgaaaaccgggaaccccttcaacaagtccctttttggaatcaaaaattcccatttttgggggggttcccccctgtctacaatcacaacctttgttttgggagggcccctttttgccccttcagctcaaatgttggaaacaacatccattccaaaaaaaacttttccaaaaacgacgtgcctttcctccaaccaatttattgtcacaggtgttattaaacattgtgaacccttgttttttggacccccatttgccccttattgaaccccggctcccatttgctttaacttgaagttctcataccaaaacttctctccgtaaaatgattccccccc

SEQ ID NO: 80479 - DNA, 287 bp, Glycine max
  Clone ID: PAT_MRT3847_4368C.1
ggaataaagtcctccaagattctccttattttctaaattaagggttaaaaccaggaaattcctcgcgggttttactaattattatacctgaccctggcaaattttcaacctaatttaacaccattttttttcccatttatcaaaaaccataatggaggtttaaaatattaaaaaaatcattttagggttgcgggtttgtttaagtgtgaagtttcttttcattaaaaccaattattttttttaccttttagaaaaaaaaaaaaaattaaaaaaaaggggcggccccc

SEQ ID NO: 80480 - DNA, 260 bp, Glycine max
  unsure (1)..(260): unsure at all n locations
  Clone ID: PAT_MRT3847_43690C.1
tcctggaaaggggtggataatacaccaccctantgaatctcctgnnggacacacaggagctcactcatctcgantcccanctcatatcaatctcacagggnttcacgctcttcgngccgnncgacaacgtcttccagagtctganccccngtgccctaaacaanctcagngacgnacagggggtgnagctcattctcttccacgtcactcccatattctacaccatctccgttctgttaancgagaancacccccttgga

SEQ ID NO: 80481 - DNA, 390 bp, Glycine max
  Clone ID: PAT_MRT3847_43691C.1
aaaaaactgttgtggccaactggccataggaacaaaactattgcggtttttggtcaaaaattccaaactatttactctgttgatggacggcctaatattcttcttttaagaaaacttgaggtcctttctaacaaattgtacacgccattctatcctattatcagctcactttctgtcatcttaaagtttgtttactaaccctaaacacataacatttgacgcttcacaaattacaccactggacctgggccaatgtggcgcgcatattcaactacataatggctcgttggaatatccaaaagagcaaagcttttgacgctgcttggataccaacccaccttgagcattgcccattattctacccgtgaactaacccttcatccggagaaa

SEQ ID NO: 80482 - DNA, 458 bp, Glycine max
  Clone ID: PAT_MRT3847_43692C.1
tgaggtttgtgagattatacagatggggagccgcaaagatgaaggggatctattaagtgccaagggaaattactgcagcacgctgcttaggaaacatctaagtgacaactacgttgctccgccggagaaacaaaccctggcagtgaccctcacatacatttagatttattcgtagtctacctcaggattgaaccctttagcttacgacttaattgaacaggctcgacctgatatatgggagcccgggtgacagaaatactatcatctttgtttgctactcccacgtctttcgactgatgcgcttatggcaaacagaaagaatctatggagaaggagttaaggacgacatggagcaagggaggcaaagccgcaaatttttctacaaactgtacatcctgggggcccatgtgattgtcaactagtgccttgaataacacaagaaaggttataactaccaa

SEQ ID NO: 80483 - DNA, 146 bp, Glycine max
  unsure (1)..(146): unsure at all n locations
  Clone ID: PAT_MRT3847_43693C.1
gtccagntatacctatatgaacactcngaganngccngatctcacaagnnacaccaacctncctncagcatngcancttnnctttacctnncnaagagtgttcatataggtatagtaaagatgcaatgctgaaggagttgtgttgc

SEQ ID NO: 80484 - DNA, 366 bp, Glycine max
  Clone ID: PAT_MRT3847_43694C.1
aatggacgcacgcttccacgcggtcgtacgaattctagtaaaacgccgagagtagcatccaactgtctcactactgcagaattggtaacataacatatactagttggaagtcgtgcatgtttaactcatccattccattaatgtacaattatgggcaaagaaccataactcagttcagaaaattgatataactggccgggatcttcacatactcccaattgaaaccattcataaaggccttgtttgtggcaacaacaaacacatataaaactatttcgagcaccttcaacacttccttttattcacccttgccttctttccaccacttgtaggttgttttgtcattctttaacaccacatcatcac

SEQ ID NO: 80485 - DNA, 389 bp, Glycine max
  Clone ID: PAT_MRT3847_43695C.1
tttttgtatataaaattataaataaaaaaagatcattttcgtaagttctacaatgtggaaatgatttcacatattaccaaccggccaaccccccttcaaaaaaaataataattaattacacatattggagtctacttattgatttaatgttatattttcaaccctgccttctatatcagcattactataattacttatttcaaatgcaaactaaatcagtgaactcctctaatcattgcattgctccataaatacatctaattctcctagaaattctcctacctccacttgcacatcatcaataatgcttttaattttcttcaaatcttcatttatatcatgaatctcttttagaggataaataaaatctccaatcttatctatctttc

SEQ ID NO: 80486 - DNA, 474 bp, Glycine max
  Clone ID: PAT_MRT3847_43696C.1
atcatcacttgctgcttgttgttcaacatcaaataccctattggacttggagcttattagatcaatctctttcaaaaaaaaagttttcccatgacttcttgttcttctattacaatatccccaaggaaactgcgctatgatctctattcctattcatacaaagaagactccaacaccccattagtgataaatgttctggcttcactcattgagaggagcatggctagaacacaaaggattgtgaagaattgctccaattctttgtccaaagccataagcacaaacatctttgattgtagggagattcctgatttgaccattcagtcctatctagagagaattttcaggtacactagggcaggaccttcagtgtatgttgtggcctatgtctatattgaccggttctgccaaaacaatcctgggtttagaatcaatgccagaaatgtgcatagacttctcataacaactatcatg

SEQ ID NO: 80487 - DNA, 1138 bp, Glycine max
  Clone ID: PAT_MRT3847_43697C.1
ggctcgagcaacaaatgacttcgatgaggctctacttataggcactggtggatttggaagtgtttacaagggtagctttgatggtggggcaacttctgtggccataaaacgtgccaatccaatgtcacaccaaggtgtttcagaattcgagacagagatcctttggctctcacagcttaggcatgccaacctagtctcacttttgggttactgcaatgaagatggggagatgatattggtctatgacttcatggacaatggaactctatatgaacatcttcatttgaggcagagagatcaaccccctttgtcttggattcaacgtcttgagatatgcattggagttgcaaggggtttacactacctacacactggcacaaagcacaggatcatccaccgtgacataaagacaaccaacatactcttagatcataattgggtgccaaaaatttcagattttggtttgtcaaaggcaggttacccttccatactcatcaccaatgtcaagggtagtattggttacctagatcctgagtgttttcaaagccacaagttgactgagaaatctgatctatactcacttggggtggtgttactcgagattctaagcacaaggcctgcggtaattgtaggtgaagatgatgagcatgtaaacttggccgaatgggctatgttgtgctttgagaatggcaacttggagcaaatagttgaccccaacttgaaaggaaacatagttgaagagtgctttgagttatatttaggatttgcaatgaaatgtttggctgaaagaggggtggagaggccatccattggtgaagtgctacagaaccttgttttagcgatgcatcttcagaaaaagggtggtgttgtccccgatggaaatgttcaaagaaatgataattctggtttacagggttattcagatttgacacctggggtcgagttctctgaaatcatgatgcctgttggtcggtgaatgtgatctactcgaaacaaatagccttaatgttttagatattaagacatttccatttcaaataatttgattagtaattcctattttatgaaaatgttacggaggttagatactaaccagaaatcattgtgtactgaattattagtaatttttttaattggt

SEQ ID NO: 80488 - DNA, 394 bp, Glycine max
  Clone ID: PAT_MRT3847_43698C.1
cttgttgggtttgtgggttttgaaattgggaaagccccgtagaggacattaagcgccccccgctattaaggggcgcggtggaagctggatttcaggagggacttgaaccaagcgtctatctagggctagggcagcgaccctttatgggttaagcgaccgcccctggaaacttacagggggaaaccaaaccacactcgttagagccaagccttgttatggcacagaggggggtccagggtgaagcacggaccggggaaaaacaggtttgaaaaaagcccccccgttatgtcaagggttaaagaataccgacggaggggcagtttttacaaagaccttatgggggttaggtcgggtccttgaccggttggtggttttccgggaaacactgtcactg

SEQ ID NO: 80489 - DNA, 428 bp, Glycine max
  Clone ID: PAT_MRT3847_43699C.1
ggctcgagcacgaagagaatgtgtgcgaagaggtttcggagtggcacgaacttaccccgataaaaggcttgatggtaagagctgtgtaccagagcttgttctgactaatcacccacaagcttaatctaagaccctggatcatcccttctctttatgttgctgctcgcttggttgtgctctttcatgccaggacctgcactggagggcagaccaataaggaattattcaccaagccctttactaagcatgacaaccctgatgttcagacctgccatgctgcttgctatggccttgccttcagtggggggggaggcacatacttgactgccagggatgagagagcataccaactgatgagccctgatttccctgtttgctctatctcaagatgccaaagacccatgcttgttgtggatgaagatttttat

SEQ ID NO: 80490 - DNA, 486 bp, Glycine max
  Clone ID: PAT_MRT3847_4369C.1
gttatcttaaacttagtggtacagatgccaagctcacagtgacagttacaaatattgaactgagagtccattacattagttgccacttgccagtggcttattctaaagcatttaaaggaactacttttggataggatgccttgactcctttttgtagataaccgatatatctgaagtgcaaccttggttaagttttgtatatgtagaacagagtcccttagttttataataatctatatggaagtctcttttaatatatatttcttgtgcaatcaaagttaatggaaagggcattatataatccttgattccacgctaatgcttagtgatgactgtgtgtgtattataaattggaaaatttatgcttcatcttaatatctggcagcaattctggtgacattttcaatgaacatttcttcatacaatcactcggaaatcgtgtgcatgtggtgagagaactccctgatgacatacttcaacgatttg

SEQ ID NO: 80491 - DNA, 691 bp, Glycine max
  unsure (1)..(691): unsure at all n locations
  Clone ID: PAT_MRT3847_436C.1
gaattcgagctcggtacccggggatcctctagagtcgacctgcagagaaaattctggacattttttcttcatcctctaagatagatgcagagtcttccgggattacaaatctttcttgatcttcatgctcttctgaaatttgttctttctgataggggttcagtattcttgttctccacaaggcctttattgctcttttatggaaacaaaaatatgatgttagctgaatgtgaaaaatagaatcaatttataagattaggaatataagttttcctgattcatacctggaggcagcactaaatgaaacaaaagattgaaaatgaaatctaagtctcccttcttcatcttgagtctttgcaccatgccttgcgtcgagacctcggcctcttcgcagaactatgaccaatgtagggctccctaatgttgccaatgatggaggaagcacttgtatctcttcaatatcttcccaaaggaagaaaaacttggttttgtgtccgaaccaattggcatgaaaccccagaatccttgctgaaagaaaccagccgaccctacaacaggaaggcaccctttatttaaataagcagtctatcacttaaaaatcaccaggtaaattattatatattaattcaacattgcatatttntcaacaattcttcacttttgatgtctaatatagtcaagcaataatatc

SEQ ID NO: 80492 - DNA, 484 bp, Glycine max
  Clone ID: PAT_MRT3847_43700C.1
ttccaggaaggtttcccgtcatcactgtatgacgtcctccttctttgggggggggggggggaaattcctaaaaaacaggtgtagaggcgcctggataaaagaattgcggtgtaagtgtagtttaggtatgcagttaacccgagaatgaaggcggagtgatagcaggagtagataggatcaagggataattaggaactgctggctagctgtatatggcaggtagcctgtagagttagcctacaggtcctcttggtggttgttggccttccgacagtagtgcaagcgtacggtaccgcgtggaacatgttcgataaatgtccgcaataaaccaaaacgtgtgccacaaaacaaacacatgtttaggtgagcagagcgcaataaagttaagataggagtgttacagacaggtggtgggagggcggtaaaattattgccaatattacatgtacaacaaggggcattgcaaattggtattgtagatggg

SEQ ID NO: 80493 - DNA, 975 bp, Glycine max
  Clone ID: PAT_MRT3847_43701C.1
tgtttctctctcttccactctctctccaacaaaaaatatctatctatcataataccctcactcacgcatacacaagaatttttcccatcctaaaaccatgaccctccattcaccattcaccgagcgaatcccataaaaacaacacccacagtaccatcatcatcatcatcatcatcaacaaaaaacggatgaacccaaccttctcccttccctcactattccatctctctcaccttttccctttaacaatccctctctctctttctctctctcttgctcttgcttttgcttagcaataagttacaaccaccaaccctagagagcgttgaggcgacaacacagtacatcaggaacagcaaacaaggcagtaacaaacaacagcaacagttaccatcaccaccaccatcatcaccatgtcccttgaagagtcgctaagatctctttctcttgattacctcaacctcctcatcaacgggcaggccttcagcgacgtcactttcagtgtggagggccgcctggtccacgcgcaccgctgcatactcgccgccaggagcctcttcttcaggaaattcttctgtgggccggacgcgccgtgcggcctcgaccctgccggaccgcgaggcgttaactcctcgcgctccggggtaatccccgtcaactcggtgggctatgaggtgtttctcctcatgctccagtttctctacagtggccaggtctccatcgtgccccagaagcacgaggccaggcccaattgcggcgagcgcggctgctggcacacgcattgcacctccgccgtcgatctcgccctcgacaccctcgccgccgctagatactttggcgtcgaaccgctcgcattgctcactcagaaacaactggcgagcatggtagagaaggcttcaatagaggatgtaatgaaagtgctgttggcatcaagaaagcaagacatgcagcaactatggtcgacatgttcccact

SEQ ID NO: 80494 - DNA, 381 bp, Glycine max
  Clone ID: PAT_MRT3847_43702C.1
tgatccttaagcggcgtttttttttttttttttttttggcttaaagacacacacattctagagagtcttaataacaagtaatactctgcagattaaaaaagacagtagaacaattcccgaaaaaatgggaaacagtctaatctttaaaaataataacctctccatattcaccaactcccaaactgatcatcacctccactgatttagatacctacagatccacttctacttgaaattttatgctttaaacaatgaaacttaaccctccatgactcacatgaatataactatctcctacaatgattttacaacccagcttcccatactttgctttttaaccctatatatatggatgcctacataaccacatacctgtggtac

SEQ ID NO: 80495 - DNA, 484 bp, Glycine max
  Clone ID: PAT_MRT3847_43703C.1
ctagttctagatcgcgagcggcctatgcaaaaattagggtaataaaaaataaaaataaaaggaaaaagaaaaaaatcaggggcatgttgttaaggttttgtccccaaaatccaaactacaaaaggatataagtcaagatttgaaatgacacatagccatatttcaacatcccaaacactagtttatccattgctaccacttccgagccaaagcatacttgttttctaaaaacaataaaaaaaaaacagcaaaagcaaaatagaaaccctgagtgggaaccattgctaaaccagcgggaagagcaatgcaaagaacatatgcatgaagttaggcaacaatgaagaaaacaaaatccgccaaaggcgagtgagaaaaagggggaaacaaaagatctccaaattttgcaagaaaggcacaaaagtgcaataaaagattaatgtataagacaaaaggagtagagcccaactcaaaagttgaaatgaat

SEQ ID NO: 80496 - DNA, 669 bp, Glycine max
  Clone ID: PAT_MRT3847_43704C.1
gcacgtaatctgggtcgagccccagaaactgtattttggccagttttcatagtggccactcttgctgccattgttggaagtcaagcagtgatttcggctaccttttccattgtaagccagtgttgtgcactaaattgttttcctccggttaagattgttcatacttcaagcagaatatacggacagatttatgtcccagaagtcaattggatattaatgtgcctttgtttagctgtgacaattggcctaagggatattgacatgatgggtcatgcatatgggctggccaccaccactgttatgtttgtgacaacatgcttgatgacactagtaatggtgattgtttggaagcaaggaataataaaagccattatatgtttggtattgtttggatcaattgaactgctttacatctcggcttctatctgcaaagttcctgaaggaggatggatcccccttgtgctatcttttatctttatgagtataatgttcacttggaactatggaacaatgaagaaacatgaatttgatgtggagaacaaggtttcaatgagcaagatactatccttgggaccttgcttaggcatggtccgtgtcccgggaataggggtcattttcagcaatctggcttcaggtgttccagctatttttggccattttgttacaaac

SEQ ID NO: 80497 - DNA, 291 bp, Glycine max
  unsure (1)..(291): unsure at all n locations
  Clone ID: PAT_MRT3847_43705C.1
cgggaacgcttggagatcagcaccacttgananaccagcatgataagatgggtggtgtcaatgattgcgganctggcncaagatgtgatanaganaantcactgggtgantggnagncacttanatgganncgctctggaagtntgtcatctcgangctcaggttttagccantcaagtanctcaaggngcatgggagnagnagantcccatgaagcgaaggccgatttgctanncnaangngtggcttntaatgantcncattccaggggaatctgctgcttgtgcnaca

SEQ ID NO: 80498 - DNA, 1722 bp, Glycine max
  Clone ID: PAT_MRT3847_43706C.1
ctcgagccgcaaagagaaacaaagaaaattcttgcacaccaaagaaagattgcaacaactgcacgaaaatggcgaccatttggaagaccaacgcatcgagaaacgcagtgcgttgtttgacgcagtccttggcatccactagccgtaccccttcgctcccctctcatttctcctccgtccgctacctccgcaccggtcgcgatcccagctcaaggacttatgagataattccgccggtgaattgggggattcggattgtgccggagaagaaggcgtttgtgattgagcgattcgggaagtacgtcaagactcttccctccggaatccattttttgattcccttcgttgatagaatcgcttatgtgcattcgctcaaggaagaggctataagcattcccgaccagagtgctatcaccaaggacaatgtcaccatcatcattgacggcgtcctttatgtcaagattgtggatcctaagctggcgtcttatggggtggagaatcccatttatgctgtgattcagctggcacagacaacaatgcgtagtgagcttggtaagattactcttgacaagacctttgaggaaagggacacactcaatgaaaagattgtggagtccattaatatggctgcaaaaagttggggtctggagtgccttcgatatgaaataagggatatctctcctccacgtggagtgagagcagctatggagatgcaagcagaagcagaaagaaaaaagagagctcaaattcttgagtctgaaggagaaagacaggctcacataaacattgctgatggaaagaagagttcagtgatcttagcatcagaagctgcgaggatggatcaagttaacagagctcaaggtgaggctgaagctatccttgctaaagcaaaagcaacggctgagggactggctgttgtgtcaaaatccctaaaagaaaatggaggacctgaggcagcaagtttaaggattgcagagcaatatattcaagctttcagtaacatagccaaggagggcacaacaatgttgcttcctagctctgcatccaatcctgctaacatgatggcccaagctcttactatgtataaaagcctgcttggtaatccttccagtggtaagcttagtggaactgcacccccttcaatagcagggcaattagaaggaaatgattcatccagtgaggttaaaggcgagagctcgacgaatgctactgtaactagtggaatcccggattatcgtggaaaacctggattttcacttcagagcccaccaaaacgggaatagtctttcattttataaaacttgcctttttgatgaattcagttttttgatttatggatgttgctgtggaaattgagttcggactttagagagaagaaggcggaagagtctggttggaattgcattgctggttgttgtggcatttaccacgggatacacgtagtttactttttatttttatttttttatctcttcctaactgacaaatttggggaggaaataatgaaaagaaaagaaaagagttattctgtcctctcatgtctgtccatactagtgttttctttctttaatgcttgcctgcatacccggctttatggcatcgcttgaatttagatgaaaattttaaggatcttgttaactagaaagtctttgataacattacgaatgtatttgaaatcatggtgtacgtgtaatttcttaaattatttgataaaccgtttgt

SEQ ID NO: 80499 - DNA, 457 bp, Glycine max
  Clone ID: PAT_MRT3847_43707C.1
ggggagtgttgataaaacatacatcttcttctatactttcttatttatggaaagccgttaattatgaatgcagtagaaaatttctgtttatatgctgcatactttttgtgaaaatttcttttggctgtcttatatttttattctggttcacctttgaggctgtgctgatgacttttttgttaggtggccctaggaacgcccaaataagctatactgagaaatttgactatccgctcactctacttcgaaacaatcatatatccgtagttgatgatatcgtgcacttaggctaataacagtgttctcattactcatatccaaagtatcatctacaaagatcgctctatatactgcgagagatctgttactgtccccatcattattcagcaacgcggcgccttcgccgttaaccaccggaatcgctactgtgacgacacatacgactcttatgcttcct

SEQ ID NO: 80500 - DNA, 399 bp, Glycine max
  Clone ID: PAT_MRT3847_43708C.1
ggccacttttcgctgagatgctgcgactttctaacgaaactggctaactgaataaatgattaatgcgattacatgggtgcataaaagggtttcgaaatcggaactagtggtggctgaaccttctaccgacaaggaaaatgatcacacgatagtcaaccatgcattcactaggatagacaaggaccatgaagacgctatcgacgatgaccttgtggcacatgcattaaccgtatcagacgcagatgacaatgcctttactggaacctgcgacgataaaaccctcgcggtgaatgaccttgacatggacctttatgatgactaaaattaaggaattgatgtgttcagttctggaattggctatcgttattatgctagtaacgacatggatccctatatcaa

SEQ ID NO: 80501 - DNA, 180 bp, Glycine max
  Clone ID: PAT_MRT3847_43709C.1
catcttttttgagtccaacaatattagtggtttctttaaccctagggattaccttcttttagcactgttcggaattaaggacattaaaacagaaacacatctacctttaggagaaaagatgagacagaatcaatcactcattggtcgctgtaacgatacagtgacagggaaggcgaatcc

SEQ ID NO: 80502 - DNA, 320 bp, Glycine max
  Clone ID: PAT_MRT3847_4370C.1
cgggccgaccgacgcgtccgctcactctccttcttccgctcctttcatacttttcatacatctctgacccctatcacatatgaatgttttgactcaaatgctcgcccttctcaactttaacaaacttatacaaatctatgcatactatcaagatatgacctcaccttatttctgacaaccacatgtgaataatgtttataacacactatgtaaaataccgctgaacatctcaaactacttaacaccaatacaattaccaaataacaagattacatactttaaggtgaataataactttaaaaccacatacaacttcggct

SEQ ID NO: 80503 - DNA, 191 bp, Glycine max
  Clone ID: PAT_MRT3847_43710C.1
acgggaagtgtgtcttttcaacctattacaccctctattattatattccgccctgagatatctcccactattttttattgtcatcacctccccctaatttaccttttttatttaaacaacttctttaaaagaatcattaaattctatcaaactctaaaatttttcttctaaaaaatcaatatctattctac

SEQ ID NO: 80504 - DNA, 179 bp, Glycine max
  Clone ID: PAT_MRT3847_43711C.1
ctgtggctcagagtactgcatcagataagagagaaaacggctcttcatccgttgggggaaatccgaccatggtgcacgtctcctcttacaggtactatggtgagtcgcttaacaagcccccccgtccttaccataaggatcttttagacgcgtatcttaatcttgttccggagtactgg

SEQ ID NO: 80505 - DNA, 422 bp, Glycine max
  Clone ID: PAT_MRT3847_43713C.1
ggctcgaggttgccaggcatgccttaggagctgaagatatcattagttttccagatgacaaattaaaccggatgtggcaaccatacaaggaccagaatcttgttgaggaaagccattcaaatgtgacttcttcagacttttggaatcaacctccagtgaaagcattcagttctgcaatgacaactaggcgggggaagacacttgagattcagtggcctcctatgtcccttcccagcacctattactacatttccctctattttcaagacaacagaaatccaagcccttacagctggagaattttcgatgtttctattaatggccacaccttcttttccagcctcaatgccacaactaagggagtcactgtttatgctgcaaaatggccactctcatggcagaccaaaattacattgacccct

SEQ ID NO: 80506 - DNA, 695 bp, Glycine max
  unsure (1)..(695): unsure at all n locations
  Clone ID: PAT_MRT3847_43714C.1
gggccggaanacccgcgncgacccagcgnccgctgggggtgatcgagggtacgcgttccttcctctgtgcaacaacactggcgaaacctgggcgaggacgccgctctccctccggatgcgtttccggctactccgctcgctcctcttccccctccgactctcgctcctcctcacgctcgcgctccctttctcggtcccggtctccctggcgctacagatcctgtcacacctcctgctgctcgtgctgacgaagctaccacagtcgtaaccctcaccggcacaggcgacgaagtgctgctgacccaactaggcgaggttcggtcccactgcacactgagtgataaggagagaccgaccctcaccaaggaaaccttcacctgtacgcgagtaacatcggtcttcaagatgaaaagctcaacagaaatgcgaaggaagggcaccatgaaagaaagagacagtaactctggggagggaactaagtgatcaaaggcgggcaatggatctgcactgtcaatcctacaaaagggaatggatatgggcagttcaagacaagaggggatgcggaaaaggcatcattgtgcatggacggcgcccaaatagatggcgatggcatcaaggcatgatttactctacctacaacgcagaaagtgtcaccacctccaaaggctgatgctgctgctccaaagagagacacc

SEQ ID NO: 80507 - DNA, 470 bp, Glycine max
  Clone ID: PAT_MRT3847_43715C.1
taaaagtgttgattttattattattttagagtaaattacacaaatctttgtaactatcctccatttttaacccctacaaaactccccctgattgtggagttaaaattacacgaacctcccctctacttttaatgaaatttggttccgaaaataccctttccttcaagtttttaacaactgaacacttgggaaaacaatcaagatcatgaaatgctttgaagatggaagcacctcgtggagttgtgggtgatgttgcaagggtcgtgaaactcctcccgcccaaaacataggtgacgttgctacctttttgtggtcagaagatgggaccagagaagatcctcataaccaaacaatcatcaatggcagtctgtgggtaaatttggaaaacagcagctgttcttggagtgaaaataataagacacctgaacctcccaaggagcaacctgtttttaatggcccaatatgtatgt

SEQ ID NO: 80508 - DNA, 581 bp, Glycine max
  Clone ID: PAT_MRT3847_43716C.1
agacttttattttttgtcttatgtattcaattatcatgttagtattataaaaaggtaaccaataaataatattacattcgatttctttaaataaaattttgattttaaccttgtaaatgagaaaaaagtaatttaaaatgaaagatctgtcagtgaattttccaataaactgtaatcaacaatatcaatatgcgatgtgattgtagaatggtatgatataattgtgttgagaatatatatctaataataccatttccaatgatacaaaaaatatttatttgattattgtttgagcggtaacagatcccaacagtgagaaaccgggcgaggtttatgttccaagagatgaaaattttggacacttgaagtcatcggatttccttacatacggaatcaaatccttatctcacgatgtgatacctttgttcaaatctgcaatttttcaattaagggtcacatcgagggagtttgaaagcttccaagatgtgcgtagtctctatgaggggggaattaaattgcccacagatatactgaggcaaattagccccttaaccagccctcaaggaatctttcgcactgaa

SEQ ID NO: 80509 - DNA, 963 bp, Glycine max
  unsure (1)..(963): unsure at all n locations
  Clone ID: PAT_MRT3847_43717C.1
cctcatcctagggtttttgtttttctgctctccaattcggagaccgaagaaccaaaacagactgagtaattggtctctcttcctccgctgcttctacacacaatgaaggtcaaagttatatcacgctccgtggatgagttcacccgagagcgaagtcaagaccttcagagggtgttccggaattacgatcccagccttcgtcctcaagagaaggcggtggagtatgtgcgtgctgttaatgcggtgaagttggacaagatatttgcaagaccatttattggagcattggatgggcatgtagatgctgtttcgtgtatgacgaggaaccctagccagttgaaagggatattctccagttcgatggatggagatattcgtctctgggatttagctgcaagacggacagtttgtcagtttcctggtcaccgaggtgctgtacgaggcttgacagcatctacagatggacgcattcttgtgtcatgtggaactgattgcactatcagactctggagtgttcctattactactcttatggagtcagatgactcaactaagagcactgttgagccagcaagtgtttatgtttggaagaatgcattttggggtgctgatcaccagtgggatggcgagcattttgccacagctggtgctcaagtagatatatggaatcacaataggtctcagccaataaacagttttgaatgggggacagatacagtaatttctgtccggtttaatcccggagaaccaaatctcttggccacctcagctagtgaccggagtataattctgtatgatttgcgtatgtcttccccagtgaggaaaatgataatgatgaccaaaacaaattctatatgctggaaccccatggaacccataaattttacggctgcanatgaagatggtaactgctatagctatgatgctaggaagttagatgaagctaatgtgtcacaaagatca

SEQ ID NO: 80510 - DNA, 293 bp, Glycine max
  Clone ID: PAT_MRT3847_43718C.1
catagaataatatttttattaccttaaacactttactaatgaacttaacaaacgaagagccgcgcgcaattgactgggttcacactttggggctgttttacccaaatgtgccctgtctgaaagcgctgtgttatcacacaaacaaggggaactgtgctacactgacctagagtgaacattcccctataaaaagggggattttgaaaaatctcggggaggattatttccacggtgcacctttttaaatgccccctgagaaaaagacctcggaatgttccatctactatgggctt

SEQ ID NO: 80511 - DNA, 444 bp, Glycine max
  Clone ID: PAT_MRT3847_43719C.1
gggtcgacccacgcgtccgtatacctgtgccgctgatctctagacctgccatgagtgtgaaagaggcttcgttttttagtgacactttacccaaccaattttcactcaagaatcttcatattctattgtctcacaatcagaataaattggcattttcctcactcagtctactaggtgctttaattgtgtttagaaatagccttttgattcttttggatttgttttttgccctaagagtcttgatttccgtactaaattacctgacaaaactcactctctccaacatcaattaaagggatttaaaaaatataattacacttaaaacactagaaagagtcaagtttttagcatatgttatggcttgccagtacgagaaaagtgacttaacatccaaataaagaaaaatagttagccaatccattcattatgttgatatgatcaggt

SEQ ID NO: 80512 - DNA, 210 bp, Glycine max
  Clone ID: PAT_MRT3847_4371C.1
actcgttcgattattcgcattcaacaacgtatgtaatgatatgatgtacttccactggggggttgtacctctttctgttcatacaccgctaacaatatttctacaatataatacccacgacaaataagcggggggctataatgataatacagtggtagggcctcccaataatgtctttatggaccctacatacttaaaaataatctcttg

SEQ ID NO: 80513 - DNA, 282 bp, Glycine max
  unsure (1)..(282): unsure at all n locations
  Clone ID: PAT_MRT3847_43720C.1
ctcaaacatttcaacgttttagagagagagagagagagagatacagagagagaagggttggcttngtgatggggttgaatcaatataatgaatgagctggcgtacgaaacaaatgtaaacttcttactgatgggaagttgtatgagggtaagccatattcctgtatctaatattagtcccggcgagaatcctgtagttcaaataccccaaatggcaccggaggaacttctgtcttctagtgcaattgatttcagaactgccatgggtgagtagaaatagcaa

SEQ ID NO: 80514 - DNA, 289 bp, Glycine max
  Clone ID: PAT_MRT3847_43721C.1
cctctatccagcaatttgaggcatttgaatctctctggctccaaaaatctaattaaaatgccacacattggagatgcccgatatcttgagagtcatgatctccaaggatgtagactactcgaagagataggtctgtccgttgttccttcacgatagcttacttctcgtgaagttgagaaattgcaaaagtcttatcaagttgccacggtttggacatgatcgaattcggaacaatctagatgacgatggatgtatcagactcagaaacattgattcatcaatcggtctt

SEQ ID NO: 80515 - DNA, 484 bp, Glycine max
  Clone ID: PAT_MRT3847_43722C.1
aattcggctcgagtacggctgcgagaagacgacagaagggtctattactacacatactctgataataaatgattgctccaactttctaccaataactattataactgacccaaactctcaattcccatgagatagcataagtttctattaacattaagtgtaaaggtttttatctaatcatagattatctatcaacaaagatccggtaggaaaaaggattaaaaggccacctgtgagaggtatcgtagtcttctaatgcatataaaagactccccttccccaccttcctacattcataaacaaattagcttaacaacaacaacaacaacaacgaataataataataattactaccaaccccactgtggggggaaatttaagttacaaatagaaggtccacgtacctctagcatccttatagagtccttaataaaggcctcagcatccctttcttttccttgaagatacaggaccctgacacaat

SEQ ID NO: 80516 - DNA, 316 bp, Glycine max
  Clone ID: PAT_MRT3847_43723C.1
gcgttacccattgttgcgctgtcgctattacttgggtgccataatagacttcctcattattaacacctacttgtgcacgcaccaattcgaaatcccatccatcgccgatccaaaaatccataatccaaattctaatatcaaactcgagtcttccaaacaccctaccaagaagactcttatacaaaccccaattctctgacaaggatcaaaaaaagcgcgaccaattcattggatttgaatacctataagggctatggggatgcatctgacaggggtatgcattctccccggcatgaaccaaaatttggcatctgct

SEQ ID NO: 80517 - DNA, 164 bp, Glycine max
  Clone ID: PAT_MRT3847_43724C.1
aaccaaagttccaaaccctaaacgctacgaatttaattttctgggtttctctttttcaatcggggctttctccggcggcgcgtgggaatgtcttttgcgcgcgattcctaatttcccgcttacctattcttctctcgacccccattgtagaattcacccccgag

SEQ ID NO: 80518 - DNA, 467 bp, Glycine max
  unsure (1)..(467): unsure at all n locations
  Clone ID: PAT_MRT3847_43725C.1
agtcaggctggactacccgcttattttaagcatatcaataagcggaggttggggcnattcggcttggtgataaggacntttacaataangtatatantttattaaataatgttgaagntgtatcaccatagatcgtcttatcaagtgttaatcttcacccacgattattctgcttttgttcttttccctccttttttgggaatctccaactagctagttgtagtgctatatccaaaaatacaataaattttgatgaatgcacgaattaatggcatttctcctccatctttcactctctctattttgttcacttggtctttgaactggattttcttacccaaattttccttccaatctatgccattaaaacctgtgttaaacttggctttttttgtgccggtcttaattgtccaagtgtataattgatcctttcccttaatcaaattttttccttttaaaatattttt

SEQ ID NO: 80519 - DNA, 267 bp, Glycine max
  Clone ID: PAT_MRT3847_43726C.1
cccacgcgtccgcaaagcctacacctataaccctaggtgatatgattctccatatagactgcgtcgggtcccacgtatcatccactgcacacagccactgaccaacactactgcgcaccagaccataaggctgcatacaccccataaggatacctctgcgagccacactgctaagaaacatacattacgtctatgacccagacttatctgaacctgctgatcttacacactgaatcaatgctgctatgaacacagattttgttgatc

SEQ ID NO: 80520 - DNA, 145 bp, Glycine max
  Clone ID: PAT_MRT3847_43727C.1
attatctgaagacatgttccattgaccagcaacgaatatgggaactgctgatagacctaatgcaggaggtgtattcctagtcactattcactaacatcaggattatcctttcaaacctcccaaggttgcctttaggactaaggtg

SEQ ID NO: 80521 - DNA, 491 bp, Glycine max
  Clone ID: PAT_MRT3847_43728C.1
tgctcctagttgctgcatatttctaatacattcatcaagtgcatgttttctccgttgccccctacattaagatggctgttgaatattatgattttgggcctcacaagatccaccatagttcagtgttctatacaagtaatctttcttttgcctttgtcaacttgcgtcctgctgtgacaggtcatgtgcttgtctgttcaaagcgtgaagtgaagcgtgttgctgatctcacagatgatgagactatagatttatggcgcatagcaaagaaacttggtaggcagctagagagctaccataaggcatcatcacttagctttggtatccaaatgaatgaaaaagagaaagagttgaatcgagcgcttaaggtggatgtagaaaggaaagacaggagcattgaagaaatggctcttgaggcagatgaatacagaaaatttgtcttctgacatttttaagtggtactttaaataaaataggaagatcgcaaaaaa

SEQ ID NO: 80522 - DNA, 769 bp, Glycine max
  Clone ID: PAT_MRT3847_43729C.1
atcatacaccttatctgttgctcctagttgctgcatatttctaatacattcatcaagtgcattttttctccgttgccccctacattaagatggctgttgaatattatgattttgggcctcacaagatccaccatagttcagtgttctatacaagtaatctttcttttgcctttgtcaacttgcgtcctgctgtgacaggtcatgtgcttgtctgttcaaagcgtgaagtgaagcgtgttgctgatctcacagatgatgagactatagatttatggcgcatagcaaagaaacttggtaggcagctagagagctaccataaggcatcatcacttagctttggtatccaagatggacctcaagcagggcaaacagtgcctcatgttcatatccatatccttccctggaaaagtggtgattatgagaacaatgatgacatttatgatgacatgaatgaaaaagagaaagagttgaatcgagcgcttaaggtggatgtagaaaggaaagacaggagcattgaagaaatggctcttgaggcagatgaatacagaaaatttgtcttctgacatttttaagtggtactttaaataaaataggaagatcgcaaaaagaaaatttagataaaaaggtttaaaataagggaacagaatttgatgattctgtgtttcataacatttacattgtatcaggagttctcaagaaaatactctgtttaaagttttcataacatttactttgctgtgatcaatcaataatttatcatttgctttgg

SEQ ID NO: 80523 - DNA, 333 bp, Glycine max
  Clone ID: PAT_MRT3847_4372C.1
gatgaagatgtttctgaatgcaagattagacctagccgaagtggtaggtttaggtccaagatggtgaagcttgtttctaagaaatttcgtgggtctaagaaagagaaaaagggtgaggtgaataaacacaatgagggtgagtcagggagtgaaatttcaagcgctgtgggggaagaaaagttaccaattttagaaattgaagtagaggaagagaatggggataataagtcaagtaacagtaaacttgattgtggaatcacttgttcctatgataatgagaagagagtggaaagagttgggaattcaggttcttccatggttttagttatgatt

SEQ ID NO: 80524 - DNA, 154 bp, Glycine max
  Clone ID: PAT_MRT3847_43730C.1
tgctggcaagccttattgacaacaccattcatggctgtgtcaatgaggaacccttcccaagttgagatcagcagcagaagatgaattatcttccatttctgaactcgtggatgtgagataatgccaaaggcccacggttcctcactcctcttcc

SEQ ID NO: 80525 - DNA, 134 bp, Glycine max
  Clone ID: PAT_MRT3847_43731C.1
aacacaataaaatctaagtttcttaaaaatggaataaaatcccggtattgtgggatagtaaatacttaatacaattgagaaaaggcataaattaaaagggggcctaacaagactgctgaaataagccttgtcaa

SEQ ID NO: 80526 - DNA, 267 bp, Glycine max
  Clone ID: PAT_MRT3847_43732C.1
caattgttagtattttagacgagggagagatgtgcatatccaaatcctcttcaacccacttgctgcttttgtctctcttcaacttgctaacatctgcaagtcaagcagctcctacatacagcgcacatgcctgctcggatgaaggatcccattaccgacccaacacaacattcgaaatcaacctcaacatccttctctcatccctcgtctccaacgccatcctccaccacggtttctaccgtacaaacgtctcgcttggaacctccg

SEQ ID NO: 80527 - DNA, 192 bp, Glycine max
  Clone ID: PAT_MRT3847_43733C.1
gaaagcgcttttgacgatcagccttgtgtggctagcccacagaacttttatgatggcaatttgccagccgattctaagctaccaatgttagtgaattgactatatactgtaagtaacaaacgtttacaagctcgacctgctcatggtaccatgtagtaccggacgcgcgaggcttaaccaccactgcttgga

SEQ ID NO: 80528 - DNA, 193 bp, Glycine max
  Clone ID: PAT_MRT3847_43734C.1
aaaaaaaaacaaaagaggggctgggctatattgaaaaatcacattttcttcgacagatagcacatatgcactcactgttccgcattattttcttaaacattatccttgctggcacttactgagctcctttcccaccaccctctgctttatcagctctgattaactgtgttccaacgcttccatggctccccaa

SEQ ID NO: 80529 - DNA, 381 bp, Glycine max
  unsure (1)..(381): unsure at all n locations
  Clone ID: PAT_MRT3847_43735C.1
gttnaaaaaagggggcctaaaaacataaataaatgggctcgaaaaaggatttttgtttttttccctgcacatatgttttgtaactaataaaatttactgtaaaactgttttaaacatttgcccccaaaaaaatttcccctcagttgcaaatccagggttactaatttgacccatcagggaaaggtttgagagccttttgtttcccattaacgtagttttcgacatttgttttctttgggggaagcttatcgggggggtaattcacgggaataattccgggcttaaatttggtgaggctagcatcgttcctaactgttttgaacaggaccttgctgttaatgaattgatccctatccatagtttttttggcctggagccaaa

SEQ ID NO: 80530 - DNA, 531 bp, Glycine max
  Clone ID: PAT_MRT3847_43736C.1
tccaacactagccttctatagagcccttttgaagatcactcaaaccaatctatctatctatctggtataggcatggagctttgttggcaaaaatctatccatggctcttaaaagaagcatggaggattgtgtgagagggttctcacccttcacactccacctcctaaagtttgcttatgctttagctattggcttctctaatcaataaccacaaaagggtatgacacatggaggaacatagttctctctatgagtggcatgaagcagagaagcattctccatgagcagagaaactttggctacagccaagcaaaccggcaagtcacaaaaaggcaatggactactctttctcattaaggggtcctcatgactatatgactaaaatccggctttctcttcagtttcttcagataagtaggtaggtaattatgtccttatatatccctctcccttaccttgatttttctcatgtgtgttagtgtgtatgcttgctgtgtttcgagaccttatatgcaataaaagaattatggc

SEQ ID NO: 80531 - DNA, 101 bp, Glycine max
  Clone ID: PAT_MRT3847_43737C.1
tttcatcaaccttgcgcttgcaatctcactcaacttgcttctcaatgttagctctaggaaagccccacgtgatttccaatgcgcctaagcttatactatca

SEQ ID NO: 80532 - DNA, 1103 bp, Glycine max
  unsure (1)..(1103): unsure at all n locations
  Clone ID: PAT_MRT3847_43738C.1
ttcnnnnnnnnnnnnnnnnnnnnnnnnnnnnnnnnnnnnnnnnnnnttaactaaaacactaccataattcttttattgcatataaggtctcgaaacacagcaagcatacacactaacacacatgagaaaaatcaaggtaagggagagggatatataaggacataattacctacctacttatctgaagaaactgaagagaaagccggattttagtcatctgcaaattgagtgttatggacaacacaagttggtatgtagcttctcaaaggaagaacatctttgtttattacattctactgaaataagatgaagaactacaatagagtcaatacatacatagtcatgaggaccccttaatgagaaagagtagtccattgcctttttgtgacttgccggtttgcttggctgtagccaaagtttctctgctcatggagaatgcttctctgcttcatgccactcatagagagaactatgttcctccatgtgtcatacccttttgtggttattgattagagaagccaatagctaaagcataagcaaactttaggaggtggagtgtgaagggtgagaaccctctcacacaatcctccatgcttcttttaagagccatggatagatttttgccaacaaagctccatgcctataccagatagatagatagattggtttgagtgatcttcaaagggctccaatagaagggtagtgggggcccggcccggccatgttttgtacagtcattgcaatatgttatagcgagcaagagtgtgtaagtatgtagctgtgtaataatgtaaatggtgtctacttagagtgatgctttttatttattctgtctttgactgaaaatataagggtgcgagtgagagtgagactaatgcattagggggatatcggtgatgtctgtaacaaggagtgagtttccccggattttgaataatgctgtgaagaagaaataagatgtgtatactatatacaatttgttttgttgaggagacgtgaaggagctgtcatttgtgttgtaacttgtaaggattgtccatgttcattttatgtaacataaaccagagtgatgtgatttgaaagcctggctagtacttcatttc

SEQ ID NO: 80533 - DNA, 157 bp, Glycine max
  Clone ID: PAT_MRT3847_43739C.1
caatggacaacccacgacgggtttttgctttctacaaaggatcaccttcacaacacaagggttcccaatacaaggcgctttcacatctttcctcaacccaatgcgccactaaaagagaacttgagagtgacaagagattcttctgaggcttaagatc

SEQ ID NO: 80534 - DNA, 304 bp, Glycine max
  Clone ID: PAT_MRT3847_4373C.1
gaaaaaggggggttgattttattacaaataatcgctggagaacacgccccccttggggaccggaaatgggcgcaaataaattctttcgtgggggtccccggtgagaaaacagggtctccaatgcacttcacttttaattttgcctataagcaaagagagtggggaaagcgcacacgggaccctcctcttgagggacataaccggacaaccttacctgggtacccgataacacatcttgagcaacataccttggcttttttcgccccaacaggtcgggataagtatccttcttagcccccgaatt

SEQ ID NO: 80535 - DNA, 793 bp, Glycine max
  unsure (1)..(793): unsure at all n locations
  Clone ID: PAT_MRT3847_43740C.1
aactcccttctatagagcccntttgaagatcactcaaaccaatctatctatctatctggtataggcatggagctttgttggcaaaaatctatccatggctcttaaaagaagcatggaggattgtgtgagagggttctcacccttcacactccacctcctaaagtttgcttatgctttagctattggcttctctaatcaataaccacaaaagggtatgacacatggaggaacatagttctctctatgagtggcatgaagcagagaagcattctccatgagcagagaaactttggctacagccaagcaaaccggcaagtcacaaaaaggcaatggactactctttctcattaaggggtcctcatgactatgtatgtattgactctattgtagttcttcatcttatttcagtagaatgtaataaacaaagatgttcttccttattaaaaaaaaaaaaaaaaaaaaaaaaaaaaaaaaaaaaaaaaaaaaaaaaaaaaaaaaaaaaaaaaaaaaaaaaaaaaaaaaaaatcctcctttttctttttttccgagaaaaaaaaaaaaaaaaggggttgtttgtgctttttcctaaaacgcacagtctcccctttgcaccaaaggcaggaaccttcggaggtgagtggctgtcatgacgccattctgatcggagtaacggtcgaaaagggtcattatcgccggcgggacagcctacacacggagcattaacctcccacgttaggatcgacagtcaaagtatgtatgtatgcgaggcatgtctaccgacacattaagagtg

SEQ ID NO: 80536 - DNA, 1660 bp, Glycine max
  unsure (1)..(1660): unsure at all n locations
  Clone ID: PAT_MRT3847_43741C.1
cacagaagtatattanaaatctcttgtgggtttcttttttactcgacataagcacgggagggggcctaactaggataggagggcgttttcattctctcttcccttatattatttattttcttgcaatcaattctctcttgcatgtttaaagaacattgttaaattgattgttgttgcttcttctgcattgaaagcctatccctcttaagattattgaggccacaaggtctaactcttttggcctcatcactgttcttcccaaatggacgccatgatccctattgcataatgggcaccaccaagagaaaaaaaaaaaatgaataaaagctaacgcagggagcaaagcacactgcaagattctcttcttctccgtgtgccgaaagcgaaggggaaaaaaacacatagcatcaatcatataatgagaagaagaagaagaagcaagaacaattaggtatttaggatcaccaaagcaaaatcagagaaaatttcaagggccactctcttttccttcttcccattttgcccttgaattttctcgagattttcctcatttccctccgaacatatcatatcacacacccatatagcccaaaagccacaacctgcgaaatcaaaaaagaaaaagaaaaagaaaacaacaacaacaacaacaatatcgtattccattccataatgttgtgtaaactggttccggtgccgcgcaagaaaaaacccggtttgaacccggtttaccttaacgtctacgacctaaccccaattaacggttacgcttattggcttggcctcggagtttaccattctggtgttcaagttcatggggttgaatatggatttggagcacacgaacgcgacacgactgggatttttgaagtggagcctagacactgccctggattcaccttcaggaaatcaattttcattggatcaacggatatggggccgaaggatgttcgcgcgttcatggagaggctggctgaagagtattctgggaacacctaccaccttatccagaaaaattgcaaccacttctgcgaagatgtttgtgtcagattaacgggaaagtctattcctcgatgggtgaatcggcttgctagactcggttttctctgcaagtgtgttcttctagctttcctgatcgaaacaaagattcgccaagttacaatagaccagggctcaaggaggaggattaaagaagtaaaggagaagcaagtcgaggaggtacgaggcatcaacccaacctacattgtaaagaagggatagtgagtgcgatcctacatctgctgtatttaatgcatctccgccctcaaccataacggtaaagtaacgctcttacaagagtcaaagccaacactccgaaatatatataggctgttagaatcatgtaaccaaccaaagaggggtagagaagcaactttttcatctgccctgtctttctgttctgttgtatgtatacctttagttgtgaggcaatggcaaaaaaaaaaaatgaaatggttgcattgtctcttctttttaagcggttgctttcttcggtgaaatgtttgtatgagttgatttttcattcagttgtttatgagatttgcaagaagctatgacaattgtggtaatggatacttcatcatgaattttttcctatctgaaaaagaatatgttttgaagg

SEQ ID NO: 80537 - DNA, 897 bp, Glycine max
  Clone ID: PAT_MRT3847_43742C.1
cccacgcgtccgggcatagcacactgcaagattctcttcttctccgtgttccgaaagcgaaggagcaatcatataatgagaagaagaagaagaaacaagaagaggcaagaacaaattaggatcaccaacaacaaaatcagagaaaatttcaatggccattctcttttctctcttcccattttgcccttgagttctttctagattttccccatttccctccccacatatcacacacacatagcccaaaggccacaacctgcgaaaccaaaaaagaaaaagaaaacaacaacaacatcgtattctattccataatgttgtgtaaactggttccgcgcaagaaaaaacccggtttgaacccggtttaccttaacgtctacgacctaaccccaattaacggttacgcttattggcttggcctcggagtttaccattctggtgttcaagttcatggggttgaatatggatttggagcacatgaacgcgacacgactgggatttttgaagtggagccgggacactgccctggattcaccttcaggaaatcgattttcattggatcgacggacatggggccgaaagatgttcgcgcgttcatggagaggctggctgatgagtattctgggaacacctaccaccttatccagaaaaattgcaaccacttctgcgaagatgtttgtgtcagattaacgggaaagtctattcctcgatgggtgaatcggcttgctagactcggtaaaggatataggaaagtgtgttgtgattagctgttttcttgatcatgtttgtatgagttgatttttcattcagttgtttatgagatttgcaagaagctatgacaattgtggtaatggatacttcatcatgaattttttcctatctgaaaaaatgatgttttga

SEQ ID NO: 80538 - DNA, 200 bp, Glycine max
  unsure (1)..(200): unsure at all n locations
  Clone ID: PAT_MRT3847_43743C.1
gccngnngtgtcangtgcattncgatgcnctactccatnagtctgcaagaagattcagatctttgagaagaaatgtttcacccttgggacnnngnntnntcctgcnctntctgttngtgggcnagatnagttggtcagaacccggggtgaaagcgctctcaatattgccatgnnnaggnccaanggcggtggcgtgaagc

SEQ ID NO: 80539 - DNA, 477 bp, Glycine max
  Clone ID: PAT_MRT3847_43744C.1
cgccctcttgatcgagactatacggaagcactcgggaaaagttttatagacaaaggcgcccatccccaacgcaggaaatgaaaatgatgcccgcaggactagggttgctcgttacagagagttacagaaagcttgctaaggctgcacgcggtgcccgcgaaacacgtgcatggctagatcagccacttcatttcgatgcccgaaaaggcagacttaagaagcagatgactatacattaaagagatgtgagcaacgtgatagatgtgctcctatgataaggaaaaatatacacaccataagaatggactgaaacccataggctagaggcaagaacacaaaacaaaatcggcgtaaacaagctgaaacaagacacatttctagacgttgtgaaaagtagatcctaactggctctaaattatggaaaaagattctttgctatttcctatgcaattataaagatggctgctaacgtgactc

SEQ ID NO: 80540 - DNA, 284 bp, Glycine max
  Clone ID: PAT_MRT3847_43745C.1
ccaggcgtctcaccgcgattacctttttgtgacaatctcttggtaagggtcaaaaggagcaggtgttcattttccaaccactacggtttctaccgtcaggggaaaccccaccgagagggaacccatgggagagtaaaccgccccagcccaagcttgttccaaaggcttcatcaccgccaaagaagatgctgaaacctctagaaggaaccttaaactctccaaggatcagtcaatggtcctggaaaagagcttcaaggaccacaacattcttaaccccgtaggta

SEQ ID NO: 80541 - DNA, 1251 bp, Glycine max
  Clone ID: PAT_MRT3847_43746C.1
tagtttcaagtgcatataggacccaccctaccattcaatcaactcaaccaaacatatttttataaaaagatacttactagtatttgaaatgttcaaatatatttttcctatttttgcatgttaaaattaaataaaaacatcaccatgatgtagttgatcagcatttctcaataaataattaagtatgcccacggcacgtgtctttgattgttctctctatatttttccatggaagtttccttagcccacgcgtccgtacggctgcgagaagacgacagaagggggacttgtacgtagacagacactacaacatcgtatgtgtgagagtgaagtgggaaaaagcatatcagattcaccccacattattattttatcttcctagtttccaagacattattttgtgtacattattctttgaatctgggatgccccaaactcctagaattgtaactgttttcaaccttgatcttactcaacatcatatccacactccaaaagggttaaaagaataaacccacttctgaaaacatagcagcaacaacaagaacaaaggaacttcacaagtggggggaaaagctagtcatattttactgttattgtttttttttttttttttttgctgctttttctttttctgttgtgcatgtctgactgatataagctcattttctttgactgcattgcaagttgtgggtgacaccaaatcattgcactcccacttttgtctggaaaagttagggtcttttgaattaacatttgcacattcctttggctaaaacttaaaacccctctttcagctttttaagattgggggaaaactactactagggcttgattctgattccctgtgatgtttgaattgcaagaaaatgagggaaaatgtggttgtggcaagtgagggaatgtgaggaggaggaggaggaggaggaagaggaaaaagaagaagaaggtaagaaggggttgagtaaatgagtattttgagaaatggggtgtgtgtttgggaaagaagcatcaaagaagaaagaggaagtggaagttgcaagagcagaagatggtgtggctcagaacagtgggaatgtgaaggtgggtggagaagaggagaagagcaagcgcccaaaaggggagagaaggcgatcttcgaagccgaatccgaggttgagcaatccacctaaccatgtacatggtgagcaagtagctgcagggtggccctcttggctctccaaggttgctggggaagctattaatggattg

SEQ ID NO: 80542 - DNA, 666 bp, Glycine max
  Clone ID: PAT_MRT3847_43747C.1
agccaactcatcacttcaaccctatctctgaaggtatgctctcagcccccttttgtacctactttgagcatttgaatgtaaaatgaatttgttttaatttgtcccagggatggggggtccccttctttattatttttgtttgggcccctaatcctgggtgacttttagttaattactattgactattgatgtttttgtttaagctttcctatgaaatatcctcataaatctcatgcatcttaattcccccttgttttcccccccactggattacagagtgtttctgatccgaagagataggtggaaatatggttgtagagtgctctctttctcttcctgtcaggttgtacttagagcatttcctgcatatgaactgtggaaagattatggatgattttgtatggcttgatatgatctcggttccattaggctttggacgattgtttttagttccgaagtggtctatactctttcatttagatgtacaagtttgcctgtgactgtttttggggttattttcttcccatatgatgtgggaaatcggattatcatgacgagcacttgtttaatgttcacaatgacgatatttcagtgaatggtggtagtcacaagtcaatcgttgaaacagttaacgaattggattttttatttttctggatataatct

SEQ ID NO: 80543 - DNA, 434 bp, Glycine max
  Clone ID: PAT_MRT3847_43748C.1
ccgtacgcgtgagaggacacttgggctgacgcgactgctgactcatggcgaaggtatccccaccaaccaacatatgttgatctttagtcagaaccaactaccaggaagcgaaggacgtcttgctgactcaccacattcatagagaggattactcttcaccttggcttcgcgtgaactttcccgtggtgactagttagagaatagtggctgcttattccttaataaggtgtgaactaccctgatgtgaaagactatgaatctagacatttcgctttataggttcctgaacataatagaatatatgcctctctgaacacttagactatcgctgcaagctatgaatgcggaccatgtgcacccatgttctaatgactgtagagcttcctattcttgttccagttcttgaatccaagttgttaccgtattctgttatt

SEQ ID NO: 80544 - DNA, 323 bp, Glycine max
  Clone ID: PAT_MRT3847_43749C.1
ctgtacacgcgcacgtcacacgcacacaagctcggatcccctatagagcgcgcccccttttttttttttttttattatttatcatgccaattacatttcttgaagtgattcaaaggagaaaactgccctctccaagggagcaaaaaaaaagacaactttttcaagacaaaggggtgaaaagccacccagctccaccctgggactcccgcaaattaaaagaagagcgcaacctttttagaatccgggcaaatatgggggagagccgtgttggccgactttaacaaaacccacgcatcacttgcccttaaaaggcgtgtaaagac

SEQ ID NO: 80545 - DNA, 1894 bp, Glycine max
  Clone ID: PAT_MRT3847_4374C.1
ccgcccgtgtgagtgactagtgccttaaatgggatgtgtgtgggcagtggttcagctctttatagattgttggcctgccacaaccaaaactgtacctcactcactcactcccctttccatcaccaccacacactttcatgtcttgctcttttgattcagtcagaatatgaatcctctgtgctgcattgctccggtttccatcgatcgggaccgccccaaccacgtgctggcaaaatcgcccgctcagtgtcagttagggctcgatgcgtccatcaggacggtgaaccacgcctccaaatccagctcctccacgcaggattcctccgtcgccgtcgactctgtcaaggccacctccgccgtcgcggatctcccggaggaggaggagccacgcgattccaaggccttctccggcgggaacggcggcggagtggctgggagtgtcgccgggatcctgtacaagtgggtgaattacgggaaggggtggagatcgaggtggttcgtgttggaagatggagtgctttcgtattacaagattcacggaccggacaagatcttgatgagtccggcgaaggataggagcgtcagggtgatcggagaagagtcatcgaagtttgtgaagaaagcgaattggaatctgaatctgaatcgagcatcttctggtggaggagtacgaggaggtaatagcagtaacaacgggaagccatgcaaaccgatcggtgggatacatttggctgtctattccagtcgttccaagaagtctgacgattggagactctcggtaagaacgatgcaagaaactcgacgccaaccaagcgtgtctaagaaggatgaggatggttggttccgagccttgcgggccgcttgggatccttgtgctagggctctttcgagcggcgtccctgctacttctggacagagcgtagattcaacagaaaagctgcgatcacgattgtcccaggaaggcataagtgaatcaatcattaatgactgtgagtctattatgctttccgaagtctcttatcttcaaagcaagttgaagtttcttcagcagaaacatgttatgttgctggacaccttaaaacaactggagacagagaaaatagagttggaaactactgtagtggatgaaacaaaggaacgtgaatcatactgtggacaaggaaatagaaggtttagtgatttctattccgtcatgtcggagggcagtgctactgattcagtggcggataatgaaagtcaagatggagcagatgttgaaacagatgatgaggatagaacatattttgacacaaatgaatttttgtattctgatgccctaagaagtgcttcctatcgaagtagggaaggtatgggcaatgctagtatattcgatagagattatatttgttatgatggtgtgcatgggtttgacaaggagatcaaagatgtaagttatccatatgtcaaaagaagggataacctaccagagccaaaagaaaaagagaagcctgttggtttgtggtcaattattaaagacaatattgggaaggatctttctggagtttgtctccctgtttattttaacgaaccactgtcttcattgcaaaagtgttttgaagacctagagtattcatacctggttgatagagcattggagtggggaaagcaggggaatgacttgatgagaattctaaacattgcagcttttgctgtgtctagctatgcgtcaactgaaggtcgacaatgtaaaccttttaatcctttacttggggagacctacgaagctgactatccagataaaggacttaagtttttttctgaaaaggttagtcatcatccaatgattgttgcttgtcactgtgagggaaggggttggaagttttcaagtcctcagctgtgctttcttttgtcacaa

SEQ ID NO: 80546 - DNA, 256 bp, Glycine max
  Clone ID: PAT_MRT3847_43750C.1
ccctcttatataaatgttgctaatttgcaaaaactttcagagttctatactatccaaacccattcgggatcctggggccacacttaagcgggaggcgtgccctcaatcaactactgttctaccatctaacagtagatgattacttatattttctctgcaccttaaactactcagctcctgaaattatcactttaaccaaaaaaaaattacatttcaacgcgggcaaccagtacagtttgaccaacctcaactaccc

SEQ ID NO: 80547 - DNA, 186 bp, Glycine max
  unsure (1)..(186): unsure at all n locations
  Clone ID: PAT_MRT3847_43751C.1
ctctcaatataggtccaggtaccgacttattcggcgtttctccttngcttttgttgtgtgtcccttggtcgttcctaaagggaagccgggtaccttcgggtgtgctcatttctattcacttgccctagttccaagttataaaaaagtttgagtttgtataagcgtgacacaattactgatctagct

SEQ ID NO: 80548 - DNA, 1323 bp, Glycine max
  Clone ID: PAT_MRT3847_43752C.1
atggaaggttttcacccttctatgacctctcctttttcgtacacattccctatcagtgatgctggtactagcaattttagtactactaccactggcactagttacagcacttccactccatggatgaacagcagaatatggagcaagctccctcagaggcttcttgaccgtgtcttagcctttcttcctccaccggcattctttcgtgcacgttgtgtttgcaagagatggtatgcacttctcttctccaacaccttcctcgaattgtacctccaagtctcaccacaccaacactggttcttgttcttcaagcaccacaagacccgcaagagctacatctacaaaaacaacaacaacaacaacgggagtagcgatggttgtggacatattggtgcgtttgaagggtacctctttgatccctatgagatgtcatggtaccgcattttctttgctttggtcccttccggcttctctccagcttcatcttctgctggtttactttgctgggtttctgatgaagctggtccaaagaccatgcttctgagcaaccctttaatcggttctctcactcagctacctccaacgttaagacctagactcttcccttccattggcttaaccattaggcccacctgcatagatgtcactgttgctggtgatgacatgatatcaccttatgcagttaagaacctgacatctgaaagctttcacatcgatggaggagggttttactccctgtggggcaccaccgcttctcttccaaggctctgcagtctcgaatctggaagaatggtttatgctgaagggaaactctactgcatgaattgtagccctttcagtattttggcttatgacatcacatcaaacacttggttcaaaatacaagccccaatgaggaggtttctgaggtctccaaacctagttgagtgcaaggggaaacttctccttgttgctgctgttgagaagagcaagctgaacgtgcccaagagtttgagggtttggagtttgcaggcttgtgggacaatgtgggtggagtcagagagaatgcctcagcagctttatgttcagtttgctgaactggaagatggaaatggatttgaatgtgtagggcatggtgagtttattgtgatcatgattcgtggaacggacaaggcgttgctgtttgatatatgcaggaagaggtggcagtggattccaccttgtccttacattgcacatgatggatttgagttgcatggttttgcgtatgagcctaggcttgccacacctgtcactggccttcttgatcaattggcacttcccttccagagttttaatgcttaa

SEQ ID NO: 80549 - DNA, 364 bp, Glycine max
  Clone ID: PAT_MRT3847_43753C.1
ttttgttttttttttttttttttttttaaaaaccaaacaatacggggggcctatataatcaatacatcttgcgccttcaatacacaaaaggggcaacccaagaccattctttcaattacaaatcctatcaaacaaaaaaaaggctactactgagtaaaatctcaaatgggggcaaaaaaaaggcttaaaaaaccgataaaatagctaattcaaaagctagtgaacttggggagcggcctttggaccctcaaaaacgggggcgttggcaattcaccgggcgagacaaagctgaccgggggctgaatttcccttaaaaggagggggggggtcttctgcgaccgggcaagtctaaaagattcctggg

SEQ ID NO: 80550 - DNA, 225 bp, Glycine max
  Clone ID: PAT_MRT3847_43754C.1
tgataaaaaacccaataccaaaccctaattctccgaaatttgatttctttcaggaaagttcttcctaaatccacgcctcctgcagacgcatatcgcttttcatcttctttctaattctccgcaactaaatttgcgatatatcagtatcacagtgttctgagcatgattccttaccacaagaacctaaccaggcttggctataaggcacttattgctcagtggcga

SEQ ID NO: 80551 - DNA, 617 bp, Glycine max
  Clone ID: PAT_MRT3847_43755C.1
ccacgcgtccgcaccgtcctccgccggagagatcaatgccaagccgctaaacccccaaacccaccgccaccgccaccaccgccaccaccgccgccgccgccaccgccaccgccatgcgagtctcatctcccgccacggcgtctccgtcgctgcacgccgacgagcaccgcatcttcaccctcggcagccgcgacgccgagtccctcttccgctcgaagcccatcgccgagatccggaagacggaggcggcgacgcggaagcagatcgaggacaagaaggaggaactccggcaactcgtcggcaaccggtaccgtgacctgatcgactccgccgactccatcgtcctcatgaaggtctcctgcaacggcatctccagcaacatcgccgccgtgcacggccgcatccgctccctctcccaatcccaatcccagtcccaaaccaagctccattcccagtcccgagcctggacctacggcgccgcctgccgcgtgaaggacctcggcgacacgcccgagaacatttggggctgcctcgacgaagggatgtttctcgaggccggctcgcgctacgtgcgtgccaaagacgtgcaccaccacttggtcgtcgattccgatgac

SEQ ID NO: 80552 - DNA, 650 bp, Glycine max
  Clone ID: PAT_MRT3847_43756C.1
cacgcgtccgtttacgaaactctccttgaatttcttctctttcccctatcccagtgaccgttctccaaaatttccactctccttcctccaccgtcccctgccggagagatcaatgccaagccgctaaacccccaaacccacaccgccatgcgagtctcatccccagccgcggcgtctccgttgcctcgcgccgatgaccaccgtatctccaccatcggcagccgcgacgccgagtccctcttccgctcgaagcccatcgccgagatccggaagacggaggcggcgacgcggaagcagatcgaggacaagaaggaggagctccggcaactcgtcggcaaccggtaccgcgacctgatcgactccgccgattccatcgtccgcatgaagggctcctgcaacggcatctccggcaacatcgccgtcgtacacgaccgcatccgctccctctcccaatcccaatcccagtcccaaaccaagctccattcccagtcccgagcctggacctacggcgcggcctgccgcgtcaagtacatcgtcgacacgcccgagaacatttggggttgcctcgacgaagggatgtttctcgaggccgcgtcgcgcttcgtgcgtgccaagtacgtgcaccaccacttgttcgtcgattccgatga

SEQ ID NO: 80553 - DNA, 387 bp, Glycine max
  Clone ID: PAT_MRT3847_43757C.1
aaaaaacagcttttataaaacggccaacaagaaggtttttatccccgaaatcccatccaagggtaaagcccaaagtttgaaagcccccaacctttttaaaaaccaagggggctggtccaacaatggtgaaaacccgggccaaaaaaccggggggaaccaaaaacccttggggcggattaccccaatccggtttcaaaaattccaaccggaataaaccgctttggccccccactgggccttccgagcttaaaaactggggggttttccagggtaaaatactttacccagaagaatcctatccccgggaacaatagttccaagggaaaacccgcttccatatgaggcaagagtttcatgccgacttaacccccgtgaacccaccccggg

SEQ ID NO: 80554 - DNA, 733 bp, Glycine max
  Clone ID: PAT_MRT3847_43758C.1
gtaagctcggagcgtggctcgaggaaagattccttcaacgatctgcgaccttcgcgtgttgcatctccaaatcccactccaaaaaaagtcacaatctatcgaaagcaaacagagagcgaatcggaagaacaaaaacaagaagcagaagaaaaaatggggttgggtttgttagcttcgaaggccataagacccacctcaaggctcctcctcggttcccaaaaccctaccacttttctcctccgaaccatcgtctccaagcctgagcttcggaatcccgaagccagcgccgcacagccggagcagccgccggcgcccgatctcccgccgcggactccgctcgccggcgcccgcgtccacttctcgaaccccgaggacgccatcgaggtgttcgtggatggctaccccgtgaaaatcccgaaaggaatgaccgttcttcaggcctgcgaggtcgccggcgtcgacatcccgaggttctgctaccacagcagactctccatcgccggaaactgccgcatgtgcctcgtcgaggtcgagaaatcgcccaaacctgtcgcctcttgcgccatgcccgctctccctgggatgaaaattaagactgacacacctgttgcaaagaaggctcgagaaggagtgatggagttttaattgatgaatcatccattagattgcccaatttgtgatcagggtggggaatgtgatcttcaggatcagtcaatggcatttggctctgatc

SEQ ID NO: 80555 - DNA, 2926 bp, Glycine max
  Clone ID: PAT_MRT3847_43759C.1
ctctcttattgcagcttcaaaaaccgaaagattccttcaacgacggattatgaagcacgacccacgcgtccgcgttgcatccccaaatccctctctaaacaaagtcaaaatctatcgaaagaaaagagaaagcgaatcggagaagaagaaaaatggggttggctttgttagcttcgaaggccgtgagacccacatcaaggctcctcttcggttcccaaaaccctagcaccttcctcctccgaaccatcgtctccaagccccagcttcggaatcccgaagccaccgccgcgcatccggagcagccgccgcctgccgatctcccgccgcggactccgctcgccggcgcccgcgtccacttcccaaaccccgaggactccatcgaggttttcgtggacggctaccccgtgaaaatccccaagggaatgaccgttcttcaggcctgcgaggtcgccggcgtcgacatcccgaggttctgctatcacagcagactctccatcgccggcaattgccgcatgtgcctcgtcgaggtcgagaaatcgcccaaacccgtcgcctcttgcgccatgcccgctcttcctgggatgaaaattaagactgacacacctgtggcaaagaaggctagagaaggagtgatggagtttttattgatgaatcatccattagattgcccaatttgtgatcagggtggagaatgtgatcttcaggatcagtcaatggcatttggctctgatcgtggacggttcactgaagtgaagagatctgtggttgataaaaatcttggacctctggtgaagactgtgatgactcggtgcattcaatgtacaagatgtgttagatttgcaacagaggttgctggggttcaggatcttggcatgttaggtcgtggaagtggagaggagattggaacatatgttgaaaaacttttgacaagtgagctttctggaaatgtcatagatatctgtcccgtgggagctctcacttcaaaaccttttgcatttaaagcccgaaattgggagttgaagggcacagagacaattgatgttactgatgcggttggatccaatattcgaattgatagcagaggacctgaagtgatgcgcattgttcctcgtttaaatgaggagataaatgaagaatggatttcggataaaacccgcttttgttatgatggtttgaaaaggcaaaggttaaatgatcccatgatacgtggttctgatggacgctttaagcctgttaactggcgtgatgcgcttgctgtggtagcagagattgcccaccaagttaaaccggaagaaattgttggcatagctggcaaactttcggatgctgagtccatgattgcactaaaagatttcataaataggatggggtcaaatgatgtatggggtgaaggcattggtgtcgatactaatgctgatttcagatccggatatattatgaatactaccattcctggtcttgaaaaaacgaaattgttggcatagctggcaaactttctgatgctgggtccatccttggattatgccagaatacaaatggctgggggtcaaatgatgtacgaggttgggtacattgggcctgctactgatttcaactatgaccaggaacatcttggtactggccctcaaacacttctcgaaattgctgagggtctccacccatttttcaagacactctcgaatgccaaaaaccctgttatcattgttggtgctggggtttttgagaggaaggaccaggatgcaatttttgccgctgttgaaaccattgcgcaaaaagcaaatgttgtcagacctgactggaatggccttaatgttttacttctccatgctgcccaggctgctgcccttgaccttggacttgttccacaatctgagaaaagccttgagtctgcaaaatttgtatatttgatgggtgctgatgatgtaaacttagacaagatcccagatgatgcttttgttgtttatcaaggtcaccatggtgacaagagtgtttatcgagcaaattttattttgccagcagcagcattcagtgagaaggaaggaacctatgaaaataccgacggatgcacgcaacaaacattgcctgcagttccaacagttggtgactccagagatgattggaagataattcgagctctatctgaggtggcaggagtgcctttgccctatgatacaattggggccgttcgtgcccgaatcagtactgtagccccaaaccttgtgaacatggatgagagagaaccggccacattgccatcttcactcagaccaaccttctctgagaaggtggacaccaccccattcgggactgtagttgagaatttctatatgactgatgccattaccagggcatcaaagataatggcacaatgcagtgccatgctgttgaagtgaaacatggattttttattttttggtttcaataatgaagattcacgtttttcctttcctggccatgcaagactttgcttgcccaaaacttattggatgtttgaagtatccaataaattaaaactaggatttatctgtttccatttgtaatatgcggtgtgaaagcaccactttttagaactgttgccatgtaaaatttgagttatccgactgattgtgaaggtttactcgtctcatcaattttccatagccaggctagccaaaaaaaaaattggatgttggaagtatccaataaattaaaactaggatttatctgttccatttgtaatatgcggtgtggaagcaccactttttagaactgttgtcatgtacaatttgagttatccaactgattgtgaaggtttactcgtctaatcaattttccatagtcaggaaagtgcatcgtccaaaaaaaaaaaaaaaaaaaaaaaaaaaaaaaaaaaaaaaaaaaaaaaaaaaaaaaaaaaaaaaaaaaaaaaaaaaaaaaaaaaaaaaaa

SEQ ID NO: 80556 - DNA, 487 bp, Glycine max
  Clone ID: PAT_MRT3847_4375C.1
ccatggcaaaaataaaaaaaaaaaataaattaaaattcttttgaaaggccaggggggaaatttttttaacaaggaaaaaggttttttgctacaagggtaaaaggttttatttcccaaaacatcgaccgttaaatattaaaacacaaccacccttgaaaagcccatgagcccccggaacaaatttttagaaggttaatgaaaggaaagggctgccacctatttccggtggaaaaaataatccccctccacaaaaggttaaagaatgaaatcttcggctactcgaatggcacataatctggggattaattttggaaacggaggccgtggccatccaataacactttgggtatcgggaaccccacaaacaaccttttaaaccttaaagaaaagctttccaaataatacaaacccgaaattattatcccaacttggaaacacggggtttaattattatcaccagggatagggggaaaaaatcttcaggggg

SEQ ID NO: 80557 - DNA, 406 bp, Glycine max
  Clone ID: PAT_MRT3847_43760C.1
ggaacggacacatgggtaaatacttttaattctttttcttttttagttaaatttttgggagtatattgagttgtttgattggggggttattggacctgttcctaatcatttgtatgggtaattttgttattaattatttaacaataatgaagagttatgctaacaacaatgatgtaaaagtcaactattttattatcttaaaaaaaaaaaaaaatctattcaaaggcttaatggttaattggttattaaacatttaataaacatgttaaaataattaaattggcttgcatattttgacggggggataaaagtaatataaaaaaaatatgggatgtaatttgagaaaaatatgctatatagatcgttaatccagtttaggaacctgattatgctaattctggacctt

SEQ ID NO: 80558 - DNA, 564 bp, Glycine max
  Clone ID: PAT_MRT3847_43761C.1
aacaagcaagcctgcctgcctgtctttggcaacaaaggttgaacagccaaaaattttaaaacaaagaaatgcaaattagttttgggatacaactggacatgagctttccatctcctataaagactatcatatctgtctcttgcacttctaccttctttatagaaggcatccttcagtatgctcattgtagattgatatatattaatccttctatcaagaatgtcctcagcaaacctcttcacctccgtgaatctactcatgttacaaagaccaatgagcaatgcattcgcactttcatctagtggcttgacacgattctcaacaacataactccaaatctcatgtgctgcttcggggtcatcacaatcaaacagcatcgcgatggctgcagcgcaattagagcctgtgggcggccactcattcttgaccatctcggcaaagaacctctctgtctcacgcgcctttttgttcttcaccaagcactcgaagatcatgttataagtcaaggagtctgggaaagcgccatggaaggccatctcatcgagcaggcgaaatgcgtctcga

SEQ ID NO: 80559 - DNA, 1218 bp, Glycine max
  Clone ID: PAT_MRT3847_43762C.1
ctcgagccgaatcggctcgaggaaagaagaagaagcatgttagggaaccaccttcagttcctttcatatgggaagtaaagccaggcattcctaagaaagattggaagccagaggcagagatccctataaccccactcaaactaattgcctcagttccctttgtttgggaagaaaagccaggaaaaccccttcccaatttctcagtggaccacccagtgccttcaaagccattacttattcatgtagcatcttcttcaggattttctgttgcatgcaactttggccatgatgacaaagagaaaggaagcttaagcttaagcagcagtgacaatgaaagcataactaccttagaccttgaagcatttagctttgatgaagatgagtcttttattagttcagttccctcattgcttgcaaattgtcttgtaccatcagcaaaagttcccactgccattccactgagggaaaccaccccatcctcaccaacctcctcagagacagacagtggcacaatcaggcatgcaacaggcttatcaagtccaattggtgctactttccttgagtgtctatttcctttgtatccacctaagtcttgcttccttgaaagtgatgagaatttggaaaaagtaacttcaagtgcacaagaactaagaaagaaagagcttgatcttgaagattgtgccggtgactcggtaaggaggccaccaacacttggagagctgattatgatgagccgaagaagaagctgcagaaggaaagcagtacaaatgaaaaaatgggatccaccaaagaaaatcacaagaaagcaagcttttggatgcttctccgttgtaactgacaacaatatgattgaagggctgctaaagagaaagtattttcccagactgaaactggtatagacttgacaggatcaatgatacagaagggaaggaccaaaactgctctagaactaaattcctatcaggctatggattataaaccaacctctcttgatttagtttgtcgagtctgttgcaatttacgggtttcatttgttaagaatttcgaaagtggattgtcaaagaatatatcttcatcaatcatttccataagatagctcatactcctcatagcagaacttctacttaccactatgtacgtgtacattgttcttccttggacaagaaagtattacttttttcttcagttattctcaaattaatgttgaaatttttcttt

SEQ ID NO: 80560 - DNA, 567 bp, Glycine max
  Clone ID: PAT_MRT3847_43763C.1
aggactccccctgacaatcctactgaacacgtatcaaacgacttcatacgaatgtctcacgccaagaacacaagagagagcagacttcgatggactgaagctcggtgagaagcgtttgatcctaaactctccaagcatcatactctggattgacgcgatctgcatcacgatcgtccttggagagaaagctcggaggaatttgtggattcaccacaaattcgcgaatgttgtctgatttgatcacacgtgctacttgagggcttgcaatcccgcatattgctaatgcatcattcttttcaatgagccaaaacactacttaagacactgaacaattccttattgttgcaacatgaagaactgtctcctttgtgaccaagagatgatttatgtttacaataaaaaaaaatcagagaaacttctctcatccgatggctcttgataccatcttagatcaaatgactggaaagaacagtcaggggattgaacacagaattcattaacccactaacacactattacaagttctctttatatatagaagagatacaggggtaccgagctcgaatt

SEQ ID NO: 80561 - DNA, 487 bp, Glycine max
  Clone ID: PAT_MRT3847_43764C.1
tgcaacttctcactcttgtgatgcaaaccaacctattgcagcttctaactctggcgatccaaaccaaggacgctaccctttagaaattaagtattatgcctttccgaaattccaatatgatagtacagaaaaagctatggagaattgttggatttttgtcaagtgtgattggactaatctgttacgcgttgagttcctctttcaaccacctatttggagagtggaacttcttgaagatcatcctttacgcagtgataagtttctctatcagcagcatcatgttacttttgaaaaaatggaaactttccaagagtttcatgctaaaagctcatgtgggtgttctggttttgttgatcacttctgtgtactcttttgtatccgacaaagctgtgaatggaaaaccagacatgttaagtttgatttcgtgttttgcctttgctttcatgtctctgtgtctgtcaaagcagattgacctttggtttggagc

SEQ ID NO: 80562 - DNA, 300 bp, Glycine max
  Clone ID: PAT_MRT3847_43765C.1
ggttctcacaccatatatagcaataatctagtttatactatacctacattttgataattttctttgtaattgatagccatggctacacgtggaaagcttgacgttgacattgatctcaactccaacgcatacaagtattggcatacgcgtatgaattcgactgaaaaatacgctaccgccttccaacatgatcacaacatcattcacgttcatgacgctgatggtcattctcctgactctatccgccagattcgttctggtgaaagttcaccacatgtgacctcatcctttgccaagact

SEQ ID NO: 80563 - DNA, 1164 bp, Glycine max
  Clone ID: PAT_MRT3847_43766C.1
gcttcactcaccggattctcactctcaactcatataccaactcggagtttcggtcttaccgtttccgattcaaaaccctaactcggatcctcaaactcagttgatttcatacaacatggcttcggagacttgaaatttgaatcctgattcgattatgttcgtgatttatgctgcggaaaaatcttgatcgctacttcgggggtttcggaggtttttacttcgttgtagcgcaattgagcataaactttgtaaccctatgatgtgtatatgagtccgtaattgacaacgatgtgttggtggcgtccatttgtgtgtggctggcaccacgaatcaatgttgagggcaattcataagagtccccaaaagaaactgtgaagctttgagtgaaacagggttttctgatgtttgcaatgttttaatgttctggtggagcgagcggcaacataagtaaatccatttgatgggcaggaagctaagccatacaagaatgaccctgaaattttggtgatgactaacttaatagcggcttatcaacgtaatgaaatattggaatttgagaaaattctgaagagtaacagaagaactatcatggatgatccatttatcagaaattacattgaggatctgctaaagaatattagaacacaagtcttgctgaagctcatcaaaccatatacaaggatcaggatcccttttatatctaaggaacttaatgttcctgagcatgatgttgagcagctattggtgtcgctgattttggataatagaattcaagggcatattgatcaagtgaaccggctcttagaacgcgctgataggtcgaaaggaatgaaaaagtacactgcagttgacaaatggaacacacagcttaaatctctttatcaaactattaacaacagagtttgttaaaacgtgtatcatggaagtgttatatttcttgttttccccaacttgcagttttgccatgtgaattattgtaagctacactgaggggaggagggagatgggagtgtattaccactatagcggaattcaggtcaaaccaacttgtggttcttgttttatattatagaaaaatataattgtttgaaacattcatgattcaatttttttggggccaatacatgtctgtatatctgcatattacttaaagcactaaaccac

SEQ ID NO: 80564 - DNA, 193 bp, Glycine max
  Clone ID: PAT_MRT3847_43767C.1
gaacagttgacatgagagatagagcaacgtcagagtttaccgtagggttgtccttagttcatggtttctgatacagatagaagggaatccttcttatctctctctctctctctactctctctctttttctgaatttgaacttggatcaactgggtctatatttgtgttcatattagagtggccatcacgggat

SEQ ID NO: 80565 - DNA, 262 bp, Glycine max
  Clone ID: PAT_MRT3847_43768C.1
gcgaccactgcgtccgtccactcgtccgcacactcgtccgatcaaccgcaactgtgatctacgctcgttgcatgccataataataaacgatcaatatttaaatattgacatcataaatgtctagaataattgattctatatctgattggtaatgagaatcgagtctgtttcagatctgagaactttaggttatcattttcaatgctctataaactaggattgggtataaaatgtaacattctatggaacaatatatctcata

SEQ ID NO: 80566 - DNA, 251 bp, Glycine max
  Clone ID: PAT_MRT3847_43769C.1
cttatatgctactaactctgtcattacgagcgattatcggcagcttgcgcggctttgtcatcgatatgtcgactaagtacctggaggtgaacagctattgaatgatattagtaactcatatgaggtgttatcgatgatgatcatcgatccatcctataactgatcatgataggctgtgcttatatggtcttgactggggttgcagggtttcagccttccatccagatctgtatgtgtctctgtatgagggc

SEQ ID NO: 80567 - DNA, 222 bp, Glycine max
  unsure (1)..(222): unsure at all n locations
  Clone ID: PAT_MRT3847_4376C.1
acatcgnncgtaagctcggaattcggtcgngnncnnnttctctctcacnttttaaaaaangnaancttttggaaatnntancccactgtgaatgcngatttncnaaaaggcggttganaaggnggaggangangttccagaggnttcatggttgaagaagagatgggtctctaatgtcggtttggcatggcantctgcntggaacttgancangggcngagn

SEQ ID NO: 80568 - DNA, 1150 bp, Glycine max
  Clone ID: PAT_MRT3847_43770C.1
cggctgcgagaagacgaccggtgggggaaaatcgcgtggtgagaagagttacgttagaatgtgctgggttgggggtgacgctggacataaataagctcaaacaaaatgccacactttgttaacttgaacaaagctcagacccaaacctttcttttgctcttcatccattccacaccaaaaagtaacagtttcagtttcggagggaaacacaacacaaaaagccccccccccaaagcaaatcacctttttttctttcaaaatgttcgccgaagagaatggactcaagggagaccctagactccaagccatttcccaagccatcagagtcgtccctcacttccccatacatggaataatgtttcaagacataacgacattgttgttggatcacaaggcgtttaaagacactgtcgacatttttgtcgatcgttacagagacacgcacatttccgttgttgccggaattgaggctagggggttcatgtttggtccctcaattgcgttgggcattggtgcaaagtttgttcctttacgcaaaccacggaagctgccaggtgaagtaatttcagaaaaatatgctctagaatatggaactgattgcttggagttgcatgttggtgctgtccagcccggtgaacgggccataatcattgatgacttggtggccacaggtggaacaatgtcagcaggagtaaaacttctagaacgtgttggtgctgaagtggtggaatgtgcctgtgtcattggtgtgcctgatgtcaaggggcagtgcaggcgtattggaaagccactttatgttcttgttgagccgcgtaaagcagataaatgttacccagattgacatactaaaggacgctgggtgtgagaaacacaggccataatgtgatccttaagttttaggctgatggagtcgtgttcatggcaattgtcaaatatcatcctgggaaatgttcatcctgtttcatatctttatcttctttgtacatgttagccatcatgttatgtggccagcagtttagaacaataacaatcattaaagaagggatggattttatggcattttataaaatgtcaatttaaagatcccctttcttccaggaagccctgtaaaaagcataaaaggaggatctacccctttttgtttttgggg

SEQ ID NO: 80569 - DNA, 993 bp, Glycine max
  Clone ID: PAT_MRT3847_43771C.1
aaccatccttttctttcgctcttcttccattccacactaaaaagtaacagtttcggagggaaacacaatacaacacaaaaagccccccccacaaagcaaatcaccttttttttcctttcaaaatgttcgccgaagagaatggcctcaagggagaccccagactccaagccatttcccaagccatcagagtcgtccctcacttccccaaacatggaataatgttccaagacataacgacattgctgttggatcacaaggcgtttaaagacaccgtcgacatttttgtcgatcgttacagagacatgcacatttccgtagttgctggaattgaggcaagggggttcatgtttggtccctcaattgcgttgggcattggtgcaaagtttgttcctttacgcaaaccacggaagctgccaggtgaagtaatttcagaaaaatatgctctagaatatggaactgattgcttggagttgcatgttggtgctgcccagcccggtgaacgggccataataattgatgacttggtggccacaggtggaactctgtcagcaggagtaaaacttctagaacgtgttggggctgaagtggtggaatgtgcttgtgtcattggtgtgcctgatgtcaaggggcagtgcaggagtattggaaagccactttatgttcttgttgagccacgtaaagcagataaatgtcaagctcaagcagataaatgttactgagatgtgatgttggttcgatcttgaactgacatacaaaaaggacgcttagtgtgagaaacacaggccataatgtgatccttaagttttcggctgatggagagttgtgttcatggcaattgccaaatatcatcctgggaaatgttcccccttttcatatctttttatctttgtacatgttagccatcatgttatgtggccagcagtttagaacaataacaatcattaaagaagggatggattttatggcattttataaaatgtcaatttaaggtcc

SEQ ID NO: 80570 - DNA, 464 bp, Glycine max
  Clone ID: PAT_MRT3847_43772C.1
cttccgcccgagcaagacctagtttaacaatcatcgaagaaaacttgagtgacagaataatccagtctgcaatttgtgactccatcatggagattgaggaatcaacacccataaaaaattccttagaattgaaggatgaagagaagagcaagtcaacaaggtcaatatcagttgagcagaagcttgggtggcctctactccgcagagccaattcaggaatgtcacaaacccttcttcatacaagggacatgtcagtagtacaatgggtaatgaccttaccagatcgttcaccacataataaaagttctagctcttcttccactgaggaaaatccatttgaaaggaggagcatcagcgatattgaatatgagagctctacaaattcttctcctgcatctgttgatataataccaaatggcctagaggagatattaaatttaaattctctcgattgcaagcgattc

SEQ ID NO: 80571 - DNA, 491 bp, Glycine max
  Clone ID: PAT_MRT3847_43773C.1
ggctcgagaacatctcctttttttacctcttcacattctccattttacagggttctgatcatgttggggaagaggcccccgccaatgatctgaaagttgtctgagttgttggtctccacaggccgcacggtgagatatttggacaccaccgcaagccctataggtccattacacatgaatatgatgcctatatcaccacgaggcttaaaaaactatgatcttggtggtgttggtcttggaattgtagtggctattgatcaattcaactagggttatgcacgtaaagtcttttccaaacacaccgtttggaccttcaatttgaaccggttcagcccaatccctgttcactacacctaaaactcaaatcatttttatgtgcaggaatacacctatgtgacatgccacgtgcctaacatgacgtctactaaggtatactatgatacaggggaaagtgaaattctgagacattacagcaactgctactttttttt

SEQ ID NO: 80572 - DNA, 219 bp, Glycine max
  Clone ID: PAT_MRT3847_43774C.1
aaacgagtgacttaatcgcatgtataatgcgtgcataaagtccaacaagtgtacatcataaggactatttattaccatacacaatattaatcaatgacaataacattgcccctcatcgacggcatatgctttagaacacagcctgaaagatctttggctatctccactttcaataccttccaactatttagattctacaactgaatgcagctcaactgt

SEQ ID NO: 80573 - DNA, 204 bp, Glycine max
  unsure (1)..(204): unsure at all n locations
  Clone ID: PAT_MRT3847_43775C.1
gagacgcgnccggataaatgatcaganggcaaaaaaggcagcaaagaggactacagccacgatgacaggggggaccccagaaagcaaacgggcgacaaagggggcgcaaaggacagcacacaggagaagagccgccaagagtgaaggcaaaaaggaaagggaagaggacagtgatgacaacggagagaggaacgggaggaggaa

SEQ ID NO: 80574 - DNA, 391 bp, Glycine max
  Clone ID: PAT_MRT3847_43776C.1
cccgtctggacccacgcgtacagcagcttcggcttgggcacataaacttatagggtactgtgctggggacgctatggggagcccgtggaagaagaagcgtttgaggaggttgtagaggaaccgccgctagatgagacagagatccaagtaacgcgttaaacctagcgcgtgcctgacgcttttacaattgctgataggtgcgcatgggacacaccacacgttaatggcacatggcctctccatgaatgatggttgagacatgatggcggatacaggttcactatatgcggcatatgttattaacgtaactcatcgatatgactcgctactgtcatgagcaataagcatctatttgcgagaaattattggatgggagaacatataacttatc

SEQ ID NO: 80575 - DNA, 536 bp, Glycine max
  Clone ID: PAT_MRT3847_43777C.1
cctatcgcgttcgatttggtattggaatttaattggtttaattccgtaccaagttcctatacgtttagctttatctcaatgttaccatcctatttggactaatactgagaaaaaagaaattcgtgaaattaaaaaattaattgaaaataaaattagaacattcaccgcttcgccaactgaatttacagtggcagcgaatcgtatgtgtctagattttaataatttattttattccgctggaaaaacctgctcgtttgttggtaaaactaaattttttcagggctggcataacctgtatttgcgtttagctaagcatcctcgcggttttgaattcgatgcaggaagttttgatgctagcgtcttccgtgatgctctaatcgaccaaatggagtttcgatgggaaagttacccttcatatttacagacacccgagaataggcgacgtttaactcatatttatggggaaatcattaattcggcgattattcttgagggagaactggtgtagctgacgtgtttaaaaacaccgttatcta

SEQ ID NO: 80576 - DNA, 312 bp, Glycine max
  Clone ID: PAT_MRT3847_43778C.1
acacacaccaaattaacaaagccttcttttttttgtgagagggcttgctaatttgcaaggagctactcttagggctaaagatattgctgaggctgctctctatcttgctagtgatgagtccaagtatgttagtggtcataatcttgttgtggatggtggagtcacctcctcaagaaattgcattggtttgtaactttttatcttggtttactgtttccccctaattaattggttgtcaatgtaggatcgcgatatgattgtaaaattattcattttaatgtaactgtagttattttttttttaaccctaaaa

SEQ ID NO: 80577 - DNA, 196 bp, Glycine max
  Clone ID: PAT_MRT3847_43779C.1
gtgccgcaaccgggcaagcccaacagcacggggggggccccgaagagctggccaccgggccacaccagcacgaaaacggaggggacggacaaaccacgggccgcggggccgggcaccaagagagcgcaccgtgacgccctcaagacaaactggaaggagaagaacaaagccgagggggagcaaaaggaggacacgg

SEQ ID NO: 80578 - DNA, 181 bp, Glycine max
  unsure (1)..(181): unsure at all n locations
  Clone ID: PAT_MRT3847_4377C.1
cccacgcgtccgcccacgttttcggataaatctcagcctgagggaacaatatgccctctgcaaaaggaagacgatctgaggggacttcttgttgataggggtgcacggacnaaagcgccgcccccgcttcccccttcccctccctcccaccaccaccatnggcaaaccctccgccggagac

SEQ ID NO: 80579 - DNA, 335 bp, Glycine max
  Clone ID: PAT_MRT3847_43780C.1
cccacacatactataaaaaatcttttttttctcattctacactacgtctcaagcgggcatatattcacagaattgcgttcttcacaaaaataccatactctcttacatctaagtcacactcatgcagacagattaacaataactaataccaataaccaccttcacaacaaatcagcacttgaaagctataacttagcatgactcactactttttaacaaattacaatcccaaaccatctcatcaacaaaattatattatacacttaataccataattatccaattgatttcctttacatctttcactaccattattctcataaataactttataa

SEQ ID NO: 80580 - DNA, 215 bp, Glycine max
  Clone ID: PAT_MRT3847_43781C.1
gtaacccaccggacaaccgagaagctggaagctgaaaaattcgagccaaaccagggattggcttgctgaaagctcagttcaatcggttctttacctggaactcctaagtatataacatttatctgagatatatattgacttaccaaatgtttacagttctacgtggactgcaaatgtcaaaaactatcaaataccaacataaatgtaattagcca

SEQ ID NO: 80581 - DNA, 389 bp, Glycine max
  Clone ID: PAT_MRT3847_43782C.1
cccacgcgtccgctcgcgggaactgcatttctttataagatagattacccgcatctacaacgagtctctgataggaatcaattgttatatctcagagtcattcagcgagttcatttcattgtaactgagctttccacaaccctcagatctctcctctcgaacgtgcaaagagtcactacttgaccgaatgctgaagcggctgaaatcggtctgagaaatatgattcttacgatacctctactaccctatggactcctagtacaccgtatgcgcccttccttggacctaaaacacggtagattctcctctcatagtatgagacatgttcaaacaagtgacatgagtaagtggcttagatcacattacgagctctctttacttctgtgtac

SEQ ID NO: 80582 - DNA, 329 bp, Glycine max
  Clone ID: PAT_MRT3847_43783C.1
ccacgcgtccgcggacgcgtgggtttaaaaccttgtgtgttactatatacttttcatgtataatcaaacttgaaattaaggaacaaattgtttggaaacagatataccatcgaggggggaggagaatgtgttacaatgacatctacatatatattatgagctataggaagcacactttcaaaagtactaatacaagtgcagattatagcttgtaatatacaaggaataatttttgttttttaatttcaccatttttattcaaatcatggctactatactcaaatgtagttttcctatgttataatccaattatccaaagttgtacacac

SEQ ID NO: 80583 - DNA, 1103 bp, Glycine max
  Clone ID: PAT_MRT3847_43784C.1
cttacagtaaccctcacccctctccacctcatctcttccttccccataaatttaatctttcgatctctcactcatatccttccatgattccgaaatttgcaaaattttttcatctttggatttttccaagcacgaggaggtgacgggaaaaaggggaaaaacactacgcgttttctagatttttctgtttgatctctttaaggttctgtggaaaatatagtgcttgaccttcctaacaacggtaaaagtcagtgatgcgttatttaggttatgttgtataggataggctggccagattaagaaagtcatagtctgtgcgccggtcatgtcccaagagtgggccatgacactaatccttactatttgatgatgaacagataaagtaacttgattggaaaataagcattatttatggaatagcaggaggcctattataccttcgtaaatgattctctcttatagatatgatgatgatgaacgtatgatgttttgagacacttggtgattagtaattataattcactttgttattaaatggatgagatgagatatcagcatatggatttgtctagatatatatgttgtgttcttttacaggttatgttgtataggataggctggccagattaagaaagtcatagtctgtgcgccggtcatgtcccaagagtgggccatgacactaatccttactatttgatgatgaacagataaagtaacttgattggaaaataagcattatttatggaatagcaggaggcctattataccttcatgaggactcttggctcagagtaaatcatagagatctcaaagctagcaatgttctattagaccatgagatgagtcccaaaatatcagattttggattagcgagggcatttgaaaatggaaaaagaccaggcaaatacaaaacaattaatgggcactttgtgagttttattgatatctaacatttctttagttaatacgatttttttaatgtagttttaagtacttaattgtctgaaaaattaaattcctgtttttcattatttaatgtaaaccgactaacagaactcgattgatttcatttagtggatacatggctccagaatatgctatgc

SEQ ID NO: 80584 - DNA, 396 bp, Glycine max
  Clone ID: PAT_MRT3847_43785C.1
aggcgtgcgaacacgcgtgagggatctaacactggtactcctagctagggtgacagactgctaaatggagaaagcttagattgatgactctggatcaaaaaccaatgacactcaggtgaaactatggtgatattatgcctctgcggctaggaagagcagataagaagatattcatagctcgtgctaaatcgtatcatgggacaacattgatagcattcaggcgttatggccttacggctctgcatcaaaaagtcgatttgactgcttcgtttgtattgcgcactgactgtgcacattactggaggcatgattttccaggtgagacagtggaagaagttgcgactagattaggctataatgtggagcaggtgattctgaaagagggaccagagacta

SEQ ID NO: 80585 - DNA, 401 bp, Glycine max
  unsure (1)..(401): unsure at all n locations
  Clone ID: PAT_MRT3847_43786C.1
cccacgcgtccgcccacgcgtccgcccacgcgtccgtacggctgcgagaagacgtcagaagggtacggctgcgagaagacgacagaagggtacggctgcgagaagacgacagaagggttcactttattttttttcttagtctaattatatttgggaatgtgtttttagttgggttctatttgaatgggttgaggtcagtgatgaattcaatttggctacattggctgagtatctgggttttattagattatgatgtggcccaacagtctgaggcctctgaggctgtggattccattttgtaatacaaaaatgtaattttaattttgtatcgcgtaggattgaatctgggttattacattggacgctgtcataaagaaaaatttttgttggttgggnnaaaa

SEQ ID NO: 80586 - DNA, 252 bp, Glycine max
  Clone ID: PAT_MRT3847_43787C.1
aaaagggttcgtgcgttcttcctccaaagcctttcatggagttcacggcactctctaacgcttcccaacttgggagcatcaaccctcgcagaaccaaccttcaaagtttaacacaaaccctcttgctttttcttagtttctttcccttcttcctctcgcagaggttgctcttgcatagccattctcaacacccacacgcccacctctagcctgtggacctccttccgctgattttgaactctctgttttgac

SEQ ID NO: 80587 - DNA, 614 bp, Glycine max
  Clone ID: PAT_MRT3847_43788C.1
aaaagttcataagcttaccaaattagtgcagacggtggttatgttgtgctggcagcatcactgccatagttagggtgtggttattgtggaaaacaccaaaagatgagtgaatcaagtcgttttttgttttattgacttgaaatgtggggctgattgctgttgcaccacaagagaaattctaagcacgtgaatttgaaggaaccactgttagtccgcagaacattgacaatttcgctcttttcatacctgtttcttcgtgcatttgctgacatatagtttcattcacattatagttctggatttattgccatggattaagaaaattcggtatcttggatactgctcaaacagttttattggtggaatccactacagcttgagggacctacgaggtacaccgtgcactgcgtgaccggtaatttgccaagtgaatacttactgctcaagatttgaagtcactggaaatttgtattttgtgggacaccttgctttgatactctcctcccatgattgttttcttagtaaagagaaactggctctctccagaacttcaacttttttagcgttttcttgtatgagctccgcgattggaacgttactaatgctatttgcac

SEQ ID NO: 80588 - DNA, 705 bp, Glycine max
  Clone ID: PAT_MRT3847_43789C.1
ccggggatcctataccagtcgacctgcagtgtcttcttttcatgtccacctgcagcttacagtagacatgaatggacagccaagaatgagaggaatgtcagcatcctcttctatgtctatgacaatgaaatcagctgaaaatataaggtgtttaaccttcaccaaaacatcttcaatgactccatatggccttgtaatggagcagtcaactaactggagggtcatgcatgtggacattatctctatctctccaattcgccgggacatggaaagaggcattaaattgatactggctcccaagtctatgagagttttgcctacaacaacctcaccaatagaacacggtatcatgacaactccaggagctttgtgcttgggtggaagaatgcgttgaataacaacactacagttaccttccacaacaattttgtcactatggatgtaccggttcttcttggttaacatatccttcaaaaaattggcatagaggggaatttgctgaagtgcttcttcaaatggcaaagtaattttcagtttcttgaagatatcaagaaatctggtcaaatgtcgctctttatctttccgggagggtaccaacggataaggtacctccttgcattcaataggagtagtctctttcttcttttgtaaggtagcctcactctggcccttcttcttttaagtctcaaaaaccttggtcttttt

SEQ ID NO: 80589 - DNA, 231 bp, Glycine max
  unsure (1)..(231): unsure at all n locations
  Clone ID: PAT_MRT3847_4378C.1
gaaccgtatagattattgtttttaaaaaaaagaaaaaaaaagagaanganaaaagaaaaaaaaagaaaggaaaaaaggaaagggtggacgttaaacgagaaaccaagctcacgtacgcaaaaaggcacacggggtgagagaccagaaagggccaacctagacccggaaaactagccgccctggatgaaaacggaagaaaaggcgggaaacccaggaagttaccgaggggga

SEQ ID NO: 80590 - DNA, 1176 bp, Glycine max
  Clone ID: PAT_MRT3847_43790C.1
caaattctgtagaaatgaagggattgctagacaacttactgttaggaacactcctcaacaaaatggagttgctaaacaaatgaacagaacacttctggaaagaacaagatgcctattgtctaatgctggtctcaacagaagcttttggggaaaagctatcaatacaacttgttttctaatcaatagaacaccctctactgctataggactgaaaactcctattgaaatctggaatggcaaaacagtaaactactcaaatctaagagtatttggctgcaatacctattatcatgtcaatgaaggaaagctggcacctaaatcaagaaaagggtatgttcatgggttatggtgatggggtgaaaggttacaggatctggtcaccctctgaaaggaaagttcttctcagcagagatgtaatttttgatgaatcacatctgctccatccaaaaattgaggttccaattgttggaacacagagctgccactctcctctagaaaaagatgtagaatctacaaccaaagactccgaaaaaggggttcatatagatacatctcctgttcctcaagaaggtgagcaatcagaagattccaatgcaaatgaggctcatcagaatgctgaacccgagcctgcacagctcaatcctggaattagtcaaagacctaagagggtcagtaagcctcttgagagatatggctttgaagacatggctgcctatgcattacatgcagctgaagaaatagattcaaatgaaccggccacctacaaaaaagctatcaatcatcctgaagctgaaaattggttttagctatgaaagaggaaatggaatctctatataagaatcaaacctgaaaacttgttgaaccacctaaaggaagacatgtggtaggctgcaagtggatattcaagaggaaacctagtctttcagaaaaggaagagataagatacaaggctaggttagttgctaagggattcagccagaaagaaggaatagatttcaacgaaatcttttcacctgtgatcagacatacatccatcagggttttgcttgctatagtggcaaaccaagatttggaacttgaacaacttgatgtcaaaactacttttctccatggaagattggaagaaaatattcgaatgaaacagacctaagagcttatgatatatgtttacatact

SEQ ID NO: 80591 - DNA, 1657 bp, Glycine max
  Clone ID: PAT_MRT3847_43791C.1
gacacatttcgttagccgctgtgggcaaaaaccctctccctttggctccttccactctcactctgttttcatcgtcttcaaccaccgccatgtgctcttagacctcccaggttccttcgtggaatttctttttctgaaacccattctcattctctctctttctcagccactgtagtgtgtctcttgacacagttcgttagccgcaaccctttggctcctccttccactctcactctcactctgttttcatcgtcctcaaccaacgccatgtgctcttagttagacctcccagaggttcttcgtagacaacacagaagaacgatttgttccgttgttttagtagctcttgaaatgaaaccacaaaccaatgggatgtctagagctcataaggcaaataataatacacagtttgaagggcctaactggcttatttttgctgctggtgctttgttgagtaccctatccattcgcctcggttacaagttaaagcaggcagtcgactccaagccgaagcaaaatgcaactactgctcatagaggaaatggaaaatccacccacacaaaaaactccacagattgctttatgcagtctaatggatattcccaaacgcaagataatcatggatgcttcagttgcatttcaggaactggaggtaccatggagctaaagtgcccaccaaatggccagatgcagatgctgaatgagtttgatggggctctccctttggtaacagttcctgctgttgctgaatttagcaaggaaaatggtgttgtctgggcatgctctcctgatcgtctcgaactgccttcaaagccattccaccattcaaactgctcagattcaccatgcgtatcagaatctggttctgatatttttagtaagcgggaagtcatacagaaactgcggcaacagttgaagagaagagatgatatgatactagaaatgcaagatcaaatggctgaattgcaaaattcactcaatgctcagatgggactttcttctcatttgcaattgcagcttgatgctacaaacagtgacttatttgactccgagagagagatccaacggctaaggaaagcaattgcagatcactgtgttggatttgttcaccatgacaaatcttccaaggtgacagtttttcctgctgagattagaaatgacctttcaaatgggcatcttgatggggagaataattgtgaatcccctgaaaaactaagggatgaggaggagagaattgagttgctgaaaaggcaagtaggagagttgaaagaggtaatagaaggaaaagaatacttgctccagaactacaaggagcaaaaggcagaactgtctctgaagattagggaattgcagcagagattggattctcagctgcctaatattttgtagaagctatcaagtttgtgaatactttggttctttacatttgacaaatcttcactgtcttcctcattctttattttctctgtaattagctcaatatatttcgagtttgtgcaatgtgtgcctactaaggagtgaacgagggcctgggtatttaaaatgagatgaatgcatatggtcttagaaatagaaaatattactcttggttctttatatttcaagtaaaatttatatttgtcacggtatttaaataaacccccccccaaaataatag

SEQ ID NO: 80592 - DNA, 328 bp, Glycine max
  Clone ID: PAT_MRT3847_43792C.1
ggctcgagatcacaaatttattcagtttccgcttatagataaagttgctgctcttgctataaatggagcggcagaaataacaactggacatgttcctttaaatgcactgcaagctattgagggttaaccttatcatggatacactcaggtgcgcttgctctggctgctgaaccacctacacaacgactgatgcgcagattacgcttactggcctagagaacctatgataacgcacattatgtggagaaactagatcatacctgctgtctatgagaaagcaattctactcgctcttaacttatgacgtgaaagaattacaccacaacag

SEQ ID NO: 80593 - DNA, 1647 bp, Glycine max
  Clone ID: PAT_MRT3847_43793C.1
ctaccacgcgtccgctctccatcattccaaaccccccctttcatctctttccatccttaataatatcccccctttcttgttacatattgctatatccatattccacacataccattcattcaactcttggtacataacttcataatacaagtcctcaaacttgcaccaccatgtccatagcaggccttatagacccagaaatgaatcacaacaagtccttccaccggcgaaacgactctggcgagctcgatgtgtttgaggcagcaaggtacttctcaggatacagtgaagttgttggctacactagtggctccaccacctacactcagaagatcatgagagaagaaaggcaccatcatggacaaagagctgccagaatcagcttagacatgccaatgagaagcttgctcccccaacaattccatggcatggagaagcaaatcatcatgaaggagaagaagaacaagcagcctagctctccaggtggaaggcttgcaagcttcttgaactctctcttcagccaatcagcatcaaagaagaagaagtcaaagtcaggctcacaatccatgaaagatgaagatgagagccctggtggaaggagaaggagaagaagcagcattagccatttcagaagctcaagcaccgcagattcaaagtccttgtactcctccttgagttcagagtttcgaactcctccttatgtacaaacaccaacaaagagctgcaaggaattcagaaccttctcatcagaaaaaaagcatgcactgtccttttcagcaaagtacaacaacaacaatggacaacaaataagatcatcaacaacaaccactttgcagaatgagttgttgtgggatgagaagaaaaagagggaacccaacaacaaccacaacaacaaccatgttagatgataatagcaaccacaaacacttatcagagaaacaaaggaacaacaacaacaacaagggaaatcatgagttattacttgagaaagataggatcttagtggacaacaagtactcatcagaagagaaggaaaccaccactcaatttaagaacttaaatgaggttgatgatggtgcagaaagtgattcaagttctgatctgtttgaattgcaaaactatgacttgggatactattcaagtggtctacctgtctatgaaactaccaacatggatagcatcaagagaggagcaccaatttccaatggccctctgtgattttggtgtacaatatttttcttccttcttaattggttatggttgaattagcatgttagaagctatgaaaaaggaaaatctattagattttgcttgtttcccgcagggtttcatttcaactcctttcaatacttctttttttctgtgtgtacagattggaatgttggcttgtcttacctaatttcatgatctaatgtcctttgctttaggacctttgttttagagtgcaaaaacaaaacaaacataagttaatgccctccattagtggcttcaatttttttgccgtgattttaggtttaacgttaacatgtaatcaagagaataattatcaaattctctaaacaatcatgtcatgtgcccccagtaccaaattcatcatcttgggatgttcttgtgcatactaaatttaggagctgatttttagagaat

SEQ ID NO: 80594 - DNA, 423 bp, Glycine max
  Clone ID: PAT_MRT3847_43794C.1
ttcccgacccaagcgacccgtccgttttgaatctatacaatcaacaatcttgtttaacgaagagcaccatttctagtcggagggctacgccggagccttcaaaacctaccctcatcaagccggtaccatccgtaagaacggctacatcgtcatcgaatgcctttctttctagaattagaattttatacttttatgactttaaggcacggtcacgcataattattaattttgtgatgattatattttcactgccaagaaacttgatgatattgtgccctattttcacaattatgatgttcctcatgtgaatcgtactgattaccagcttattgatattgctgaggatggatttttgagtctgcttactgaaaatggtaacactaaggatgaccttaagctttccactgatgagagtctgctcac

SEQ ID NO: 80595 - DNA, 712 bp, Glycine max
  unsure (1)..(712): unsure at all n locations
  Clone ID: PAT_MRT3847_43795C.1
tagtgcaatttataattttccaatacataggcttagaaactttggtcccgggaagggaatcttcaccatatgccactcacgttatcttttcatcacaccttcaccttcgatccttcctatgtccaattaattgtttaaggagagaccaactcataaagtcacaaagaatattactataaacatttggatttaggtggtggtggtggtggtggtgtatttcaaattccagctgttactattgttgttttatcgaaaacccaaattcccaaaggaatcgaaattgaaatcgaagtgggaacagagcaacacagagcgtgatttgttccaatcggtcggtgggctatggagagtgtgaatgatctgatccaagaggccaagctccgcactctctggtgggccctctgtatattcgtcgtttcctatttcctaactcatactagtaaatcaatgtggatgaatgtacccatgtcgatcctatttgttgtggggctgcgcattcttttcaatagggtggagttccgttggaaggttccacagcctagactgcagacctatctatctcatttggagaaaaagcagntgtctctgaatgatccacgcctcactagtttgccctcccctgcgaaatggaagaagaaaattgattctcctgctgtggaggctgcaatgagtgatttcattgataagattttgaaggattttgtggttgatt

SEQ ID NO: 80596 - DNA, 367 bp, Glycine max
  Clone ID: PAT_MRT3847_43796C.1
ctgtctttattctgtctgtctatggatgatcctacgggggcatttgcgataacatatgagggctcttaactgaacatgataaagggaaactttaacggttatgagcatgatagtgcgaatgataggaggactttatacaacttggtgtacgaactaacactttgtaagggatcctttaagggatcctcgtagctaaatatggtgggtaacgcggtgggatagccacagggaccctcagaaagattttgtagtgagggatgttataagggatttgataagaggggagcttgtaaagaaactgcattacagattgggtgatacacgaagcactacccagatctaatatgacggtgtgttttgaggattg

SEQ ID NO: 80597 - DNA, 505 bp, Glycine max
  Clone ID: PAT_MRT3847_43797C.1
ggggcacaaaaaacctttaagccggggataaattttttggaaaggccaatttttggacccccctttttaaaaaaattttttttttccaaagggacattgggcccccccggggcgtaaaagggtaacaggggggggggggggaccaatggggccccaagctttattggggggttaaaaaaaaaaaggacaaaaaggggggcccccccaaggcaaaaaggccccttttttggggggcaaaaaggaaaggaaaatttcgttccaaaaataaggaaccccggttaaaccccaaggggtaaaaaaaggcaaaaaggggttggcactccaagggcccccggggccatcatttttatttgcaaccatgggggaaacaagcaaaactgttccggggccccccatgttttggacaactttggggaaaaaatagaaaaggggggttttatcctggccgggagttttcttccagggcctttgagtcccctggaaaaaaaggggggtctgccccccc

SEQ ID NO: 80598 - DNA, 268 bp, Glycine max
  unsure (1)..(268): unsure at all n locations
  Clone ID: PAT_MRT3847_43798C.1
tttgaatactggatttctttttttttttccccagcaactgatttagcatttcacgagctatgggaagatatatattgaaaacccaccactcacgataaacgcttgtaagactatgaacatattctatttctaagatagggcgnnngtncctgaggacttaatggctgcctcttgggatatgaaactctttattgcactaatcaatgcgtggtgagccacggtttctaccctataatgcaccgcttgagagaggaagaactcttcacat

SEQ ID NO: 80599 - DNA, 1308 bp, Glycine max
  Clone ID: PAT_MRT3847_43799C.1
ggctcgaggcatcttcaaactcccttttggcttttctaagtgctgtgattctttctttcatgtgtgtcttcagatttgattcataaagcaattggcaatgttgtagtaccttaaaatgttgctattaggtaaataggttggtgacatggatgaaggtaggtagttaaaatgattgaaactacatctaccactgtgagttgtacgatgaggtggtatgaagagtcaggtcctaaagcatacttgtgatttcctccattatttcctttgagatttggacagtagttggtcatacacccaattctaaattagagttgggatgtctggaggagtagtttgatacagtgatgcatctccacagatacttgagtaaagctatatgctgtggtgtagatttttactatggagttaaatgcaagttatgacgtcgagcattcacattctacacaaagaatacagcatgagctgtggcctctagatccaattgatccaaagaaggcaaagtttccatgttgtttggtttggaatccacttcctgtggtctcatggttggctcccttcattggtcatgttggcatttgcagggaggatggagttgttttagatttttcaggatcatatcttgtgaatgttgatgattttgcatttggtccagtggcaagatacttgcaacttgatcgtagacagtgttgcttcccccctaacctatctgcacatacatgcaagcacggttacctgcatgccgagtatggtactgcaatcgcatgggacgatgcgttacagacaagtttgcggtattttgagaacaaaactcacaaccttttcacttgcaactgccactcgtttgttgccaactgtctgaatcggctgtgttatggtggatcaatgaattggaacatggtgaatgtaggagctttggtaatatttaaggggcactgggttgatttcaggtcaattgtaaggtcttttctgccttttgttgtggttgtttgcttaggtgtttttatggttggatggcccttcttacttgggttactatccttctctctactcttaatagggtggtttctattgggtacttgcctatttagaaacctattagagtgctagatggtctcttgaattgaaagatggtcatgatttgtgttccctcttctccaaataacaggtttaaatgttgatattggaacaagaaatagttatctcttatggaaagttaatggaatagcttttgaaagtgtacttgatgcttcgttagaccgtgaattatgcaattgtattgactaattggtggaactgtaaagcaacctg

SEQ ID NO: 80600 - DNA, 261 bp, Glycine max
  unsure (1)..(261): unsure at all n locations
  Clone ID: PAT_MRT3847_4379C.1
ttgatcgngataagtannaacagtgtgatnnactgaatngncnnngtatnntcgtnncnacaatntcgtagctngcatgccatgcgtacgatatgttcctctccgagtgaacatggctatggtgcccgtactcccggaggtgaaatgcgcnagttggnngnttgctgtggaagcacacanatctttggnttgagaccatcctgangagtgcgttgatnnnacacaggagtacatccatggcgaccatntagatcacatccc

SEQ ID NO: 80601 - DNA, 810 bp, Glycine max
  Clone ID: PAT_MRT3847_437C.1
aaaatacacccggctattcacagacgaagaaatagaaactaacccacatctatttttctcattaattttaatataacaatggatttcattcccttcaaacacgggacctctctatagcagcagtttccaataattccaccgttttcttttcttctttttcttttcattttcctcttcctctttaaaaaaaaaaaaaaaaaaaagaagcgagatgaggtttttcttcgagttcgtgtcttgttgcggtttgctgactcagcgcgtgccggagccggcggttccggcggcggaggaggagatgtctctggttccggcggcggaggaggagaggtctctggttccggcgactgtggtctccgtcgtgccctcccgccgaccatgccgcaagaagatgcggatgggcgcggcggagtggaggccgtcgctgaggtcgatctcggaggatgttgcggcaccgccgccgagggagagagagagtccccgaaaaggcgcggtggcctcggccggaagggatgcgaagaggaggagcagcggcggagccgccaaggttcggcaccggagttacagcgacggttattacgggtcagcaccttccatgccgatgatgatgccaacatttatgttctaaacattagagttgaatttataacagtaaatgtgtatatatacggactacttggattgggggttaaaaagaaaaagacaaaaaaaagcgttgtaaaaggggcatttttgaattggtaatggaataataaccttttattttattttatcaacccattggtttataaatgaaaagaaattccttct

SEQ ID NO: 80602 - DNA, 302 bp, Glycine max
  Clone ID: PAT_MRT3847_43800C.1
ggtaatgggagtagggtaagagttgtggttgttgcgctgtgcccactatgtggtttcaacactgtatggtaaattgactgtcagcgtgcttgcgatgtccccactgtgaatgttgcaggtgttgacgctgctacatggctggagaagcgagacccctatgagctaatcactttttgttctcttggatgtatcaaagggcaaatctaatgacttgttggcttacactgattatgatgctgaggttactaaaatctgtggtgtcaacaggtctagcatttaagtcgcctaggcctaattgtctt

SEQ ID NO: 80603 - DNA, 221 bp, Glycine max
  Clone ID: PAT_MRT3847_43801C.1
gggtaccattaccagaagccagcagaactagtctaagcagaaatggcctcttcagggatggcatctagaggatctcaaacttggtactcttactggcgagaagttctcagttagatgccttcacttaatttcaaggaactgctcttcattcaaagacgtggccactggtagcacgatgatcaagactgacttaccttattggattaatattggcatgtctt

SEQ ID NO: 80604 - DNA, 192 bp, Glycine max
  Clone ID: PAT_MRT3847_43802C.1
ctctctcccatgccatcgtacctccctccacccgcgttgtcggaatcctgagccgggttcaccgcgccggagactctgcgttctcaccgttgaactcggtttcgaatgatctacgcccatcatcgaccgtccttgtacgtagacggcgcctgtcttcatcgattgtgactactacctactgattcatcagtc

SEQ ID NO: 80605 - DNA, 381 bp, Glycine max
  Clone ID: PAT_MRT3847_43803C.1
tgcgggttggagaacactagcttaccttacacctatgggtagcaaataattcaaggttcccaagacatgtagcttaattcagttcttgaaccctttgtactatagagttctatcaaagactggacatcacggatcaccaactatttctttcggacacaacgaccaggagttgacattcccaccaatcatgaaccatttgcagcaccaaagggttataatgcacctcaacaagtgcacataacacacggcgactattatgtaaaagcacaatattctcatacctgaccccagatgaaccaatgactcgacatgtgcaatatagcacatcaaaggataagtttcaaactattgccgaaagcacaactgcaaactacactttct

SEQ ID NO: 80606 - DNA, 251 bp, Glycine max
  unsure (1)..(251): unsure at all n locations
  Clone ID: PAT_MRT3847_43804C.1
atgaaaaaggagactgagtcacgtgtttgctccacttattgaattaatacaatgcgggaagggtttacgaaaatgggatgtgtggaccagtgcatgtataatggctctaacattaccttactcatatactatcaattatggttgttaaatcttattaacagtgaactaacctatggacacgagcttctaaaactatttgacacccngattgtctgtagcttggctactctacatagcttactgcatcatcg

SEQ ID NO: 80607 - DNA, 444 bp, Glycine max
  Clone ID: PAT_MRT3847_43805C.1
gtggtaggcttgcttctcaatttgttttcatcatgtcttctgttgttgtcatcattgtcaatgaatgttaactcataatattgtttatttgttttgaaaagcttagagcctatttggtttaagaaaacattttctattttaatttcatgttcttacaaataatcacaaaatgttacttttgttttcatggttttctatacaaatcttcaaaaaatgacaaatggcattttgcaattatttatgaaaagttgaaaatagaaaacgttttctcaagccaaataatcccttaggacttaggacctgttcaattacttatttttaaaacatttattttaaaaaccaaaacatgtatgcatgaggtctcttaattttgacgacggaaaattggaaataatgctgagattcaaaatgtttttgaaacaatgtgatttcaaagtagcaatc

SEQ ID NO: 80608 - DNA, 802 bp, Glycine max
  Clone ID: PAT_MRT3847_43806C.1
gcacgagaattagtgtgctagactttcaagatgctgaacctgatattcttgcacattcttcttcggaaattctggaacgcttcaatcaattctgcgatgatgaaattaaagcactttgcaagaagaaaggtctttatggcgagggagcttacctggttggggcgggcagccttggtgtggatgttagagttctttcatgtgcagaagtaataaggggatcctttccattcaaagtccaggccgccaatgcaaatgcagctgaaaaacagatttggcaactcttgtttcctcgctctcggcgaaagaagaatatgaagaagtggtggagtgccagcatgatttgagtatcccttggtgattggtccttcttttttgactttgtccttttcaaactgctggtagagtctgatctggagtaattgatttcttcttgtataaatagttctataatctgtacattttttccgggcaaatcctacacagcatttttttggtaaatcatcagagttaaggaaaagaggaggtaggggtgttgtcactccagaaaggagtattgctggctgcaaaaattaagcctaacccttcaccaggtttacttggttgatccttaccagctaaatcattcccctgttggccctataattttacttaaatttgaaaggggtcaatggcggttatcttctttttcctcctctgactttcttatagatcagaagtattaaaatgttagctttgtctttgctgaataacaagtgatgctgagtgatggcatttatggataaaactgtttcctcaaaaaaac

SEQ ID NO: 80609 - DNA, 281 bp, Glycine max
  Clone ID: PAT_MRT3847_43807C.1
actcgagccgaatcggctcgaggtcagatgagtattctcatatatacgtgtttaaaatttatacccctacatttagcctggaacagaaagaatccccatgaccaatcttataaagcggaaattatgagggactgcgaaactcttactcgcatcgcttctgttcatccaaagaaaaggaaacaagttagctcatttagtttttaactttcatgagatgtactgggttcaggatgctcccacccagattttgactcttattgagttcaacgtaattgtcttgt

SEQ ID NO: 80610 - DNA, 392 bp, Glycine max
  Clone ID: PAT_MRT3847_43808C.1
cccttagatgcgagggggaggctttttagaaatattctccctctcttacccccaagaaaaacatggcatttcacatagccagatagctctaaaatggttcccaagagagagcttaagtccgttgtgtacactttctagattggcacgaccacagcccagtattagcaaaaagtttcttctgatctcagtgcatccatcgggaaggaaatggctgaaactgggatcacggacatccctagcagcactgtctctaactatgaccagagtcttgatggcacagacatcattaccacggttgcaccaaggtactgatcaaccagctgcgagattgaagttgacacctacttctacatggcctgatgttgagctaccgagcctgcatttgagatgac

SEQ ID NO: 80611 - DNA, 1339 bp, Glycine max
  Clone ID: PAT_MRT3847_43809C.1
ggctcgaattcaaagttgggaaatccctccaccgctaacgtagtaggaaggaacacgataatagatagagtcgtgaaaaaaacacagaatggagctcatgcgaactgtgtacccaaccaccgctgttcctcttcctctttcaaaccttcccgttaggaccaatttcgccgttcggtgttccaacgttcactcgcaaccgcagctcgactcgcgcaagttgcagttagttcttgcagtgaaggaaaagcttgaaaaagaacatcatagtctccctgttggcagaaatggaagggatgacgaagatatgatactgtggtttctcaaagatcgcaagttttctgttgatgatgctatttacaagttgactaaagccattaaatggcgtcaagattttgaggtgtctaaattaactgaagaagtcgtgaaagatgctcttcaaactggaaaaggatatgtacatgactttctagatatcaatggccaacccgtgctcgtggtggttggatcaaagcatattcctcaagcactggaccctgcagacgacgagaggctctgtgttttcttaattgagaaggcattgagtaagtttccaactgggaaagaacaaatacttacaatagttgatctcagaggtttcagtacagaaaatgctgatcttaaattcttgacattcttgttcgatatattctactattactatcccaagcgattggctcaagtcctatttgtagatgcaccttttgtttttaagccaatttggcagctagtcaagcccatgttaaaatcatatgctttctctggtgagattttgctctgcagagactgttaggaaggaatatttcacagacgaaactttgccaccaagcttcagagattgaaagttggattatataaaaaactgcagcaaactttacaaacacactcttatttagcatgtcttggagtttgaaagaccaatatgtggatctgacgacagcaactcaacatttatttagctgaaaaaaatagcttcttacttaatattcagttgagaggaacattagaagaacagtgctgatataagcaccctattccctagttcttggagattgggatttgtgttaagagaggacatagtgctcagctcctgttgggaagaataccatctggacgtaatactgaagagacaagttcatattccgagaagactggtcttgtgttttccatgcgaggagcaaaatttcatattcagtttattgcttccgttttggcatttcatcttaatatgcttaccaatatctattgtacaagcggtacaaactaatgttttaaatgcatggtataatttttttttcaaaaa

SEQ ID NO: 80612 - DNA, 304 bp, Glycine max
  Clone ID: PAT_MRT3847_4380C.1
aggcaaagggcgtattgataaaaaaccatatattgaaaccagtgcttggtgaaattctcactcccagcctgaattcaatcccaggcttggatacaacttttattagaggtacacgggggaaacatacccaactctcggtgggaaacaaagtctgatacatgaatgaaaaaacgtttctttctccaccttacaaaaagggctcccaacaattgccagccttcccacatatccaaaactatgtcagtatcttattcctgctggggcttcttggaatcagtggtcaacacatctaggggggcgggag

SEQ ID NO: 80613 - DNA, 1003 bp, Glycine max
  Clone ID: PAT_MRT3847_43810C.1
gggagcaagctagaagttgggaagttcctcctccgctaacgtagtaggaaggaacacgacaggtagaacacagaatggtgctcatgcgaactgtgtacccaaccatcgctgttcctcttcctcttcctctttcaaaccttcccgttaggaccaatttcgccgttcgatgtgccaacgttcactcgcaaacgcaactcgactcgcgcaagttggttcttgccgtgaaggaaaagcttgaaaaagaacaccataacctccctgttggcagaaatggaagagatgatgaagatatgatactgtggtttctcaaagatcgcaagttttctattgatgatgctacgggtaagtcgacgcgtcccaagaaatggcgttaagattttgaggtgtctaaattaactgaagaagtcgtgaaagatgctcttcaaactggaaaaggatatgtacatgactttctagatatcaatggccaacccgtgctcgtggtggttggatcaaagcatattcctcaagcactggaccctgcagacgacgagaggctctgtgttttcttaattgagaaggcattgagtaagtttccaactggaaaagaacaaatacttacaatagttgatctcagaggtttcagtacagaaaatgctgatcttaaattcttgacattcttggtaatattttttaccatctgccaaatatcattcattaagaagtttgtattgtcatcactagaaagctgtacaaagagcatcacaaaaactaatattttatttttggcagttcgatatattctactattactatcccaagcgattggctcaagtcctatttgtagatgcaccttttgtttttaagccaatttggcagctagtcaagcccatgttaaaatcatatgcttctctggtaagtgttgctcatttgaatgtgcatttattaatatgagaaaaaaaaaagttattttttctctttataggggagtgctgagaacttgatatgcctttgattttggaaa

SEQ ID NO: 80614 - DNA, 1450 bp, Glycine max
  Clone ID: PAT_MRT3847_43811C.1
ttttttttttttttttttttttttttttttttttttttttggacttgaataatctgtagagatttattgtgccttgttacttgtacagaaattattatgaacttagaaagcagcaaatgatgttaagttttattcttcactgcagcataagcgtggcagacaatgccaaatctaaatataagacatataagatacatacttccttaataggaggtctgataaaattcggaataacaatttagagaccttttatctccaattgataatatggacagtcttctaaattctgatttgtcccatcaaaactgcagacttgtataataaatttgagattagaaatgctagcaggaactttgagctcagaaacatagaaacagtttacatgtgctactccaagatactcctgcacatgttctattgtagtgcctgaattaccacctgctagctttggtattttctccacatacacattgtagtgtggaaatgcaaaattctttccttctttcagctcccaagaaattttaacactgaggatccttgaatcctgaggaccagatttccaattgatgtattcaccatcaactagccaggaagtagaaactggaaaatctggcttgtagttagaagtcttgactgtgatatgaccaagaactgcagaataatcagttgaggaaggcacagtataatcgggaccaaatggtctggatttcagttctttgaaaggggcatttggcctatagcacaaagcatgaatgccagtgagaatgtaaccattcatttcaattgtaccttcatgtataacccatccaggggcatttcccttgtgttcacttgttgggactactttgctaaatccgcttgacagatgatccattccatgggaagtgagtagtatagacattgctttgttgatggtagaagtgaactcaagtacaagtcccaaagaagaattgctatcagatttcacagaataaaagaagtggataggcagctcgcttaaagtgaactctccttgaaagattctcctcttcaagtaattatccttttcaagagatcctttgaatgtaatatttccccctccactatatgatgcttccttcaagtctacaagaggttgaatagaatttgcagtagaatcagcaaactcaaggagtggctgaacaccttgggaagaaatattgcaccaagtagcatctgatacttggtctccatcaactgaaatatgataaccgcgtccctgatcaaaatttgtgtaaaatggtagtgttccaagatactttcgcactatgccccaagatttttccacgagactccaccaacgattctgagcagtctcaaaatctggtgcttgcttagtctcgtagacccatccaggagcaaatattgcggcagaaacatcatcttttcttattacatcaagagcaacatttgtattccacattccaccacc

SEQ ID NO: 80615 - DNA, 833 bp, Glycine max
  Clone ID: PAT_MRT3847_43812C.1
catcatgaaaaccacacttaaacatgaggcactctttaatctctaacaccacatttcaaaatgaagcattgcatctcaaaacattttctaagttgtttcgctttgtttctgttgctagtcgcaacaacctatgccactgttgtccctaccaccacccaaaagccaccaagaagctttgcaaaccaattcctcatcccccagaacgcggcacgtgcggtgctgaggctgcggccattggtgtgggactccaaattagcacactacgcgcaatggtatgccaaccagaggcgcaacgattgtgccctagagcactccaacggaccttacggtgagaacattttctggggcagtggcacggggtggaagccagcacaagctgttagtgcatgggttgaagagcgccaatggtacaattattggcacaattcttgtgccaatggacagatgtgtggacattacactcagattgtgtggagcaccaccagaaaaattggttgcgctagcgttgtttgctctggtggtaagggcaccttcatgacttgcaactatgatcctcctgggaactactatggagaaagaccttactgaaaattaattataagaagtgagacaagtcaataatgttctaataggatcatagtagctacccatgttctccgctggcatattactattgtctgattgccatgtgcccatgtgcatgggtttaattgtggctctgtctcgctagctactctgtatccttgtttttattgcttgtctaatctaatataaagtataaatgtctaaaaaaaaaaaaaaaaaacaacgagctcgtaaaaaaaaggccccta

SEQ ID NO: 80616 - DNA, 305 bp, Glycine max
  Clone ID: PAT_MRT3847_43813C.1
ctaccccttccttcctttttttttttttttaattataaacaaacattaaaacgggttgttgttccttaaaagacatctcaaactacaaaaacatattctttgacttattttacttaaagtgaaacctacaaaaatcttaataacttttaccaattaataatttgtttttttaacatatttgtaatttcaaactaatttagcttaaaagttataacatccttaaaattcaactttttttttgctaaaattaaaacactataacttttgtttaaaagctaacaatggatggaaattctctatctttt

SEQ ID NO: 80617 - DNA, 431 bp, Glycine max
  unsure (1)..(431): unsure at all n locations
  Clone ID: PAT_MRT3847_43814C.1
acgacatgcttcctctttccctgatcaacttttttgtctcaaattaaggagccgngtgtgtggatgggtcaggtgctattataaagaggaggcaggtgacgcttgcaactagttctccagctagtagtattgaggaccatctgaaatatggggattatgtcaataaaatgtctgcacaaacattgtatcagagcaactccatgcaaaagagcattcctgattcgagctatgaagcagggcttgaattggccattcagtcttctggcatagcaaaccaggaatcagctattacatccgccaaggaatgtctgaagacaacaaggagaatgggtccttcaccaaccctgaatgctgcaagcctagcactgagcttatccaaggtggtaccttatagagcgcaaatagaatggtacaagacttggtgcgaaaaa

SEQ ID NO: 80618 - DNA, 799 bp, Glycine max
  Clone ID: PAT_MRT3847_43815C.1
acgaggagaaaataaaaacacttgagggcatgataaagtccaaggaaactgctttggaaatgtcaacttcttcatttttggagaaggaaaaggagctccaatccaaaattgaggaactggaggacaaagtggaggaattcaaccagagcatagctttgcaaaaggttgttgaggacacgaatactattacttcaaatggtgttgcagtgtcattattcaagagtgatgtacatttgtccgagaaagaagcagaaatatccacaatagatagtaatgggggtggcaacctttgtgacactttagctgaattatcgttgctgaaggaaagaaacaactcaatggaaacggagctgaaagagttacaacaaagatactcagaaatgagtctcagatttgcggaggtagaaggtgaaagacaaaagcttgttatgactgtacgaaacctcaagaatgccagaaaggcccaaatgactactagttcatgatatctgctgtggaaatagtataaggtgaataaattaatgtgtacactggcaagatatgtatgtattttcttctccttttcttagggttttttctccctcccttctgaatcgtaaatgcgtgccataatagtgctcattttacagagttatcctagcagtttgtgatgttttaagttctatagttaccaatagtgctcatcagttctttgattgtatcttttcttttctttttcttatgcgtttatatacatattcttttattgtatgctttaactgatatatgatataatacaaatgagcatttattttattgg

SEQ ID NO: 80619 - DNA, 475 bp, Glycine max
  Clone ID: PAT_MRT3847_43816C.1
gtggggtggtgtgtgaggaaaggataccttgggaatacgcaatgtttcaattatgggaagaaaggtgaggtaggataccaattttattttagtggggggaaaaagaataagaccatctaattttttaattaatttacattattccctggttcttctttttttaatcattcctctattttcgggggggggggggtaataaatctttcaggccaaatttggtaatcccggggggggctgtttttctcgcagaatctgccacgggcacgtttgaaacgccatgttgcgcgggggtgatcctagaacatacttgagggaggtggcttttaagacataggtttgggggtctacatttgtgggctggggggggcaacctagacttgtccctccttggtgcccccttcaatgtcctgaggggggccgtgcccctcctcgattttttttcctgcgcgggccatgccgggcctgattggctggg

SEQ ID NO: 80620 - DNA, 523 bp, Glycine max
  Clone ID: PAT_MRT3847_43817C.1
ctagctatctcgatcgaactgtccaaggtcctgtcacccataaatgcctaagctatagcaggtataaggcgtagtatttatggtgccgtagagtagttgccctaacaaagtgcaaaggtttatacctttggccctggccaccactataatagaatgtttacgtttaaaatctgcctagcgtactggggctgtcttgcatgccgccctggccaggctaaatgtgagtaaagcaaatgctgttacgtaacgtaccaattgcgtaagtgaatggatggcaagttcgtattaaacgtgcgcgccatgtggttacacgctacgaaacgtcacgtaccgtaaacgtgtcttagaggcgtgtgtaaaagaaatcgacagattaccagcagccagggcagggccatagcatagatagtatgcaaaagagaaggctgagcccagggttccaccgcaggggagtgtgccaagggccagatagcacccggtgagtctagtataccagcaaccagtacgggggcaaataagagaa

SEQ ID NO: 80621 - DNA, 474 bp, Glycine max
  unsure (1)..(474): unsure at all n locations
  Clone ID: PAT_MRT3847_43818C.1
gcgtaagcctcggaacttcgtgctcgtgaacgactcaacgctttatagtttgtcngcgggtcgtcacttcttgagttaagaaagtgatagtaagacttcctccatggcgtctcttatccccatccttgtgatggcacggttcgtgatagctgggcccatcagaccccagaagtgcggaagggtcgaagcatgatggaagacctgcctccaagcagcgtctccttaagaagcccatggtactgcccacaccgagtcaagtactcgggcccattctctggcgagccctcgttctacctaaccggagagttcccaggcgactacggctgagacactgctgggctttccgcagacccagaaacctacgtctagaaccgtgaactccaagtgatccactctaggtgggtcatgctaggagacctgagctgtgtcttcccggagttgatgacccctagcggagtgaacttcggagaagcc

SEQ ID NO: 80622 - DNA, 545 bp, Glycine max
  unsure (1)..(545): unsure at all n locations
  Clone ID: PAT_MRT3847_43819C.1
attgtttttttccttttcttattttttcttattacttcatttttgttctctattttctcttttcttttttcgggttggggctcggacagaattaggatctgacaatcactcttcctctagtcctcttgctcttgccatcacattttgtgcatcgtcttcatgtcatgtatgacaaacatattcaaacattcacacagcaagaagtagaggttaggatcaaacatacgtactattttcataaaccaatctcaatatctcaagtaataaaataacaagtaatacattgattcacagatagcataacagctaaaaaatacaactaaccaacacctataacagacaatttgcgaagggttaaacaaacccggaccagacctagagtgcgtacagaaaaaaattatcaatatatagtataaatgtcacacatcactgatcgaatttagaaatgcaaaacacanagcactcaattctaacaattttgattgtctaaatccattggtctgtaattcctcagaaatcaatggtaacactccttaatacactac

SEQ ID NO: 80623 - DNA, 671 bp, Glycine max
  unsure (1)..(671): unsure at all n locations
  Clone ID: PAT_MRT3847_4381C.1
ggaaacaccaagtccaactccnntgcatgtgaaacgtgtttctgatgtgatcttcagtgatcttgagtcaaactacacagatactgatgagtttgatgattctcagattgagagtgttccagtgatggaacaggttgagagtgttccagtgatggaacgtgctgtgaggcctgggaagaagggttcttgctataggtgcctcaaggggaaccgtcttacgccaaaggaggtttgcattgtttgtagtgcaaagtattgtcgcagctgtgtggtgagggctatggggtccatgccagagggaagaaaatgtgtgacttgcattggctacagaatttatgagagaaatagaagcaagctggggaagtgttctcgtatgatgaaattgttgctgtctgagttgactgtgactcaagtcatggatgatgaaaggtcttgtgaagcaaatcaaataccaccggagcttgtctgtgtcaacttgcaacctctgaatagggaacagcttaaattgctcctcaactgccgaaacccaccaaaacaactgaagccaggatcctattggtatgataaaacacctgtagattgggggggaaatgggaaggtcaaaccccctattcaccttcacgaaaaaacccaagcgggtcgcctgccaaaaatgcaagaatggaaacact

SEQ ID NO: 80624 - DNA, 495 bp, Glycine max
  Clone ID: PAT_MRT3847_43820C.1
cggccggcgtttttttttttttttggaaaggggctcatggtgaattagtgcctcgaaataaaaaacaaccatagtgaagactatgacaggacttgttgactcacagcgctacacaactgaaagcgaagctagggcccctattcgaacgcatcttattacctatgaacagtagggatcgagctccgatcgtcgaaagggaaaggaactactgggtggctagctgggatgacgacgccaacagggcctgctataccctctgtggccagcgcggagatccctccattgatctcctctgaggccaacaatgtagattccctgccttatcagttaactctctcgctgatgtttaggccgacaccgccttaggagcggaaggagactcaggatccttgagaataaatggctccgatctgtggtagccagcctactacaagaaagcttcttatacggcctggaagtccaacgcgacctcggacgagaatataatctacaagg

SEQ ID NO: 80625 - DNA, 521 bp, Glycine max
  Clone ID: PAT_MRT3847_43821C.1
tccaactctcatcttctctgttccacaaccttaactttctgcattctgagaaaggtgatgaatcttctactggtaccatttcccatctggggaggttgcaaaatcgccatttcttcttctttccgtgtttagttgcacttgttccgctagtggctggtttcatcattgcataatattttgaatttgactgctaaggaaagcccccatttttctgagttgtaaagtggcttatattttttgagctgaaagtatatctggaatcaaggattgtgtgcttagtcgaccagacttgctatctcagcaatttatgtgagatccacggcttaaaaaggagcaacatggccttatactcatcagatgtctgcattctgtagctgagaaaatgggttgttgtgtctcaacaagcagtaggagtacttgtagcagcaagagcaatggagacatggtgtcttcatcttgcttagaaactggatgctgtgggcaaaagagaacaaggagaacattctctgatcatggtattt

SEQ ID NO: 80626 - DNA, 495 bp, Glycine max
  Clone ID: PAT_MRT3847_43822C.1
cccacggccggcgctgcgagaagacgacagaaggggatagtggacaattgagtgcaattaaagaagtcagggttgtctgtgatgaccaatcatcaaaggagtgcctcaaacaacttaatcaggagatccatttgctcagtcagctttcacatccaaacatcgttcaatactatgggagtgatttgggggaagaaacactttccgtttatttggaatatgtctctggtggttctattcataaattacttcaggaatatggggccttcaaggagcctgttattcaaaattataccaggcagattgtctctggactttcctatcttcatgggagaaatacagtacatagggatatcaaaggggctaacatactaggggatcctaatggtgaaatcaagctggcagactttggaatggctaaacatataaattcttcttactccatgctatctttcatagggagtccatactaggtggcacccgaggttgtaatgaata

SEQ ID NO: 80627 - DNA, 621 bp, Glycine max
  Clone ID: PAT_MRT3847_43823C.1
tacagctgtgagaagacgacagaaggggggctgcccctctgcttgcaagagagaaaaccttctcttacccttgctctcaagctttcaagaacatttcatcataggctccaaagaaggacatggactccaccaccttcctacaatcccgtcaaatactggcggtggcaagcagaacaacaagaattggagcaagggaaagcaaaaggagaaggtgaacaatatggtgctgatagatcaaggcacctatgacaagctcctttctgaaactcccaaatacaagctcatcactccttccattctctctgatcgattgaggattaatggatcacttgcaaggaacgctataagagaattgatggcaagaggttctatcatgatggtgtttgcccatgcaagtcatcaaattcataccagagcaacaaacacctaggaggtgaactgatcttattttacggagtataggaaggaatagtgaataattgttcttatgaagcttgagatgcatctcatatagctactatcagatctacattgttgctgaatccgaggctgagatagcattttgtgggtcacttcaatgagttatctttttggatattatggcaggaatgctcatacttg

SEQ ID NO: 80628 - DNA, 449 bp, Glycine max
  Clone ID: PAT_MRT3847_43824C.1
cttcctacttccaccacatcccttcccaatcaaaatccgcaaaacattaagtacggcgctttccctttgcgagctgagacttacaaataaatcctttgctgccaaaccacgctcactctcatcatcacttcattcccactctccccagaagaagaagaagtgtcttataataatgggaatgaagggtgcccccgtctgtctctccgtcgacgacaacgtcgttctcaagtccccaaacgaccgtcgtttgtatcgcctcatccacctccccaacggccttcgcgccttgctcgttcacgatcctgagatttaccctgaggggcctcccaagcatgctccaaatgaggatgaagttgaagaagaagaagaagatgatgaagaagatggagaatatgatgatgatgatgatgatgatgaagatgaagaagaagaagaagaaggagaagaag

SEQ ID NO: 80629 - DNA, 511 bp, Glycine max
  Clone ID: PAT_MRT3847_43825C.1
caagggccgatcacgaagtgaaccgagggaaactgtggaaggcaccgaagccgaggctggtcagatggcaacgcgcgtgaatatgggtggactagcgacgagcgctgtagcgaacgagtcggccagtcgcgcattagccagttagtcacatggttaatgccaggccaacgttggcagagggcgccgagggacctacggttgcactgtggtgccagcaaggctcgctgcggcagggtggggcagccggtggaccgtatggatacctagggcctgaggtggcctcagattatcgtggagctcgccgtggggcagcctaaggatgtcgtagccgagtaattcaaagcagatgcgcttaagcagcacagctgtagagcaacacatacggcagaggtgcaggcagctgctaggagatctgcacatgcaggatggcaccccacgtatgcagaatagaagcggaacgcactgtctttttaggcctatgccgcaagcgcttggcgggtggaagcagcac

SEQ ID NO: 80630 - DNA, 423 bp, Glycine max
  Clone ID: PAT_MRT3847_43826C.1
gcgatgtacgtccgtcgagaactaagtctatggatggatcccgattctgaatcttaaaacagcgatctgctgttgaactgtgaatccatccacaacgctcgaaggattatatacgccgtgcactgatgctttgcatgactcttacatcgttttacatatcttctacgcttgatcggtacgaccgaacaaggctggtttgtcatgatatgtatctgggtagagagatatgctaggtgactgtgctgccatggacctaggcttatggagcgagatgagaccctctttgtgaggaggtaacgtatggggaaagccggcatactgaaccttacttttgggtttcaacgcctacaagacaaggagaatgacgctcattttcttctctactaaggctatctgcttttaatagaatcaacgctctatgac

SEQ ID NO: 80631 - DNA, 453 bp, Glycine max
  Clone ID: PAT_MRT3847_43827C.1
ggaaacatgtgccgtggaggtcgcatgtttgctccaaaaaagacctaccgtcgctggcatcgcaaagtaaacgtcacacagcgtcgccatgctactggcgccgctattgctgggtccggaatccctgctctcatccaagctagaggccatattatcgatcaattggctgaagttccgctcgttgtctctgacaagattgagagctacactaagaccaaggaggccgtcgcattcatgcaacgtgttaatttgtggagtgacgtggagaaggtttacaagtcgaagcgtactcgcgctggcaaaggaaagggtcgcaatcgccgctacaagcagaaaatcggaccgctggttgtctaccataatgacggaggaattgctcgcgctttccgcaatattcctggtgttactaccctttcggttaaccgcttgaatttgctgaaacttgctccggga

SEQ ID NO: 80632 - DNA, 1520 bp, Glycine max
  unsure (1)..(1520): unsure at all n locations
  Clone ID: PAT_MRT3847_43828C.1
gaaacaacaataagaagcaaaattaaacttgtgttcttcccacaacttaaagtaagactctagttatttgcaagtataaggaatatctagctatgggagacattgatccagcttttatacaatccacagaacaccgtcccatagcaaaggtggtggaagttagagagattccagtgatagacctttcagaaggtagaaaagaattactcatttcagaaattggcaaagcatgtgaggagtggggatttttccaagtaataaatcatggggtaccctttgagattagtagagaggttgagattgtctccaagaagttctttgagacgagcttagaggagaagaagaaagtgaaaagagatgaatttaatgcaatggggtaccatgatggggagcacaccaagaacgtaagagactggaaagaggtgtttgattaccttgttgaaaacactgcacaagtcccatcttcccatgagccaaatgatttggatttgaggactctcaccaaccaatggcccccaaaactctcctcattttagggaaacattgcaagagtatgctcgagaagtggaaaagctagcttacaagttgttggagctgatttcacagagcttgggtttggctgctgacaaattccatggctgtttcaagaaccaactcaacatggtgcgactcaattactatcccgcatcccctttcccaaacctggcacaaattgggtggtttcgattctgtattcaaataataataacttaacttgagttctagtatgttttgaaacccaagctgaataggatcattaacagatctctgattgaggttaaaccttcccccaaatgcatttattatcaataagagggaaaaaaaaaaattgcggaggttcgattctgtcagtaaataatgagcacagggtggtggtgaatacagaaaaggaaaggttttcaattccattcttctttttccctgctcaccatgttatggtgaagcctgccgaggagctggtaaatgagcaaaatccagcaagatatagagaatacaagtatggtaagttctttgccaacagaaaccggagtgatttcaagaagcgtgatgtggagaatatccaaattcatcacttcaggatcttggatgaggcatttgggttggcatcctcaatatcatccatatctgagcataactagttctatctgctagttccatcatttcaaatccaaacaaaattgtgttggttcgattctgccaataaataataaaatattgagctttagttctagtatgtgttgttctctaaatttttattctatataaagagttcaagacatggactagtgtaagttgtagtgtgagtatctggtaacaccttagaagtcctggttgagtataaaatcactgtgaaatcaatacaaaagaagacattttatccattttatacccttaattgtaggaactctgttaatctcttcatataaataaacatggtaaaattgtcctaacaaaaaaaaaaannnnnnnnnnnnnnnnaa

SEQ ID NO: 80633 - DNA, 372 bp, Glycine max
  Clone ID: PAT_MRT3847_43829C.1
aagcaatcggagggtaagatttctacgacgtgagcaaagtggatagccttcaacttcccaatttcgttaccccgcaagggtggaattgttgattgcatggcacaagtttgcgcgaaaacattaactctgtgtagcctgcagatcttcacgtcatcaggtccgatggcaacgtcatcacttgcaataatgcttgcgatgcttgtacaggtaatagattctgctgcactggacctatcaataccgcacagacatgtcaacctaagatcgactcgcatattttccaggatcactgtccccatgcggattcctacgcttacgatgatttgagcaacactttcagatgcttcaacaagcctgaatatacgatcacat

SEQ ID NO: 80634 - DNA, 465 bp, Glycine max
  Clone ID: PAT_MRT3847_4382C.1
gaccggtccgttaattattggttgtcccacgcgcccatccacccgtgcgcacggctgcgagaagacggcagattttaacaccatttttgcccattaccgcacatgaaagggagatgccctcatgaacaatctattgtacaaatatagacaagaagcttacttaagtagatgtcaaacactacttcgaatctatttgaggagaggatcatcgcttgaggcttctcggggattaccatcattcaactagaattgcattcgttgagtacgcacttgctgagggcgcaatcgcatctctgaagctgaaatggtgtgacctcgggttcactgcctataagggttagcccatcaatgacaccagtgcgcccttgttgtactcgggcccccatgcactgaatcatgcttcttcgtgtttgtgttgctgctgcaacccggagaactaatagcatatattcatgcattgaaaca

SEQ ID NO: 80635 - DNA, 121 bp, Glycine max
  Clone ID: PAT_MRT3847_43830C.1
gctagacgtaatctttgactgaatttggcaaagcccattcactaatcatcaccaatacctaggtgctcccaaaccacatcatcgatcatcagcgcgccagtatcacgaacctcaactaatc

SEQ ID NO: 80636 - DNA, 218 bp, Glycine max
  Clone ID: PAT_MRT3847_43831C.1
actctgtctcgtttacacatctctccaacccttcacgttcgtttctcagtcttattcgaatccctctctcaatctcctgtccacacggccttcgccctggcggcacaggaaacaccgacgagaggcccacacgacccacgagctcgcgcgagggggacctgcgaaggccccggggcctcgggcgcccgtccgacaggcgagcctggggccgggcgagg

SEQ ID NO: 80637 - DNA, 515 bp, Glycine max
  Clone ID: PAT_MRT3847_43832C.1
aaggtttcctgtcatcactgtatgacgtcctccttctgtctcagtgacaatgacctcccccaaccgaacgaccgccgtgtgtatgtgtttattcaagttataggtgaacgaagatcttcacaagcatcgtatatgtttatgatttatttcatggacatgttcatgttcgtattgttgttttatgtgttcagtatggttatcatctcttcttttgtagttgtggtagcgctagtggtcgtcctaccagttgtttttctttttatgataattaatgttgtgatcgtccatcgccatatttgtagtcgtgttcgtaattgtgttagtatgggtgttgtttgtaggtgtaaatgtgttaaatgtgtaccgttaaagaatattatgggggtggggtaggggagggagagggagtaaccggcggtcccatatagcggattcatattcgtgtaagcgtacgtcgaggatgtgcaacggttgttaaagggtggaaaagtggcagagggagagggacagcccgg

SEQ ID NO: 80638 - DNA, 476 bp, Glycine max
  Clone ID: PAT_MRT3847_43833C.1
tttttccccacacaaaaaaaattatttgggtggtgtttttcaacggaagaagggttccccttttgcctaccaagggtccaagcgttttttgatttaatccagctaactcatactcagaatgaacccgttaaaaacttttcaaagtttaaaaaaagaactgggcccttttaaaaaacaactctcctcaccttttggaaataaatgatcactccccccagagaataaaatgaaggggtaaccaaagcttgaatcaaagggttacaatctgcaatgcattggttccaaacaaatcgggaagataggaggctttcccttcaataaccctttttattgaaacaggttaaaagcactttttgggcccaattggtggaccagattcgtcatattctgcctttgcaatccccatttggtggaaggggctaagaaatgcccaaaaagaacccccgatccagacactggtttttctttcagggggg

SEQ ID NO: 80639 - DNA, 429 bp, Glycine max
  Clone ID: PAT_MRT3847_43834C.1
agcgcttgaattcaagcgaagggaaatatgaagagaatgatatgcctggtagctttaaagtctaatttgcaatggacaacaaacaaaggttatggtaacagtatatataaataagagaaagaagggatcaacaaccagtcagattaacttgagctatagttgctattggaagaaaaagtggctggtttgcagtgagagaagcccttttacctgagtctcttataactgttgtcactgtttttgtttcaactaacggtttgtttggtttgagaaaacattgttttccttttttgtttttgcaaataattactaaaatgttaccctgtttccaatttgtatcctgctttcaagtttatgtatagaaaatggtaaaaacaacaaaatgttgtttacaaccagttcttgtacaaattttgaaatctaaataaa

SEQ ID NO: 80640 - DNA, 329 bp, Glycine max
  unsure (1)..(329): unsure at all n locations
  Clone ID: PAT_MRT3847_43835C.1
accaaaacaaacccactaggatagctgcctttttatacatcccaattctccttcctacaccccttattcttatacctaaataacttactacttactacaaaccaattaataacccaccattttacaatcctacattgtacaagccaccaangtacaaaccaccattttataatccaaaaccacctttttacaatcctaaaccacctctttacaacccaccatatattaatccaccatacaagaaaccaccttatttaaaatacccttcattaaatgacaacacccattccnaaagcaaacaattatgactattatctacttaataaata

SEQ ID NO: 80641 - DNA, 227 bp, Glycine max
  Clone ID: PAT_MRT3847_43836C.1
tttcttttaagaatttaattataagagaagaaatattgagtttttcctataaagttaaaatctatccatttaacttttatagaagctatttcatctaactctagctaagatgtataaattaggaagactcaattcatttcaccacttctaattttcttctcttataaatgtttatggagaaacaaattttagcatccaaatataatctaattattatattgtgaaga

SEQ ID NO: 80642 - DNA, 280 bp, Glycine max
  Clone ID: PAT_MRT3847_43837C.1
aacagaaaattccatttttttttatttttacatgccggctccatttaaatgatacaagcggaaaattttttccaaactactttttctgccctatcctttattcagtactacaaggacaatatctgaagaaataaaccccccccccctctcaaatgcatgttcctctcacattcaataggtgcacacactgctgcttattacccttataaaacctggttctcaccgggcaaatatgaaggataaccaccctcaacctggttctttttactttggaacatgc

SEQ ID NO: 80643 - DNA, 375 bp, Glycine max
  unsure (1)..(375): unsure at all n locations
  Clone ID: PAT_MRT3847_43838C.1
ctgcaggtttcggctctgtattctcggtttgacccacgctttattgtttacaaatggtgtcaaggtataaacaaggggttatttatatgggacaccagttatgctcagcgnggtgtgatgctgcaaactaagtttgagaaattctttgagaagattgatttaacaatgcttaacaggcttctgcgactggttctagaccataatattgctgattatgtcactgcaaagaacaatgtggtgttgtcatacaaggatatgagccatacaaattcctatggtcttatacgtggcctgcagtttgcttgctttgttgttcagtattatgggctggtattagatcttttacttcttggactgactcgagccagtgagatt

SEQ ID NO: 80644 - DNA, 306 bp, Glycine max
  Clone ID: PAT_MRT3847_43839C.1
tttctttttttttgtttttttttctttttttttttttttgtcacttggttttttttttttatcaaaaacccttccccgggaaaaaacatttaacactcccccctttacctccccatgatggaacggcccccctgtgggggaaataaaaatttatattagctcttttcccaatattagaaattaacgggatttttcgcctaacaatcctgtgggataccttgctggcccccccaaaagggaggactttgcctttataaattattggccccaattgtttttcttggtcaaaaaacacttttttacagg

SEQ ID NO: 80645 - DNA, 147 bp, Glycine max
  unsure (1)..(147): unsure at all n locations
  Clone ID: PAT_MRT3847_4383C.1
atcaaggaattaaaaaaactggagaacccnnnnctgcattccgtgcaatcatttattaatttcatgccgcaatctgctttataacagccgtgaccgcaattcataaacaatggattgcgctatgcatattcagaaagagaaatttag

SEQ ID NO: 80646 - DNA, 177 bp, Glycine max
  Clone ID: PAT_MRT3847_43840C.1
gtaaccaagcaaaatttttttagtgttttagagtcattaacacagagaaaccaaaaaatacctgaacttcgaataatacaaataatggaattttttgaacggccgcattctaattggattatgaagattcgccactatttggcctgggtggatcattgcattaaaaaaccccaaaaa

SEQ ID NO: 80647 - DNA, 307 bp, Glycine max
  Clone ID: PAT_MRT3847_43841C.1
ggaagacgtgctaaataatgttgtaggcggaaataacactgtcgaacaagactggactgcatcaaacaatgtacttgacactgccgttgttctacaagaataactgcgtgctctattcgtcaagatgaataattagacaaacaacatgactctctttaaaatgttttaacactggatctgaaatgcattacgatgagttgctaaatcggagggtatctattacaactgcctgttggattcacataccatctatatatttatatcgggcattggttgactacattgagcatatgagaataaaatttat

SEQ ID NO: 80648 - DNA, 185 bp, Glycine max
  Clone ID: PAT_MRT3847_43842C.1
ctcatctgagattcgagagatgggtttggaaaaagctttcagaaactggatataagtgatggtgctgttgtgacagttcatggtagtttggtgtttggaaagagcctaatgattatgtgtttgaaaccactaatgaagtgaacaagaagatgtccaactgtatgaacacttattggtgatataat

SEQ ID NO: 80649 - DNA, 392 bp, Glycine max
  Clone ID: PAT_MRT3847_43843C.1
ggcacaagtgagtttgtagatcgagatacctagagataatgtgatgaatgatgagtgtcgttggtttcttcattgctagaattttggtaacatggcaatgcaaagcataagatatgttctctctccgaatgaacactgtctagtgtgcccgtaatccggaggttaaatgctgcaagttggaagcttgctgttgaaacacacaacatctttggctttgagaccattcctgaagagtgcgtgaaagtaacaaacgaatacatttataggaaacaataaagatcagactccaaaacagttaaccaacaagcttacttttatgccagagacctcgaagtccatcccaaggacatactttgtgttagtatagatggacacgtactctccaatactcc

SEQ ID NO: 80650 - DNA, 1760 bp, Glycine max
  Clone ID: PAT_MRT3847_43844C.1
cgagaagacgacagaaggggacttccgttcacttttgaacccaaagagcggatagctgagatcggagaaccctctctttcttctccttcttcagcagttgaaaataaaaaatggcagatggtgaggatattcaaccactcgtctgcgataatgggacaggaatggtgaaagctggatttgctggggatgatgctccgagggctgtgtttcccagcattgttggtcgtccccgtcacacgggagtgatggttggcatgggccaaaaagatgcatatgttggggatgaagctcagtccaagagaggtatattaactctcaaatatcccattgagcatggtattgtgagtaactgggatgacatggagaagatctggcatcacaccttctacaatgaactccgtgtcgctcctgaggagcacccagttctgctaaccgaagcacctctcaacccaaaggctaatcgtgagaaaatgacccaaattatgtttgagaccttcaatacccctgcaatgtatgttgccatccaggctgttctatccttgtatgccagtggccgcacaactggtatcgttctagactctggagatggtgtcagccatactgtccccatttacgaggggtatgctctccctcatgccatcctccgtcttgacttagcaggacgtgatctcactgatgccttgatgaaaatccttacagaacgtggttattccttcactaccacagctgagcgtgaaattgtaagggatgtaaaggaaaagctggcttatattgcccttgattacgagcaagagcttgaaacatcaaaaactagctctgctgttgagaagagctatgagttgccggatggacaggtcatcaccattggtgctgagcgtttcagatgtcctgaagttctcttccaaccatccatgatcggaatggaagcttctggcattcatgagaccacttacaattcaatcatgaagtgtgatgtcgacattaggaaggacttgtatggaaacattgttctcagtggtggatctaccatgttcccaggtatcgctgacagaatgagcaaggaaatctcagctttggccccaagcagcatgaagattaaggtggttgctccacctgagagaaagtacagtgtctggattggtggctctatcttggcttctctcagcactttccaacagatgtggattgcaaaggctgagtatgatgaggctggtccttcaattgtacacaggaaatgcttctgaatgttgcaaggtggcttggtgaaagaaaatacggtgtcctcgttttatatgataaaaatgtgttgttaaatcagttgactgaattgatgacagtaaattctttcatttgtttttgttctattattggcaattgttcaacagatcttctttagttatgactataaatcaacgcctttcaacttaaaagttcgttcccatatcttcatctagattctagataatatgaaatcgggtcccttaatatcacaatttgttccttgccttaattatatgggctaagaaatgtaaatgtggctcgggccaaacttaggtcgctgaacaatgtctgttaaaggtgtatttatataagagaagggtcagtaacatattttttaaagtataatatttattatcagttaaaatttatgagtaaaacttttgaaatgagaagtacgagttcatgacctataaattcttttaattttcaataaactgcaggtcgactctagaggatccccgggtaacgagctcgaattc

SEQ ID NO: 80651 - DNA, 378 bp, Glycine max
  Clone ID: PAT_MRT3847_43845C.1
ccacgcgtgcgaagacaccgaagggggggcccatttatacatacatcttaatgtaatttgtgaatgtgaaattgatcattgaagagattttattagtgcgcaccatacgtgaaccaaccagcatcacacaaaataaaggttttgcagattttgcagttcatgtgctgaaaaactggcaccacttgtgaaaggagactctgctcgctaacgctatctacctgaaatgaagccgtgatacattattctaaaccatggtcgttggaattagcctatacaaagcaattagctagatgttagaaatataatctgtaaccgtaattgaaaccaagattggaaattatgggcatgatcacagttttattgcgatctatcatatta

SEQ ID NO: 80652 - DNA, 439 bp, Glycine max
  Clone ID: PAT_MRT3847_43846C.1
gaagacataagtcatgaatttcaataaaatacatgaagtgatgccctatccttggggagggttagatgaatcatgaatacttccttacccaaataagccaagctatttcagtaacttgaacacaaagccaacacaactcaactaccctatcgttgcaccaaggctcgggaagaatatgtgatgattagaaaaacaaagtatgtttaattttgcaaaccttttgaggaaacttagaaatatagcctataattttttcccgcttcttgggaggctcttttgcgctcatagaatcaacatttgaccctacacttttctcagagccagaagaagattccactgaactctttttcttcacaagcaacccctcattcaaattcactgtgacttccccaatggaaatgtccacactctttataagtatacccacttccctgcatcc

SEQ ID NO: 80653 - DNA, 451 bp, Glycine max
  Clone ID: PAT_MRT3847_43847C.1
gcacaagctggtgcagtttggacagattcatgaaaaagttgttttgaaattttcacatgaggaatttcttacagcttggtcaactcacgtgcctcctgcatcaactgtgttggctgatgggtgtccatatttgtatgctatggtgcatgatagttcaatgtctacaataccacgtgattcagtcattggtgttgggttggcaaccatagacagtatgtgtgcatatgggctcaatcctggtatttcaggttctctttttttgggcaccattcctcagtctatttcacagcctactgcttggaatctattggatacagtgagaacaccattgagatttgatcctagcaagcgaagcgtctgtgacttttctattgaccttctcggtggaggaattctatggtactgggctggacattgtatcacactgcttcttatttgtccgattagtaac

SEQ ID NO: 80654 - DNA, 785 bp, Glycine max
  Clone ID: PAT_MRT3847_43848C.1
attttctttgttgaaggtgagaaacatgcatgacccacattcattttttattatcggcaatcatcttctatatatgattatacagagaggagaagatttatagctggggcgagagctaaagtacatggtcatggcaattgatctgtcaaggatctctgtccggccattcaaggcaagtgaagatgttgacgatgtattgttatggttgggagatgctagagtgactcagaacacacgattaaagacctgtgggtccaggtcagaggctttgacattcctgaaagatgagtgtgttcaccccttacgccggtcaatatgccttgatgatcgttccatagggattgtttgggtgcttccttattcgggtgatgaaaggtacaaagctgacttgggatatgccttagggttcaactgttggggcaatgggatagccactaaggcagtgaagattgttttgtcccaagtcttccatgatttccctcacttgagaaggttgcaagcttatacttatttgcgccacaaggcttcccagagggtgttggagaaggttgggttccatagggaggggatagccacagatttgtactttccggggaagagtgatgattgctatatttttagatttttgtcaacagatgaaattccttctgtgattgtttaattagtaattggtaataagtggacatgtttatctcttttgctgcatttggtacaactattgcaatataatttgttttttgagaaaaaaaaaattaaaaaaaaaaaaaaactgagactagttctcc

SEQ ID NO: 80655 - DNA, 252 bp, Glycine max
  Clone ID: PAT_MRT3847_43849C.1
aggaaaagttaggtttttccttacatttaatagtcaaccttgtgagaaattacggtaagccctgtagttaagaatgtgtttgtgatctgggaattggattagtttgtggcttcaatgcattatattgtgttaagagcagatgctggtgcctgttaagattgatcagatgtgacattgtgatacatgggttgactttgccaccctgctaactggggaagtatctggatgtggcttacgtggtgggagttttgt

SEQ ID NO: 80656 - DNA, 353 bp, Glycine max
  Clone ID: PAT_MRT3847_4384C.1
caaacctccgtaacggtgccaaaagaccaccaaaaggggaaaaaattcaaggttaaaaccaggttccaaccgattcttttccaaacaagaatccaaaccccctggtcaaaataaaagggtaaccctccgaaattaaaaatcccaaccttccgaattccttcccaaaataaattaaattgaagggaaaaaaacccattttaaatccaaccaaaaaaggggggaacccattttaaacccaaaaaaggcgaaaccggcaaatcccttcaaccgatttcaacaacagcaccttacctaattaccttaaccctttcaacgggcttggccctgctgaatccttttgatcaataaaacag

SEQ ID NO: 80657 - DNA, 321 bp, Glycine max
  Clone ID: PAT_MRT3847_43850C.1
tccgggcttcccgggtcgaaccacgcgtccgcccacgcgtccgcggacgcgtcggcggatgcgtcaatacggcagcaaggggcattgcaagtgggaacataagtctttacacccttcacctcacacacaagatatgtgtcacgctacgccagctcattcattatgttcatgcactgccatcacaatccgaatcattctctctctctctcgcgcttctcgctcgcacattcatttaggcattttctctgtcaaatcgcaatgcctaccatggcgatgcgtcttcctctggatcgcgttacccacatacttatctgggcaaaa

SEQ ID NO: 80658 - DNA, 210 bp, Glycine max
  Clone ID: PAT_MRT3847_43851C.1
ggggcctaccgttccgacgaagcgtccggaacgtggcccacaaaacaaaccatgcatcatcaaataatccaggtggcttcaaattctctgcaacggtatcaaccaaccttaatcaacggtatatatatatcgggtattattaaatttaatttcacgtaatgggcaactacatttcatgcactttggcgccttctttgacgaagaactcca

SEQ ID NO: 80659 - DNA, 287 bp, Glycine max
  unsure (1)..(287): unsure at all n locations
  Clone ID: PAT_MRT3847_43852C.1
cctcnnngagnngggtttaaaccaaangcaggcnngagcagcaaccngcgagggaanngannaaacaaaannnanagaanccaanacaaanagcancagancacaagncnnngancncnaanaggnaaaanananagagaaaaaanaagaacaaanaanaccngccaaagagggggaganccngangacnnaacagagaacaaaaannaacncancaaagnaaancagcaacannnganggcagcnccncaacagncacanngnagaacnncnngaaancagacagc

SEQ ID NO: 80660 - DNA, 399 bp, Glycine max
  Clone ID: PAT_MRT3847_43853C.1
caccttcctcttcgaccagccctctcgctcacttttcctctccctccacgcccgtcccttggataggcatttctcagctcggcatctctcggctcgccaccactccaggatccagctgctgacgctgcccgctgtcaccatgccttcgcaccagcctgccgccggcgaggcggctgttaagcccgagttcctctcgagccagccctccgctatggcgaagccctcggagcccaaccgcaaccccaagtacgacccgaccaagaagcacatcaccgaatatcccatgacccgccagaactggtacaagcacgtcaactggctcaacgtcttcttcatcggcggcatcccgctgatgggctgcatcgccgctttctggactcctctgacattcaagacgct

SEQ ID NO: 80661 - DNA, 889 bp, Glycine max
  Clone ID: PAT_MRT3847_43854C.1
tgcatcacacatccatcagaaacatacacaatattctctttcaaatggcgcagcaacaacaaaatcaccgagacgagttcgggaacgaccagagggcctatgatgtccgccaccgcgatctcgcggtggcggaaccagttcggaagccgaactgccatagaccccgtggcgaactacgcttacgggaacatagggagtggcgggtacggagcgccacccacaggagaaccgtatgctggccctaactatgcagcctcggggtttgaatacagtactgcttatggcactattggtgctgctcccgtgtaaggcgctccgactgaaggccatggaaccgctgatcgcggccgtggtgacggtgaaaggaacaagaatatggacatgaataggaacaggaacatgggtagggatcagaataagaagtgaagataattaagttctagtactttaatttatagtaacttatactactagtgctatatatatataaatgttgtttgttaggagaaattattagatgatcggtctttgagcatcacgtcattcatgatcatgctaaataattatgtcatatgattattgattgagatcatggatggatgataggttgatttcagaccacctaataatttagtttgtcaggtcttgttttattgtttgtcaagtgttgttttatgaggccggttggttcttagtttgtgtggttgaaaataaaatgcatgtgggggagtcatgcatgtgagagcaccctatagtatcgtagtggtataataacacgtttgtgagaaggaagtgtatctttgcttggaagtggtataatactgttgtgtcttttttgcttataaaaggggttcccatatgcaaacaaccaccaactgttggacatttg

SEQ ID NO: 80662 - DNA, 134 bp, Glycine max
  Clone ID: PAT_MRT3847_43855C.1
tgcacgcctgcctaagttcggtatatccgttagattctgcatccacagacaggtccaccgtagcttatccaggcgaagatatagcgtagtatcactaggcctcaatgcgctcgcccccaagagtgactgcacgc

SEQ ID NO: 80663 - DNA, 783 bp, Glycine max
  Clone ID: PAT_MRT3847_43856C.1
ggctgggaaagaatcttactctctcgatgaggggtcggttctgacttttccaatgaataccagagatcttcttcaaaaagaacttaacttctaccccggctaatttcatccaagtgggaaagaaagaactgttacagaaggaggacgttaatcattaaccgctgctagtgcttgagaataagctgcaatctaactcgagcaattcaatttctttttcatgtcaacatgtccgccttcaaaataaaatgaagtgaatctacgagcggtagggataatatagccaccagcagtagatagagagacaaggtttacgttagctaagctggcatcagtcaagggatttaccacaaaaagcactatgcaagctaggagggattcacctttttggcctaaggcatggggttagtcaccgttccttagtaactctctttgctttcttactgtcccgttgttgcaataaccggtgctttaggaagagtactcgtatcagcccttggcatattccatcccatctttaatctcctttccagtgcgccaagccaatctcctgtcattccagtcagtgagataagagaggtaagagaggactggaaatcgttattctattctctaggatgaggttatttgatatcctgagtatatgcactgtgtgtcaatacccaggaaggagatccgctacggataaagagccactcgaggtataagctgtgacaccccccccagctgagagagaaaaagcatgtcagtcaggaaataatgaaataagggtgtggttagattaag

SEQ ID NO: 80664 - DNA, 1195 bp, Glycine max
  Clone ID: PAT_MRT3847_43857C.1
gtttagtttcgaaccctttccttttccttccttctccgcctcaccaccctaacccaaccctctctctttctctctccaaaatctctctccctcccaccgttatttagggtttggcagatctcgatccgtcacaatggacgttcgcaagcgcggaaggcccgacgtcaaccttaacggcgccgttaagaagaccaagcaagaattggagtccttatcaagtggtgtaggaagcaaatcgaagccatgtaccaagtttttcagtactgctggctgcccatttggtgagggctgccacttcttacattatgttccaggtggttacaatgttgttgcccatatgatgaatttaaaacccgcggctcctccaccaagaaccgttgctgcaccaccacccatcccgaatggttctgctccatctgctgttaaaacccgcatatgtaacaaattcaatactgccgaaggatgcaaatttggtgacaagtgccattttgcccatggtgaatgggaacttggcaaacctattgctccatcaattgatgatcatcatcatcatcgtcctttgggacctccagcaggtggtcgtatggctggtcgaattgagcctcctcccgctatggctggtagctttggtgccatttctaccgccaagatcagtgtagaagcttccctggctggagctatcattgggaagggtggtgtgaactcgaagcagatctgtcgccaaacaggagccaaactttcaattcgagagcacgaatccgatccaaatcttagaaacattgaactcgagggaacttttgaacagattaaggaagcaagtaacatggtaaaagatttacttttgaccgtgtcaatgtctgccccaccaaaatccaccccaggtgttcctggtgcccctgccccccctggaagcaacttcaagaccaagctgtgtgagaattttgcaaaaggatcttgcacctttggagagagatgtcactttgcacatggagctgctgaattgcgcaagtcgggagtatgattttgtttttccatttgtattagccaggctattattattatcatcattattgttgttgaagctgtgcattgctacttaatggtactgaaattaattcttgatgttatagttttgcagtactaagttatttttcaaaactacttttttgcgattgcaaatactgttctttttctt

SEQ ID NO: 80665 - DNA, 207 bp, Glycine max
  Clone ID: PAT_MRT3847_43858C.1
agtatacaaggtgaacacatcttcttcctcttcaattctcttttctcatcctaattatcttttccttcacggtaactctcacaaccctctttcatctttgttatataccgggggtgtgatgttgatgtgtgtaaagtaaatatatgtgatctctttctctggaagatttttcagtgtgatatacataataatctcttaatctagaga

SEQ ID NO: 80666 - DNA, 725 bp, Glycine max
  Clone ID: PAT_MRT3847_43859C.1
ccacgcgtccgcttatcttacgacatctccagtgcttttggttgttagagcaaacaaggtaatttgacaaatacaagagccaccatactatgcaaatatgtaccataccacacatcccatgaaaagtgtggccaaatcatggacaatgatgatgccatcacctatgcagcatataccattaccatcttctctaatgaataatatttccactcacaattcaatcttgtgttgtgactttaactatgtgaatttgagcaaccaaagaggtacaaggcttttgtgttcagcaaggaggcaaattagataccaagatgatggggatgataaagatagtgatgaagagtatgggcacaatgaggagattgccaagttggagtcttatagtcaatcagcaaaaggagaagtactccttgtgcatgcacttgtggaccaggaggaagttgatgtgcttatcttcaaggggttctcttcatgcttgagctacagtacctcccctgacccaacaagaagcattcttccagctagggcagtgatagtgtccatagatagaatcaaaggaccttttaaccctgccaatattgagtatctacaaaagggtgtaacatgggaagaattcaagacaaatctcctctctaattaaggagcattctattttgttctcaatttttttttcaaacaaaaaaaattgtttgtttttgtttttattattattttactttttaatt

SEQ ID NO: 80667 - DNA, 580 bp, Glycine max
  Clone ID: PAT_MRT3847_4385C.1
gaagtgaaattgttttgggtgccttacttggggacaaaaccggggggttaaaaaccatagggaaaaaaaaggctggaccaaacctcacaaaaaagggcccccatattgggaagggaacaactttggggaccaaaaaacaggctccccctgttatcacccaggccaaacaaagggggggaacaagtggggggaacaaaaaacgggtccgggacccccttgggaataaaaaacccgggctttcccccaaatattttcaggcggaacccctgagagcacgttttattccccccaaggatcgcccctttgtttccacccctttgccagctatgttcaaaacagcaaaaacacagacgggggaaacccccaggtccccggccctggtcccaaacttgtttaccaccctaaaaaacaaaaggccaaagacaaaggggaaaacccaaggggggccaaaaaacaaagaaactgctttggcccaaattctaaaaccaaattttttgggtaaaaaaggggggggcacaggccccgccccaagagagaggggtgggacataaggaccagcccttaaaacagggggggggcc

SEQ ID NO: 80668 - DNA, 215 bp, Glycine max
  Clone ID: PAT_MRT3847_43860C.1
caaaaaaaagagggtaatagctaatacatgatcatacctctgacaggattgcctccaaaggtagcatcatttgcaaaatgcctgacacagacatttttacacgccctcacaccaaaatgcatttttgacctggaatatcacggataattgagtgactggtcgccttaggtttggtttgtgaaactgtaccaaccataacctatgcccttgttttt

SEQ ID NO: 80669 - DNA, 141 bp, Glycine max
  Clone ID: PAT_MRT3847_43861C.1
ccggttcggaattcccggggcgacccacgcgtccgctcacacgttcgaacaccacagtattgacaccataccgcggatatgatacagggaccgggtccaatactctggctgcgatcctcatccttacaccgacgctgattt

SEQ ID NO: 80670 - DNA, 303 bp, Glycine max
  Clone ID: PAT_MRT3847_43862C.1
ctgtctcttggctggtctcgtagggcgaaaaaggggatcattgaccggcgaacgggtgtaaacactcacgatgagtcacaaaactctcatgtctatccggtgccaggtacaggtttgttctgcaattgctggggctatacacctgacagcccaacctctacaactaccgaggaccctagcacaggcgcgacagggacatctcacgctatcagcaacggtagctttactactgctactaccacgactactacttcttcttggagagagagcagctacataaatagcaaggtctgagagacaaat

SEQ ID NO: 80671 - DNA, 299 bp, Glycine max
  Clone ID: PAT_MRT3847_43863C.1
attcaaacaacatattgaactatggtgttatctgcatcatgattattttcatcaaggtagtctggggagaggtaatccatgccaaggattacacactgggttcattggcttgtttcatgaacacgacagggttgtagatttgtagtatgctaatggatcatatattttttttacgactgtataataccaaaccattagtgatgctcagtccaaccaataccaacttataacttggtaatgccaacgctgatggtctgttcatcgtcattttccgattatcctttcgccatgtatccatt

SEQ ID NO: 80672 - DNA, 208 bp, Glycine max
  Clone ID: PAT_MRT3847_43864C.1
tgcgatagtaggaaaaccaactcaatctagggtatgggcaataacaaaaccaaactattcaaccccttcatacctaccggatacccctcaggtatgctcccaaatccaaccatcacagattctcaacactcccaggattaagattaattatcaaaccgctttcactaagaccatactacctacgtgcactgtcactgtaaacattatt

SEQ ID NO: 80673 - DNA, 394 bp, Glycine max
  Clone ID: PAT_MRT3847_43865C.1
ccacgcgtccgcatcttgctttgctattagtatgtgccactacatacatatcgacctgctctttgtttgaagtttcactttgactatgaatgctgcaaatgatgactaggaattgccctacgattcatcagcatatgaagcggctgactctctgactgagtacacgttggaaggaaattgggaaaaggttatcaaaatgtacaatgaagtagaaagtgagacacacgcctatggtcaacgagtccatggccactgaactgcacgtgggccgctgatgtgccgatcaaggtgaggctgaagagctcgcgaaggcaattattcggtacaggccacaagagctaagtgcgaaaatcaaggctctataaatggacaccgaccacggggagacccctct

SEQ ID NO: 80674 - DNA, 405 bp, Glycine max
  Clone ID: PAT_MRT3847_43866C.1
acaggcggcctttcctctggtttggggaggggcgcgatcttttatattagttggtttccttgttgcctgttttttgctacctggttcgttggaaacgacaaaaaaaagtaaggtaattatagaactttgtctatataacacatgctggcagaaggggcgttttgaccccaccaaattaacaagggtttagaagagagttgtccaaggttttctttggagcttttttttttaaaaagccccctttttcctaaagtgcatcaggaagggtttaaagcataccttaccacctttaccttgaacaaatcctaaaaaactacgccggggttttacaacccaaaaggaaaaaattaaattttttttttgggggggaagggggggtttatcaaaagggttttttgccaatgg

SEQ ID NO: 80675 - DNA, 417 bp, Glycine max
  Clone ID: PAT_MRT3847_43867C.1
gacaaacaacgaagcttagcttttatagatcattgcaaaagccaaatacgaaagattagtaactcctatacattattcaactgaaacaatttaacccaaatccaagctagcctgggaaattctaatgtattatggacatctatatattattggggctcaacttcgccgcccttgagcaaggaagcttattccttttacacagtatggtgtgtatttatataaaagaaaacatggatcactacctaaagattgaattaattgtttttgcgtgcagaactttcttttgtcaacattgaatgctagcttccatcgtacactctttggatccggatcttatgtagtgagccatctgtcgatttggcaagttcgtacaggactttccattcaaccaggccatcaatccttactttgaaaatt

SEQ ID NO: 80676 - DNA, 495 bp, Glycine max
  Clone ID: PAT_MRT3847_43868C.1
cttgcacaacaatttccacctttttttataaaagaaacttcaatgttcaaatgtctgaaactattagttcataaatttcaaaccccacccaatccggaaaccaaaaatttcccaattgtccatttcccctccaatgcatcttcttccctccaaatcaccatttccaaagctccttctccttattcttcttcgccttcttcttccaatctgaaccctacccaacaccatcaccaacaagaacaccaccttcttctataacactaccatgaattctctcttttcgccggaaaaccttcctccaccaccgggaatcccatgtgttgtttgtctcttgatgtttcgaataggaaggaaaatgtggccattcggctttttaacgacattgatcgtaactatgaccctctgcagtatgagtatcttgtgaagacaaattttccgcagtttgtctttcatcagagtgggagggggacgggttgtgagtgtgtggatgggtgt

SEQ ID NO: 80677 - DNA, 460 bp, Glycine max
  Clone ID: PAT_MRT3847_43869C.1
tttggatgaaaacattgcctatctgatgactgcacgcatcgggaagagtgttcttacacacatgactgacttcaactgaagcaccctcgcttggcgttacactgatcatgatgatcacaggaggaggctctacctatgactcgcctccaaaacacgtatgaatacgtggaaccgagctgctcatttgcaccaatctctctataatacttcagagctatattaatagccatcctaggtagaatcatattgattctgcgaccctcaacaaaagagatggggctaatatcctgcttagccatttatgactctaccaatctcgcataggtcttacacaaacttcacaagatgcctacgccaaacaggagagagagcattgcttctataatggccctaagttgccctgcctcctgtgatgcataactgtcactactcagttgctcattattactccagtccatct

SEQ ID NO: 80678 - DNA, 293 bp, Glycine max
  Clone ID: PAT_MRT3847_4386C.1
aatgggtggcgtggggaagactacgcttgcccaacatgtatacaatgaccctaggatagagggtaaatttgatatcaaagcttgggtttgtgtttcggatgattttgatgttttgacagtaacaagagcaattcttgaggcggtcattgactcaactgataatagtagaggcctagaaatggttcatcgacggttgaaagaaaatttgataggcaagagatttcttctcgttttggatgacgtttggaatgaaaaacgagaaaagtgggaagctgtgctaactccgctaaatt

SEQ ID NO: 80679 - DNA, 1043 bp, Glycine max
  Clone ID: PAT_MRT3847_43870C.1
cgcgccgggttcccgggtcgacccacgcgtccggtgaatccacgcaaaacgcgaatgtgaacttccttctgtcaagaccatcattaagggtttcttgtttcgttaagaaaggtggtgatgctcgagtaagagtaagtaatcgcgatggaaggaaaacgaaggcggtggtttgttgccaattgatgcatagccacaaggaggagtcggatgagagaaagagaaggctacaggtggtgcctgtgcctgtgcagaaggcagattttgtgaggacattgttgattgacaactatgacagttacacttataatatattccaggaactatctattattaatggcgtgcctcctgtggtgatccaaaatgatgattggacatgggaagaactttgccattacttatacaaagaaaatgcttttgataatattgtaatatcacctggacccggttctccagcatgcccggaagatataggcatttgtcttcagctgttgcttaagtgctgggatattcctattctgggtgtttgcctaggacaccaggcattaggttatgtgcatggagctcaagttgtccatgcatctgaaccaatccatggtcgtttgagtgaagttgagcacaacggctgccagctttttcgtgatataccttctggtaaaaattatggattcaaggtggttcgatatcattcactggttatagattctgaatcacttcctgcagagctcattccaatagcatggacctcttccactagcacacttccatttattgggtccaaagattttggcaagtccaatactcatgaagctcagccagatcaaagcatttccattgatcctcttttagctaaagtaggaaatggaagttcaaaccattttgattatggaaaaactagaagtgcaagagttcttatgggaatcaggcattctacaagaccacactatggtgtgcacgtgtcaagtgcataagtgatctgcttataatatttcccttgggcttatatttatttattaagttggtaaatatgttcaactcaacaattt

SEQ ID NO: 80680 - DNA, 454 bp, Glycine max
  Clone ID: PAT_MRT3847_43871C.1
gaagtagataggagtgagaatgtaggaatggagtgggatagtgtggtgttggggagggaagagagggatgaagcagtagttggaagtggagaagttgatgctccatctttactggaggagtctgttttggatagtagagctcagaaagaagtggggactgaggttagcaatgttgaagatcctagtgtggtggatgttgacgttgagtgcacaaatgcaccagatgccgaggcctcagatcacgaggtgaataatgctttacgatgcctgttagtaggagagaatgtacaagttagttcagatacatggcatggagtttataaggatttaacaatatgagaagaattaaacacgaatgttgctgatgctaaaaaatgtggtacgcctaatgagatataaagtgaagctggaggtcaaccagaagcagaaagtacttaaacaacgaaccacactt

SEQ ID NO: 80681 - DNA, 389 bp, Glycine max
  Clone ID: PAT_MRT3847_43872C.1
atccagctaaagatatttcactcactggtcacactaccaacagagcattctggacatggcatcatctgtctcttacgtgcttctacttcccgatctgatgattgtcgcctttgctggggagttaaactgatactttggacatcacatgtggagatttgacggaccaatatactaaaccacggactagttacgctctctttcagtggaaataccatcttgcccaggttttcagacaagaaacgattaaccctgtgggaagattgacatgccgctcaagcatgtccctggaaacactgctggcaccgtccctgccgatgaactcactccaaaaggatcaacttgggatcatttagactatgaacttcttggagttctgagtggtgatctat

SEQ ID NO: 80682 - DNA, 134 bp, Glycine max
  Clone ID: PAT_MRT3847_43873C.1
gagagtggtggactgtgcaaaatagcgtcgtggtcgtgatttttttcatactaagtgcatcttgaacccagtgacgtcccccatccatgggttgtacgcaccgacgcggtaatggttcatccgcttctgcttcg

SEQ ID NO: 80683 - DNA, 716 bp, Glycine max
  Clone ID: PAT_MRT3847_43874C.1
aaaaaaataataataaataaaaactgagttatccaaaaatggctcatttctagaaataatttatacaatttatttacaaaccattttctaagcctcgtgattgatttaccacgggtaataatccaggtgaaaattacacaaaaccttgtgtaacgctcagaattactctgaagataacccaccattctcacaatgactttgtctctactgagtcagtgagtcgtcatactatgacttattgaaccatgtcctgtgcaagttggcaccagcctctgggaacaaaacggtcacttgttgaaacaaaaattattcctttgattgctgtctatcatggtagacaaggcgtaacggatgtggcccatctgcataataatgctatagtacatacagatgagtaaaagcagcttcacttcagatacatagcgagaaccctgtaagcaacttgaaaaaagagaatgtttctttcatgaaagcttctgaggctcattttttaaaatacattgtctcctcgatactcctaattacaacactcagactgtcaccgctttccaatgctttaacagcagctcggtgtgcagctctatgccacttgagcaaattataagattgcaaaactgcccatcttgcttgattggacatctgctcaatgcaagaatgtcaaggtttaaattttagcatcagagataaaatataaaccatcaaaccagatgcatcag

SEQ ID NO: 80684 - DNA, 492 bp, Glycine max
  unsure (1)..(492): unsure at all n locations
  Clone ID: PAT_MRT3847_43875C.1
ttagcactactaatcatagtcatttgaccattatatccttcttccttttccttatccctaaacccttctcccttcctctctctcactttccccttcctctctcataacatacccaaccattctcccttcctttctcatttctccacatcttttattctttctctctcccttaaaccacctaacttggtaatatttttttacacaatagaatgatgattttgttgtgttaaccaacaccaaaaccatgattatgtatttttttttttaaaacacaacagaatcatgattttattgtgtgtcgaatttgatacacaacagatcatgtttttgttttgcaagtatacaacatgaaatgtgtttctattgcaaaaattggagtggcaaaaaagtagcacaatggaaacacattntgttgtataactatcattgtacaacggaaatatgtttccattttgcaaataggggtgaaaaaaattaacaacgaaattatag

SEQ ID NO: 80685 - DNA, 363 bp, Glycine max
  Clone ID: PAT_MRT3847_43876C.1
agcgagaccacttgatcaatctctgataatcatgactttagacatcacatccgcctttcgcactcaaggtgtggtgcttacaaagacccaacacatgtctaaaccctacgatgatgcatttgcaaatgctcattacagtacaaagagtgcccctcaaagagcatcgacttcttatgacagcattcaaaatccatttgaatacacccgacttgtgcctatagctacttcatcactgtaccatcgtgatatcgcaacacatattgcatcatccattagagacatacaatgatcacactgtgccaattgattagcatgcgcttgatgcaaataggcatgtaaatatgcactacaatgttctaattg

SEQ ID NO: 80686 - DNA, 258 bp, Glycine max
  Clone ID: PAT_MRT3847_43877C.1
gctggctgacaggaatgttgtatttgttggttgagcagactgatgcttcaacaagtgacatttcggaagtattttgtcgcttgcctcttccatttatcagtgaggagtttaagattgacttcacttggaagacatggacaataagatggagcagccatcaccatatgtacacataagacgcaatatatacttagtaaagaagaaacgtagtgatgcggatgatggtgcagggtgcaccagttgcagttctacttctac

SEQ ID NO: 80687 - DNA, 431 bp, Glycine max
  Clone ID: PAT_MRT3847_43878C.1
aaaaaaaatttctcgtcttcaaaccgggtttagttttgggggggccccaaaaacctcttgacaaaacaaaaatccaaatttaaatttgcaacaagggggtttttaaattttaaaacaaaacggaaaattaatttttggaaaaaaaacgggaattttaaaaaaacaaaaaggctttatgagccaaatcaacccccaactacttgaggggcttcctcacccaaggtttcatggggggggctgcccacctgggccccaacattttaaaagaaacccccaagaacccccatcagttttccaaaaacaaactttggagctttaaggatcttaactttacaaaggaacacattttggaaaggaaaaaggctaaagggtgccttctaaatcccctttccaatcatttgggggaaaaacttgcccaccaattttttaaa

SEQ ID NO: 80688 - DNA, 563 bp, Glycine max
  Clone ID: PAT_MRT3847_43879C.1
ccacgcgtccgaagatagtaagtggtgtgtcctatcggatgtaaacaggaaagcttgaagcaattgcgtgtgatgctcatcatatgaggacctgatcaggccaataggaccaatgaagagatgtgcgcctcttaacgtgtacaaagcgaagggactcttactgaaaaccatgaacatcctgtacaaagaaatcaactccatatggcaagactctattttcaccatatatagctatattcaatggccttattatcacatgaaggacctcctcaaagtaggactgtattgctccaaaactaactatctattactgcacctattactttaatagaagctactactacactgacacctgtttgtttatgatcgctcttatgaagatgcatgcagatctactaacacttattaaagggaaaccttgaaatccgtcaaatcaattaggagtataaagtgtatgattagtgccatgtctaaaattatacccatcaatgacctgtagatattagatccgccattaaagactacttaagattgtaatggcctaatctaaaacatgatattga

SEQ ID NO: 80689 - DNA, 1624 bp, Glycine max
  Clone ID: PAT_MRT3847_4387C.1
aattcggctcgagcggctcgagcggctcgagcggctcgagtatattttctagatttttataataaagggtcctgcagttgcctccgggaacaagggggcttgtatcttccccaagggcttgaatctttgtccaatgaattgagatatcttcgttggacccattaccctttggaatctctgccttcaaagttttcagctgaaaatcttgttgaactgaacttgccctatagccgagtgaaaaaactttggcaagcagtgccagatcttgtgaatatgaggatccttatactccattcatccacacaactaaaggagctgcctgacctatcaaaggccacaaatcttaaagtaatggatctccgattttgtgtagggttaactagtgtacatccatcagttttctctctcaaaaagcttgagaaattgtatctaggtggttgcttttcccttagaagcctccgaagcaatatccatttggactctcttcgttatctctccctctatggctgcatgtcactgaagtatttctcagtgacctcaaagaatatggtaaggttgaatttagaactcactagtatcaaacaattgccttcatctattggacttcaaagcaagcttgaaaagctacgtctagcatacacttacattgagaacttaccaacaagtatcaagcatcttacaaagctgcgacatctagatgtaagacattgcagggagcttcgaactctaccggagcttcccccgtcacttgaaacactagatgctcgtggatgtgtatcattggagactgtaatgttcccttctactgctggagaacaactgaaggaaaataagaaaagggttgctttctggaactgcttgaaattggatgaacattctctcaaggctattgagctgaatgcacaaattaacatgatgaaatttgcacaccaacattgtccacatttggtgatgcccatcaaggtacctatgtgtacccgggaagcaaagttccagaatggttggtgcataagacaatacagcgtgattacgtgactattgatctctcttttgttcttgctccacactcctctgatcacttgggcttcatttttggcttcgttgttccggaagtccctaatgagggtttggttttggaatttaagataagcactggaggagaaggtgaaggtagcaatatcaatgtgtacttagacagaccacgtcatggtattaaatcggatcatgtgtatctaatgtatgaccaagcatgttctcgctacctaaatagtcgtgccaaacatcatccaaggttgaagattaaggttacagtagcatcgcgaacgcacacatccaagtatgtaccattgcagttaagagggtttggagtcagcacaatcaacactacacaatacctcagttttgttcgtaaagtagaattgggtgatggtattccaaatgccccaaatttgtttagatttttttggactttctgccttgctgttttttttgggacttctaggatttattttagaaggttagtagaataatgaaagaaatgttgtttttgcattaagaaataatagaatacaaagctacttgtgatgagaaggatatatattgacaggagctttttgacatggct

SEQ ID NO: 80690 - DNA, 105 bp, Glycine max
  Clone ID: PAT_MRT3847_43880C.1
cggtccaagattaattactcagaagattgctcagttcagttaatccccttcctggcgccaccgatttccaagttcattaccttggtccaacattgcccagggctt

SEQ ID NO: 80691 - DNA, 202 bp, Glycine max
  Clone ID: PAT_MRT3847_43881C.1
caccagaaactttaagcacatgtctaatagctcgcgggcggctcctgaagacaaggcgagtgtatggtcacgacctcattatgtatcacgtaataatctggaaatgcacgaagcttatcttggcaatctcgtaaatgtgttacgagaataggatgagcacagaccagacgaagctcgccaactgacaaggacagctctctct

SEQ ID NO: 80692 - DNA, 532 bp, Glycine max
  unsure (1)..(532): unsure at all n locations
  Clone ID: PAT_MRT3847_43882C.1
ataaggctaatatttggaaaaaccaaccatggggacctaagaaaatatttatctgggttttttgacaccacagtggggtaatgcttttttttattattatattcccccttgacgattcctgtctaaagatacgtatttcatgcaaaacttccttatgcaggaacaaaagagaaacacgcagttatgttgaaatttctgagtcacttggtgttgataaaccatcagatattttatttgtcactgatgtatatcaagaagccacagctgcaaaggcagcaggtatgaacatttttcctagtccataatctaatagttaaattttatccaccttctcttaaacttgttacattatcaataaacttagtccaatgtttggtatatcttaaagtaaactgaaccatacacttaaaaagtgtcgcatgattatagtaaccgattcatttcaattgcaatgaagactttataaatntaatcatntaatatttaaattntgattcactacaagtgtaaaattatgtatgctacatggaac

SEQ ID NO: 80693 - DNA, 749 bp, Glycine max
  unsure (1)..(749): unsure at all n locations
  Clone ID: PAT_MRT3847_43883C.1
cgaattcgacctcggtacccggggatcctctagagtcgacctgcagagagggttaagcaagaagaatatataaagaaatttgaggtctgttctattgtttccttataaatacttaatactatttggttaaccataattttgtttccttcaatagtgcatatttggtgtttttttcatgattttttgttatgcttatcataatttctcacattgtaaactctcctgctagaaaatatatatttggttaaccataatttctcacttttccttctataggcatcatacatactaaaaaggtagctttatgaattgatgcaccttcgtatgttatcatgcatttggaaagcctttgaaactctcctgctattagataatggatactaattcaagaaactggagatgggcaagaaaggcccaattgcttattgcttctactattttcttactacaagactctctggttaactctactaagacaagctctgtgagtgcaacttaagtttctagtcctgctttagtatacatgtaaatacatataaataatatgtgattgagcacaatcaattattaaatgaatgcttctaggtgcacattgtatacatgggagataagatatatcaaaatccataaactactaaaatgtatccccacanaatgttatcatcactcctaggaaggtatggccttgtgtccctcacacactttttccaatgggattgataattgattttactttaataggaatcaag

SEQ ID NO: 80694 - DNA, 403 bp, Glycine max
  Clone ID: PAT_MRT3847_43884C.1
aactaacattggggacttattattgtcttatctttgatgacaaactatacatgttacctcttaatttttcttctttttcttttcccaaacaaactcagaaacttttttttcttttttttaggaacaaaaaaattaccctttcccgggaaattttacaaaaaaaaagtttcccccgcctaataaaaagagagatccgacccctggaaaccccccgaacagcacctccaacaacggggaaaaaaagccgcacaccagggtgtggggccccccccccccaaaaaacccacccacaaaaaaactcataaacacgcccggggaaaaccaccaaaaaaaaaccggtaactttttgtgtgcccaattttcccaaaaaaaccccccttaaatgtttccttccccccccccg

SEQ ID NO: 80695 - DNA, 143 bp, Glycine max
  Clone ID: PAT_MRT3847_43885C.1
tgttaaacctgctggactgtctcgtggaagaggaattgcttgctttagaaatttagttgagattcaggactatgttaagggtaaagagtcacagtgggttgtgcagaaatatatggagaatccattaattgtccacaagagga

SEQ ID NO: 80696 - DNA, 473 bp, Glycine max
  Clone ID: PAT_MRT3847_43886C.1
ggagtacatgcatcataagatgaactcaagtgatcaaaacaaaactaagaaaaggtggtggattgggaagattgtgaagtgtggaaccttcaataaacaaatgagaggtgggaaacgaccagaaaatgagggttacaacatgcttaagcaccagaatatcaatggccttgcttccccgggtctcatgggaatgctctcacctctgcgcctcttctctccccgtcattcaccccgtcgttccttcggttgagaagtaacaaaaattattacaggatctataagaccattgtatatttagggtttcagttaatttttatgtgatatataattgatttttttaatttataaaaaagataattattagcaaaatttgattatgtatcatgtaaaaattgctcaaagactagtagtcttgattcatgtaagaatttctctcatgttgaatagtttggttagctgtgttgaattccaac

SEQ ID NO: 80697 - DNA, 342 bp, Glycine max
  unsure (1)..(342): unsure at all n locations
  Clone ID: PAT_MRT3847_43887C.1
accgccgcaagngcaacaccaagaagcgcagcgccaagccaccangnnncaacanncaacagaagccnnnnnccnnccacnncncncnnnnggaagggancnnccgcnaaccaggcagaaggagcagcaaggngagaagggagaggaccaagcanangggacaccnacacnagacagcanacngaaaagaanngggancanagcaccggngacangggagcngannnnnancaacganacaagggngacanaaaanaagcgaaagaanaagggcnggacncnnncagaancncnancncaaggncaagaanacncccaaagggcaagggagcagnnaacccc

SEQ ID NO: 80698 - DNA, 272 bp, Glycine max
  Clone ID: PAT_MRT3847_43888C.1
tttttataataaaggatatctaattttgaataaactcttttaacagtcataaatacatagtggaacttgtagccctaccagaagccatagatggatgttttagtattgaaatattgcagacattgcttccacaatcacgagaaagcaaaatccgtacatgtgggacactcttccaactctctcccattgctggtttggaaataccatcatctccacccaccacatgattcgttaccaatactgcaatattatgctcatgtgctaacttcttc

SEQ ID NO: 80699 - DNA, 787 bp, Glycine max
  Clone ID: PAT_MRT3847_43889C.1
ggaacagcccagaagagggtaccggtggaggggaagaaggacagagacagaccaaagcaaacaaacaaaacagccaccgccattccaattcgaagaagaatagtagttcaagagtttgttggcaaccatggcgatgcgcgacctcgtttctggtgccgcggcatgtggcgactcttcttcttcttcctcaaaccctctcgcttccctcgccaacgcccttattggctcttcgtccaaaactcaggagaggctgaaggagattcccacatccactcctactgaccctgcttcccaattttactccacagctctccccgccaatcagcttcccggctccgaattcgataagcctctattgaatttaaactcccaggcttcggagtttttgcataggttccgtggctccactggccttgaggagacatgggatgagatacagcgtgatggggcggctgcccaaatgcgccaactgccaccggggattcaacagccgccgttggatgggacaccgcagagagttctatcgaacattttgcattcatttcttgatagcagccgtggtggagtgccttttcatcctgctccacttccgatgttgggtttatctgaaggtgataaacaatgcatacgtgaccgcagcagcataatggccaggcatctctttgtggataaaagcgaagaatttattgatgcccaagtaaatgcacttctatgctctctagatattgacagcagtgtccgtggtaagggacctatgcctgaaagatttcgggagcttgaggattac

SEQ ID NO: 80700 - DNA, 524 bp, Glycine max
  unsure (1)..(524): unsure at all n locations
  Clone ID: PAT_MRT3847_4388C.1
ccactcttgcttttcacatcttcatcttcattcttctgccatcaataattttatttcattgtaaagcaagtttcgaccgattaattgtgccgtaatctcctttttatcattgtaaagtgagtttccaccgattaattgtgtcgtaatctcacttaatcaatgtaaaataaaagttcaaccgatcatttctgctataacctcggttaaccattgaaaaataaagttttaatcggtcatttactttgcaagtcctcttttaatgagtttgaaaataaccatgtgaaaccaaagctaaaatcaacacataatcaagcttttatccacaacaatcgcttgaatccgttcaaggtccaacgccttaatgatctcttttacttttatcggttaaaatgaacctttcaaaagtctaaaatcaaccctatgcgtaactttcttgctttcaaagaactacataagtatgagttcctcatccgaaangaggatacgttggagcaggagccccgttcttgtcgacttcaaaaggt

SEQ ID NO: 80701 - DNA, 266 bp, Glycine max
  Clone ID: PAT_MRT3847_43890C.1
atttgatataatgggtgagatatcatatgaaaaactccaaagcttcttcaatgtggtcactgttgcatcggtcacgtttgctcctacaccgcgttattaatttcggaccgggaccttcgatcgaacccactgagcatgttatcatgtcttatacagatttccgtgctaatggacaccgcctggttccgtgagaagttgatgtccggttacatgaacgcactacttacgagccggaagcttcattgctagagcctgtggcgctcaat

SEQ ID NO: 80702 - DNA, 496 bp, Glycine max
  Clone ID: PAT_MRT3847_43891C.1
aaaaaaaaaacccaccccgttattaacagggccagggaacaatttcagggtaaaacaaaggcccatttttttctcaaataaaaaccatcaccacaaattaaggccccccacaacttattcaggccaaattttaaaacagcaattcatatcacagttttgagggggacggaacccccccccacgggtaaaaaaaaatggcctgggccacttgcttcacactaaaaaagttttggagcccccattttcctagttaacaaccaaaaccactacgttaaacccccccccagggagcttaaaaaaaccttggttgaccacaatttatccaaacaatcccagcctgaaaaccctttgataggcccccccattttttaaaattttttgacattacagaaaaccctaagccggggggggggccattggctaaaaaaaaagctttttcttgggaacggaaggtttccacacaaagcacagggccaaaaactttttctttccaaat

SEQ ID NO: 80703 - DNA, 314 bp, Glycine max
  Clone ID: PAT_MRT3847_43892C.1
tcggaaagggcagatgtcggatgttattatcattcacaccacagagcgaaactacaaactcaggacgagaatgttcttttgagaatgcaacccgagctctacccatccacttttgcagatggggatttttcacgtaactggaggggtcatatacatagtttggagaacaggactatctgtgtgccacgcccaggaaagacaaaccatggtaagtagcacagttcaccactgtcttgatgtaatggaggttgacaatagtatataactcacactatgctctgtgttaacggtcagtgcaagaacacataaagcgt

SEQ ID NO: 80704 - DNA, 602 bp, Glycine max
  Clone ID: PAT_MRT3847_43893C.1
tttaaaggcacgaccggcgccataaggaatccagttgacattggtaatgtctttccagactttcaactgcaggcacgtggttttccctcatcataatcttcgacaacaatagacgaagcaatagaaggaaaatgctcatagattcaacactacacatattttgaaaacaaaaaaaaaatcaaaacaataatcaacataaaatacataacggaaataaaaaattaaattcaattataattacccgtaaaagtgtgatatatcctgcaagttgcctagtgttgctcttagacgcatcatccaaattgtcatacatatagactagggcaacaactccctatgcgtagcttccactctgagtgaggtcatgagaggcatccaagtataccacatgcacatatgtgaaactcttgttagcaaagagaatgcaacctaccaaatgcaacaaatatgctcgagctgctacagtccactatgatgcatcacatttgctatgataaatgtctcgcagccacgatagatgaacatatgccccatggcattgtactggcttggctctcgcttcaactccactaactttaagcaattcaactaacagcggcatg

SEQ ID NO: 80705 - DNA, 299 bp, Glycine max
  Clone ID: PAT_MRT3847_43894C.1
gcaaaaaaatgggaacagataggcctaaaatacattcttaaaaaaaaatccccgccccaattatccaaattccttttttttgttcccgggggggggaggaaactaaaaagcgggggtttttcctctttttccccttgggggaaccatttttcagggggggcaagacctgtttgaatgggaataagattttttgtccaccgggaaatgaaaaatgttgttttttgaaccccctttgttggggcagcattttgtttttaaacaccctttattgctggcaaaagggggcaaataaggggggg

SEQ ID NO: 80706 - DNA, 1549 bp, Glycine max
  unsure (1)..(1549): unsure at all n locations
  Clone ID: PAT_MRT3847_43895C.1
cggggcgcggggttcttgtttaatttgacaagatttttatcttacgcgaaagaggggattgtttacgctttcagtagaatcaatgtagaccttagagattggatatatgataggaattttcgcgaaattgatgagactttgtttcgacctgtgattgaggctttactaacctatagcaaacatcactgttgaaagccaggttttgtaccatacaccaaagtcttcattttctaactgggatgataagcatggaagccacatatttagaaccgaggatcttcctttctttgtgaattcaaatgagtggcacttggatacttctgttgcagctggaggaaggtcaaaagtattgcaactcgtggtgtatatatcttctctgccagttactatgcatgtcctcctggctgctttacgagaatggaaaaggtacaagcaagaaaaaacgcagtacttggcatcgaaggccaaagtaaatccccgaagctgtatttgagcagtgatgacaagatgaagcaactttgctggtggttggggcctagcgtttggtagaagctttttgaagttctcatggggcagctgcggcaaccttttggactgaagtcggataacctttatgttggtaagtcaggtgcatccattcttctaggcagggcaaagagttttcacagaatgggagttggatgttttgtcgacggaagcatatatgcttgaatcttcaagcatgtgcttctacgcttggattaccttatatattagtaccgactttttcaagaatcttaatactaatcgatgaagtgtaacaatcgagtttctttctgctggctgcaaaagctgctcaaagtaatgcatctattggaatatatgatgcttcagctgtatcatcaagacaatcaagatctctggcagaggatgcctttttttcatccatcaattatgtccataagctattattcgtttgagcattgttttgccatctattcgccattttttctgccagttactatgcatgtcctcctagctgctttacgagaatggaaaaggtacaagcaagaaaaaaagaagtacttggcatcgaaggacaaagtaaaagtttcataaatctgttgagcagtgataacaagatgaagctagtttcctgggatttggggcctagcgtgtggtgaagcacttcaacttcaacccaagtaaagcctccttcctttctcttcccaagacctgctgcgttgtgaattctgttgaaaatgacaatgttgacacgatgcttacgtgacatgtgatataattggagcaaggcaatgttggcatggcggcttttggttgtaccatagttatgagtagattgagggaaaatgctctttactaaaaattcatacttgagttattgaaaaatctcattactaatctgtgaaatgtatcaatctagtatcttcgtgctactgtgatctaaaatcatgttgtgaatgaaagcgatgccattgactagatttcttattaaaaaaaaagatatttacgtccaaaaaaaaaaaaaaaggacggcaaagaaaaanaa

SEQ ID NO: 80707 - DNA, 959 bp, Glycine max
  Clone ID: PAT_MRT3847_43896C.1
tttttatacgaatccatttctttattttagacaaatattacagtcgcacattcccgaaccgataaagaatttccccggccataaacaaagaattcaataatggtattcctattgataatctaacctagaaaaataaataaatactaactggaacataaaataacaaactaaaaattcccttactacgttgttacctagtttgctacatgtataatacatacataatataatgtatatacgtagtattggagtctgctactgctaccctataaaattatggtaaagatatcttataacttgtttgtttgggccaatgaatgtggcctcgtgcaaggtcatgggcccaactaccctgtgaagaataatgctcaagttagaagagctggcacaaccgccacatagccatcgtgatactgacaatgccggcaatggcttgggattggaacacgtgtctgcacgtggcccacgacatttcactctgatcaaatgcaccttcatacaccattgtgctgttgttgttaagaaagggagaggttgaagaaccatcttgcccctgtgatgccttctgactgttgagaaaaatcaaaatgaaatgctcagaagcaattctatttgatattattttgcttctagacatttttatctttaattattatgatttattaaaacattttatttcaacttttaataataataataataataataataattgtatattttaaaataagttacattatgctaataacaaggtagtactataattattcgaagaagaaaacaaaaacagaactctgaacgtgtcataatgtgatttgtgcaacggtcacgaaatgcacagagcacagaactactttaataatgcattgctaacacgctaataataatggtgtgcaacgataactatcgacatgcgtgccagccagccaccccataccatttgcataatttaatatctc

SEQ ID NO: 80708 - DNA, 252 bp, Glycine max
  Clone ID: PAT_MRT3847_43897C.1
gttaaccaacaaagtaaacttcatttggaaattttttttttttttttactttttcagcaaagaaaaggcgacgcccgggaacacagaatgcccatccctaaaacacctgaaagagagttaagcgctccaatttgaaaggggaaaagaaaaagccaaaaaaaaaaaattgcccttggcataaccctcctctgggggtgattaatcacaagcctcaaaagaaagaaagatttccaccgaagcattttcaacaga

SEQ ID NO: 80709 - DNA, 1454 bp, Glycine max
  Clone ID: PAT_MRT3847_43898C.1
atattcctggttccaatcgaattctgttattcatgcatcataatttcaagcattccagatatggcgcaagaacaagagttcagaacaagcaccccacttccaaagtgtgatgcctatttcgaaaccatacaatccagaaagaagctaccgctgtcactgcaggagaccttgacagatgcatttgcaaagattcctgtttcttcttttcctgcagttcctagcggaaaagtaattgaaattctagcagacacacccgttggtgaagcagttaagattctatctgaaagcaacattttagcagctccagttaaagacccagatgcatctaatagttcagattggagaagtaggtatcttggcatcatagattattcagccatcattctctgggtgctggagggtgcagaacttgcacaagctgcactattggcaggtacagcaacagctgctggagttggtgcaggagctgctggtgctttgggagcactagcattgggactgacaggtcctgcagcaattgctgggctaaccactgctgcagcaggtgctgcactggcaggtggtgttgctgcagataaagtgatggctaaagatgcacctcaagctgctgataacctgggagaggacttctacaaaataatactggaagaagaacccttcaagtcaacaacggtgcgatcaataattaaatcataccgatgggcaccttttgttccagttgcaagaaacagtgctatgctgactgtcctgctgcttctctcaaagtataggctgaggaatgtgcctgtgatagaaccaggtagacctgacattgtaaatttcattactcaatcagcagttgtccaagggctcgagggatgcaaaggaagagattggtttgactgcattgctgaaaagtgtatatctgatctgggactctcgtttatgtctagccgtgaggttattagcatccagagcaatgaattgattcttgaagctttcaagcagatgaaggataatcgaattggtggtcttcctgtaatagaggggccaaagaagagaattgttggaaacttgagcatacgagacatcagacacttgcttctaaggccagagcttttcaccaattttaggaagttgactgtgatggatttcatgaagaaaattgtctcgtcatcccttcaaactggaaaagttacccaacccataacatgcaagcctgactcgacactacagggggtgatccatactcttgcttctcagtctattcacaggatttatgtggtagatggacatgatgaagtagttggagtcattacactaagagatgtgatctcttgttttgtcaccgaacctccttacaattttgacgattactatggatttgcggtgaaagagatgttgaaccagtgatttttatggaagtttaaataaaggaaacactccaaatgtaagaaactcttatgttatctgag

SEQ ID NO: 80710 - DNA, 235 bp, Glycine max
  Clone ID: PAT_MRT3847_43899C.1
cttcaatcttcattctccattttctttactaaaccccccacttctgcttccaatggcttccatcaacttcaaccccttcggtggaaactggttctcaaaaccccccaatcccctctctgtcccttccctccccaacaacctcaccgatgcaccctcctcccttcctcccaacttcgccgcgatctccctcccaaagcccttccgccgcagggcaagcccaagctcaagctcgaag

SEQ ID NO: 80711 - DNA, 565 bp, Glycine max
  unsure (1)..(565): unsure at all n locations
  Clone ID: PAT_MRT3847_4389C.1
ngtcgcangcacgcgtacgtnagctcggaattcggctcgaggcatggagtgctgtcggggccgcttggcgcgagtgtttccccctgcaaggtcacgatgtagcacgctggtttcccggccacatggccaagggactaaagaagatgcagagcagtctgaagttggtggattgtgttatcgaggttcatgacgcccggatcccattttcaggtcgaaaccctctgttccaagagctacttggtctgaagccccatttgcttgtcctgaacaaaatggacttggcagatcttacagagcagcagaaaattgtccagcacttagaagaaaaaggcctgagaaatgttatttttaccaactgtataaaggatgaaaacatcaagcagatcatcccaaaagtcacagaactgatcggatgcagctaccgctaccaccgggcagagaacccagaatactgcatcatggtggtcggtgtccccaatgtaggcaaatcctccctcatcaactccttgaggcggcagcacctcaagacaggaaaagctgccagagtgggtggtgagccaggaat

SEQ ID NO: 80712 - DNA, 320 bp, Glycine max
  unsure (1)..(320): unsure at all n locations
  Clone ID: PAT_MRT3847_438C.1
ttnnacatggccatggattaattgaatagatgagtgatatctgaagacaagtgcaagaacagcaaagttttagaaagaaaacggtaactaacacacaatggaactaaaaatgacaagcatgcatgagacaataatcaagcgaggttgtcttcggaggtgtttgaccaggagctgctgaggtacaagaacatagaggatgagttggtggcgatgctgcacgtgggactggcgtgcgtggcggcgcaggcggagaagaggccgtgcatgttggaggttgtgaagatgattgaggagatcagagtggaagagtctcctctggg

SEQ ID NO: 80713 - DNA, 189 bp, Glycine max
  Clone ID: PAT_MRT3847_43900C.1
ctgcacaagcgcgccgcgttatactgttttttttttttcaatggccaccatatctttccacaatgaagcttcacgcccctttagcctacctataccccaaaacactttactcccaaacgcgaccttactagccatcgttgtcatactgataataagcggaaccccgttatggaacccttgggggcaata

SEQ ID NO: 80714 - DNA, 290 bp, Glycine max
  Clone ID: PAT_MRT3847_43901C.1
gactaaacaaacaatgaaaggttggtggatttacactacaagagaaccgatacaaaattgattaaccttgccctcccgttatacatgtactgatgtttattcaaccatcactgttaggcataagcaacctaaaactacaaaggggggtgacaaaatcgaattgctcaaaaaaaggaagaaagaaaaccttacccctcctattacgaattaatcacctcccaacatcattatcctagacactctaccactctataagtgaaactactgagggttgaaaaaactgacattta

SEQ ID NO: 80715 - DNA, 675 bp, Glycine max
  unsure (1)..(675): unsure at all n locations
  Clone ID: PAT_MRT3847_43902C.1
tctttgggtttctttaccttttcccaggatgaaactttgatatgcacaatgactggccatagatctgtagtttccacacttgctgtatgcgatgaggttctttacagcggtagttgggatggtacagttcggnnnnggagtcttaatgaccacagtccactgacagttttgggggaagatccgcctgcagagatgaagtctatcttggctattactgtagataggcatttgcttgttgctgcacatgagaatggatgcataaaggtttcttacttttccataattttgagccttttgaagattaataatgaattttgtagcccacttgaaatgaaatatggacttgatcgagacaatcaactcctgccattattgtgtaacatctcttttatcatttgcttgtttaggtctggagaaacgatgtgttcatgaattccaaaacattgcataaaggggccatttttgctatgagtatgcagggaaaatgcctttatacaggaggttgggacaaaaatgttaatatacaggtagtttcgcgagctctggtgctccgggttggcaatgcctaggcatcctgcccttcctgtgctgttgcaacagcttattatgcagccaaggaaaactgtacgttggatatgctgacaagtctatcaaggtttatctgtaaacagtaag

SEQ ID NO: 80716 - DNA, 549 bp, Glycine max
  Clone ID: PAT_MRT3847_43903C.1
tagctgagcgagacgcaattgtgttgctcgggcatggaacaaaagacgtttgtggccctattaaaggtggccgagatatgtcgtcttccatgcgcaaaggttccaaaggacttagtcactgtaacatgcaagaccgtggaccgtaaggttgcaagcccgcactgactccgccatacccagatgatccataccctgattgcttgacggctttgtctggagctgactacagatgccatcgcgcttacaacaactcatcacagctgcgcttttcttgcacctgaccccactcgtgctacttcccttcctgcacagtgcaatctccctcccccaacataatgcgctcatcaattatgcttctcgtgaactattatctgtgctctcttggtgagatgcaatcttttttctgcagatagcatgacctattgagaaaacaggaagtcaacgtactctaattcccatatatcttttcatagagagctaagatggtgtcatctgtcttggccgtatacataaaaaaaacctctatgtatttaaccgtttcgtccaccg

SEQ ID NO: 80717 - DNA, 471 bp, Glycine max
  Clone ID: PAT_MRT3847_43904C.1
ggcgcggcgcggaagtgcccgggtctttctccacttcggccgggcttcatactctcctctatcctacgggcccacagggggtggtgtcttttccaactgcgggggtgcccctcctccgttgcatccattgtcacgagtgcaatccattaaaaatagaaaggcaaaaccccatcacagacctagaatgacatgcagtggaaaccagagcaatccaacaccaaaccctaattgccagggagaacctccacatattgtcggacataggaggagcgttctacttggcctaggagggctttgtggggcttgtactcctaacaacaacaaccctgttggccttgcagctcccatatctccttctgacctaaacacgggcggtccaccagacctacccgcaggggtgaaacccaccaattggtggcccccatcttccaaaatcacaggattcaagttttctcctctaaccaacccttg

SEQ ID NO: 80718 - DNA, 342 bp, Glycine max
  Clone ID: PAT_MRT3847_43905C.1
gtaaaaccattttgtttaaattggtgttttttttggggggaccggaggcggagaaaaaaaggagccccgggggcgcccccaacccaattaaataaccggccccttgggcgggcagaaaaaaaaagtcgccacccgaccaacggggccgggccccacaatgcccaatgcttaaataaccaaagaaaggggggcaaaggggggggctaaagaaccgtaaaaaaaggggggggaggaccaccgcggtttatatgaaatagggggggggggccccccccgccctcccatcaagaaggccaaaagggggggaaaaggccgctgacaacggagcctggggaggggggg

SEQ ID NO: 80719 - DNA, 479 bp, Glycine max
  Clone ID: PAT_MRT3847_43906C.1
ggaaggattaaacaatttttttatattaaaaacacaaagttactaattacatggttttaaaaatattttatacttttagataagtattgatattaattttttgatatcatctacgtgtcttcctcttcttttgatatgtacaatctgtctgagtgttaggccgcgagatgtttaatgcctcctgcatgatgttccaagcgtgaccatcttcagatcaagcatggattgaagtagttcagaaatcctctcaaaccgttcctacaaaaggaattaaggattagcataaaagagtgtacacatacacacacttaccgaacaagaatgaccagtatgggctctcagaggaaatgctgaggaaccacatctaatgtatcctgagaagagtgagatgtcatgaaaaggcctatgctctctatgaaccgtgtatggcatccacaagatatccttcgtttgcaacatatccagcgccggacgcgtgg

SEQ ID NO: 80720 - DNA, 831 bp, Glycine max
  Clone ID: PAT_MRT3847_43907C.1
atgttacgttttggtagctatctgatatcccgacagtaatacttaaaatatctggatattagttattactgatttctgataaggtccttgtattctaggacttgattagtaagtaacccgaggttctgaatatgctaagcacaccacagacaatggcagctaatcacagcacagtaaagaatctttgatttgaagaatcactcttgggaaataaagaatcttttcaagtttttcccttaattttcctgtagagatgggtgatgaaatattttgggtgcattttgcatttcatttttctatatcttttcgtttcctgttacccaatttccttctgtggttatcttttaagttttaattgtttcttaatataatagagaggaaaaggtgagctgcacttagtacacagcttattgtgaagcaattttacggaacacttgtcaaactgtctggtgaattatcttctctattatgataacacgtgttacattttttgggaagtggttgtccttacattctctctttctatgcagatgaagaggacagtgattgaactcgggcagattccacaataattattaggcgaattttttcacaattaattaggaggtgatgatgtataatgtaatgtcttgtaacgtatttgctctcttgctttattttctgttgttccaaatatataatgtggtaatggccaatactttttgctagttgcagaagtattaaaaaagtttcttccttggtccgttaatagtaacttctgctttgccccaaaaaaaaaaaaaaaaaaaaaaaaaaaaaagcaaaaaaaaaagaaaaaaaaaaaattaataa

SEQ ID NO: 80721 - DNA, 484 bp, Glycine max
  Clone ID: PAT_MRT3847_43908C.1
ctaaagcaaccaacctcaataaaggataattataatccgatacaaaaaaaaaaattgggaactttcatcctaagacacggggtagaaacttcaaaaccaaggcggagaaggctggtagccactatgcacaacacacatttcgagagggggggcgaagaaaaaaacgggccccagcatcaagacccctagaggcgacgaccaagaaactgaagagcacaagccaatacgattccaataccaggggcaacagcaagtgaaaggggacactagcaacctgataaacgccacgcaaagagcgggttgaatcatagaaggggacaatcccatcaagcaccatctgggggcagaggtacggcatcaggacgaccgtctaaaacctatttcagagccatgacaagggggtcactccccgagaaaaaaggagccactccgggcggtggggagcgccccctccaaccgggagcgagcaccccaaggattgaca

SEQ ID NO: 80722 - DNA, 989 bp, Glycine max
  Clone ID: PAT_MRT3847_43909C.1
gaatgtcgttttggtagattctcttataatctctgctgcgctaaattcgaaatataaattgtttttgtttttggtagaatttcattttggaatggaatttgcgtctttattttattcagtagccatatatgattagcaattaatttagagtgtgttttggttaatggctcaggttactgtgactgttctaaaatatgtagtgcctaatatgttattaggatttttatttgtttgttcagttggaaaatggtaagcagtaggtttttgtcagaatcgagaagctgtgggatcttatcttgattttgacttgtgtgatgtaagttgtttaaaattgtcattgcaagtattttgggatcttatcctgtagcttttttatttgttttgttgaaaaagtcatgggttttctccttgctgcaaatcggctgttgggttctttcattgccatcaacttgctcaagaattacttatgtgatgattggggtggtctttttgaggccatcactagttatggtcttggtgggtcttctatggctttgtttggaagagttggtggaggtatctatactaaggctgctgatgttggtgctgatcttgtcggaaaggttgaaagaaaaatccccgaagatgatccaagaaatccagctgtaagaaatataatcctgaaactaggcccccttatttggttgacccaaaaaagagaaggcagtatgacagtgctggatttgaggcccttgatgcggatagcatggacatggaaattgatttatctaatcttgggactgtgaacacaatgtttacagctttattcagcaaaatgggtgtccctatcaagactaccatttcagctaatgttcttgaagaagctctgaatggaacagttacaatcagaccccttccaattgttctactttgaacaagatgcaaatggaggctatggtttagcattgcaggaagatagtgagaagactggcaaggtgacatctgcagga

SEQ ID NO: 80723 - DNA, 285 bp, Glycine max
  Clone ID: PAT_MRT3847_4390C.1
gccacgcgtacatcaaccattgcatccctgttgatttgtccgacgcaccgagctatacaggaatgctgtgacttgtcatgacgagctctatgatcatagggaacgtcttgcagcagtggctactttctccggtgcaataatctaggggctctttgccaatggcattcttgaaaccggtggaatggctgctactgagcatggaggccacttgtttgacaacaagagcatatatggtagcgatagtattgagatttaccaatgctcctcacaatgctctaggagatg

SEQ ID NO: 80724 - DNA, 599 bp, Glycine max
  Clone ID: PAT_MRT3847_43910C.1
ctttttggttgagacgcattggttgcggtggttcattgacaagtggtggtggttggtgtggctcttaacgttggatgcaacatacgttgattttcttctacaacttcgatctagttttatacggatttgcattccgctacataaacttacagattgataatctttaagttttatataacttaaggattaacaatccatataattgttacgaattgacaatccgtatgtttcttacagattgacaatctgtaacaaccatacaaattgtcaatcggtaaggttcttacggattggtaattcgtattattgttacggattgtcaatccataagaaacatacgaattatcaatctctaagtttcttatggattatcgttaatccataagatttttttattttatttttaaaaaaatttgttttattgttttttaatgtaattagttttattatttaaaatatttttaaatacgtatagtttaataatttgtaccttttagtttatatagtttgaaagtggtatttattttaaataatttagaattttattttattttagtcatttattttaaaattgtttttttagtctttataattttatg

SEQ ID NO: 80725 - DNA, 932 bp, Glycine max
  Clone ID: PAT_MRT3847_43911C.1
gtggttgcccatctacccacatggcctctgtccatgctctgtgatcaccccctcccctcggagtgcgtgtgcttcaaccatggaccctagaatctccttctcctatgatttcgtggtttcccaacaagcaatcaagcatgaaaacatatacagagaagatcctgtctcttcggatttcgaattctctgtcaagaacaattctatgatatcagcagatgaagtcttctttcagggtatgttgttgcctctcaagagtgattgctccaataagaaggtgactttgagggatgagttgcttgtgaatgatgatcactatgaagaggagttaccaagattgccaaagagttcaagccggtggaaggagcgattaggcctcaggaaaggttcatctaagaaagataagaataagaacaatgaggggtttcagcagactagagttgctggtgaaaaagggtttagctcaggacaaggagacaagactgttagctaagacaacatgggaactgtttcatgaaggtgtggtgtaattgtaggagcaagtgaactctatagaagcaggattcatttctcaaggagaggggatggcatattctactaatatctatataaagacattaattgttaggattttgggcgccgacttccttttcaactgttaagttaaatttaacctaagttatgttccccacctttgtattctaaagacattacgtagtagcagtagtagtagtcccttcagcattttgatctttgtacaaaaatttgcagttgaagaacttccatgagtcttgagtatttttctttgtgtagtacatcaggtagtcgtggctcttattgtttgatatatagtgagttggtagttgttattagtccttgtaggttgtcaagcatcttcttcccttgtactactctctaagcattttcaattctca

SEQ ID NO: 80726 - DNA, 273 bp, Glycine max
  Clone ID: PAT_MRT3847_43912C.1
ccacacgcgtccgccaacccgtccttttatttttccgccaacgcgtccgaacaaggggaggggttatcattaggggcggcaccacctagtttaagttgaaatggcttttcaagggatggcatttggggccttaaaacctgcccctttaactgtggagaagtcctaatgggggggctatccctttttttaaaggaactttttttaattcaaagttggggccaggggcagtaatatcaagattttcaaactctttggaattaatggtggcatgtt

SEQ ID NO: 80727 - DNA, 919 bp, Glycine max
  unsure (1)..(919): unsure at all n locations
  Clone ID: PAT_MRT3847_43913C.1
taagcnncatgccgcctaatttctggaactatgcattgttacacgcagcatacttaataaattgcatccccactccctttctacaaaacacatcaccatatgaaagacttcatgggcatataccagacatatctcatctacgcatttttggatgtttatgttatgctagcactatcaaagccaatcgtaaaaaattggaacctagagctcatccttgtattttcattgggttcaaaccaaacacgaaaggctacatgctttatgatttacattcacataacatcatcacatcacgcaatgtagtgttctatgagaatcacgatgccatgtccttcaacacttcttctctcactgcaccaaaagattgaacctttttggcactgagaagatgcaagacacagatactccttatctgcctccagtagttgccatacggagcaaacgccacatctttggagccatagaagaagatatcaaccatcttacgatgtggtctgttggagaaaacgaggtcatgtgctttcataacctcatgagcagcctcagatgttgagacaacaagaactggcacttttccaaagtgaagtaacatcacagggccataggtttgagctaaggattggagggtgcggtgtgtgagtgtgccaagttggtggagatttcctattataggaagctttggtggagatggtggtgatgatgatactggtgaggtttctctggttgttgcagaattggaattattattccatttggataaaagtttgatcacagttcgcaaaacaaagaaggtgatgaaagtaataattggaaggaagaacaaagatgaagggttttcatgcagagaggtcgacattgattttcagttgtatgtagtgcaaagactgaggatgtgtgtggtgtcgttttccggacgcgt

SEQ ID NO: 80728 - DNA, 376 bp, Glycine max
  Clone ID: PAT_MRT3847_43914C.1
tgttgaacttttctaaaattaaagaaatccatccaactgataacccaaacgatcttgcctacacataatgaggcttgattacatatgacgccatgtgtgcaaacaaattaccacatcaatgataaatgagatggactgatttgtccttaaattctttacggactaatttgtcagcttggaatccaaaacctaattatcacaccagattcccctacctattctccgatctctagctgcatcatatagtgatcggagaataggtaggggaatctggtgtgatgcagctagagatgatttttggctacgctattgggctgctttgttttcttttcttgacacccatttcctctccagtgatctctcctttgtcgaaatt

SEQ ID NO: 80729 - DNA, 2679 bp, Glycine max
  Clone ID: PAT_MRT3847_43915C.1
gccacgctttctcccacacgtacggtcaatactccttcgtacactctacacaacaacaacaacaataacaacacaacgagtttgaggcaaggcttgggaatcatactcactaatactactattctaatgcaccccttttgaactttgataccctttcttctgaaatcttaatctcatagatgattggcgcagaatttacatgtactagggcatgaaaaccttcgagcttctttgttccgaggcggccatttccattgctccaacattgctgatcggagaattgaccgatgaatcagaatcaattggacttaagagctcatcattctggatcaacacaatcagaggagtcggctctggaccttgaaaggagctactatggtcatcctaacccctccagtccttcacccttgcaaccttttgcagaatggtctccacatgctgataaggcactgaacagtgaatatcatttattattctttggcctacaatgatctcttgtgagaaaatggttaagaaatttctagtatgaaaaagggccgggaggtgtttggtgtgatgtggatgttgtggagttctcctattatggtgcacctgcacaaactcctaaagaacaattatatacggagcttgctgatggcttaaggggaagtgattcatgtgttggctctggttctcaggttgcaagccaagagacatatggaaccttgggtgctattgtcagaagccgaacaggaaatcgagaagttggctttctaacaaatcgacatgtagctgttgatttagactatccaaaccagaagatgtttcacccattaccacccagccttggacctggtgtgtatcttggtgcagttgagagagcaacatcatttattactgatgatctttggtacggaatttttgcaggaacaaacccagaaacatttgtgcgagctgatggggcattcatcccatttgcagaagatttcaatatgaacaatgtaatcacaactgtaaaaggtgtaggggagatcagtgatgtgaacatcatagatttgcagtctccaatcaacagtctcattggaagacaagtggtcaaagttggaagaagttctggtttgactactgggactataatggcatatgctctagagtacaatgatgagaaagggatttgttttctcactgattttcttgttgttggtgagaaccagcagacatttgaccttgaaggtgacagtggaagtctcattctcttgactgggcaaaatggggagaagccacgccctgttggcattatctggggtgggacagctaatcggggtcgtttgaaactaaaagttggtcaaccccccgaaaattggacaagtggagttgatcttggccgacttcttgatctccttgaacttgatctcattacaacaaatgaagcactccaagctgcggtgctagagcaaaggaatggttctgctgctggaattgattctacagttggagaatcctctcccactgtgccaataaagaaaagcttgaagagagctttgagcctttttgcttgaatatcccacttgctcaagttgaagatgaaccctctcaaagagtcaacccatcaataaggcctgtgagtttcatataaaaagtgagattgaaatagctccaaatgtagaacaccagttcataccaagctatgcgggcaagtctccagcacgtcaaagctacctgaaagaagacatggagctgaaaagtttagccgaacttaggaatggccctgatgaagataattttgtttcgttgcatttaggagagccagaaatgaagagaagaaagatttcaaattcctcgttttgcatcaaagaattaaagtactagtaggtttaaatatgaagcatatatactgaatgaagcgactgtcacatttgcatggctgttctctatgctatagaaacgcaaggcctttagcatgtggtgcctagtatgggaggagcttcaaaagcaaaggataaacaaggttcacttctggatgatattcttattcttttttcttctttttcaaatcttgtttcggcaaagtgatgatattagtcacttgtgggttatataatattttatagaggacatttagctagcactgtgttgaatgatttataccacttttgtagactttgtattataagcactccctgaaggaggaacaactattgtaagttatcggaatgtgaaatatatccatgttaagcagcttctgtttaaaaaattctcatggctttgcgatcaagttcagatgcattcaccaacgatgtgttcctcagctttagaggctcagacacccgccttggtttttttggtaatctctacaaagctcttagtgacaggggaatccacactttcattgatcatgagaagcttaaaagaggagaggagataacaccaacacttgtgaacgcaattcaagagtccaagattaccatcattgtgcatttgtgctctctataaactatgcttcttcctcattttgcttagatgaacttgcaacctatccttgactgtgccaatgggaaaaaaggactgttggttttgccgggttttcataacatggatccttcagatgttcgacgctggaaaggcagttatggagaagcattggctaagcatgaggaaaggtatcaggttcaaccataacatggagaagttgctcgagcc

SEQ ID NO: 80730 - DNA, 372 bp, Glycine max
  Clone ID: PAT_MRT3847_43916C.1
actgttttcttttggtgtgtaatgtcttgaaccataaaaaataaaaaaaaaaaaaaaaaaaaaagaaatttgtaaaattaaaaaaagaaaaaaaaaaaaaaaaaaaaaaaaaaaaaaaaaaaaaaaaaaaaaaaaaaaaaataaaaaaaaaaaaaaaaaaaggccgccccttttaaaaaacccaatttaacatacccttccttccaactctaaaccttttttatagtgtcccctaaattaattaaaatgcccttctttataaaaacttctaaactggaaaaacccttgttttaccaaatttaaacccttaaaaaaaaatccccttttcccaaattgccttaataccaaaaaacccctaactaatcccctttt

SEQ ID NO: 80731 - DNA, 124 bp, Glycine max
  Clone ID: PAT_MRT3847_43917C.1
cggctcgatcgagaacggttctttgaaacaatcaaaagtgtttctcagctcgaagaatactgggaacggaaagatacccggaaagggtgggaaccgcttttggcaatccattgggcttggattt

SEQ ID NO: 80732 - DNA, 362 bp, Glycine max
  Clone ID: PAT_MRT3847_43918C.1
aagttttgaactgaacaacaacttgttcaatttcaatgggacatccatgacacaatttgctgtggcgtctttgcaagctgcagccatccatcaacttccaaatgctacctcatggttgtacctaaagggagttgattctggtaattgttcgcctgagcgtgtccccaatcacggtcttgctcaaatttctccccctcttcatagccatgttcatagtgagcttgatgtgtcacagcagggcaggaggcattacatgatctaggggagtccagggcctgtgagtcttctcactggtctctttgaagccccttctttgctatcagaaagtatgaggggaatctgtgcctatttgatcacctaac

SEQ ID NO: 80733 - DNA, 427 bp, Glycine max
  unsure (1)..(427): unsure at all n locations
  Clone ID: PAT_MRT3847_43919C.1
gttttgattaattgattcttttatttaaaagaatttgattaattattagagtgagatatcaattatcaattcataaacatgcttggcgttaataacaaccatgctgtgatgaagagaaaagggcagagcaaaaggggtcacaagaagaacgttaaagtcacatatatttcaagccccatgaaggtgaagactagtgcctcaaacttcagagcacttgtgcaagagcttacaagccaagcctccaatgttgctgaaatgttcgtggaagctgattattattatggtgtgcatgatgatgatggagttnacaagggcaatcaacactgcacgcccgacgagggatattttnnnnantctactaggggcgcacacgatgatgatannnanttgaattnangttcttcatggagctactaaccgaacatct

SEQ ID NO: 80734 - DNA, 354 bp, Glycine max
  Clone ID: PAT_MRT3847_4391C.1
cccacgcgttcgctcactctttctgctgcattacgctttaatggggcatcattggggtaagggctaatagcaccagtgggacgacgcttgaacactacgttttgcatgctgacatcaaccagctgttcaagctcatgataaacagcttgttcagctacaccgagattttcttgtgtgaaactatcaccaacgtttctgaggctttgaataaattcgatttgagagtttaaccgccaagagcatgttcgatgctaagacatagctattgattcgtattgtgccttacaaggacaacaagactctttgcggtattgacatcggcattgtaatgaccaaagcagattttgtgaacaa

SEQ ID NO: 80735 - DNA, 937 bp, Glycine max
  Clone ID: PAT_MRT3847_43920C.1
cccacgcgtccgcccacgcgtccgcccacgcgtccgaccaggtctaaggcggaaatatccatttcatgaatatgtatctgctgtacttctggtgattgggttgatcctattcacactagcagacgcacaaacatcacctaatttcagtgccattggtgttcttatgatatctggggctttgatcatggactcctttttgggaaatctgcaagaagcaatctttacaatgaaccctcagaccacacagatggaaatgcttttctgctctactgtggtgggattgcctttcttgattcctcccatgcttttcacaggagagttattcaaagcatggacatcatgctcacagcatctatatgtgtatggagtgttagtttttgaagcaatggccacatttattggccaagtctctgtgctgtcactcattgccatttttggagctgccaacacagccatgataacaacggcaagaaaggcagtgacattgctactatcatacctcatatttacaaaaccattgacagaacaacatgcaaccggactcctactcatagctatggggattacaatgaagatatttcttgatgacagatccaacaagaaggccttgaactcttctccaattgctagtattccaaaaccttctgaggacaaagaactgatggcgcaatcaggttatgcaggtgaacatgaagaaaggagaccgttggtttagcattgacagacatcagatacaatttaatttttatagtgcatgaaaaaaatcattccaatgtccaattagcatggtttataaatattttttttcaattgaaaactccttacaattaggccatacatttttttatataatcaaacatttttcaataagttcatttagaatgttaacctattataggttgttctgaaggggaatatacatatagagagtgtttgg

SEQ ID NO: 80736 - DNA, 463 bp, Glycine max
  unsure (1)..(463): unsure at all n locations
  Clone ID: PAT_MRT3847_43921C.1
ggttttgttttttttttttttttttttgttttttttcttttttttttaaaaanaaaaccaaaaaaaattttaaaaaattgtttgaactttgggttcctttttgctcatggaatgtggtagaattgccctaaatttgccattatttttggatgaatggggggggattgaataaccattaattcccctgatttgcctttgattggtctggggcccccttcaagcccttttgaaaaatatttgggttttagggggggttaaggggggcctaaaacccttaccccatttgtaccaaattggttttaaaaaaagggttttaaaggggttaaaaaatttttaaaaatccttcttaaagccaactgggaggaaagtgggcccccttttttgttgcctttttaatgaggattcatttggaaatggggcttaagctaaacaaaggaggggggaccaaggggtaaccaaaccc

SEQ ID NO: 80737 - DNA, 534 bp, Glycine max
  Clone ID: PAT_MRT3847_43922C.1
ctgcttgggggggggggggggaggatggaattggtggaacgattattatgaactactaaaggggagagagtgtagtaaaaatgtcatgtatttaaagggaatggtgtcaacctaataataaacgaacaaatgggtcataagaaatagacgggctagtaaagagtacatttgtagactaaacagaaaatatgttatgttatatgccataattgccacttcaaggttcactggatcgctctcgctagccaatctatagaccacaggagacacctcagtaactgaatttaatgcaagagtggcacttaacgttaccgcaaccaaaagtgggctagaggtcatggaggaagcgatagtgtgagacccaacgaaattcgtaagccttacaaacacacgctattaagaacccttaaaaacgtaggcaacaagcccacgaatagactgataatcctacgcagaagtatagagctacgttgctatatgatttgaagcaaccgtataggcgactggttatagacaccaagcggtaacgagctg

SEQ ID NO: 80738 - DNA, 239 bp, Glycine max
  Clone ID: PAT_MRT3847_43923C.1
tcgtccacgcgcctgatctaggatccctgtatctggcttttttaaaggctgtccatccgtcctcgcaacatggtaatagtcctcactacaagcacagacccacctcacagtcacttcactgtataccacccacaaacaggacaccggaacaagaggtaccctgaatagcggggaggctgcgcaaagcagcatccaaacagtgcttcggcagaaatagctacacacgaactgcataagcc

SEQ ID NO: 80739 - DNA, 691 bp, Glycine max
  Clone ID: PAT_MRT3847_43924C.1
caccatccgacaaaagaattacacattgtcccgcgtagatttcactgaccctttataaccgatacatcataataaagaaacattggaggacttacaagttaatgtttattcagtcacaaaagttaaacttaattagtatttaacaactggtcaagactctagcctattgatgagatcgaaagcgacaaggtgtggaactgatattgactatccatagtctatctttacatacgaaattacgaatggtcagaaatgctcttatcaaccaaaaagaagatgatttttgtttacgtgtggtgaacaagaaattgaagcacacaaaaaagaacaaatcgttctgattagaacaactgaacaaggaatcactccgttgatagaatctttgcttcaatattgatatatagtgatatataaatttaaaatcgacagaagtaataagtaatgcccagggcaatataacaaatgctaatgtgaagaatttgtgacatatggttgtagaataaatggagaaaatgtcacggttctccaaagaatatttatcaactagatcggagcattaaccaattttggctaattaacatgatctatatcaaccataaatccaaaatcatgaccaaaggaaattcatgaactgacagatattggtcaatctataagaatcggtattataaataaatcggacgcgtgggtc

SEQ ID NO: 80740 - DNA, 330 bp, Glycine max
  Clone ID: PAT_MRT3847_43925C.1
attgctcagaaacagatcaaaagattatcatttaaatggtgtctgctccagctattgagctttgtgtgcttccttgtttcggtagtcgccgcagttggttccattcgtggaattagcaagaatatcaaaaaatacaaacttttcatgtataaacaataggccattttgcgcattacttaccatctttcgtgtacgtgtacgtttaagataagtgaatataaacggacagaaaatgacttgtaaacccgttaaaattgagcagtgaattatacagatgtaacactgttcaactcattaataatgggttagaagttagatagtactcatgcg

SEQ ID NO: 80741 - DNA, 131 bp, Glycine max
  Clone ID: PAT_MRT3847_43926C.1
acactttcagattcaaaccctccatctctcatcacgcaaagcagcttctacattcccaacgctcttctctaggctttctcactaaatttaaaaccacctccggagcgaattctcggcggctggttcagaaa

SEQ ID NO: 80742 - DNA, 456 bp, Glycine max
  Clone ID: PAT_MRT3847_43927C.1
ccgtcactcgccgcatgcagcattttgcttcctcaaaattctcttcattctaacttccattttcgcaaagttaggaatcactattcctctccgcttcagttcctgtgatttccggtgaatcggagaattcggaactgtggtgtgattcttctgctgcctcttctcgcttttccgaaatgcttctcctcagccctgttactcccggtcaggtctcgttccttctcgggatcattccagtcgttgtggcatggatatattcggagatattggagtaccggaaaaactctgtctcgtccagagcgcaatcggacatcaacttagttgaaatgggcagtgatgttgttaaagatgaagacagagcagttttattggagggaggagctttacagtcaggatccccaaaggcacggagcttaactggctcaccatcgattatccgaatccttttgatggatg

SEQ ID NO: 80743 - DNA, 217 bp, Glycine max
  Clone ID: PAT_MRT3847_43928C.1
ctgcttcaacctggcggaagaagaagacgccgtagccatgatgaagtactccatacagctcgacaatcgcatcaagtcctgcaagcgtaaggcgctgaccttatagtgcatttcaagaacactagggagactgcctttgccatcaggaattgcccctggttaaagctaaagagacctggagattttggccacaaacagtcatccttccgacgcttct

SEQ ID NO: 80744 - DNA, 530 bp, Glycine max
  Clone ID: PAT_MRT3847_43929C.1
tcacttgacacaacaaaatatagattaaactgaaatatattaattaaacaaaataaataaataaaaacatctacaacaattaatttgagatgtagcaaaaataattatgattaagcaataattttacaaaagtatttaatttattattatacatatataactgaaaagaaataaaataataatttcacaataatatttaatttatttctgcaaagcaataaaataataatttcataacagtaattaatttatctctgcaaagcaataaaataataatttcacaacaatatttaatttattatatatatataacgaacatgtacgtacagtatgcggaattgcaatttcaatagaagggaatatatattgcattgggtactgtacgtgggaattgcatattcaacaaaaggaaatatatattgcatttgtaaaccccaacgtactgggaatttgaatcaaacatgagatatatatattgcatttcaacaaagtcacaacacgcgtgattgataaattttgattacaaacaa

SEQ ID NO: 80745 - DNA, 531 bp, Glycine max
  Clone ID: PAT_MRT3847_4392C.1
gtggaggagataagaaagcaagcagatgatgctacaacctataccatgtcaatgccatacagagttcaaagaatagaagagtttacaaagcaacttgaggcaggggatctaaaacttcgggtccgagtgcttgagtctgaaagagctgctcggaaagcaacgggtttacaaatggcaactatgtataccgtattaggaggaactctgctaaatcttggtatcactatgagcagccaaggcaacataactattgcgaatggatctttcattggtgcaggtatttttatgacactatttgtcagatccatgcaaagggtaaaaatgcttgataagtttgagaaaatgatataaatggttaccaacaaattcgattctttcaaacttatgtaaagttatcctcatcttcattttcttacttgtaatttgtaaatgttcaattttttaaattacacaagcatagcaaatttcacgaattttacagaaacatgattggatatgatgtcactacaatacaaggcatttcatggcttc

SEQ ID NO: 80746 - DNA, 249 bp, Glycine max
  Clone ID: PAT_MRT3847_43930C.1
gaagtcatacagaggttccgatgagtagtaaattctcgcactaaagagctttcatgagccacactgctcataattccacaagacagaaatgctcctagcgaatcaacttacatggagcgcttcaacctccatctgcactaacgactgggccatctacatacccatatccgttaaatactattacagttgcacatcctgaaattaggcaataccaacagaatcacgatcatgtaataatgaaactcccct

SEQ ID NO: 80747 - DNA, 247 bp, Glycine max
  Clone ID: PAT_MRT3847_43931C.1
ccactcgttcgtccacgcgtccgttaaaaaaaaaaaaaaaaaaaaaaaaaaaaaaaaaaaaaaaaaaattaaaaaggagaagggtggtaattaataaaaagtgggcggcctctttaatggttcaatattttctttcgcttgcattcaacagtaatatatattctttggggtgcccttttatttaattaaattgcggttggtttaaaaccgtccgtctggaattttctttggggttacccaatttaat

SEQ ID NO: 80748 - DNA, 128 bp, Glycine max
  Clone ID: PAT_MRT3847_43932C.1
tttcgaggtctcgtgggtgatatatgaatgaacgcgttgtgtggtcattacttggatgtttggattgtgaaatatctgtgcatcgtaagagaatatgtcttattatacctaatgagtcggagcaggtg

SEQ ID NO: 80749 - DNA, 760 bp, Glycine max
  unsure (1)..(760): unsure at all n locations
  Clone ID: PAT_MRT3847_43933C.1
cgaaaaacgaagagcgtccgtttgggtagtgaggttgaagacgatcttcatcgccttcgttatctttcttctcttctccatcagattgacgagcttgtcgtgcaagccattgaagtgaattacaacaacaacaaaaccataagcaaagagggcaaaacgcaaattgagtctttttctcgtgtcctttctgacatgctctcttctttggagccatgggttcccaaaattcaaaaagcccttaaccctcaaaacacagtttctgacgatgaaaccatagaatgtgacagtcctgaagagacaaccttgaatttagtgtctccttcaccccttgtgtcatggcgtgccaactgcactgttgaaagaggaagacaaatgttcatgcttacacctcttccattatcatccaaacaccaccaacctaaaccacacttccctcctcccaccacatcatcaaccactaccttcaaggacagtgttatggtgaaaccaaccccaattaagcagcaacttccaaacaaccaagacggatccatgcttcttatgatgactccgtgcttganaatgtcgcctnctagatcctgccttttgctcgaacccatatccgaaatctcacggttgggagatcgcaatgctcgcaagggcactccctatcctgttgggattcattgcagtgattcagaatcttccagtagtgacgattcttcgcgtgatctgtcgttgatgtatccggagcttcttgggatacacaagtcaggaattg

SEQ ID NO: 80750 - DNA, 319 bp, Glycine max
  Clone ID: PAT_MRT3847_43934C.1
ggctttgctggtggaaaaaaccactaatggaacaaagtacaaagctaaagacctttcccaggccgacttcagccacctcaagatcgagctggccgaagtctagatgcccggtcttatggcctgtcagaccgaattcgatatttcccatccctacaagggggcccgaatcaccgtcttcctacacatgaccatccagaccgcccttctcattgacacccttaccgcccttggtgccgaggtactcttgcgctactgtatcctttattccacagaagactcattcgcaacacgtaataaatcacaaagcgaagatatcttc

SEQ ID NO: 80751 - DNA, 446 bp, Glycine max
  Clone ID: PAT_MRT3847_43935C.1
ggagagagtagttcaggcttagcgcaacatgggcaccaatggatatggtactaacatgggcacccctaaacaaaatggtttagctgaaagattcaataggaccattttggagagagtgagatgtatgtttctaagtgcaggattacccaagattttttgggctgaggcagcaatgactgttgtatatctcatcaacaagtgtcctttaacaactctgaactttaaaacccccgaggagatttggtctggccatccaccgagtctaaaacagctaaaggtatttggttgtgttgcctatgctcacatcaggcaagacaaattggaacctagagctgtcaagtgcatttttctaagatatcctgaggaagtgaaagggtataagttgaggagtctggaagctggttttaaaagggggttaatgagttgtaatgttgccttcaatgaaa

SEQ ID NO: 80752 - DNA, 451 bp, Glycine max
  Clone ID: PAT_MRT3847_43936C.1
ggtccaaaaccttccggaacccccccgccggggttaatttttcatttaaaatcgtcttttccccgacttttatttttcttttttttataatatagtgccttatctgtactacaactggctctctcttggctgccaatttgatgtactacatgctgttgctttttgtttttcttacggtgttattctgtttctcttataaagtcttagggttagttttgctcaacctcaaagcttactgtggatggactggtttgtttgttgggtggtgtggcaaaagactggctttgaacagttttattaaaatttggatgttttgcctagacagttgtataaatggcgttattcgagttttttttagttttaaaaaaagtttgctcgtgtatttagtcttgaagtcatgtactttcggtgtattttacacatattttttgtgatttttatttatttttcc

SEQ ID NO: 80753 - DNA, 695 bp, Glycine max
  Clone ID: PAT_MRT3847_43937C.1
ccacgcgtccgcccacgcgtccgacggctgcgagaagacgacacgtcggtacggctgcgagaagaccaccgcgtcatacggctgcgagaagacgacagaaggggactcactcatacaatagagaccagcttttgcttctttgtgaacatggagatgaggaaatcatgtggcttcttcttcttgctcctcctccttgtctttgcttcccaggtggtggtgcagacggagggaagagtgtgtgagtcacaaagccacgggttccatggtttgtgtaatagagaccacaactgtgctttggtctgcaggaacgaaggtttctccggtggcaggtgcaaaggcttccgccgccgctgcttttgcaccaggatttgttgagatctcatcaaacactactcttgccatgcaaattaataaatcatagctaggccaaataaattgcatctactctttatccatttgggagctagctaccacaaccaactcatacttggtcattggattgcttccctttggcttctgcctttgcttatctctctacctctacgtcttgttcagggtttatgtttcgtaatgattaatgaatgctgtttaattaactagtaaaaaaaaaaaaaaaaaaaaaaaaaaaaaagcggccaacattccattatctgtcatttgcagggtttatttataataaaaaaatcattcaagat

SEQ ID NO: 80754 - DNA, 484 bp, Glycine max
  Clone ID: PAT_MRT3847_43938C.1
ttcggctcgatgccaccagaaaaccgatctcgttcgcctgaagaactacctaatttatttacactcccgccgacaccggcaccggcaccggcaccggaaattcatttaggcccgtgcttggtttgacctacatgatcgccgaatcagttgtcttgagattgcgggattgatttgtgtggttgcagtgatggaactcttgtttggtaccggaagaaaagaaggacaactttgatcatagagagaataaaagcatgggattaggtgtgattaagaaagtagcggtaatgatactactgataatgtttctcagctaccctgtagcatactcctcatcttcgtctgagactacgatgcacactaataattgggctgttttggtctgcacatctcgcttctggtttaattaccggcatatggccaataccctgtcattgtaaggacagttaagcggctaggaataccggatgagaggattatactcatg

SEQ ID NO: 80755 - DNA, 1873 bp, Glycine max
  Clone ID: PAT_MRT3847_43939C.1
acgaggaagaaagcaaacatggggagtttttgcttccgagctagaaaggaaggagatgataacaaatacaagcccaatgatattatgacaacaggtgctgctgctgctgctccaaccaaaacttgtgatgaaactcatggtaccactacagatcataatcatggaactcatgataccacagctcatcatcatggtagtcatgataccacaggccatcatcttcatcatcataccgttggtcacgatggaggcgctcattttagtggtgatggcggtttctgaggttccattctgttttgtgttttaagttgatgtcaatttatattttgtttggtttgtattttttttctttcagtttaatgtttttaatagcgtttgccttttttctattatttaaatattcttgtaataattgaaatatggtatgattttttatttttagaattttattaaggaaataatacaaataataaattgcgccttaaaaaaaaaaaaaaaaatctcatctcagcacaagaaagaaagaaagaaacttcaatcctcacacaaacgaaaacaaatatctttcacttcttctgcatccgacgctagaagaggtgtcggaacaaacaagcttcgtttcgccggaacgatgaccggcggcggatcgacggggaggttgccaacatggaaggagagagaaaacaacaagaggagagagaggagacgaagagcgatcgccgctaagatctacaccggtcttcgagctcaggggaactacaagcttccgaagcactgtgacaacaacgaggtcctgaaagctctatgcgccgaagctggttggatcgtggaagaggatggcaccacttatcgaaagggatgcaagagacccagcgcgagtgagattggaggaacagtggcaaacataagcgcgtgttcttcgattcagccaagtccacaatcctcgtcatacccgagtcctgtaccatcctaccacgctagcccaacctcttcctcgttcccaagccccacgcgcattgacggaaaccacccttcttcctttctcatcccattcatccgcaacataacttccatccccgccaacctccctcctctcaggatatccaacagcgcccccgtcaccccacctctctcctctcctcgtagctctaagcgcaaggctgatttcgactccctccataacgcctccctccgccaccctctttttgccacctccgccccttccagcccctctcgccgccaccacctcgccacctccaccatcccggagtgcgatgagtccgacgcctccaccgttgactccgcctctgggcgctgggttagttttcaggttcagacgacgatggcggccgctcctccttctcccacctttaacctcatgaaacccgccatgcagcagatcgctgcccaggaaggcatgctgtggggttctgttgcggagcgagtcagaggaggctccgattttgacttcgagaatggcagagtcaaaccctgggagggtgagagaatacacgaggttggaatggatgatttggagcttactctaggagttggaaaggcttgatttgttgcaatcccttgcttggatctgctactctactactaccctcagggcaattggttgttatgcttaatttctctatatttttcccttttatgtgtacagtttccttttcatatagcagtggttaggtgttacattacattacttggaatttgacttcattgtaatgccttgttaattgttggaaaggttgcatttgaagcaatctttgtgcaagtgtttttgagacttcacagcggccacgtaaaccccgccgtcaccttcggcgccttcgtgggcggcaacatcaccttactccgcggcattcgg

SEQ ID NO: 80756 - DNA, 398 bp, Glycine max
  unsure (1)..(398): unsure at all n locations
  Clone ID: PAT_MRT3847_4393C.1
wntcnantngcntagtaactcggaatcggctcgagcttcntctcttgcggctatgnntttancgcanttcntctagatttnaagnagatgngtaannaaaaggttgcacattnagtattcgnggtncattnggcncntntccgactcctagggtaaatcncattaanccacctgttncaacctggntgtgtnacnaaggncttgnnnagngccagtntggagccaaggnnnttngtttnnatntgtcnggcanggtttgttgtgntagaanggntcatgtctgtgcntgnnaggaatctggatccccaagngannggntacnctttgncaaagggtantttgncnctggntctntgtcgccaggngtanccanaancttgttaaaaggtggncttntc

SEQ ID NO: 80757 - DNA, 1355 bp, Glycine max
  Clone ID: PAT_MRT3847_43940C.1
caacatttctatttcctcttcttcatcacttgaatccaccaagtccttctcctcacacacataaaaacaaatatcctccacttcttctacccccagcagtagaacaagaggtgccggagcaagtttcgtcacgccggaacgatgaccggcggcggatccacggggaggttgccgacgtggaaggagagagagaacaacaagaggagagagagaagacgaagagcgattgcagctaagatctacactggccttcgagcccaggggaactacaagcttccaaagcactgcgacaacaacgaggtcctgaaagctctctgcgccgaagctggctggatcgtggaagaagatggcacaacttatcgaaagggatgtaagagacccacgagtgagattggaggaacaccactgaacttaagcgcgtgttcttccattcaggcaagtccacaatcctcgtcatacccgagtcctgtaccatcctaccatgctagcccaacctcttcctcgttcccaagccccacgcgcattgacggaaaccacccttcttcctttctcatcccattcatccgcaacataacttccatccccgccaacctccctcctctcaggatatccaacagcgcccccgtcaccccacctctttcttctccccgaagctcaaagcgcaaggcggatttcgactccctccgccaccctctttttgccacctccgccccgtccagccccacgcgccgccaccacgttgccacctccaccatcccggagtgcgacgagtccgacgcctccaccgtggactccgcctcgggccgctgggttagtttccaggttcagacgacgatggtggctgcggcggcggctgctcctccttcgcctacctttaacctcatgaagcccgcgatgcagcagatcgctgcccaggaaggcatgcagtggggttctgttgccgagagaggcagaggaggctccgattttgacttcgagaatggcagagtgaaaccctgggagggtgagagaatacacgaggttggaatggatgatttggagcttactctaggagttggaaaggcttgatttgatgatgctattgaaatcatcccttgcttggatctgctactaccctcagggcaattggttcttgttatgcttaatttctctatatttttccttttatgtgtacagtttttcatttatatagcagttgttaggtgttacattacttggaatttgacttcattgtaatgccttgttaattgttggaaaggttgcatttgaagcaatctttgtgcaagtgttttgagactcttcaatcttgacttactaagaccaggggaaacgaggtcatattcttaattattctt

SEQ ID NO: 80758 - DNA, 319 bp, Glycine max
  Clone ID: PAT_MRT3847_43941C.1
ctccaccttgtgacccaagtgggggcttcagagtgatgtaacagcgttccggcttgctgggtgggactgcggctgttatctgcgggcctgcccgctccaagttgggagttgagcctcgagtctagagcgaacgcccaagtttcggggctcctatacttgatgccacatcgtgtaggctggattaacagagcaccgaactaccttggctcccaacataggaaggataacaggttgctgtgcccacagtccacaatggccttgtgagcccatttgcttggaccatcactcttttttacaaaaataaatcatacatttgtct

SEQ ID NO: 80759 - DNA, 419 bp, Glycine max
  unsure (1)..(419): unsure at all n locations
  Clone ID: PAT_MRT3847_43942C.1
aggaaaagccggcgcgacccacgcatccnaccactccctccctttcttataacaattatccactcataacacaccatcgtgaccttggaggaactaaaccgtgacatggcaaccacaaacatctcaacctgtcacatccaatacgtcatcaattccattattcgcctacacaacagaaattttttacactctaacatttacatgaacagacgacacccatacatccaatatacgacatacatgtcactcatacaacttacgaattctatcttaccaaccaaacctgaaaacttatacttccttttctcagcagcagaactcatcatatctgcctaggaaaactttgatacataatccacactcaacacatcatactcttcaccaaaatataccatataccatacatcaaatgccttttt

SEQ ID NO: 80760 - DNA, 428 bp, Glycine max
  Clone ID: PAT_MRT3847_43943C.1
tcatgttcagttcttgctttactccattattctttcttgcgcttttgtccttttctccatttggtgtcgttccactatatgcttcccttgaccttgaactttattcttctgcaggctttgcatccattcatacacggccgacatgagatttattacggtatcagagctgtatcattgcctctccgctgcgcactatcgatcaacctgttcgttcatagccgtcgccatgctctgtcatgagacaccgattctggtcaacacctaccttcggacaatccttattgatcttatagagctcactgtcatatttatcgaccacataaccctaaatgctttttctacaaagcacaaaacacaacatttgcccttatctttgatctctgggctattggagccgcgattcgtgaaaccaccactaccaatcaatt

SEQ ID NO: 80761 - DNA, 1682 bp, Glycine max
  Clone ID: PAT_MRT3847_43944C.1
gataaattgctcgagaaaaatttcaaaggagttgctacatctttagaaggttgtgtaaatggataccttcaatgtgttgcatatgagagggtcccttcaaaaattctggtttatcaagcctcagatgatccactttaccgtggctatagagcagcagttcaatcgtcaagtcaagaagagtctttgttagattttgcatcatgggagccacctcatggtccgtacaaaacattcaattatccttggagaagctatgttaaagtcagtggagctttgaggcattgtgctttcatggtcatggcaatgcatggatgcatactttcagaaatacaggcacccccagaaaagaggctggttttcagcattgaacttcagaaggttggcactgaaggagctaaagtattacgccaacttggaagcaaagtggaaaatatggaaaagctaagcaatgtagacatacttttgaaagtacatgaagcagctgagcaattgcagatgaagattgaccaacaatcattcctcctagtaaattcagagagctggcaggctgcaaaaaagcctaaagaagttgaaaatcatgacaatttgttgattgatctcaaagaccctcatgaacacaaacactcattgatctcttccctcagtgaaacaggagttgattcaagacttaacataaacatagagccttcagttcctgaattgcacatttctcaaagcttgttgtccaacaaaatatcatggccacgtctctcattttatggagataacatgttacttgagcaagattccaaagtatatgaaagtgcaagctctctgtctttggcaacatttgcttcccttttaatagagtttgttgcaaggcttcaaaatcttgtggatgaattccaagatctcagtgagaaggccaatttcaaagacccctttaacccaccagtgctgaagtaggggacaatgacattgtggcctcgcttcactggcgactatatttcaaaattggaggtatttagaatctatctaactaatgtataatagtctatccataatctataataacacaaatataaaagttatatcgcatttttcttagattttcatttttatttctggtaaattattattgtaacttgttttacttttctactttcccttcttcaatacctaaattgccaaaactagcagttacatttaatgatcatatcttaccctcacaggtagattttgcattatggaagccacctcatggtccatacaagacattcaattatccttggagaagctatgttaaagtcagcggagctttgaggcattgtgctttcatggtcatggcaatgcatggatgcattctttcggaaatacaggtaaagattgaaattttctgaggctctgtacataatgaacttttggtttataattggctctgcacactgtaaatttatccggcttcatctacttgatttgtggtctttcattaatcatttttttcataaagtgtaccttttcaatctctgtgtcatcttttgtatgtctatagtgaaaggaggaattgtaagatgatcaattgcatatatattgagggcttatcttgtatatattttttgtaaaagaatggggaaaatgctttttaaaaaaaaaaaaaaaaaaaaaaaaaaaacctgcggccgcccaccggatccaagcttagg

SEQ ID NO: 80762 - DNA, 922 bp, Glycine max
  Clone ID: PAT_MRT3847_43945C.1
catgtgcctactatcaggcatcaagaactgattaggctgctccctttcataggtaatgtagtcttgatccatatacataaaaccccaacatgcacgctttaacgccgcgtatgcaactccaggctgaacatgcgatgcatcttcgcagacaaacaacagatggatgcgttgttaaaaaatgctgaccgcgtgatcatcgcatgacggtattggaccactcgagtttgctgcgattggccgaaatgattgcccctcaacaccacgcccactatcgcgactcgcgcctctacatcactgcacaattctgcttctggcactgcgccagatagccctcgtcctcttcggtgcctaatgcgcttcccggcttgcgcactgcacctttgaccgtaatggtttgatctccttcagcatgccaccatcggagtgtttgctgtagcgcgccgttggtctcttcggatgtcatggtccacttgccgccgctgacctcgacgctcgtttgtcctgcaggaaagtggaactcgggaaggtacgttgtcgttggcgcatcttcgccggttgaacttggtgctgtgagggctaatttgaacgtgcacgtcttgaggtcgaaaacgaacgaagagatgtcgccatgaacagccacgggtgctggtcgaatgaatgcctcggctgctcgcagacccgcaacatcgccatccgtcctgctggagctcatttgctcgctgctgaccgtctgcttgagattcgatggcgtgacgctgagggtatccacagattgcgctctcgagaaggacggagaatttcgatctagcgaggcacgggattcttctggtgaaaatgaacctgctggaactggcttgtcgtctagcgagaagatggacaagtcctcgccaaaccactgatcgccccagtaatggctcgagcc

SEQ ID NO: 80763 - DNA, 391 bp, Glycine max
  Clone ID: PAT_MRT3847_43946C.1
gcaattagtttcgctacaacacctgctgatctagctaattgaacaccctttccgagtgtgatttctatgcaatgcaacgccgcgcctaagggcataatcgggagaagtacattgttttttttgatcaataaaaacctcttcccaaactgtacaagcttgttaccaaccatacaggatttctggaagtagatgaagagatatatagcagatggcgcttatatttctatttataaatggataggaattttgatgtagaaatgtggatatagatcatacaaggcaattccgaacgagaggggatataagaatccaagtgtggcccaaaacttatgttatgaggggaacatactacctaattccgcaactttatctggggtatggtcacccaggg

SEQ ID NO: 80764 - DNA, 287 bp, Glycine max
  Clone ID: PAT_MRT3847_43947C.1
ctcattgaacaacgaaagagaatcgggcatatgattatttagttcaaaggctttattcgtacattattacttttattaaccataacctgtaggaaaggcttgcttaattataaaaaagcctattataaaaagtgtggcgcgtattgtttaacacgccacggcggagataaaaaagagacggcctcttccttttttttttacgcgcacaaatttttttttggcaaaattgtgaaacctttggtgggattaactggcggggcgtttacatagaaaagagtgggaaaatt

SEQ ID NO: 80765 - DNA, 331 bp, Glycine max
  Clone ID: PAT_MRT3847_43948C.1
caaaaagtaaaaaaaaacctttctcctggatatcatatatagagacatatttgcccatacttttttaaaacagggatcgaggttgaggggggaatccttgaaaaagggcaaaattttaaaaagggggaccccccctttgaaagttccttctccttctcgcccacttgttaaaggggccttcccctataaaaaacccatctttaatttttataaaacaagctagcttttatcccctataaaccccaaaaggggggcctaaaagctagctagcccccccaaggaaacaaagacaaaagggggggtcctttggggggggcaattgaaaaagggg

SEQ ID NO: 80766 - DNA, 455 bp, Glycine max
  Clone ID: PAT_MRT3847_43949C.1
ccgtcgtgaattgcatcaatcattgagttcagctccctcgggggcatttgcgtcttttcacactcctacctttgcttcttgccgtagcgcaattctatttcactttgaatacataaaacacaacactggccaaccggttcaatttttagtttaaaatttaatattcattaaattgaaacccttttgaaatgacagaaagatccttcgttttgatgactattttcgactgaattatgagtgcaaaaacatgcagttgcacaacacaacgttgttttgctaattttgtccacgaaaaacgttacaccacatttttttaaacacattgtacttatgattcaaatttattataaatcgtgtaattttcttgtgggtcttgttttttacttgataaatgattttataattctttataaattttaaataataataataaaaagtgttacaaaaatgcatta

SEQ ID NO: 80767 - DNA, 749 bp, Glycine max
  Clone ID: PAT_MRT3847_4394C.1
cacgcgtccgctctctcggctttgatctttgaacatgagcaggaccggttcttagctactactgggtggcagacgccacccctccgctccgtaatagtaagactactatgtttatgctctccacgccgccaacaaccacattcttcgctacgcctagggttcttccgtttctctcttcatcaaaactttcttccgtttcttcttcttcttctactgcgtcgtcctcgccttgttgctcctcctcctcctccatcactcccaaggttaaatccaaagataacaacaattgctacctcgtctccgctaaacattctcccgctaacatgtccgcttcggtttcgtcacgcaccttcctcaacgctcggaacgaacaagagcttctagctggaatcaggaaagaagtagaagctggatctctgcctgctaatgttgctgcaggaatggaagaagtgtacaataactataaaaatgcagttatccgaagtggagatcccaaggcaaaggagattgtattgtcgaatatgattgctttattagatcgcgtatttttggatgtgacagatccttttgtctttcaaccacaccacaaagcaaagagagagccttttgactactacgtgtttggtcagaattatatccgtcctttagttgatttcaagtttggaaccatgccaattacttcagaagtagggctctctgttgtacttcctgaagtataatcctggggatgtagcaatctgtatactgaa

SEQ ID NO: 80768 - DNA, 370 bp, Glycine max
  Clone ID: PAT_MRT3847_43950C.1
ctgactcttttgttgcatggactatttttcttgggactagttcctttcttcttcttcttctctctctctctctgagcactgtttgtgtttcagccaccccccatttttcattcttccaaacacaacaacagaggcagagagaatcagagaaaggagtattaagtaagtgcctccttttagctcttcacttacatcactcttttttttctctttctttctgtgtcagatctctttggattaggatctttgtccttcttgcacttctctgattctttcatttttcattcctttctgccacagatctgatttctgcatgtgggttctctgcctcttcttggtttttgttctttggcttcagtttgctgttttt

SEQ ID NO: 80769 - DNA, 834 bp, Glycine max
  Clone ID: PAT_MRT3847_43951C.1
aattcttctctctttcccctgtaatctctatatattgtttacaattattggagagtcatggcaacaagggtgcttttgttgatggccctcaccctctatatcttccccattgctacagcaacattccatgtcaagggttccgtttattgtgatacctgccgtgctggattcgaaaccaatgccaccttttatattcgaggtgcaagggtcggaattcagtgcaaagagaggaagaccatgaaggtagctttctactctgagggtgtgacggactccacgggaacataccacattgaggttgaaaatgaccaccgtgacaatatttgcgaatgcttgcttgttaaaagccctatcaaatggtgtagcaccccagactctgggcgtgacaaatccagcatagtactaacccactaccaaaatggcatagtcaaccatcttcactatgcaaatgctatgggttacttgagggacgaacccttgcctgaatgccacaaactgcttaaatactacttggcagactcagatgtttgatcaataaggtagaagaacgacttgttctttgtttaaatcatgtgttaatttaacgacggatctatttctatggttaagtatttgttgacatcagagtggtactatgtattagttactagcttgttactacttagttttgcttcatatgtctgtttgtaattaagtcacttaattgtggcgtcgtaatgattgatgatgtttaagtctcttatttattttatgacatgaagagaaaaaaggtacagacatgctaaatgcatggttacgacacatggtaaagtcatgacatttatatatcgtata

SEQ ID NO: 80770 - DNA, 133 bp, Glycine max
  Clone ID: PAT_MRT3847_43952C.1
gggatacgtcgcagcatgcacagactgactataggttttagatcgcaagaactcttctatatgtactcacgatacttcgtactatgctcttatgctagctaagataatcgattagcactattgctgctacctg

SEQ ID NO: 80771 - DNA, 574 bp, Glycine max
  Clone ID: PAT_MRT3847_43953C.1
cttttttttttttttttttttgttttttttttttttttttttttttttttttttttttttttttttttttttttttttttggcccaaaaaaaaaagaaaaattttaaatggggccccagggggcctaaataaacaaagggggctttaaaaaaccacaacccaagggtcccattggaaaacaaagggagcctggggggaaaccaaaccctaaattacaggggaccagttttttgcccctaaacatgggccggggaaaaacaaaaacaaaaaccctgattaaaaattgggggcccaaagatgggacctgaggctaaaacccttttttaagggccgaacccccccccaaaaaaaaaaaaaggcctttccccgggtttttttgcccccaaagggttaacccaattttttaagctccgggaaaactaaacaggaccttccaaaaaaattaacccaaggggggttaatttacctgccaaccccaaaaaggggccccccattggggcccttgaaattttaaagggaaaccccagtttccataaaagggaggagggacttcttaagggccccaacctttggg

SEQ ID NO: 80772 - DNA, 177 bp, Glycine max
  Clone ID: PAT_MRT3847_43954C.1
ctaaatctatcctcatataataataataaaatgtatgtaatgtaatataaatttggctttaaatgtcacacacgaagacatgagggattgttcctgatttttgaagactgtgtttgttttgattgatctatgttgttgagtgtgtgtcagctcgtgcaaaaaagtttaagggagatg

SEQ ID NO: 80773 - DNA, 237 bp, Glycine max
  Clone ID: PAT_MRT3847_43955C.1
aaaagttgaagaagtcagtgaaagaggttaatgaagcagcaatgggagttgttttgggcatgcgtcgtggggtgtccaagagaagggttggcatcaaggtttttagggtcaaaatgtcttcacactcgatggttcttgttaccttaagatgttttatcccatggttgaacaaaagtaaggttatataaagattaaaaataatatatacagttctttaggtgttgtttagtatattgt

SEQ ID NO: 80774 - DNA, 159 bp, Glycine max
  Clone ID: PAT_MRT3847_43956C.1
ccgcgacgaagctcggaatgggctcgggagagaatggtccacatgactctagctgttagctgtgaccccctgtaccaacaccatgctgatggctggtatagctggaggactaacaaatacggcttgcactggcactacattttctaccataaagcctaa

SEQ ID NO: 80775 - DNA, 333 bp, Glycine max
  Clone ID: PAT_MRT3847_43957C.1
agcttttaggcagcaatttagctttagtaattagaatttagaaagctaattctctacactcacgataacaaagattaacatattaggctgagtaatgataaaaaaaaaaaaaaaaaaaaaaaaaaaaaaaaaaaaaaaaaaaaaaaaaaaaaaaaaaaatggggcggccaggagaataaagagctcctcagaacaggaaataaataacgatccggttccgggaagcggacaagctttcattatagggagtcgcataaaaatttggggaaatgatgggaaaagagattccctgtgtgaaatggggagggggtaaaattccacaaaacataaaag

SEQ ID NO: 80776 - DNA, 399 bp, Glycine max
  Clone ID: PAT_MRT3847_43958C.1
gccgacccacgaatccgaacaagcatcggcaacataggttcacatcacaactaggagttgtggttgctgatcattcgcttctcatcactgggacttgatacattcctctcacgcagctaccattcgtaatccacactcacattgataggatgcatcttccgggttctgaaggtgtgactccatcagtaatataaattgtagtaaggaaaagacgtgtctttgcagtttgaacaacattagattcgcaaacatatatggagatgattgatagctacctcgaggtcatgaagaactagtaatacaaggtgttctagcgtgcgtaaggcaggatctagtagagagaaacttacagagtaacgctagacaggtgtacgatgaacaacagaaacttggctgaca

SEQ ID NO: 80777 - DNA, 424 bp, Glycine max
  Clone ID: PAT_MRT3847_43959C.1
aatcaaataacaatacaatcttatttaattaatgtttgtacaaactttattcccatagaaacatgataaaggatcatttaattgataataaggactcgaaaagttttcagggttatcaaatgtgctctgacacaggcaacatcgtatcagcaccttcgcactaccatgtgcacgatatattagcccttgattataacgtgaaaagatggggaacaaagaaagtggataattacactaaacaagaatcctgataccctttttatcatattttgcagcgccttataagaacattgactagttagcagacggggagagaggagaacatgtactttccaatcattaacaagacttaggcccaataaattgcattcatgatcactcttgggtgctgattgactggagctctaaacaattgttttctgtg

SEQ ID NO: 80778 - DNA, 373 bp, Glycine max
  Clone ID: PAT_MRT3847_4395C.1
gctttagaattctatttcattttattgttgttgttgttgttgttgttgttgttattattattattattattattattattattattattattataactgttctttcttcaaattatgcgtttcacatattcagagtagttttagtgtttttcttaattgataagcaatgttattgtctttggaatctgaaactattaaaaaacgaatttcttatgtactccacatgtcaattaagaatttattcttgtgtgtaattttttttacaacattttttttactttagggtttatgttatgaatatctgatatctcaagtttttgtattttttcttagacaatgattttcttacattatttgtgagaagattatactg

SEQ ID NO: 80779 - DNA, 553 bp, Glycine max
  Clone ID: PAT_MRT3847_43960C.1
gcaattggtatgatacgtaggttataaattgttgatttccttttataattaatgggatacatctctttttttgttcttttggaaaattatatttagaaactcattaaaatgtggatatcttgatagagatagaaagggagaagataaataattgatatgatctaactcattaacaatatgacgtactaaaaagagataatagaaaaaaaaataaaagatctaaaaaaagagaagataaataattaatatgatgtgttaaaaacagataatagagagaaattgaggatctcaataaggtattgatattattaagatgtctaaatatatcagaattttttgactatatattttatctatttaataatattataagttgtaccattattacgttttatctgcatataaaataaattatttcattaagttatatataaaatataattctacattcttattttttatttaaacctttatcatcccttttcttctatacagctagctataagtatgctgttactaacaggtatgtcatcatcaattaatccatctccgg

SEQ ID NO: 80780 - DNA, 699 bp, Glycine max
  Clone ID: PAT_MRT3847_43961C.1
gttaaaaggaactttattgggtgttgggttcagatgaggtccatgaggatgtcgtcctccatgacgctgggctgcaggcccggctgggggaccgggcccctgggacccccgctcagcagcatctgacctggcagtggcgcccgctggggaagctgtgtgggccatgactgggcaggtggaggatgcaggagctgcggccccagctggggctgccccatgctctgatgtggtggcagcaatgtaggggcccctggaggctgtaggtggtgtagggaggcctggggcgggggcaccccagtctggggcggtgctgggttaaggagaaggctccgcagctggggggttggccccagggttctggggccgcaggatgggtccagaaggaggtgggccaggggctgctccaggaggaccttgaggtgcgcctgtgggggcctgggtagcaccttggggctggggctgccctgtagccgcagaagctcccacggcaccctgaggctgaggctgtggtgcacggagctgtagtagattctgcgggggcctcgcttgctcctccagaatggggcccaggactggaggtgcctgctgtgcccccatcccgcgctgttgctccagcttctgctgctggacctgcttgtgggtggtgatgacctggcggatgccattgacgaagccgctctggtcgtaggggatgaggcc

SEQ ID NO: 80781 - DNA, 110 bp, Glycine max
  Clone ID: PAT_MRT3847_43962C.1
ttgcatttccagcttttaacgttaaattgagtgcgccgaaacttgaaatgggttaaacggtgtgcctcagcttcgcatcattgaaattttgattgagacaataattagtt

SEQ ID NO: 80782 - DNA, 254 bp, Glycine max
  Clone ID: PAT_MRT3847_43963C.1
ccagcttagttgtcgaggggctccctttattacgcttggatagtttcgttttctctaagaatcataggtttactttagggggcggggcttaaattttctggcatcatactccagggtacaaacctacctacctaataataaggagcaattttcgtcttttgggtgtacttcatagaatttgtagggttagattaagactccggtcaccgaatggagttgttttataatgcggagccacaggattatttatacag

SEQ ID NO: 80783 - DNA, 160 bp, Glycine max
  Clone ID: PAT_MRT3847_43964C.1
caaccattaacgtttacgctctgatatgcctttctatgctcaagatctagccggagcgggggcagagcacgcgcacatcggacaggattgctgcttctgctccggcacgaatggcggcgtgggaaaccttacttatggagaaagaagtcccattttgaca

SEQ ID NO: 80784 - DNA, 1729 bp, Glycine max
  Clone ID: PAT_MRT3847_43965C.1
cttattgtctcatttcctgttcttaagccactaaatcaagttatggctcgagggttgaccaagatttcaaccatcaaaatgagagtcagaatatgaatcctgatgagcaaaaccgcttttatcctattgatgaatttgaggttcgtattatggagccagaaaagtctggtggcccttggcaaacaaaggcaacaatacctatgcaaagttctgaaaatgcccttactgtgaggatggttactttactgaatacaacctcaaaagaaaatgaaacacttttagccattggtactgcttatgtgcaaggagaggatgttgctgcaagaggacgtatcctattgttctctttggggaaaattactgataatccacaaactctggtttcagaggtgtactctaaggaattaaaaggtgctatatctgccttggcctcacttcaaggccatctattaatagcatctggtccaaaaattattctgcacaagtggaatggcactgagttgaatggtattgcattttttgacgcaccgccattacatgttgtgagcttaaacattgtaaagaacttcatccttattggcgatatccataaaagcatatactttcttagttggaaagagcagggtgctcaattgagcttattagccaaggattttggttctctcgattgttttgcgacggaatttttgattgatggaagtactcttagtctcatggtttcagatgataatagaaacatccagattttttactatgcaccaaagatgtctgagagttggaaaggacagaagcttctttcaagagctgaatttcatgttggtgcccatgtgactaaattcttaaggttgcaaatgctatccacttcggatagagctggttcagttccaggctcagataaaaccaatcgttttgccaaaacgtttggtaccttggatggaagtattggttgcattgcacctcttgatgaaatcacatttcgcagactgcagtctttgcagagaaaacttgttgatgctgtaccccatgttgctggcctgaaccccagagctttcagattatttcggtcaaatggaaaggcccatcggccaggccctgacagtatagttgattgcgagctgctatgccattatgaaatgcttccattggaggaacagcttgaaattgctaaccagattggaacaactcgatcacaaattctgtcaaatctaagcgatctgtctcttggaacaagcttcttgtgaacagtcatcttttgtagatcagggaacagtgctgcccatgtttcccaagctcttggcagttatttattttgatgcaatggcatcttattatcacaattaaatgctccactatgttgaaggcttgggtaactgatgagatcgtagcctaactctcttacggcccttggaaacagtgaatgcagacaaactatggatagtgatatctaaaattgattccaatgtatgtttcattggaagtaggggtgtctgtttaatgctctaatggacgaggtggatgtaacatgaattttgttcatctaaagaaacaagtaggaaacttaaccccactagaaagcccggcccggacattctttcttttctgtatgtcagcatcaagaagtttctgtaacttgtaattattattacttaatacttttgttcgctccataatatgatggtttagtttcaaatggtattaaaaaaaaaaaaaaaaaggagggaaggggcgc

SEQ ID NO: 80785 - DNA, 659 bp, Glycine max
  Clone ID: PAT_MRT3847_43966C.1
aaataataataattacaagttacagagaactctaaatgctgacatacagaaaagaatatccgggctttctagtggggttaagtttcctacttgtttcttttgatgaacaaaattcatgttacatccacctcgtccattaaggcattaaacagactcccctactcccaactcgactataggttgaaggaaatgaccacttgacctttggtggaccgaacatgaaacatatatcagggtctgactgcattcactgtttccaagggcagctagagagtaaggctacgatctaatcagttacccaagccttcaacttagtagagcatttaactgtgaatcaaaataaacagctgccaagagcttgggaaacatgggcagcactgttccatgatctacaaaagatgaatgttcacaagaagcttgttccaagagacagatcacttagatttgacagaatttgtgatcgagttgttccaacctggtgagcaatttcaagctgttcctccaatggaagcatttcataatggcatagcagctcacaatcaactatactgtcagggccaggccgatgggcctttccatttgaccgaaatagtctaaaagctctggggttcaagccagcgacatggggtacagcatcaacaagttttctctgtaaagac

SEQ ID NO: 80786 - DNA, 347 bp, Glycine max
  Clone ID: PAT_MRT3847_43967C.1
gtgagagcggtgtggtgcttagtgctcttaccaattaccaaaggcagctgataagggggatcttgaactccgcaacgagatcgattagcttcttcgacaacagcgcgagatttctgaaaggcttcaagatcctactggtcttaccagaggtgcctcgcctggtcctcctgctctccgcactaacggctttggacaacgaccccttattaatcctgcaaacaggaacgattctgatgatcaacctccttacagccatcatctaacatatagtcctcgatcaggttgataaaacttgtcttaggctctacacactattccatgacaagcttatgtaatgaccaatgttt

SEQ ID NO: 80787 - DNA, 330 bp, Glycine max
  Clone ID: PAT_MRT3847_43968C.1
ggcgaagaaaccactttcacctattcctccactccctaagtttacaccacttaatgcactccaaacttgtggcggagtttctgcacaggactttgtacattaccccaaatggtgcccacaaccaccttcttcctgtatgcttaggctgtatatattaatattgtataggtggatgactactcttgatgagactgcaaaacatgcacgcatattttctgccttctttattgtactgttcgtgtgaccaagtctatggagcaaccactatttgtttctaataaaaccttgaaaggatagcccatgacatgatcctgggtggagactttgaat

SEQ ID NO: 80788 - DNA, 247 bp, Glycine max
  Clone ID: PAT_MRT3847_43969C.1
caacatcaacatgaagtatttagattttatatcaggaaagggagggcagcaagcaaaccatgtctattcgaggcattaaaattattgtaaaaaatatatatttattcaacatgaagtttgagcttctgactattattattttcttgatccactctgttttccatgtgggatctgtagctattggtggtgaaatcatcctaattttttaacccagttgattaatgaagtttgtgttttaagatcaaaa

SEQ ID NO: 80789 - DNA, 466 bp, Glycine max
  Clone ID: PAT_MRT3847_4396C.1
cgcagaccagacacgacatcgaaatgtggtgttcatgctttgtaggaaattgttatgatcatcgatcttggatgcgagtattattatttttgcaccatcttgcctgtcagttagtgatgagtagaacatgtatacagtctatagacatgacagcttaggacttaacaaaataaataaattatattgcttattgctgttatatctatactacagttggggatggcaaaggagtcccaaccacctgaactccccccaactttactggggctagattcaggttcgggttttctctatttttaagagtcaggggatgctcatacccacccagctgttcaggaaaattacaaaaatgcctttatgcttgaacatgagaatctgtgtgctctttcactttgacgctcacaggttgtttacaaaacatacttatttttgaattttacacatcctatttggtaacccctttgag

SEQ ID NO: 80790 - DNA, 324 bp, Glycine max
  Clone ID: PAT_MRT3847_43970C.1
gttaaataacatatcacaggaggggatcaataactgcaattggacctgaataacacaacccgacaccaacctggccttgttacacatgcagcgtaataaaacggcaacttaggtgatacgaacaacatggggcacaccaatatacgagaacgcgcccatctttacgcgcaattttatagcaacatgccatgtcactgctgcggaggtcgccagatccttgcacaccctaatctcgaactatgctcttcggtactctgtcgaaacaaagctcgtttcccaaccctgatggtgctagctcaagaccgggaccaactcgcttaacgc

SEQ ID NO: 80791 - DNA, 404 bp, Glycine max
  Clone ID: PAT_MRT3847_43971C.1
gggggggccttaaccaaaaggggccttaattttttaaaaaaattttcaagccccaaaatttttttttcggggccccccaaaaaattttgaccaaaaaaaagggggtttaccccccgaatttttaccccccttttaaccaaaaaggcaattttccccccccatttccggggttcccttggacccttggaccttaaaaaaaaaaaaaggttccccccctttttccgaattctcccccggttcccctttttgggcccctaaaaactttgggttttaccccggggcccttaacctggggcccccaaatttcccttctaaaaaaacaatttaagggggccaaaaagttggcccagaaccctattttttccccctcatccaaaatttgggggcaggcctcccctttcctt

SEQ ID NO: 80792 - DNA, 261 bp, Glycine max
  Clone ID: PAT_MRT3847_43972C.1
tcggctcgagctcgtctccttgcggtagctttaccgcattcttctagatttaaagacactgggtaaggaaaagcgtcacatcagtactgtggtccttggccatgtcgactctgggaattccactaccactggtcacctgatttacaagcctggaggcattgacaagcgtgttattgagacgtttgagacagacgctgctgagatgtacaagaggtctttcgagtatgcctgggtgctggccccccttaaggctgagcgtga

SEQ ID NO: 80793 - DNA, 271 bp, Glycine max
  unsure (1)..(271): unsure at all n locations
  Clone ID: PAT_MRT3847_43973C.1
acanaaaaaaaaccaaaanaccaaaaatactacaaatttntttcagtntctccgccgccgcacaaccatccacctcctcccgttcggatctccggcggacctantatccctacnactantctactctatntanccggaanaanaaaaactatncccctcccccanaaaaaaccccaaagcggctcggttagggtttagttttgnaccatttcgtgtaatctaattntgcatcngtaaaaatctantttggaggcggcnagttggggcgnnt

SEQ ID NO: 80794 - DNA, 139 bp, Glycine max
  unsure (1)..(139): unsure at all n locations
  Clone ID: PAT_MRT3847_43974C.1
gttgtgtggtggggggtgggggtngncactntnntcaanggaaccaccctgagacagnccangatgatccaccctgactggctttattacatataacantccgcggggcgaccacccaactggcggcccgncngcatac

SEQ ID NO: 80795 - DNA, 1924 bp, Glycine max
  Clone ID: PAT_MRT3847_43975C.1
aattcggctcgagctttgtttgggctgcccaaccggtttataaacacgaggaagttttagaagaacaatggaaagagatgcttaatcttactaatcgtctatgctggaagttattgaaaaaagatgggtatgtcgcaatatggcagaaaccttctgacaatagctgctatctaaaccgtgaggcaggaactcaaccaccactgtgtgacccaagtgatgacctcgacaatgtttggtatgttaatctaaaatcatgcatctctcaattgcctgagaatggatatggagcaaatgttgctcgatggccggcacgcttgcatacaccacctgataggcttcaaagcataaaatttgatgctttcatacagaggctttttagggcagaatcaaaatactggaatgaaataatagcaagctatgttcgtgttttacactgggaagagagcagattaagaaatgttatggacatgcgagcaggttttggaggatttgcagcagcattgattaatcagaatcttgacagctgggttatgaatgtggttcctgttagtggcccaaacaccttgcctgttatatatgaccgtggattgattggagttatgcatgactggtgtgaggcatttgacacctacccaagaacctatgatttactgcatgctgcaaacccacacgcgtgggcgaggatccattggagggctatattgctatatggcggaaacctttggacaatagctgctaccttggtcgagacattgatgcgcatcctccattatgtgagtccaatgatgatcccgataatgtttggtatgttggtcttaaggcatgcatcactccattacctaataatggatatggagcaaatgttacagagtggcctttgcggcttcatcaaccaccagacaggctccatagcatccaattggatgccattatatccagagatgaactcttgagggctgacacaaaatattggtttgaaataatagaaagttatgttcgggctttccgttggcaggactacaacctgagaaatgtaatggacatgagggcaggatttggaggagttgctgctgcgctgcatgatctccagatcgactgttgggttatgaatgttgttcctgtcagtgggtttaataccttgcctgttatatatgaccgtgggctgataggagttatgcatgattggtgtgaaccatttgatacatacccaagaacatatgatctgctgcatgcagcaggtcttttctctgttgaaaaaaagaggtaaaagtgtaacatctcaaccattatgcttgagatggatcggatgctaagaccgggaggacgtgtatatatacgcgacaccacacttgttataggtgagcttcaagaaattgcaactgcattgggatggtcaactaccataaatgatgtaggagagggtccctattcaagctggaagatattaaggtctgataaacggttctgaattgctcaattgtgtctgtaacttatagaacaccatatattggctcatgcaaccggaacatggtactccaccagaaatctcattttgtgccagaaatgtggccaaaactaacccataaaaaattctgctatttgccagaaatggtagtcttaattacaatgttgaatccctactaacaggttttcttgtaaacactttaaagaacttgccttgtatcaatctctacagcattattgaattgctcaattgcgtcagtaacttatagaacaccatatatggtactcccaactgaaatctcattttgtgccagaaatgttggccaaaactaacccataatttgccagaaacggtagtcgtaattacaatgtttgatcccaactaacaggttttcctctaaaatcttttaagaacttgccttgtatatttcttacagaatttccagatttgtttagatga

SEQ ID NO: 80796 - DNA, 260 bp, Glycine max
  Clone ID: PAT_MRT3847_43976C.1
tggctccaaaaaatctctttctgtctcctcatctctctcattctccttgttacttgcactgctttttccttccaattccatggcttccataatagtgaaagaaatctcacccgtgaaggggattcaaatgtcacacccaaggtatacttcagctcaccaaaagagaaaacaacattgttggccatgcattttataacaaacccatcaaaatattagagaaaacaaattcttcagtgccccaaacaaaattttcctccttt

SEQ ID NO: 80797 - DNA, 328 bp, Glycine max
  Clone ID: PAT_MRT3847_43977C.1
gagagtggtggagtgtgcagacacagcgtcgcagtcgcaaccctattcagaagacccgcagcttcaagctagtgacagccatcagccatgggtcatatgcatagctgccgtaaaggtatatcctcgtctgcattgccccacatacggacacctcctaactagctcaagcatctcattcgcaaggatgtcaaaaatgaatatctgctagtttgcgaagaaatgtttgactccctctcaaattcgtctcattctcagacattcacacggtattgctcaggtcattatcgtcactggcatcataatccttcgcatcctcaaagctcaggta

SEQ ID NO: 80798 - DNA, 3401 bp, Glycine max
  Clone ID: PAT_MRT3847_43978C.1
tgctttctgttgagaagaaaagagcctgtaccacacacagtcggtacattcacttccattacaatttttcttatctccagaagaagttactgaatagcctttggcgtttcaaggacgcattttgactcttgccaaggaaacattcttagctccatgaattttgattgaatcacgaaattctcaatgaccggccattttctccggacacccctctcattcaagatcgctgctttcttcttcatcgcagtcaccttcttctacttcggtaagcactggtccgatggctaccagcacctcgtcttcttcacccagcgatccgacccggattcgaactcgaacccgtttgtttccacgtccccgaataacgccaagacattcaacgtctccgccctaattgagaacaacacgcaaccgacactgcgggaaaaagcccctccgccgccagcgccggaggaggggtcgatcgataaacttggggtggtgaacgagaatggcacgatgtccgatgagttcgaggtgggggatttcgatccgggaatggtggatcagtgggtgaacgagactcaggttgatgagagcgagggttcttcttctgatgtgggatttgggatcaagaagttcgggttgtgaccccgcgagatgagcgagtatataccgtgtttggataacgaggacgagaatcggaagctgccttcgacggagaaaggggagaggttcgagcggcattgtcctgagcaacgtcgaggctagaattgcttggatcctggacccaataggtaccgtacccctattccatgggccaaaagccgagatgaggtatggttcaataatgttccttatacgtgtcttgttgaagatagaggaggccaaaactggatttgtagagacaaggataagtttcaattcccggaaggtgttacgcattttatgcttggggcaaatgaattcttggaccatattgctaaggttgttatgatgattcctgatattacttttggtaagcatataagggtggttcttgatgttggctgtggtgttgctagttttggtgcgtacttactgtcacggaatgtcgtcaccatgtctgttgctcccaaggatgttcatgaaaatcagattcagtttgctcttgagcgtggtgtaccagcaatggctgcagcatttgcgactagacgcttgttatatccaagtcaagcttttgacttggtacattgttcacgatgtagaattaattggactagagatgatgggatactgcttcttgaagttaataggatgctaagagcaggagggtactttgtttgggctgcccaaccggtttataaacatgaggaagttttagaagaacaatggaaagagatgcttaatcttactaatcgtctatgctggaagttattgaaaaaagatgggtatgtcgcaatatggcagaaaccttctgacaatagctgctatctaaaccgtgaggcaggaactcaaccaccactgtgtgacccaagtgatgacctcgacaatgtttggtatgttaatctaaaatcatgcatctctcaattgcctgagaatggatatggagcaaatgttgctcgatggccggcacgcttgcatacaccacctgataggcttcaaagcataaaatttgatgctttcatatccagaaatgagctttttagggcagaatcaaaatattggggtgagataataggaggctatgtacgtgttttacgctggaagaagatgagattaagaaatgttatggacatgagagctggttttggaggatttgcagctgcattgattgatcagagtatggacagctgggttatgaatgtggttcctgttagtggtccaaacaccttgcctgtcatatatgaccgtgggctgattggagttatgcatgactgtaacaatttcatgatttataatataggtgtgaggcatttgacacctacccaagaacctatgatttactgcatgctgcaaacctactttctgttgagaagaaaaggtactattttctccacttatcagcattttatgtctttcttatgcaatgtctcatccattatgcttgagatggatcggatactacgacccggtggacgtgtatacatccgcgattctcttgatatcatggatgaacttcaagagattgcaaaagcaataggctgcacttgctacgctcttaaagctaaatgggatgcaagtgcaagtactactaggcatttgagaagtgcacttccttacaaacgtgaggaggtgctcagcatttattcatcgataccactatccctagagccggatgcatcatctagcctatttgtaaaattcaatttatttgtatattccaaagcgctacgtgccttaaatatattgtttccatgatgatactcttgccatcatggatgagcttatagagattggcaaggctatgggctggcaagtgtcattgcgagatacagctgagggtcctcatgcaagttatagggtcttggtttgtgataagcgccttcgttaatgcaaactagctcactttcttgttttttatctctgcaatggggaaatcaacagaatagggtcacactcattttagtagagaagaataggagcgatgcaagtgtaaatatcacttccttggttttgtctgctggttcttgacatcagatcgccagagcagctggggtaggcatagtgtgctttctctggattttgatatcattatccaaacaggtttgtattctgtttctcaccatctctcgtggctgggggtttctccacttcactcctagatctgttgagtattttaactttatggaaacttgctatgaaaataagcgtggataatcataaatccatgacttattcagtttgttgtaaccaatggtaatatgtttcatgcgttatcgttaatgcaaactcgctcacttgttttttatctcttcaatggggaaatcaacagaatagggtcacactcattttagaagagaagaataggaggacgatgcaagtgtaaatatcacactttcttgtttttgtctgctggttcttgacatcagatcgccagagcagatggggtaggtatagagggtgcatcatttaacttgtttataaaatcaatttatttgcatatcacaaagtttttaggccgaacatctggcatatttaagttaaacgggctttctctggattttgatattattatcaaaacgggtaactactctgtttctcaccatctctcgtgactggggatttctccatttcactcctagatctgttgagtgtttttttaactttatgaaaacttgctatgaaaataagcgtggataatcataaatccatggcttcttatttactagtttgttgtaaccaatcgtaatttgtttcatgcattactcacatcctcatcg

SEQ ID NO: 80799 - DNA, 762 bp, Glycine max
  unsure (1)..(762): unsure at all n locations
  Clone ID: PAT_MRT3847_43979C.1
gaattcgacctcgttacccggggatcctctagagtcgacctgcagttcatcattactctgacgctccttcacaacaaggatttgattcatggcctccatattttccaaattatctactttttcttgcaattcatcattcatctcttctgttttattctgaacagctgcatcatcttcatctccaagatgcttcataacttgcaatttcccttttaactcttcaatttccatttccaacttttgtttggcatctagctgtttttccaactgaagtatcttgttataggcctcctctttctctcgctgaaaattttgaagtttacaccaataagatgtattcacaatgtataagaatgaagtgataaatagcaatcttttcataaccaagacactaaatagtaaataagaggcaaaccttttgctcttcaacaagccttaagacactctcatgggctatcttttgttcctttgaagccaataggagtgactcattcctcagatctttctagaaagacaaatattatgtaagaatcctataaaggcacatcataaatgctattgttttcaaagtctgcaagcaccttaagcaaggcagtgtggaagctataaatgttttcaagtatgctgctttttttcctccaaaaactaacattggctctttagaccttagagttnactgtttcgcataatatatgaatattatatacaaatggnttttaataattattgtcatagatggcataatcacataaataaaactga

SEQ ID NO: 80800 - DNA, 439 bp, Glycine max
  unsure (1)..(439): unsure at all n locations
  Clone ID: PAT_MRT3847_4397C.1
tggccccaaaggggnaaggactactactcgactcngnaaancattnnagggatgaccgctcaccagctacgtgcgcgctttcttcctttttttaattaataatttttccattttacataaaccaacatgcattctgggcttaggggataaaaagaatcaggggcggactcatactatttctttgcaccgagagcctatattaaatttaccctggcctgcatacacgcaaaaacactgaatacacctggaaaattccggaattcaaaaattatcgcaagaacatgacacgtggacccacacgcttggctcttgataataacttctctaacatgggcttccatctcaccaaaccaaatcatgtgcattaccgatcccactgcacagaggaaaactgcactacataaaacagcaagtggtatggccaacccagatttaccac

SEQ ID NO: 80801 - DNA, 660 bp, Glycine max
  Clone ID: PAT_MRT3847_43980C.1
tgcattggtaaattcaaaagtgaacttgctgtcatggaacttgaaattcaggctttggtcagattagcagaagaaatagctcaatgtggtattccagaaggttcaaggaagatcaatggaaagtacattcattctcaccttgttgctagattagaagctgtaaatgaactactgaaggaacaaataaaagatgtcgatgcggcacaatcgaaggaggtttctgtattttgggttggcatggctgagagcgtgcaagttatgggcacctttgatggctggagccaaggggagcacctttcacctgagtatactggttcttacacaaggttttccactacattgttgcttaggccaggaaggtatgaaatcaaattcttagttgatggtgaatggaagctgtcaccagagtttcccattattggtgaagggttaaccaaaaataatttgttagttgtcgagtaatgatcctagtaacagatacattagcagaaactgagtgttatttactcagtaatttaaaatttctttctttggtatatatacccacaaacactttttgagttaagagtgtgctgttagcacttcttgtacccaaacacttttgacctataattatatttttgtgatgcgtcgacagtaactttattcataaatattttt

SEQ ID NO: 80802 - DNA, 126 bp, Glycine max
  Clone ID: PAT_MRT3847_43981C.1
tctccagcctagttatgaaagagtatatatggacatatgctgctctagagtgtgcacttgcggctttaactgtgcatgctatattatactatcgtagtatgtgacagccattatatgccatactac

SEQ ID NO: 80803 - DNA, 257 bp, Glycine max
  Clone ID: PAT_MRT3847_43982C.1
cgcatctcaggttcctccgtagcagcatataccatctggcgaagttgttggtaagtcatcatcaactgcatcgcagagtaaggctagaactacgcggactccagaacttcacgaggcctttgcggcagcagttaatcaccttggtggtcgtgtgacggctactccacatggtgtgttgaatcaaatgacagttgaaggtctcgatatcgatcatgtacaaaggcacttgcagaactatagaactgccagttacaaac

SEQ ID NO: 80804 - DNA, 406 bp, Glycine max
  Clone ID: PAT_MRT3847_43983C.1
gttgattgtaagaccaatatttttatttaaaaaaaaacaaaatatagcgggctaagttgtagatactcatattatatgcgagcatgaagaatagaagaacacgtcgataggaacattatttaatagtgtgccacgcttgctcgacagagctcatatagaacaacattgcggcctaccttatctagttgcttgaacaaaagcgatgagttatctctggccaccagctgaatgtggtgaggccaattcatcacgttgatcaacactgttatataatttattgggcacaaatgacctacttgtaagcgaaggtatggttgccacttcttgtaactgggcctctggtgaagaagctgggggtggtaaatagacggggaaccatctgggctgtggaaagcttgtgatggcc

SEQ ID NO: 80805 - DNA, 514 bp, Glycine max
  Clone ID: PAT_MRT3847_43984C.1
cggccgcccctccttttccctcgttgcaggatctcatattacagtcctgggtctactcactcccttacagtgcaccccttagagcataattcatgctacaaccctcccttaaccctaaccaaattgaaaccccatcaccccctgcaaataataggggcacccttccccaaatcgacacccccgtgaataggtacagccgcgagcctacgtcgcttatcgcaccctcctcaccatgatatcaacgacatcgcgtgtacgatttggatacgagggacaaacgacgcccataatggccgtgccgggaccacacaaagaacccaaggccaaggcgtgctccggggaaaataacaccgctggcttcagcagcgaggagtacgcccatacccaccttaagaaggcccgaaggtggccacggaggctgccggactgcgcatggcacctccctgattaaggctcaagaggtggctgtcctccttatgcaaatggggatagctttcttggtgatgcggccgct

SEQ ID NO: 80806 - DNA, 455 bp, Glycine max
  Clone ID: PAT_MRT3847_43985C.1
ccccccccccccagccccttttttttttaaaaacaaaatcttttttaacaaaaaacgggggggggggggggcccccaacccccaacgggggggggggatccaaaggcaagggggccgatttaaaaccccggctaaaaccatgggggggaaattggggtaaaacaaagtcccaggggtcccaaagcctttaaaaattggctaaaagcccccggaaaacaacccccaagggggctttcccggggggggaaaacggggggggggaaggatcccctggggggggggggcaggggtttttgggcccccctttggcccaaaaaaccggggggcccccttttttttttcccaaggaaaaaaggggcccagggggaaaggggactataaaaagcaaaggggggggcccctgccccccccttaagtccaaacccccgtgggggatagggggccctaacccttag

SEQ ID NO: 80807 - DNA, 226 bp, Glycine max
  Clone ID: PAT_MRT3847_43986C.1
aatctttaacataacaacaacactgaacaatttttggctctctactaaatataactaaatctttcatctacactcactctcaataaccttaactttcaccatttccctaaccatccatacttcttcattattttctacccaaacaacaaactctccactctcttttactaaatcttctacacttactctaatatctaccaaacactcacaatttctttaccaccaa

SEQ ID NO: 80808 - DNA, 523 bp, Glycine max
  Clone ID: PAT_MRT3847_43987C.1
ggctcgagctgagaaccatgctatcagcggcaagaacaacaacaacaacaacaactcatatagcccttgtttctatcccagctttcagccaccaagtttcaatcctcgagttcgcaaaacgtctccttaatctccacaacaacaccttcaacatcacatgcatcattccaacacttaactcctcttacaataacattgccaccaaacccttctttgatttcctccctccgaacattcactgcattttcctcccctcagtgtacttcgaggacctaaacaacaatggagtctctgtggagatccaaatccagctctaggtttctcgcgccatgccctccgtttgggaaaccctaagatcactctttgatgccaccaacaaccgtcgacgccatcgttgccgatgccatggtcccggaggcgctcgattttggtaaggaacatcccattttatcctacaattactttcccttggtccacaatggtgctatctcctatgccttcatttttcacaattggatgaaca

SEQ ID NO: 80809 - DNA, 1629 bp, Glycine max
  unsure (1)..(1629): unsure at all n locations
  Clone ID: PAT_MRT3847_43988C.1
cccagttgagctgaaaaattgtggaacggaacatttaggggagaaacataactgaagggagacaagatccgaggatagaaaccgtgatcgaacacttgagttactgttaccgttatttgtagttatcatagtaaattgttgttccgaatttcgtttgtgctgtcaagaggcgtttgttgaaaagggacggttcccaaagactggaagataaagagggggccttagtgggtcttcctctgttgtgcccaacgaaacaagtgaggtgaggaagaggaagagaatgaaggagcaagggaggtgtagaactgagtggaaggaatgtcttacataggaaatgggctcttctgctttgtgtggcaagcttctgtgctggaatgttcttcaccaataggatatggtcaatggctgaatataaagaaatttcaagggcttctactgagattgaaagaataaaattaaactctgagggttgtaatctaaatctagttgtaaggcctaactccaattacagtcaacgtggaagtttcaaatacacagaacgttatcacgaaatcgaggaagtcagagacagttgaatcaactacaaggaaaaaatatttcatggttatagggatcaatacagcttttagtagcaggaagcgcagagatactgttcgtgcaacttggatgccacgagctgtggaaagaaagaagttggaggaagaaaagggcataatcatacgattggtcacggttctacatctggtgcattcttgacaaagctattgaagtagaggagaggcttcatgctgactttttgagctgaaccacattgagggatacctagaactatcagctaagacaaagatctacttttcaactgctgttgccttgtgggatgctgaattttatgtcaaagttgatgatgatgttcatgtgaatttagcaacacttggattgactctgtctatgcatcgtaagaaacctcgggtgtatattgggtgcatgaaatctggtcctgtccttgctcaaaagggagtgagataccatgaacccgaatactggaagtttggagaggtgggaaacaagtactttcggcatgctacaggacaattatatgccatttcacaagatttggctacttatatatcaataaatcagggtatgctgcataaatatgctaatgaagatgtctcattgggatcttggtttattggtttagatgtggatcatgttgatgataggagaatgtgttgtggcacaccccctgattgcgagtggaaagcacaggccggtaacatctgcgttgcttcgtttgattggaaatgcagtgggatctgcagatctgttgagaggatgaaagaagttcaccagcgttgtggggaggatgaaaacgcattgtggagtggaaccttctaaaaactaaagaagtagtagtgcaatattcagaaacctgaagaaaaacacacgagtggtgtagtgcaggctatacacgtagtatgagactagtaggatgatataatatgatatagacatataggggtagctgcttgggagccaaagagaatgaaaaagaaagagtatagtagcaaccaaccaatcctttcttttgttacgtgnnnnnagggctttatattcnnntnctcnnnc

SEQ ID NO: 80810 - DNA, 414 bp, Glycine max
  unsure (1)..(414): unsure at all n locations
  Clone ID: PAT_MRT3847_43989C.1
gagaagaaatctcctagcaagcatgtaaaacatggacgaaaaggtgcctcaaaaaattaattcccatcatgaggatgccaaagagagttctgagttatcaaaccctgaagatatatctaaagctgagattaactcaggtggttctgaagcagaacaggctgaagggtctgaaataattgtaactaagcagaagaaatctaacaagaaagcaaaatcagtttcacgtggaaagaaacttaagaaagagaagagcttaaggtataggaaagaatcagatgaagagaaaaggaagaagaagaagaaggaaaagaaagggctgaaagagaagatcgaggagaaaatagagggtgatcatcatcatcacaaggatgaggacacaagtgtcnctgttgagaaagttgaggttgttgaaac

SEQ ID NO: 80811 - DNA, 238 bp, Glycine max
  unsure (1)..(238): unsure at all n locations
  Clone ID: PAT_MRT3847_4398C.1
gatccggaaacccaaagaaaggagagagattaaatcacagcaccagcaacctaaaaacagcagcatcagcaacctcttctcttagaaataaaaaactctatctaattcagctagcgaactacatacaatnntnaaatnaaatncaaacacataataacaatatcaaggcattagcacttcaactcacaaaccttacacattttttttataaagaaaaagaagctctcagcgttgcagc

SEQ ID NO: 80812 - DNA, 471 bp, Glycine max
  Clone ID: PAT_MRT3847_43990C.1
cagagagagctggaagaattgaagagaaccacagaaaaattggaacgtgttttggctgaaaggaatttgttccagcgagaaggtggaggagctggaacaggagaggaatcactggcagtctgaattcaagaaagtccaacatgaattggtgatctacagtacccaggaggcggaaggcttgtactggagcaggaaacacatgggttatcgccaagctgaattccagattctgaaagctgagctggaaagaaccaaataggaaaagcatgaattaaaagagaaactgatggaaacagagacacactttgaaatgctgcataaggctcaagtctcctaccggaccccaaagggagatgacctagaaagggctttggcaaaacttacgcggctacgtattcacgtcagctatctccttacttctgtcctccctcacttggagcttcgtgagatcgggtttgactcacaacaagt

SEQ ID NO: 80813 - DNA, 545 bp, Glycine max
  Clone ID: PAT_MRT3847_43991C.1
cactaggtacggcggccgccactataccttttttttttttttttttagcacctacacggaacagtgctatttttttatctctaaaaaaaaggcggtaaacaacgacaggcgacatatgaagagatggtgagaactcgtcctccataggcgcacgaagggatctatgactctaaccatcctggtttcacatattttacagattactctggtaggctatagctgctaaaaccgcactagaaaccatacgtgtgtataaaagaaaaaactccttgctagcttctgtcacaacacgatcgaagccctgtatcgcacaacggaatctctggcggaaaaggacgaaccttaagaggaaagcccggatcggatgccatcgggcttgtccgtggtgaaagccttgcggaacccatttttaagcttcataagacacgcccctaagagaatctgctctccattagtgcccatgtcaaggtaaagaaagtggggcaagacatcctccatgaagttatgcaggccttgcaagcaaggacgaagggggccccaccccc

SEQ ID NO: 80814 - DNA, 579 bp, Glycine max
  Clone ID: PAT_MRT3847_43992C.1
agagtgcttctattgttcagcctactgcgacagcgaacgtcgattctttcaattcgactttcgacgttctgcgaaggctactcttgtcgcggcagaatactgaccgtagcgtcatgcattagtgactggacacgcctactaagcctagagaccaggctacgaacaagacacgtacgtccgggagcagcatggccaccctcaaaatgcccgctcggcgcatcaaacgtttgcgtcggggcggaacctaccctgagcgagtaggcgtaggagaccctgtgctacctcgtcgccgtactacgaatatctcacagatctgtattgttaggaattggatgcaaaaggtgcgatagacaacgagaagactggacattgctgcgcgccaccatctcgatatgtcggcgcatgtgaacgattaggagctgagcaagctactcggagacgggcccctcggtactggaggggtcgtgcctaacgttcactatcttctccttcccaagaagggtgctggatgatccaaggctgttgctgcagaccatgactcttaaatacgagttatatttcggcgaaaagagatcggaa

SEQ ID NO: 80815 - DNA, 437 bp, Glycine max
  unsure (1)..(437): unsure at all n locations
  Clone ID: PAT_MRT3847_43993C.1
aaatggacggttcaacagttcgagggtctcaacaacatgggcaacggaaatatgcttgttatggaaaagggttttggtggaaggtatagcttactgatgcatcatggagaagaggaactaagacggtttggattcacggatgaaatgctgattgatcaggagtggtacgattacgaacaaggagggtgatcaacaatttataccaacttcatagtcaatgcataggctacaactacaaagaatattttttagttaaataacgataatgaggagtacgttcttgtaactaattagtagaaaaagttgtacccaaaaaattaaatatatatatataaaggaagaatcagatgtctgtatgtgatactgtacacaatgcagttnccgtatgagctacttcataatcacgnggggctatctagctccttaattattccaaa

SEQ ID NO: 80816 - DNA, 361 bp, Glycine max
  Clone ID: PAT_MRT3847_43994C.1
cactaggcagccgtccccctttatttttcttaccacaacttttattatattatacccacagacatacccacggggaaggggggtgacctcaaataacaaatttctataatccttgaaccaaagattctgtctgcattgctgatcacacttataccacatccaaattcctatgaggatcgtacacatactcaaaaaattacgattttacaaatatttgagaacaccattgtctgttcatcatttggaacctcttaaatttcccctttgttaccaccactcaaacaaacctgaagttaccattcaaacaaaagagcacaggttttatttccctaacctttcctatgcaaaactaatcgataaa

SEQ ID NO: 80817 - DNA, 1373 bp, Glycine max
  Clone ID: PAT_MRT3847_43995C.1
gaaattcacaccaaacaacactcagcaaagccggaagggcaaaataaaaatagcacattcgtcgcttctggaacataaaataaacatattcatttttttgaggctctaataaatttaccatcatcatccaccaattcctgggcatggccgtgctacctttctcatactcaagatctcccactttatctctaccatcatctcaacaaataaggcctaaaacaaaaccaaattccaagacaaacacatgctctctaatccactgctgccacagccaaacagaaccaatcgaactaaatggccaagccagatttcgagagaagaaccctgccactgcagttgcatcccccgtggttgttccaccaaggcctcgaaggataatccttgttaggcatggagagagtgaaggaaacgtggatgagagcgtgtacacaagaatacctgatccaaagatatccctcactgagaaaggaaaggtccaagcagaggaatgtggcaacaggataaagcaaatgatagaaaatgaccatgaccaacattggcaggtttacttctacgtctctccatatagaaggacacttcaaaccttgcagcacctcgctcgtccttttcaacgctctagaatcgctggcttcagagaagagcctcgcattcgagaacaagattttgggaattttcaaaacagagaaaagatgcgaatggaaaagggaataacgctggcgtaatgggtcgtttcttttaccggtttccagatggagaatccgcggctgatgtatatgatagaataacaggattcagagaaacgctgagaacagatattaatattggacggtatcagccacctggggagaagaaaacagacatgaacttggtcattgtgtctcacggtctaacacttcgagtttttctcatgagcgattacaaatgagcggttcaacagttcgagggtctcaacaacatgggcaacggaaatatgcttgttatggaaaagggttttggtggaaggtatagcttactgatgcatcatggagaagaggaactaagacggtttggattcacggatgaaatgctgattgatcaggagtggcataaatttgcaaagcctgctgatctgaattacgattgtccaatggtgaattccttctttccccacctcagtgacagtgaagaaacatgcaggtacgattacgaacaaggagggtgatcaacaatttataccaacttcatagtcaatgcataggctacaactacaaagaatattttttagttaaataacgataatgaggagtacgttcttgtaactaattagtagaaaaagttgtaccccaaaaaaacttaaatatatatatataaaggaagaatcagatgtctgtatg

SEQ ID NO: 80818 - DNA, 286 bp, Glycine max
  Clone ID: PAT_MRT3847_43996C.1
ctacctcaatccattatatgtccaatacactcactgatcactttacatccatgtgcaggctcaaaactttctttcacttgatcacctataaattaatgcactaaattgaatccaccaattctataaattacattaacaatcttcttgcttaatattaccaatatcatgattctactactcataataaattcatcatcaatatacaacaaatacaaaatattgcttaattcatttatttattattaacattcttattaattatcaatatgtctaaactttaaaccat

SEQ ID NO: 80819 - DNA, 335 bp, Glycine max
  Clone ID: PAT_MRT3847_43997C.1
tcacatgatcaatcctaaaatgccgtaccctattgcaatcttagacatgacaatcgagagcacgcccaccagccggatcatcatggacctctactccgatgtcactccccgcactcacgagaacttccatgcactctgcactattgagaatgaagtcagcaaacgcggcaaaccccttcattacaaaggatcctccttccaccgtatgatccctaatttcatgtgccatggacgtgattacacccccggatatgctacatgatgagaatcaatctacagatccaagctctccgattaaaacttcatcaagaagcacaccgaacctagtattctat

SEQ ID NO: 80820 - DNA, 810 bp, Glycine max
  unsure (1)..(810): unsure at all n locations
  Clone ID: PAT_MRT3847_43998C.1
ggaaccaggcgcccgagaacatcggtggatagaacccgtgacagtcttatctagtgcttttacatttgcagctgggagattttagatagctcataaaatcgtatctggaaagccatggaggttgtttcgcagcctctgtgcacaattcttacccccacgcgcaaacactcacttctcattccacaacaaatccccaatccttctaaacattttcccttcttatcctttcgcgccaccactctctccacttcttcgcgtttttctcctccacctcttttgttcgcgacgccggaaaaccaattgagcatcggggaaggagagaacaccgatgcaagtgattgggcactacaagatttttattccctgaggaaggatgttgaaattatgtcacagcgtgttggagagattagagaatcttctggtctacagctattggagcaagaacttggcaatttggaggagcaagcagctgatagctccttttgggacaatcggggcaaagctcaagagactctctcgaccttggctgatgtcaaagataagataaaattactcaatgatttcaaaacacaggttgaggatgcagaaacaatagttagcttgactgaggaaatggactccattgatagagggctttttgaggaggcttccaatcttattaaagaactgaataaatcaatagatcgatatgagctgactcaacttctatctggtccttatgataaagagggtgctgttatctctatttacagcaggtgctggtggtactgatgcacnagattgggccgacatgcttctttagatgtacat

SEQ ID NO: 80821 - DNA, 460 bp, Glycine max
  Clone ID: PAT_MRT3847_43999C.1
cagacgcatgggtttaacactgcgctcttcaacttattgtatgaataagatggaatccatagctctcaaaactagtgactatgcccctgaagtagataggttttcaaaattcaagctatcatcatcattgttacggatccaggcacacaatgcatgctgaggctcatacactcgtgataaatgtgagaacgtgctggctgcatgagtctgacatagccgcaatgagtcaaacatagtccctgagcatgtgagggaggcattacacacaagaaccatgggaggacgctgggacatacccaaagagaggaatgcaaacatgatggacctgaagagtgcacggttagaaggtgtaatgggggatgctcgacggggatgggctgagaaagatgggcctttgaagtacagctggggaccataggctgaactggcacatatgctgcaggtgcatggatagaagctc

SEQ ID NO: 80822 - DNA, 286 bp, Glycine max
  Clone ID: PAT_MRT3847_4399C.1
tacaacagcagagaaagggaaagttaatgggagcctctcatcttctgtcgaccagcttttgcttcgttgtgaacatggacatgaggacaacaggttgcatcctcatctagccctgcatccgagttcatgcgtcttagatggtgtcacaaactgcaggacaagtgtgttagtcattacagcgtcgggttcgaggaggatgtttaagagacacaacatctgcgccttggactgcaggaacgattggtgctctggtgtcatgtccaaaaggttcggacggatcggcctt

SEQ ID NO: 80823 - DNA, 150 bp, Glycine max
  Clone ID: PAT_MRT3847_439C.1
tttcgccaagaggggaaccctctatttctgagaccctacaaaacttaactctgatttttaactatgccttgcctactcacgagaccaaaaggaacctactaatggcctccaaaatggttctgcttgcttgtccagaactaagggaactga

SEQ ID NO: 80824 - DNA, 271 bp, Glycine max
  unsure (1)..(271): unsure at all n locations
  Clone ID: PAT_MRT3847_43C.1
gatgancaacttgtgtcagggacncgcanganccannntggcacagttnccgtncaactcancgtctangtctcacnccantcaacggctatgcctatnggcttggccttggcntctcaccattctggggttcagttcatggnttggaatatggttttggtgngcacgagcncnacacaacngggattttcgaagtccagnccanaacantgncctgggntcactttcagacngtcattttcntcngaacaacagatctnggtccgcngat

SEQ ID NO: 80825 - DNA, 511 bp, Glycine max
  Clone ID: PAT_MRT3847_44000C.1
ggctgcctccctgatcgcctccccccctgtttgcaccgaccaccgtgccggcgccggcctggatgctccattcatccgcctcacatccatgcatggctgccccccccgcaagaccaaccatgactttccctcccttgcttgctacggaggaagagtacgatgcatgcatgcgtgtgcgcccattggctggaaaaagtacgagactctttcctacttgcctgacctcgctcatgcccgattggttgaggaaggcaaataccttccttcgaaaggatggatgccttgcttgctagtcatactagatcacggtctcgtgcaccgagcgcgcgcccggccacctgcctgctatcatggacgctactgacccatgcgtgagctggctatctatggctgcactgacgcttctcacgcgtgggaggagcttccttaggctaggactgactgcccccccggctgcctccgtatcaatggatgtaactgccttcgctcagcgcagggaatgagtttcatc

SEQ ID NO: 80826 - DNA, 440 bp, Glycine max
  Clone ID: PAT_MRT3847_44001C.1
gcgggaatgttagttctgccgagagcacagtgccacatgatctttctgacccatggggccagagctcatgcaagcactaaccttgtgaagctgtggctcacctgttacgtctactgccatgctgtgcaaaagtcggatgtacaaatcttgaggccttggataatgcattcttagatgaactggctgaccctgatccccgcctgccacttgggcgttccctgaccgacctctatagctcataaggcaaacatctaaagagagagcctccagacgcgcgggggctactggaaccattctatgcacaaacgcatggtgcctatgggggctgcatatggtgacctatcttctatgctatctactgacactgtagaaaccattgaagctggtaacaggctgcttatagtgggtgacctcccccttgtgcatattatgagtcccgc

SEQ ID NO: 80827 - DNA, 387 bp, Glycine max
  Clone ID: PAT_MRT3847_44002C.1
ttctcatcacgtaatatatcacaacccagacggcggtggctgcaaaacaggatgcacaatgtcgtgggctatcacacacagaaacaccaaacgtggaaggcccattaatcaccagaagaagggtcgcagcctcgaaagggtcattcagtgacatatgcgaagatatcccgattgaggggatgatgccatcatgagcaaccatgtataccgataaattagcaagacagactgaggccagaggaaacaccaactggggaacaatactggtggtaggcataaacccgagcctgaacagtactagggttagaccagcacactgagggaagccattgatcgctacaatggcagcaccaaaaccatgcttgatgacaggacgcacatgctgca

SEQ ID NO: 80828 - DNA, 668 bp, Glycine max
  Clone ID: PAT_MRT3847_44003C.1
gcattcttccaatttattttcgtgacaaataggatttctcttcaattatttatgcggaagttacaattagcaaagaacaacgtaaagaaaaacaacagtcatatttgcagaaatatcatgaaatattttacttgcagcctcccatattcttccattttgtggccaattgagacaatgttgttgtggaaaatccattatttttaattgcactagcaccagcatcttgcatcacttccattctattacgaattctcattccttcattaccaaccaataagctcttcaccactttggcaacttcacacctttccacaatgccactctcattagcctttggccttatagccactttgaggtcatcaactagaattgttgcaatcattctctgctcagcaaagagtggccaaactattattggcaccccattcaccacagactcaagggtagaaaaccaaccacattgagtaaggaatgcaccaatagctttgtgaccaaggatctcaacttggggtgcccaaaatggaatcaccaaacctgggccttttggtcctcttcataaactcatttggtagaaaactcaaagggtcttgtcctaatgaggaaacctccaaaataattagcactaggtaagtcatttgggttctctcacaacccacacaaacttttgg

SEQ ID NO: 80829 - DNA, 981 bp, Glycine max
  Clone ID: PAT_MRT3847_44004C.1
gaggcgccctcacaaaatctgggaaccacacacacaaaccattcccttctctcactacggcaatgaccacccaagcttccaccttcgccgtcgccgttcccttccgctcgccaacccctttccgccgccaccggaatccctcagccgttcgagcccaagtggatggttcagataaaatggattgataagataaagaggttagaaaagaatgagtgaagaaggtcctccaaagctatatactgacaagcccggaaaagcgcaattgaagcagtttcgggggcaacagaaatcaaacgggttctcctcgccggcggcgatggggacacacgccgctactccgccgccacctacgccgccgccaaaggaaccctttattcggcgctacaaattcgtttggcctgtgcttttggctgtgaatcttggtgtcgcagcttatttgtttatgaggacaaagaagaaaggtactggtgaggaggaacaagatgatactcgtgtctcaactaaggatgctacccctcatgttgttgagattcctgtgtcatcaccatctattacaaatcccgtgatcaaacgagagccaattccagaaaactaacaatgtgaactcttgaagtggatattggaagagaagaggaaggtcaaagcaaaagacgcagaggagaagcggaaaattgatgaagagaaagctctgcttaaaaagcttattcggtcaaaatccatcccaagtgtctaatgatgttatctttatcgtcagggaaaaaagttcttgaattcaaatgtacttgaattgattcatccaatgcttttattttctgttggttttttgttggattctagattatagatttgtgaatttgagagttcagggtcctgacatcctaaattgtcatttgcagaattttggatgtggttcgctggttcttttggttctgacaataatacaagttgatggcacttgactaaaaaaaaaaaaaaaaaaaa

SEQ ID NO: 80830 - DNA, 301 bp, Glycine max
  Clone ID: PAT_MRT3847_44005C.1
cgtaaacacaggtttttttaccttgaggccgaggccaaaatcgaaacaaacttgattaaatggatccttgaagatgttgctacttctaagggttccatgtcggatcggaaagaaaatcactctctgagcgggccacacacaaacacaattggtggaaccatcactcttagtgaactagctgcacactctccgacaggaggtaagactacagctcggattgaaactgagtgcgcttatcgctaaaaaggagggagaaaaacaagggcacagctggggaaatcctgaaaaaacactcccactc

SEQ ID NO: 80831 - DNA, 767 bp, Glycine max
  Clone ID: PAT_MRT3847_44006C.1
gcgcccacgcgtccgcccacgcgtccggagtgagtgagagacgagaaaagaatgagtgaagaaggtcctccaaagctatataccaacaagcccggaaaagcgcaactgaagcagtttcgggggcaacagaaatcgaacgggttctcctcgccggcggcgatggatacacacgcggctgctccgccaccgccgccaaaggaaccctttattcggcgctacaagttcgtttggcctgtgcttttggctgtgaatctcggtgtcggagcttatttgtttatggggacaaagaagaaagatactggtgaggaggaacaagatgctactcctgtctcaactaaggatgctacccctcatgttgttgagactcctgtgtcatcaccatctattacaaatcccgtgatcaatcgagagccaattccagaaaaccaacaacgtgaactcttgaagtggatattggaagagaagaggaaggtcaaagcaaaagacgcagaggagaagcgaaaaattgatgaagagaaagctctgtttaaaaagcttattcggtcaaaacccatcccaagtgtctaatgatgttatctttatctgcaggggaaaaagaagttcttgaattcaaatgtacatgaattgattcatccaatgcttttgttttctgtttacttggtttgctgatggattttagattgttgatggcacttgatgtacaatgcccatgttcttttttacctatagatgtcatttggattttcaatatatttaatggttttgtg

SEQ ID NO: 80832 - DNA, 318 bp, Glycine max
  Clone ID: PAT_MRT3847_44007C.1
ctataaagcaggttattaacctcatccatgagcagaccttctatctgactatggagcattataacaagcttaaggaggatttaggaattcagccctggacttttgctcagaagcgtggatatgctgttgttaatgcatctgggtgtcctataccaaggcagaaatcggatgtcatgtattaaggttgctttgaattgtgtctcttccataaatgttggggagtgctttagtttgactgaggaacttcacccaatttcaatgaaccacaggtctactgatgactatttggaggtgaagaataagtcactatatgctgtg

SEQ ID NO: 80833 - DNA, 713 bp, Glycine max
  unsure (1)..(713): unsure at all n locations
  Clone ID: PAT_MRT3847_44008C.1
gtgatgctggcagcttgaaatactattcctactagtaatggagcaggatatagaaatcatatcccaaaatttcacnaagcccagatatgattcgcctggtagcaggcatcactttcttgctggccctaagaggcaagggattgagcagttggatgcttccgtccttgaggagttaagacaacgtgatgccatggccgaggctcgttttaagtgccatttggctaagctgaagagagatagggctaaaagattgctatataaagtagatgtagcaattcacaaggccattgctactctaatgactgcagaagcaatgaaagcttctgaggactcccttggtgaaattaaagcttatgaggactaatctggcaattcaaatgacttggtttacttggtcaagagttttggcctttttttcattatccggggtgttcgatggagaatttgaatcatgagaattttgggttcagtgaggggaggagattctgttgctgcagattgcaactccttcccactgtttagtgtcctacttggaaccttttccagcttgggatctgctcagttcagagtaactgtagcactgatctgcatggtgtataggtctatgaattttttactacctatatttgtacagattccctccccatctcagtttcaaacattcaatatgaaaatagaagtcggccaataatacaaacaccactttcaactgg

SEQ ID NO: 80834 - DNA, 279 bp, Glycine max
  unsure (1)..(279): unsure at all n locations
  Clone ID: PAT_MRT3847_44009C.1
ccnattcccaattcgaaacccttattcctttcaaagaaccaaattgagtgatcgtgatggcaccaaaggcagagaagaagccagcggagaagaagcccncggaggagaagaagtcgacggtgggagacaaggctccggngganaagaagccaaaggccggaaagaagcttccgaangagngangcnccggcggagaagggaagaagagaagagntacaagaagagcgtggagacttnnaagatncactantcatngttnnaagcagtaccagcngncnt

SEQ ID NO: 80835 - DNA, 378 bp, Glycine max
  Clone ID: PAT_MRT3847_4400C.1
atggttgacgaaagaagacgatttattagtcgtgctggtattaaagatacatttgaaattactcaagataattgtaacgaatcagttaatgaaccctacattttagttactggcactattggatttggagaggtgccgcagccggttcaatcttttttaaatgtaaatcatactcagttacaagctgttgctgcgagtggaaatcgaaattggggacaaaatttcgctaaagctggccatacaatttctgaggaatataaagttccattaatgatgaagtttgaagtacaagggacaaataaagacattattgaatttaaggataaggtgggcaatttcaatgaaaaccatggaagaaaagaaatacaatcatattga

SEQ ID NO: 80836 - DNA, 333 bp, Glycine max
  Clone ID: PAT_MRT3847_44010C.1
cctaccccccccccctttttcttttttttaaccctgaatttgacattaaactgatattaacagctattgtatacaacatgatcatgggaatgcatacttcctatgactattcaagtatgcaatgaaacctatctcaaaaatattttatctgcacatacaaaagggaactatgtacactgaacaaataaataaaaaaagggggagaagagggataccacaactaaatgagatcttttgtaataaacttgaaaaaaagtttgttgcaactcacggagaaaatatgcatgctagcaacttgcagcataagtgttgtaactcaggtgaaggatctga

SEQ ID NO: 80837 - DNA, 4009 bp, Glycine max
  Clone ID: PAT_MRT3847_44011C.1
cttttattggtgatctcagtattcaaattcctgctgttgatcaatttgagaaacctgatgataacggtgatttatgtgatgctgaacactctcctgatttctcttggaatataaatggatgtggtattccaagctccaatccaacggctcgagcgcagaagttcttggtatcagaaccggaataattccttgtcattgggatttcagtctcatgtgtggtctgatggcaaggttgattctctttgcaatgatttgagcaatggacctaaaaaaccacgtacacaagtatcatactcagtgccttctgcagggtatgaattcagttcaaggcagagaaaccatcatcagaaagggctttctcataaacgagttagaaaggccaaggagaagaagtcatcagatgttgatagggtccctgaaaagaatatcaaatgcttatcttgtggtgcaaatgtcttgattactcttggtgataagggttggagagaatccggggcccatgttgtactagagctgtttgaccacaatgagtggagactttctgtgaaacttctaggaattactacgcgttcatacaaaccacagcagtttctgcagcctggatcaacaaatcggtacacacatgcaatgatgtggaaaggagggaaggattggatcttggaatttccggataggagtcagtgggctcttttcaaggagatgcatgaggaatgctacaaccgtaacatccgttctgcttcagttagaaacatacctattcctggtgttcatttgatagaagaaaatgatgataatggatctgaggaaacttttattcggagctgtatgtactttcaacaagttgaagcagatgctgagatggctttggatccatgccgtgttctgtatgacatggatagtgaggatgagcagtggatttcaaatgctcaaaattctgtaaaagacaacagtgaattttcttggatctctgaggagatgtttgagaagacaatagacgtgtttgaaaaggctgcatatgctaagaagcttgatcattttactcctaatgagatagaggacctcatgcttaatgttgggcctttgtgtgttgtcaaaatcatttatgaccattggcagcagaggaggcagaagaagggaatggctttaatgctgcgagaagacgacagaaggggggaaagatatcagaaacaagtgagagagtgggaactagccatgaccaagaacaatgccccttctaatggatgcctggacaaggttacaactttggagaagccggccatgtttgctttctgtttgaaacctaggggtctggaatcactgaacaagggattgaaacatcgatcccaaaagaagatttcagtctctgggaatgcaaacagtaatctagatcaggatggcttccacactttcagaagaagacagaatgctttaccttttggtgatgaaaagttcctataccaaggccacaattacgattcttttgatgattcatcattggctctgacctcaccaagggtattcttacctcgtgatgctggcagcttgaaatactatcctactagtaatggagcgggatatagaaatcatatcccaaaatttcacaagcccagatatgatacgcctggtagcaggcatcaccttcttgctggccctatgaggcaagggtattggtctaagacatcttaataccagcagtgattccatgaaagggcttactatcatgtctatttcacttgagcgatgcccaaaacaaggctcctctcatggagattgtaaatattcttttgatgccagtggattgacatcatacagcttctgctcttgtgatcgaaaccatggtggctttgactgtagcattgaaattgtatcacataaagggcatatactacaatcaatttttctcattggatcaaatgctgcagccatacttcctgcctattggtcccttcggcagaaggcatttgcagaatgggttttgttcacatccagtggcattgctagtgcactatatcatgcatgtgacgttggcacctggtgtgcattgaactttaatgttttacagttcatggacttctggctctctttcatggctgtggttagcacttttgtatatctagctaccgttgacgaagtatataagagggcaatccacacagctgttgctatcctcaccgcccttttggctgcaaccaaggcaactaggtcttccaatgttgttcttgtcattgtgattggggctcttggccttcttataggatggttgatagaaatctcaaaaaagtataggtccctctccttttcatttggattatcgctaagtttcattcaaagtttgcaaactataaagcaatggttctgtaatctagtcaagacacttttgagacggtttcgctggggttttctgttggctggtttcattgcattggctatggcaggattaagctggacgcttgaaaccagtgcaaactactggttttggcatagcttttggcatgttacaatatacacatcttctttcttcttcctttgctcaaaagcaaacattgttgatgctgaagattcatcatcaccttcaagtggaaactatgcactgactcgtcaggattcatttccaagaggtgattagaagaacatatatgggattggtgggtgcaaaaaggaaagaggtggatcttttggtatttaatttttgcattgatgagacacaattgcgtaggtaaaaagatatggctgctgagctgaactagaaatcaacataagagtgaattgtgaggcctaagatgttaacagggatcaacaaagcagtctcttgtaaattcttttttctcacaggatttgcttattttacattcattatagggtatatatattttccataaatatctttttttatgccgataggagaaagaaatcaaacaagggatacatttagtcgtaggataaagggttaaagggtctaaactttggttatgtaactataaattagaatattaatattgatatcctgggaattgtatatattatatggagaattctgtaatagatcaacatttgtggggagagagttaccccttaattgatacttacttttttaagaattagaaacataaatatacatgaagaaatgaatagaacatacattgaaagaaaaagtgaaaaaaagaaaaacgcgtataattaaaaaaaaaaggtttgccactgatctgacgcaatttcgccaggggaaaagatatggctgctgagctgaactagaaatcaacataagagtgaattgtgaggcctaagatgttaacagggatcaacaaagaagtctcttgtaaattcttttttctcacaggatttgcttatttacattcattatagggtatatatactttccgtaaatatcttggattgagcagttggatgcttcagtccttgaggagttaagacaacgtgatgccatggccgaggctcgttttaagtgccatttggctaagctgaagagagatagggctaaaagattgctatataaagtagatgtagcaattcacaaggccattgctactctaatgactgcagaagcaatgaaagcttctgaggactcccttggtgaaattaaagcttatgaggactaatctggcaattcaaatgacttggtttacttggtcaagagttttggcctttttttcattatccggggtgttcgatggagaatttgaatcatgagaattttgggttcagtgaggggaggagattctgttgctgcagattgcaactccttcccactgtttagtgtcctacttggaaccttttccagcttgggatctgctcagttcagagtaactgtagctcggttcggcgcggggtagtcgtcgcggagtgccttactgcctgtgcgccgactggttccctcccctgcgcactggctatcatgcattggggatggggaggtcggcccggcattcgcactccactttcaactggaaaaaaaaaaaaaaaaaaaaaaaaaaaaaaaaaaaaaaaaaaa

SEQ ID NO: 80838 - DNA, 335 bp, Glycine max
  Clone ID: PAT_MRT3847_44012C.1
gagtatcagaaggccactgttagatttaaatccaattgacaagtttacatttacctgtccagtgattgcaacactacgctgtatacgtgcggatgtataaagactatatcctattactctagcttagtaacttataataagagtgctactgtggtcttatttgtatgcactcacaatgctctagcttctgtgtgctggtaataactgactaacatcttttgtgctctgggctaacaatcgagagtgcattaagctccttctaaagagctcacaaagcatgctctcatttaactacatcctctggcaaagccagaaatcagtggacgcgtgtccta

SEQ ID NO: 80839 - DNA, 306 bp, Glycine max
  Clone ID: PAT_MRT3847_44013C.1
tcctctagatcggcccccctttgttttttttttttttttttttttttttttttttttttttttttttttttttttttttttttttttttttttttttttcctttttttaaaggcaaactttggatccttttgaccctttcccggtttcaacatttcaaaattgtgtgcccctcccgtttgatggggggacaaattgcaaaagaattctttgggggccccttcccaaaatttccacccttggtgggggaccccctttttttttttgaagacccaggttttttttttgatttcccattggggcccaaa

SEQ ID NO: 80840 - DNA, 352 bp, Glycine max
  Clone ID: PAT_MRT3847_44014C.1
ggaacaaaaggaccctgaagagggacctaaaggcaatttattgggatggggggggaaccacaaaaaatgggcccccaactcaaaaaaaggcccatgctaagtcacagaagcatgaccttgtttatttaaaaaacagggggaaaatccccacctttaaccccccatatgcctcaatactatgggaaaaaagagcattttctttttttttaaaaaaaaaaaaaggacaaattcccaaagctggatctgaaggcaaaaaaggggggcatcaccatgcacaattttatgtcccacatatttacgggaaatcggtcaaattattaaaagggaaaaatggacagcaaaaagtactttt

SEQ ID NO: 80841 - DNA, 321 bp, Glycine max
  unsure (1)..(321): unsure at all n locations
  Clone ID: PAT_MRT3847_44015C.1
cctttggaatttaaacttgttacaaactaataaactaaattngcttnatctttaaaaaaatttttttaccggcagtgaataaaaaataaattataaataaattaattttaaaaatggttatttaaaaaatttggataagtatataaattatataaagggatcatttgtaaaaatttcaagtagattttaaattttaagtagatttaaaaaaataatctttaaaacctttgcttcttgtgataaggaaaaatcaagtggtgttagtgattgtgattaatttcttgaaaataattattaaacattttcacaattaacatttgg

SEQ ID NO: 80842 - DNA, 328 bp, Glycine max
  Clone ID: PAT_MRT3847_44016C.1
aagcaccccccctcagctgggcggaattcggctgcgcgtactccttcaggagttatttatacaatctccgtccgccactgttggatgaggtactgagatggcaaggcttgcttatttcaattgtgggtgacgagcagcaatggtagtaaaaacggcaaagagtcagcctgtgaaaggggcgctgctatatcacccgcagtttgtgaagtccttacaggcaagccagacccagtctatcaccaccatcatggcggacctgacgatgcaaatgcatatggacctgcctatgcaagcaatcttccaatataacatgagggaggtcccaaca

SEQ ID NO: 80843 - DNA, 747 bp, Glycine max
  unsure (1)..(747): unsure at all n locations
  Clone ID: PAT_MRT3847_44017C.1
gcgtccggaagttaaaggcganactcatgttattgtggatgaaattcatgagcgtgggatgaatgaagattttctgcttattatccttaaagaacttcttccacatcgaccagaactgaaactgattttgatgagtgctaccctagatgctgagctcttctcttcatactttaatggggccccaattatgtttattccgggcttcacataccccgttagaactcactttttggagaacattcttgaaatgacgggctacagattaactccttataatcaaatcgatgattatggtcaagaaaggatgtggaaaatgaacaaacatgccccaagaaagagaaaaagccaaattgcttctgctgtagaggatgcaattatggcagctgatttcaaagattacagcctacagacacaggagtctttgtcgtgttggaatcctgactgtattggttttagtctcatagaatatattttatgcaatatatgtgagaatgaacggcctggtgctgttttggttttcatgactggatgggatgatataagctctctgaaagagaagctcctgacacatactgtcttgggagatgcaaaccgtgttttgttgcttacatgtcatggctcaatggctagttcagagcagagattaatatttgaagagcctgaagatggagttagaaaaatagtgctaacaacaaatattgctgaaacgagtatcacgataaatggatgtgnttttgttcttgactg

SEQ ID NO: 80844 - DNA, 297 bp, Glycine max
  Clone ID: PAT_MRT3847_44018C.1
aaaacaacatagttcaatattgccattcagtttaggtacgtaacaggagcagcgaagcataaaagcaatgcgtccaaattaaaaccacatcggtactgggacacatctgaacatcaaacacaacagaaaacagaccacaagaacaagaatgtgaagtagattctagtagagttcatcctgtggctggccctcagcagactgagggcccagttgttgataaggcttgtgaagggcgtcatggtgctacacagactgcaaaaaatttaccttcttgcataccctcccccacataccaaa

SEQ ID NO: 80845 - DNA, 337 bp, Glycine max
  Clone ID: PAT_MRT3847_44019C.1
ggctcgaggttttgcttagttaaagtagccaaccagtcatggtgctctacaatgttgaacgcgtatagaccactcacttcgatggccagaagcctggaacctctggtgtacgtaagaaggtgaaagtgtttgtgccacctcattacctacataactctgatcatgcaacattcaacgcattaactgtggaaaaagttagaggtgccacgctcgtgtgatttggggatgagccttatttttcaaaggaagctattgagaatataactcaactgtcatcaacaaatggaggaagacgtgagtggattcggcaaaatggattgatgtctactcctgcaga

SEQ ID NO: 80846 - DNA, 429 bp, Glycine max
  Clone ID: PAT_MRT3847_4401C.1
gtcggtagccaatagtgcaatagagtgtaggcgccgctccgacccttgaattctctatcaacaattctagccagctcacgctctcgtttggcggcctagtctatgtcattcgacactgttccacactcttttagtattaccagtcttcgctagttgctacgagagagctgttcttactcaggagcttcgagactcgactccaggcttcaaagacaaattgccgcttcatccgcctggagacaagtcgctcatcttctctgatcaccgctgtcgacaccgtattgcgtatcctcttgcacacttgcaagagctgaagactcattatgcgggacaaggccatgtcaaaatcactctgtacgaacgcagggttcctcatggtcacacttactggaactaccggaacttttaaggtttatcctggaaggccag

SEQ ID NO: 80847 - DNA, 396 bp, Glycine max
  Clone ID: PAT_MRT3847_44020C.1
tttctgtataactgatgtcaacattcatcatgcatacacattttttgctgttgttcattgtgtttaacatcgggtatttagagaaccgatgttgtcatatatatgttaacatcggttttacaaaaccgatattaatattgatacattcaacatcggcactttcaacatcggttttagaaccgatgtagaatgttctaaataaccgatgttgaaagtgtattttctaatagtgaataccctatagtaaatcccctttattaattttaataaggttaaattactcatttgttcctatagtttcacgattcttacctttttggtctctatagtttgaaagtggtttttttagtccatatagtttacattttaattcttttttaatccatataattttaa

SEQ ID NO: 80848 - DNA, 369 bp, Glycine max
  Clone ID: PAT_MRT3847_44021C.1
gttgaatttccgagtgataggtgctaaccacacgtggacctcgtttgctctgaaaataagaatgattgatttcatcggtggggttttctctttggatgcatcgtctggtttaatgaaaacaatcttttcatttactttacacttgtgttgcattatatataaaatatgccacagattaaacttgtcttggtgtcatactacataattcaatttgttcatttaaaaaaaaaaaacaaaaaaaaaaaaaaaaataaaaaaaataaaaaaaaaaaaaaataatggtcgtcctaataatattatactcctttatctgtaacaaaatactaaagggcgcccccccattttttacttcttttccccccgaaataa

SEQ ID NO: 80849 - DNA, 425 bp, Glycine max
  Clone ID: PAT_MRT3847_44022C.1
ggagggagttctggacaccctcacttcatagctagatgacatgagatctagatcatcgggcatatagacgagctaagttattagaacatatgaagggttagatgactgctgagagatagtaccttctcacagaagcatgtgagccgaacccatcattagccttgtgtaaagagaaaaaactaaattgtgaatcctcagctcagagataagtaggaatcctgtctgacttgtaaatcttgcattgtgataggtacaactagtagcttcttgaagtaatcaatctatgcctacctttctcgaaagttatgtagccttaatttcatctagatttgcaagactatgagcatagtgcttgatctcagctggaagctcgagctacaaaactgtcaggtctaaacaagcctatctgattcatgctagagcat

SEQ ID NO: 80850 - DNA, 662 bp, Glycine max
  Clone ID: PAT_MRT3847_44023C.1
tacggctgcgagaagacgacagaaggggtcatgagacaccaacaactagttgaattggcctggggcctagcaaatagcaagaaaaagttcatgtgggtgattaggcctgatttagttgagggtgaggcctcaattttgccaccagaaattgtagaagaaaccaaagacagaggcctagtggtgggttggtgtcctcaagagcaagttttgaagcacccagcagtggctgggtttttgactcactgtggttggaattccacgcttgaaagcataaccaacggggtgcctctgatctgttgtccctttttcaatgaccaaactctcaattgcaggtatatctctcgtgaatgggcttttggcatggagatggatagtgataatgttacaagggctgaagtggaaaagcttgtgaaggagttattagagggtgagaagggtaaagagatgaagaaaaaagcaattgagtggaagaaattggcacaagaagctacccacactaatggttcttcctttttgaatttggaaaaactggtgaatgaattgttgtttgtcaagagttaggctacaagaaaataagttcacattagttagtttccatattactaagttgatattcagatattgtttgtaatgctatcatctaaatgtgatttgaagtagtt

SEQ ID NO: 80851 - DNA, 1046 bp, Glycine max
  Clone ID: PAT_MRT3847_44024C.1
ggctcgagaattttagggttttgctttcttgtggtttgggggaataactgcataattgcaagagtcctctttctttgtatttctacagaggatttcaaaggtggaggttgagattgattactctgaagctgtctcaaatataaaactgattacggctgcgagtatagtatagaaaggggatgacaacagagaaggtggaagttctgttgaaccaaatgacaaacaagatcaacatgataatgtgactcaagattcctctggagggatcactatcccaactgcaattcccacagtatcggttgtttcagttgaagagccctatgttggtcaggagtttgggtcagaagcagcagcacatgcattttataatgcttatgctacagaagttggattcattgtacgtgtgagtaaactctcgcggtcaaggcgtgatggaactgctattggacgcactcttgtttgcaacaaagagggattcagaatggctgacaaacgtgaaaagattgtgaggcaaagggctgagaccagggttggttgcagggcaatgattatggtgaggaaacttagttctggcaaatgggttattgcatagaatggatttccactcaatgaaccatgcaaccaactgaacaggacaaaagtgctgctagaaatatcgtgcaataatatagttgctgacctaggtatcagctttaggtgtcagctgagttctaaagttcaatttgccaagctcaatggaactctataatccattggattgctatttgagcagtgatatttaaagttcagtcaatgtaaggacctttgaatccattcttctgaagatacagtaacaaagtgtgactcaagacaggcatgtgaatgagatggaagccaaagaagaacacagttccgttgttaatgttgtacagtttgacccgagcctttagtctgggaaagatactagttaagtcaatttatcaatgtggtgttctttttattttagctgttggaggttgtcagatggctgtggtttttggttgtaatatatgattatgattgttgag

SEQ ID NO: 80852 - DNA, 323 bp, Glycine max
  Clone ID: PAT_MRT3847_44025C.1
gacatctacaatgatacaatatggatattcaggtctcacagagacacagacccttatgctgcctctttacacatagtaagctggtctttgtccgcctcacaattctttttacatgtacatacggaacatacctgacatcactttcttgaacactaggaaaaagacacacttaacacaggaacactggtatctacacatcgctactggaccaatgcgacggctcaagatgaaaggcagggcgtctcccgacagaaggatggcgtccgcccggctacgagcatctaacatacgctttttggcaaacattggaatgtgctgatcac

SEQ ID NO: 80853 - DNA, 1735 bp, Glycine max
  Clone ID: PAT_MRT3847_44026C.1
gctcgagcacgcacactcccaaacgaaaagcacaaaacaaaacctcttttaaaactcgaccaaaacaaattgtggttcagatccaatctctcttccttcttcacagcacttccaaaaagggcacttcacataataaaccattccattgaacacacacaccatcaaacaccttcttcttttttatacatcattgcctcatcttttgtaaattatagtttaatttcatgcacgtgagatatactatatagcaagcactgccatagaaggaaaagggttggtattgcttttgcgtaacatatcattggagtttccaatttagattaacatagtgtgttgattttgggattgatgcttgcggtgtcacctttgaggagcaatatcaaagatgaaaagaaccaaggagagatggagggtaatttctcaatggcaacaacaacaaccgatgatgttgtctttggtgacctttctgaagggaacttgttggagagcatcaacttcgacgaactcttcgtcggcatcgacatcaacggagatgtcttgccggacttggagatgttccatgagttctccgtcgacgtcaacaccggcgaggaatcgtcggagatgaactcatcggcagataacagcaaagttgagaatgatcagaatgtcatgatcaacactggtccaaaaaaagaagaggaagaagattaagcttcttgcaattcttcgaagcatttgctagcgcgtgaagctgaagcagcaaggtggagtcaaaggaaacaattgttggcagcagcaggagtaggtagaggaggaggaagcaagagagaagtgaacccttggcttacaccaaccatgggtttccctcccatgacatcaatgcaccattttagacctttacatgtatgggggcatcaaaccatggaccagtccttcatgcacatgtggcctaaacatccaccatacttgccgtcaccgccggtatggccgccacaaacagctccgtctccaccggcacccgaccctctatattggcaccaacaccaacgggctccaaacgcgccaacccgaggaacaccgtgttttccacaacctctgacaaccacgagatttggctctcaaactgttcccggaatcccaccacgccatgcaatgtaccaaatactagatccaggcattggcatcccggccagccaaacgccaccctcgacccctcgtcgactttcatccgtcaaaggagagcatagatgcagctattagtgatgttttatcaaaaccatggctgccactacctcttggccttaaagctccagcacttgatggtgtaatgggtgaattacaaagacaagggattcccaaaatccctccctcttgtgcttgagtgccaattctaagagagaggtgattttcctcttacgcgaggtgtgatggccataaaaccctaattcgacgacttctcatctctcttcccttgcatgttagaatattatgcgcatgcttgcttcctatttcacatctagcaaaaattaaaaggggagagaagactatttatatatataacttttggaactttctttgttcatgtgctatgtccagccaagtagtttagcccttttgtgaaatatatgtgagattataaaggctgtgatttttgtattagtcttagaagatcatatgagactaatatatgatgaggaatatataattgagttatgtaagtgaaatatttcttctttcatgtagaagctttact

SEQ ID NO: 80854 - DNA, 850 bp, Glycine max
  unsure (1)..(850): unsure at all n locations
  Clone ID: PAT_MRT3847_44027C.1
ggaaatgattgcaatgaaaagcttatgcatctcccagttattcgagttcttttctccagtgagaagatccaagatatcatttcccctgtctgcaaattccattctcattcttggacaaggaagcttatatgcatatgcaatttcctgaagctgctttgattatttttgtatcttttctgtggaaatcaatattcctggctcccttgatgttctaaagtgtacttgtgtggttcatcgataaattctatctttcatagtgctctgtattctctcaccttatagtgcattcctaggatactggagatcatgaaagattgcaagtatcattggactggtaatatccgtggagttctatatttctggaccttggtttttcaacagcttaaagccacctgtcctgcaaaacctgtcacagttaactgctggagtacatacctccaacaaagatgttggctgttcatgcaacttgcttatgctcatcttcttgatgttggctgaaatcatggttttctgtcagagaactcagcaaggttcgatataaaaggcatgatcttggcaactaggttgctccatttgttggaatagtgttattggattgcaattttctcattccaactatgtctatggctgctattgtgtaagttagtggagttggaggcttgtcttgttattttagtgttacatttatagccttgtcttgttctttagtgttaggtttatactttatagccttgtcttgttatttagggttatgtttatagccaatcatgttttgttgtcgtctttactcgacaatcttgatgcctttaatgctgttatacctattaatttttttgaatttatgttccng

SEQ ID NO: 80855 - DNA, 1111 bp, Glycine max
  Clone ID: PAT_MRT3847_44028C.1
cccatgctttcgcccacgcgtccgcccacgcgtccgcccacgcgtccgcccacgcgtccggaaacaggaacagaaaggtttgggaaggaagcagaaatcgggggtggtgtgagagacaagcatggcgacgtgtcttcgccttgggagatttacgactattgattcgctctctctcttcgtttccaccgctagattctccttttcttcatcatcttcgtcgtcgtcctcgtcgtcatcttccggtaagtccaagacggggaagaagctgatggatcgtctttccaccgttatcgacgccgtcaatgatcgcaaactacctcctgagctacgtggccagcgcagcaatgtcaggtcagaaactgacattatcaacgttgttgagcaaagaatatggcataccatggaagaagggaagtttgagaatttgccaggcaaaggcaagccgcttaagctcgacacaaatcctcatgcagatccagctgaagacaccctgtaccgtatcctgtcaaaaaacggatatgcaccggagtgggttgaacttaacaaagagattagatctaaaatatctgaatggaggaagtccttgaagaaagcttgggctactaagtgcagtggagatcactctgagtgggttgaaagttcattggtattgcacatgtaattaattatatttttttagcaggttttccggtataaccttattgtgccttttggtcggcaaatgtttggccttaagtgggagaaagagctaggttacttagaagaaaaatgagaatcattgttgttaaatttgagccagttggttcactatagtagaagattaaaatttgttattttcctgagaaaagtcatgccaggcgactaatcaactaggaactagcttaagttattcagttcaactattgttgattacttttaatttcttagcattatgttactggttatgattcctctttcaggcttattagtatggctatatttatatggttcataacctccgatcatgtacatcccaaggatacaatacaagtaaagatagtgaaaatgtatgtgactcaacaatattagttgtcctgacgattgtattatcagtttttgctttgagacaaaa

SEQ ID NO: 80856 - DNA, 380 bp, Glycine max
  Clone ID: PAT_MRT3847_44029C.1
caccatcccacgcaaccccaaccctcttctcgtttcctcacccccaccactctctcgaaaccccaacgtcttcaccttaaccgtgccgcgccgccgcagaaggattcggtttcgggtctcggccgccgcggagcccgatgggccgtcgtggtcgcaatcgctgctgcgcgggtcacggcggttttggggaaagtttggggaaatggtaaagaaggagacgggtctcgacttcgaaaacaggagtgtgaagaaagttggcgagtttgtgaacggagatgaattgcgaaggttggggactgattgggtgtttcggtttgtcgattggaatcgttgggaacggtggaagaatatcaaggattgggaacctaagcgaattggtg

SEQ ID NO: 80857 - DNA, 433 bp, Glycine max
  Clone ID: PAT_MRT3847_4402C.1
tccggaagagctattcctctgaagcttgctactgaggttcacactgcgtacctgaggtcttccgacttctaagtgattggcttgatggctaatgaaaatgctcgcacctgcattggggtggtaatcgtgtgaaccctgaggaggctaccaccattagcgagctgaagaagcctgttgaggagaaagaagctcctgggcatgccatatgatgacatagtacgtactgcctcggagggcaaccataaaattatgatatcaacataatctgcaaccctaatgtatcagggccataatcagtgcgtactttaagctagctatgctatggcttcgttctttgaaatgagagacctgatgaacatgtaccattctgatgtattgctttccttgaaagctaatgcatgcttcttatcttctgtctaaaaaatgaaaaaga

SEQ ID NO: 80858 - DNA, 491 bp, Glycine max
  Clone ID: PAT_MRT3847_44030C.1
ctttattttatccacatgattttccaatttcgtactggattcattgctccctcttctcgtgtatttggaagaggtgttttggttgaagattctcgggcaatagctaggcggtatgtatcatcatatttcataattgacattcttgctgttcttcccctcccacaggtggtgattctagttatcattccagagatgagtggttttaaatcacttaatacatatgactgcgctggaacatgatggtttcctccaatacagtgcctcgtctattgcgaataattccattatataatgaagttacaaggtcctgctgcctctttactataactgcttggactggagctgcattcaatctctttctttacatgcttgcaagtcatgtaattacaagatttctaacctctcccgctccagtggcaatccaatgttttaattgatttcctttcccttggtgagaggtgggtatgctgcttttccatgggaaatttgga

SEQ ID NO: 80859 - DNA, 148 bp, Glycine max
  unsure (1)..(148): unsure at all n locations
  Clone ID: PAT_MRT3847_44031C.1
atcctccncctaaaaattggtcaanatctatccaatctctttgncatattccttcttatnntcatctncgtcttcntcnctntngcntctagaattgaaaagttctncttcctgccanagtntttgacaccctnttccancctctaga

SEQ ID NO: 80860 - DNA, 591 bp, Glycine max
  Clone ID: PAT_MRT3847_44032C.1
ttggtagctcctgctcgtgtagggttggttgcacctattgatgttgttgttcctcctggcaacacagggctggatccctctcaaacctctttctttcagattaataagggtactgtggaaatcatcacccctgtagaactcattaagaagggagacaaggttggctcttctgaagctgtgttgctttccaagcttgcgataaggcccttctcttatgggcttgttgtcgtttctgtttatgacaatggttcattttttagccctgaggttcttgatctcactgaagatgacctcattgacaagttttctgttgctgccccacacatgtttggcaatgcttataagaacgtccttgctgttgcagtggcaacagaatattcattcccagaagcagacaaggttaaggagtacttgaaggatcctaaatatttgctgtggctgctgttgccgcacctgctattgattctagcactgctccagctactgcctccaaggaggaggaaaagaaggaagaaccagcagaagaatctgacgatgacatgggtttcagtttgtttgattaagttgtttaaagttatcgagttagtttaa

SEQ ID NO: 80861 - DNA, 263 bp, Glycine max
  Clone ID: PAT_MRT3847_44033C.1
aaaaaaaaacccccggggggcctttttctttttggggggccccctcaaattccaaccttttggggcctaaccccaaaaattttgccccacaattccttggggcacaccacggggattttctccccctggggggcctgggggttttcccttttgggggggattgggtagttttatgccatatgtgaacccccgtagaactggcatcaccggggcccccctattttttctcctagaagagtggtgttaagccttggggctcccgt

SEQ ID NO: 80862 - DNA, 1804 bp, Glycine max
  Clone ID: PAT_MRT3847_44034C.1
tgacgaggatgaattggaagcagaacttgaagaactggagggtgctgagttggaagaacagctggttcatccagcaactacagctcttgcttcttcattccctttccttctttcttaaatttttctgtggtgttttgacaaccaatacaacacgcctaggccaaacccaaatccaccgctctttattttcgtcttttctacccttcccggatcccaatccctaatctttctaccactctcactccaaaaatctctaattttttcatctgggaagatcggttgacgaatcgaggatccgatcgcttgcgaggaactagggtttcaatcgatcgcatcacacacaaacaatcatgtttagccggatgttcggtaaacctaaacaggaaaccaatgctgttgccactttggacaagctaaacgagacacttgaaatgctggagaaaaaggagaaagtgctccttaaaaaggtggcagcggaagttgaaaaggccaaagaattcacaagggggaagaacaaaagggcggcaatacaatgtctgaagaggaagaggttatatgaacagcaaatagagcagcttggaaatttccagttgcgtattcatgaccagatgatattgttggaaggtgctaaagctaccactgaaacagtagatgcattaagaactggagcagctgctatgaaggctatgcaaaaagcaacgaatattgatgatgttgacaagaccatggatgagatcaatgaacagaccgagaacatgaaacagattcaggatgcattgtcagctccaattggtgcagctgctgattttgacgaggacgaattggaagcagaacttgaagaattggagggtgctgagttggaagaacagcttcttcagccagcaactacagctcctgcagccccagtgcaggtcccagctgggcgccaacctactcgcccagttcctgcaaagcgaactcctgaagaagatgaattggcagctttgcaggctgagatggcactttgagcaggtgcctttcctcagctgtaacactatcaatttgtattgttatttgtgcatttactatggtagttaaatgatatgtgtgctccattttcacagtggaatgtccaacagttgcacaatttagttcttgcttgaatgatgtatcatagtttgaaatgaactaacctaagataacttgtgagaaaaagtatgaaaatcttattttaggctgttcttattggttttgcctctggctttgattaagccagaattttgcaggcttttttttgtgcatggcttcaatgaagaattgtaaccactattacgtggagaattctgcttctctcctgctcgcttatctttgaaattattgagctgaccagaggatgtatataaaagtggaaaaaaaattatcataaaagtcttcaaaacgtactacttttattttggatgagttcgaacccctcctttccattatacgtatcaagtatatgatgcatttggctatcttatattttatgtggttgagtttaacgtggtcagtttaatcaatgtatatcttaaacatgctacagcgaagtataaggaataagaatttggttagcctatgagctagaacacagccatgattaaggagtaagattttttttagtccataggaggatttgcaattccggggccctttttaaaactttggaaaaaccttggccccaaattttttttccctttttccccggggaaaaggccctggcacagccactgtgcaatgtaaaattttattttctttatacttataataatgagtaagtacttaagat

SEQ ID NO: 80863 - DNA, 445 bp, Glycine max
  Clone ID: PAT_MRT3847_44035C.1
ggaagaaacaagtaagtgagcgagatggggaacttattgcattacgtgggaacgttgcctgcctttatgatgcatgcattaattttgtcattgtacttgaaaatgaaaaagctgaactggttggaaggaaggttgaatctgcagatctaggaattaacttggaaacaccttcatttgatgatggcatatctgaggaatgcattaaaaccctgacagatagactgctgttggctgcaaaaggttttgctagtataagaactgaatttttagatgccaatctaaaggaaatgaaggctactataacatattttcagagagtgctttatgataatgatgttcatagagataagatgtgctcagaactggtaaaacacatctaggatgcttaatctgctgcgaacaagttctcttaagagcttcatgcttttaggctttaataacataa

SEQ ID NO: 80864 - DNA, 317 bp, Glycine max
  Clone ID: PAT_MRT3847_44036C.1
gggagggggtacattttttatatttttctttttatattaagttttctcccccaaaatattcacatcgaaattttaaccttctaaaacgcggacgaaaaatccctggaacaaaacaacatagaacggacgcccacaagacacaataacgtaattgaccacacaaagcaccaagccccagggggggaagaagagcaaatgcaacccacccccgctgccaaacaaaaaaagtgaaaccctcccaaagaacaagcaccccatgctctagcgcccatggcggccccctgcagagcacgttttttgcgtggcaaaaggaaaca

SEQ ID NO: 80865 - DNA, 256 bp, Glycine max
  Clone ID: PAT_MRT3847_44037C.1
cggcgggcaagctgccggacgcatcgagatggagctatacaccgacgtgactaccagcaccgccgataacttacgcgcgctctgcaccggtgagaagggcgccaggcggagcggcaagcccctccactactaaggctcgttcttgcaccgcgtgatcccgaacttcatgtgctaaggcggcgacttcaccgccggatacggcaccggaagcgagtatatctacggagccaagttcaccgacgagaacttcatgaag

SEQ ID NO: 80866 - DNA, 201 bp, Glycine max
  Clone ID: PAT_MRT3847_44038C.1
gaattgcgctataatttgttgaatcaaaaaaaaaaaaaaaagcggacgatatagcggacgctctataggatccaagtttatgtaagcttgcatgcaacgtattatgtcttctatagtgaaaccatagtccaattctttagaccgtcgttttataacaaaaccattgggaaacccatgttattccccatgtaaatcatcttg

SEQ ID NO: 80867 - DNA, 359 bp, Glycine max
  Clone ID: PAT_MRT3847_44039C.1
cttaactctaactcgctaacccagactcagtcgcatcgagccggccttggcacatgactgaactacactctctgtgtctatcaccacacatcagtgggcactgctcacaagggcctcgttcccaataactacgtgacctgagcccatggaggccgcaatcatgaactacattctccaccggtccagcgccaatgtcaccgacgattcatcctacgacaacctggacggccaagcactacacggactgaagaacataatcgacgccttcgaattcgacatggtcggcaacacctatgacctagtcgctctcccctgaggattacagggtgatgagaatcagatagactgaaaagatcttg

SEQ ID NO: 80868 - DNA, 558 bp, Glycine max
  Clone ID: PAT_MRT3847_4403C.1
tagatggtacagtagttcatcacaactgatcctatctatatagagtatcatgattattattggggacaaccaatctatgatagcaaagaattatttaagctaatggctcttgaatcacaacatgcaggattatcatggttgacaatattaaagaaaaaagaatcgtatgaacaggcattttacaactttgaacctcaatttatcgcacatatgactgaacaggatattgattatttaatgaaattcccaaacattattcataatcgtaaaaagttagaagcaattgtgagccaagcgaagggatatttaaaaattgaaaaagactatggtagttttagtaaatttttatggtcttatgtaaatcatcaacccataaatatgggttataaaaaacctagagatcgtaaaaaagttgatcaaagagctactcaattatcaaaagatttaaaagcatatggttttaaatttttaggtccagtaaccgtgttctcattcttagaagctgctggattgtatgactcacatcttgaaggatgtcctttcaaaccaaatcatgag

SEQ ID NO: 80869 - DNA, 384 bp, Glycine max
  Clone ID: PAT_MRT3847_44040C.1
aagacagataggagttatatgatacagtccctgccttcaccaaattataagctgggtaggaagctattgagcaatgtgaaataattaggagatgatacccagtgtgtataattaagcacccgggtaccaggtgcagtatggatcaaaggtttgcagggaccattaatcaagtgaagctacaagtgttgggaacctttccttgaaagatggacaagaattaaagagtatggagatgaggcatctaagctgagtgaattccctttcctctgcactcccagagctttgagttgagccagggtgccgctctggcctgttgattggcagctcagctaatcatccctggttttccaggcctatcgctggatgattgactccagagatgac

SEQ ID NO: 80870 - DNA, 257 bp, Glycine max
  Clone ID: PAT_MRT3847_44041C.1
aggctcgaggcccactgtaaggagtataaaaatctgaattccttttttgccatcgttatgagactaagtaacgttgctgtgagccgcttggcactaacgtgggagaaactggccaggcaagttcaagaagttctatgcggagtttgaaagtgtaatgcgcatgattgcaaatacggcactacagtgagatgctacaggagccaacccttcaatcctgatgcaactcatgctagtaagaaggagcaggatttccggag

SEQ ID NO: 80871 - DNA, 269 bp, Glycine max
  Clone ID: PAT_MRT3847_44042C.1
ggggaaaaccccaaataattttatattaccggtaatgcaaaaagaggggtaaataaaaaaaaaaaaaccaagaaaaaaaacccattttaagttgttatcaagcaggtccaaagccaaagggaaagggtgaaaacttttttttaaaaaaaaccaaaagcttctaccaataaatttctttgcctttttaaacaagatgagggcattaacctttgtgggaaaagaaagaattgctccctttttatgagttaaagtgctcaacacccatttta

SEQ ID NO: 80872 - DNA, 232 bp, Glycine max
  Clone ID: PAT_MRT3847_44043C.1
ctcatccatttacacaacttaccacgcctgacactatacttaactgccaccaacccttacccttacccaatacttacatcttttccttcatctattcttctttctctatacctgcaccttttacctggcgaactccatcttgactactaactcattcttaactctcttttttcattactctttttaatcaaccttatttttgaacaaataaaaaaaacacttttttacttct

SEQ ID NO: 80873 - DNA, 637 bp, Glycine max
  unsure (1)..(637): unsure at all n locations
  Clone ID: PAT_MRT3847_44044C.1
cacgcgtccggtggcggagatgacgaaggtggcgcagcagaaggggagtgatcctctgctttgggccgttcagatgtattccaatttgaactccgccggagagtctctaccctccctccaactcgccgagtttttggtctcttacatttgctgggataacaatgtccctattctatggaagtttctcgaaaaggcattgacgcttcagatcgttcctcctatgcttctcctcgctctcctttctgtcagggttattccatgtagacatgtccaacctgcagcgtataggctatatttggaacttgtcaaaagacatgcttttgaacttaaatctcagataaacaggccagattatcaaaaggtcatgaaatctatagatgctgttcttcatctttccaacatatttggcatgccacaaagtgagcctggcattctggtggttgaatttattttttcaattgtctggcagttgcttgatgcatcattggatgatgaaggtttactggaatttactcctgacaaaaagtctagatgggctacactatatcatgacatggaactggataggcatgataattatagtgaacaaaggactgaacatcatgagaaattgcaaaatgcanatacactttatggc

SEQ ID NO: 80874 - DNA, 1172 bp, Glycine max
  Clone ID: PAT_MRT3847_44045C.1
gctgaataaatggtaagcagtgccaagtctttaaaagatgttattgtgaggttttctgatatgtttctgtttttaagagcactgatttgtggtgtttttatttttattttatttttctgttatgctttagttctataaggagcactaacatgcttataattagtgtacttgctgttataaattccagtcttctatttttctgccttttcatattttctcagtttgcttttgctttgtttttctgtataacaacacacactataaccatccttctaaggagggaagaaggagggaaaatgtcattagagaatgagtctgagatcacccatctcaagaaaaatcttaaagtccaaatggaaagaaatgtgtcactagagaaagaaaacaagaatcacagacaagaagtagcacgtttgaagtcacagataatgtcactcaaagcacataacatagagaggaaatccatgctgtggaagaagatacagaaagccatggatggtaataattcagatacccttcagcataaagcagcagttaaggtaacaatgcttgaaaagagtccaccaaatgagagagtgcatacaaattcagatttgctagaaacacctaaagttaaggacagatcagtaaaagtaccaccacctgcaccctcttccaaccctcttcttccttcacacaaaactgagaaaggaatgaaagtgcagccattggcattgccaagaacagcaccaccacctcctccaacaccaccaaaatcactagttggattgaaatcagtgcgtcgtgtgccagaagtaatagaactgtatcgcggtctcgtgggcggacgcgtgggcaatgataacaaaataagtaccaatggaactcctgcagctgcattcaccagaaacatgattgaggaaattgaaaatcgatcaacttttctgtcagctgtaagtttagttgctgtctgcctgtttttcaagttttgataaatatttacatatatcacacaatgctatcttgatactcaaggaagcataaacactaaatagtagttgtgtcataatatctcatcataattagataagcataaacactttgaaatttgaatactcttagctacattttaccattatttttgaaaccttggtattaattgagatggagatgggaatatcacaataattaga

SEQ ID NO: 80875 - DNA, 259 bp, Glycine max
  unsure (1)..(259): unsure at all n locations
  Clone ID: PAT_MRT3847_44046C.1
cagncttaatcgatatttttttttaaactctttatcatttgccacttatctacatgctcccctnaagatctnctttatttatgtaaaaggaggcaacaggttcctgccactaatatatatcattctttattcaagttcatttaacttacccaaaaaagccaagatgctagtcccctgatcaataaaacaaccttgcactcatttgatgtgaccatatattattctatcctctccatcaatacccttcacatttcaaaac

SEQ ID NO: 80876 - DNA, 308 bp, Glycine max
  unsure (1)..(308): unsure at all n locations
  Clone ID: PAT_MRT3847_44047C.1
ccncccactcttccggattttctcnctttaacaacagaaagaaatccagggttttcttttcggtgggcgaaccaatcaaacatctcacaantccaccttcngcaatgctcctcttaatcatctcgccacaaaagccgctagaaagtcctctctttttaccttccgagtaaaaaagcctcacccttttacgcccggcaccgtttcccttaatgacatcctaaattaccataatagcacggaacttctcatccggaagctccctttccatcggctctttctctacatcgcacattatttcaaaacctatt

SEQ ID NO: 80877 - DNA, 242 bp, Glycine max
  unsure (1)..(242): unsure at all n locations
  Clone ID: PAT_MRT3847_44048C.1
gtccctcacnaaatnttccttcattctcaacnganccgccgtgtngttccagncggaggctactccntatncnaccgcgnatccatnccgctttcctctcctcgcttttctcacaaaacaaaaaannttnaaaatntctccgcagnctgtgtattatcgttatcgttnactgagttaggttttgctgtncttcctagggtnttattgtgtccaatnacaagaggagggggacgagaaacaaa

SEQ ID NO: 80878 - DNA, 384 bp, Glycine max
  Clone ID: PAT_MRT3847_44049C.1
aagaaaataaaggtctgggatgctgttagcggtgtcagatgttatacttttgaaggtcacgatgctcctgtttgttctatttgtcctcatgtgaagcaacatgttgattttattttttcaacttcaaccgacggaaagattaaggcatggttatatgattctttgggagccagagttgattttgatgcccctggttatggttacactacattggcttacagtgctgatgataacaggcttttttcttgtggaactgggaaagatggagagccgtatcttgtggaatgggatgaaagtgaaggatatataaaaagaacatacaagggacttaagaaaccatgcttttctgccatccattttgattcaactcagaaaggacttttg

SEQ ID NO: 80879 - DNA, 222 bp, Glycine max
  Clone ID: PAT_MRT3847_4404C.1
acctaatgcagcatcgctaatctcttcattccatggctttgcgcaaccagcataccgtggatcaccctagtttcaaacgcggtatcgtcggcgatggtggctaagcaaagacggcctttgtgaacaggcatatcagcggagaattcgataggaaatatgagccaaccatcggagtggaagttcaaccattggatatcttcacaagctgtggcaggatacgat

SEQ ID NO: 80880 - DNA, 289 bp, Glycine max
  Clone ID: PAT_MRT3847_44050C.1
cccttggatatatttgataggaataaaagtaagagtgggtaaatcccaggatacaaacttgtaagcagtaaaattgggggatgcatgctgtctgaaaaactggttccattttatacgaaatgcacacaatataattacaagtactgccgtcagcagaaagagacacacccatcgacttagcttggactttgacattttcccctcttcttcagaaggaccaaaaaactggccaaaattcccagcttcagcatcgcccaatttatgcctctattttaaaaaactttctgga

SEQ ID NO: 80881 - DNA, 264 bp, Glycine max
  Clone ID: PAT_MRT3847_44051C.1
cctaaaaatgagatgcagtggccttggtgctgaatggggaaaggtatcattgtatattttaacttattattgcctatttatctagtagtttgtgtatggtgaccaatgggggcaagtttatcaatgagctccttagctgcagtgttgtgtgttagttttcatagttctggggcaagtttatcaatgagctccttagctgcagtgttgtgtgttagttttcatagttctctgcactgtatctctttgtctctctcttttctgttt

SEQ ID NO: 80882 - DNA, 481 bp, Glycine max
  Clone ID: PAT_MRT3847_44052C.1
ggctcactccgggacagggagagtgcactcccgagtccgcttcggtagtaaaaatgctcccgccccaaagaaagcctccaggggatcgggacgagacaccgacagacccctttggtatccgggaggcaaacctctctaatcccactatgggacacttgtcggaaaataatcgatacagccgtttgtgatggggataacggcggagtacctgcaatgcaagctggagtcgcttgagcaaaaacttgcaaagaacagggtggggaacatcatggaaaccagtaccgagctcgcgtacatgaagaccacgctatcttcaaccctaaagagaggtgtctgggctcgcgatgtctacgcgggcgcggaccacatccatggaatatctgcgctgctactcaacttgggatttcacatggtggagtgcttcacggctactacacggcaagtacggccgaaataggagtacgtaaatcaagggtcttca

SEQ ID NO: 80883 - DNA, 389 bp, Glycine max
  Clone ID: PAT_MRT3847_44053C.1
cgcaacgcaacgacgacgacgacgacaacggcacagaacagtttaaaacggaaataacagtcgccggcagagaagcgtaacttttccggcaaggaaatggcgcgctccggcgacggttacggtgtcggagtggacgagtcgtatcgcgcgctgccgtggctgtacctgacgttcttgtcgatctggttcttctcttcttgctcttggaccgtttacacctacaaaacgcgccattttcagagcagtggaataatttgcagtggacacttgcttcggttccgttgattaaagcattacagctcatgctgtccttccctttctggtattcctgcttcaattttaaggcctgttctttgtggatgtcattcggggtggttgtaacaggggtg

SEQ ID NO: 80884 - DNA, 714 bp, Glycine max
  Clone ID: PAT_MRT3847_44054C.1
ccacgcgtccgcttgaaactctgttttttttttcttgttgccaagaaaggctctaaaagttttgaagttttaaagagcaggggaaaaccagagcctgacttccttgttttgtgtgtctgtgtctcccaagattctgctgaggccttaagggagtatattacatatctccatgtgcggtgtttccaaggggaaaccttctcaaattgatttgatcatggaggagaagtatgcaaaagaagggatgcatcataagatttctgctttgcttgagttttcagcgacggatgatctaattggtttcaaagatgctgtggaaaaggagggtcatgatgttgatggggtggggttttggtatggaaggcgtgttggctcgaagaaaataggttatgaagagaggacacctctcatggttgcttccatgtttggaagccttgatgtatcaacttatattcttggaatgggttgtatcgatgttaatcgggctagtaggtcagatggggctactgctcttcattgtgctgttgctgggggttctgccgcttccgttgaggttgtcaagcttttgcttgatgcatctggtgatgttagtgctgttgacgccaatggtaaccggtcaattgacttgattgtctctgtggctaattctatcttcaatcaaaggtcaagtgtgctacaggccctcctgggaggtacaagtgatgctgatcaggcatg

SEQ ID NO: 80885 - DNA, 814 bp, Glycine max
  Clone ID: PAT_MRT3847_44055C.1
ggctttttcttttcccctccctctggcaggaagggcagggaaaacggcaatttaagagagacccttttcctctttctctccacattccaagtttccaacctaacaagaccttgtccatctaaaatatgagttccaaagcgtggcttgcgttccttctcctggcactggccatggtcgctgaaacatatgccacaatagatgaatttgcaactacgttagaagaatttgaccctattatctctgatggtgatgctgatctcattgtagatgacaatgagtttttgatgagttctgaatcaacacgtcggtcactgatgcatggtcatcctggcaaaggcagaggcagagctaggtatatcagctatgcagcccttagaagtaaccaggtcccatgcggtaggcgtggacgttcctactacaattgcaaccaaaggggtagggcaaacccttacaatcgtggttgcactgccatcacacattgtgccagagacacaagttagatgaacaaaacaagccacaacaaagaggaagatgctgttgcatgtggctaataatactcttcatctttctcattgggattcttgagtaacatatataattggttgcaacaacttcctccgttccaacaatttgcatattttgaagtcttattttacgttatgcggggtcttgtttaattattagtattgcgacaaatactattataaggtggaaacaacttggtctatttctatttatctatataacatctctgtttacattcttcttattataaatgtggaggaaatacacaatattgacatttaaaaaacac

SEQ ID NO: 80886 - DNA, 139 bp, Glycine max
  unsure (1)..(139): unsure at all n locations
  Clone ID: PAT_MRT3847_44056C.1
gttcatttgccattngagtttcattncactctnatttagctctcctcntcgnatatanaaaggnntccttcttcgctnangntctntcgcgaaaaactccccttgctgaggttgctccatcacctaancanttccnnac

SEQ ID NO: 80887 - DNA, 678 bp, Glycine max
  unsure (1)..(678): unsure at all n locations
  Clone ID: PAT_MRT3847_44057C.1
acgcccacgcgtccgattttggcatgtttgatgagactgtcttggcctgaataaaatgttgcaggtggacttggatactgcggagcctcaagctcaacaaagtgaacaaacaagtgggttttaatggccttctgtatttttttctactacatatatatgctgtggaactcaaaatcccaacacttttatttgctgtgcagatgaatcaaagtttgttcgtgtatcttttcagttagaaaagaattgtaacttcggtgaacagtttcttatcgttggagatgatcctgtgcttggttcatgggaccctttagaagcattacccatgacatggtttgaaggacatgtatgggccgtggagctggtgagtaaaatctgttcagaattttaaaatattgtcggattgaaaacttttataaatgttgtttttgcttcctttgtgtaatcaggatatgcctgctggaaagtcattccagttcaagttcatactgaaaggaaaagggggggatattatttggcagccagggttggatcgaatgatccacacttgggaaactatgaacagaataattgttcttgaagattgngagaatgcagaacttcagaaaataatagaggaagatcaacttgctgagccaaatgaggaaccccaggtcgacttagaagtgccgactttagctg

SEQ ID NO: 80888 - DNA, 337 bp, Glycine max
  Clone ID: PAT_MRT3847_44058C.1
agcgaagacccttgcctctccacgcaaaggacaccacaaacacgggggacacagtggtactgaaaagagacaacacccggcaacgaggaagcggaatctggtgaaaccaccacaaaaggcaaccagccaagcgcagaacattgaagacttcacacggcggaatccaagctacaggccagctgaaaagcagttgggacatccaccaatgggagaccatcacagaaagacgcaacgggcaagcgccgattcaaacgaaccgcaacggaacccaaagcacctaaccagacggaaccacctccgacgctaccggcccgagagccaaccaaagcacaccaaa

SEQ ID NO: 80889 - DNA, 179 bp, Glycine max
  Clone ID: PAT_MRT3847_44059C.1
gacgtacggtagagtccttgctgacgccttctgcttcgtagtgagctgagagccgacgtctcaccggtctagaagggctgccatcattgactatctggcggagccagccgggatgggacaccggtcttcgatctctgcggcccgagtcggctacacgtatggtgatgatggcacttcct

SEQ ID NO: 80890 - DNA, 386 bp, Glycine max
  Clone ID: PAT_MRT3847_4405C.1
aaacaagatgggttggctgtgcggacttcagtgggcctcgcgggttggacaatgtagctacctaaacttatggccctaaggtgggctatgacttagctgttgctgcgatactcgacgaattcatacactagggcgcgttggaacattcttattaaagaatccaataagggcactcattggacctgtccttaatcctacaccttgaccataaacttgtctggtaggctagacaggtttgttggtcacttgtaccacatagccaaaagtgagggttcaattgaacgtaccgcgagaaatcatcaatctatgatgacaatcctcgtggcacgttcaactgactctcttctcacaggcttggtactgactactatgtctttttaacacat

SEQ ID NO: 80891 - DNA, 945 bp, Glycine max
  Clone ID: PAT_MRT3847_44060C.1
cgcaacatccttcatcctgtaatgactgacttgaaagtcaaacagcttcctttgttcactcttctggtccgcaaactgagcgagcagtcctgcgccgctaccgtttgtgaggctgagataacgggtgtctgtatggtttgatgattcttgaggcacctcgtaatcgacccagagttcgtcgacgctagatgctgtgtacttgcccacaggttgtgagagcttgctatcgcggtaggtctcgccgaagccgcggccaaaccattcgactcgttggaattgcttaggaagctccataacgagaccgatgcgtggaagggtccgaggtaggttctcaccctttggtgtaccgacaacatggacagacagagtattgttggcgctgaaagtgtacgtaagaacgcagtcgacagaccaagagagaactggaggtgcgacacgttgatgcacggtaaccttgagggtctctgagtcagactgtgaccattcgaccttgcgagtcaatggtttcgcgtgatgcagttgcttgtctttccaatcccaaccgtcttgtgggatatcgtagtcggtaggtgcgcggaagatgtcaatttctggtgccttggagagaagctcggtagaaccttgtatccaggatgtgaggctaccatgaagagtgttgaactcccaaatggcttgatccgccgtgatcttgagggtgttcctgaatggtttctcaacagtgatttgcttgcccgatgactgaggtcgcttcaatggcgttgctggtgtgatggatatctgtgctgtcgcgatctcgaaacctgccttgagatatgacgtagcctccttcagttgaaacgagatgctgagcagggtctcctctcctgaaccttcaatctttggaagctgtacatcaaaggtctgaccaggtgagataccagaaggaacctctaggctccctgatac

SEQ ID NO: 80892 - DNA, 1464 bp, Glycine max
  Clone ID: PAT_MRT3847_44061C.1
aaagccataacttcttttcactttctttccttacccacctacgtttccttcagatccaaccaattccatcgtcaccaggaacacaccccttttgcctattcagctttacctctcactcttcaactgtgtctctgataaggttcaaccctttttttgctctctatgccattccaacaggatgggcaagtgcaagggttgtggaaagttaggaagaatgaggccaagtcatatgagtgcttatgaattttctctgatgctggctcctgttgtttctgtttgggattgcatagttcgcaaaatgaggtactcctacagacctgagtgggtgtagtggttcggaacatagtagtattagtcttgatacttcaacaaataatatatttagcattattacaattagggaaagagtggaaaagaattacagaaaagaaaaatgtatacagctctaaagaaattcacttgaaggaagtctcaaagacgtcactttagtatttactatttaggtgtagtaaattatatggataccatggcatgcaataaagggcaaaatgtgagaaaggcgaagaagaagcaggtgaaagacgagctggatcgtcttaaacaggctgagaagaaaaagagacgcttagaaaaggcactcgcgacttccgcagccattatttctgaactggagaaaaagaaacagataaagaaagaagagcagcagaggctcgacgaagagggtgctgctattgctgaggcagttgctctgcatgttctactcggcgaagactcggacgagtcatgtaaggttgtgatagataatggtaaccaaaatattggcatctccgtaagtggagaaagtgcttgcttccctcatctagagggcggcggcggttggtcttttgaaagagtgggttgggtctctgatgcatacagatatgggtgcgacaggggtgctgctgaaaacggcaaatggtccttcacatccggccctcttgagaagaacgtgtatgaacccctatatgaagaagcaggatggggtcctactggattctctgttgatcttatagcagcacaagcagttagatcactccatattgcaaaggaggcggatgaagcaaggattatcttctaaaggaatgctgaatgaagtcttgtttgtgtcttttctggtcactggagatgaagtcttaatcttctgttatcttactggaggttgtcttctgcatattacttctatataatatgcttgtcagctacgttctgcttcagttgtgactgaagaactttttgctgtgtcatcatattttcttctgattttcattaactgcatgcaaggctgctaattttctattggagtgacttttcatactctgattgtaatggagatttatacttttttgagttgattacaaataatataaatgctcgagtggaactcaatgactcataatttatatatacttgcattgtggcctcttg

SEQ ID NO: 80893 - DNA, 659 bp, Glycine max
  Clone ID: PAT_MRT3847_44062C.1
ctttccttacccacctacgtttccttcagatccaaccaattccatcgtcaccaggaacacaccccttttgcctattcagctttacctctcactcttcaactgtgtctctgataaggttcaaccctttttttgctctctatgccattccaacagatctgttggctttttcaggatgggcaagtgcaagggttgtggaaagttaggaagaatgaggccaagtcatatgagtgcttatgaattttctctgatgctggctcctgttgtttctgtttgggattgcatagttcgcaaaatgaggtactcctacagacctgagtgggtgtagtggttcaaaacatagtagtattagtcttgatacttcaacaaataatatatttagcattattacaattagggaaagagtggaaaagaattacagaaaagaaaaatgtctacagctctaaagaaattcacttgaaggaagtctcaaagacgtcactttagtatttactatttaggtgcattaaattatatggataccatggcatgcaataaagggcaaaatgtgagaaaggcgaagaagaagcaggtgaaagactagctggatcgtcttaaacaggctgagaaagaaaagagacgcttagaaaaggcactcgcgacttccgcagtcattatttctg

SEQ ID NO: 80894 - DNA, 1245 bp, Glycine max
  Clone ID: PAT_MRT3847_44063C.1
ctcacgcgtccggccacgcgtacgcccacgcgtacggtgaattaaagtatattcacatgtgcgtttctctgactaacaggattgaatcaacataaatattccgttttgcgtttctctgcctaaaaggattgaaagatgggtcaagcactaggttgctatcaagttgatcagtcaaatgtggctatcaaggagcattttggaaaatttgatgatgtcctagaacctggatgtcattgcctgccttggtgtcttgggtaccagattgctggtagtttgtcactgcgtgtgcagcaacttgatgttcgatgtgagacgaaaaccaaggacaatgtctttgtcactgtggttgcatctgtgcaataccgagctgtgtctgagaaagcatctgatgcattctataggcttaccaacacaagggagcagatccaatcatatgtttttgatgtcatcagggccagtgtaccaaagttggagttggattctgtctttgagcagaagaatgatatagcaaaggctgtggaggaggagcttgagaaggccatgtcaacctatggatttgagatagtccagactctcattgttgatatagagcctgatgttaatgtcaagagagcaatgaacgagattaacgcagctgctagattgaggttggctgcaaatgagaaggctgaagcagaaaaaatactgcagatcaaaaaagctgagggagaagcagaatccaaatatctgtcaggactcggtatcgctcgccaacgtcaagccattgtggatggactgagggacagtgtgcttgctttctctgagaacgtgcctgggacaacagctaaagatgtcatggacatggtgctggtgactcaatactttgacaccatgaaagagattggagcatcttcaaagtcctcatctgttttcataccacatggtcctggcgcagttaaggacattgccatgcagattcgggatggtctgcttcaggccaccacttcacagaattaagctttcctggagttgtaaataacaaatagtagcgtgccagattttttttcagtaaatgcttttcttgtttgaacttaaaatgtctgcatctttactcttatattggatagattcatggcagtgtctatttttatgcgtgtaagtactgatgtgcagttttgaatacttgtttgaggatagtcttaatgtcaagttgcttgtgaatcatattatttgggggtttgttatgtaagaattacttcccagagg

SEQ ID NO: 80895 - DNA, 131 bp, Glycine max
  Clone ID: PAT_MRT3847_44064C.1
ggctcgagcacttggccgaggatcgtctcagccaatccgcagttccagccgaggtgggtcacttaatcggaaagttcagctccgctttgggccgggccttcctcttcgatctcattcccactgcacacaac

SEQ ID NO: 80896 - DNA, 658 bp, Glycine max
  unsure (1)..(658): unsure at all n locations
  Clone ID: PAT_MRT3847_44065C.1
agactcggccgattcttgtaatgttgttataaatgnctgtgaatgcaagacctggaattataatcggctcgagggcctcttcatggatgaaagaagagcttgttttcctcatctagatggtggtacgtggtctgtctctgctgaaagcggcaaatggtccttcacatccggccctcttgagaagaacgtgtatgaacccctatatgaagaagcaggatggggtcctactggattctctgttgatcttatagcagcacaagcagttagatcactccatattgcaaaggaggcggatgaagcaaggattatcttctaaaggaatgctgaatgaagtcttgtttgtgtcttttctggtcactggagatgaagtcttaatcttctgttatcttactggaggttgtcttctgcatattacttctatataatatgcttgtcagctacgttctgcttcagttgtgactgaagaactttttgctgtgtcatcatattttcttctgattttcattaactgcatgcaaggctgctaattttctattggagtgacttttcatactctgattgtaatggagatttatacttttttgagttgattacaaataatataaatgctcgagtggaactcaatgactcataatttataaaaacaaagattctgccc

SEQ ID NO: 80897 - DNA, 1768 bp, Glycine max
  Clone ID: PAT_MRT3847_44066C.1
acgcgagctgttttcgcttgggctttattggtaaaggggtgatgtgaattcttgaagttaaaactgattcgtcggaggagattacaaaatttcaggctgtgaagtgtgaattaaaatatattcaattttgcgtttctctgcctaaaaggattgaaagatgggtcaagcattcggttgctaccaagtcgatcagtcaaatgtggctatcaaggagcattttggaaaatttgatgatgtcctagagcctggatgtcactgcctgccttggtgtcttgggtaccagattgctggtagtctgtcgctgcgagtgcagcaacttgatgttcgatgtgagacgaaaaccaaggacaatgtctttgtcaatgtggttgcatctgtgcaataccgagctgtgtctgagaaagcatctgatgcattctataggcttaccaacacaagggagcagatccaatcatatgtttttgatgtcatcagggccagtgtaccaaagttggagttggattctgtctttgagcagaaaaatgatatagcaaaggctgtggaggaggagcttgagaaggccatgtcaacctatggatttgagatagttcagactctcattgttgatatagagcctgatgttaatgtcaagagagcaatgaacgagataaacgcagctgctagattgaggttggctgcaaatgagaaggctgaagctgagaaaatactgcagatcaagaaagcggagggagaagcagaatccaaatatctgtcaggactcggtatcgctcgtcaacgtcaggccattgtggatggactgagggacagcgtgcttgctttctctgagaacgtgcccgggacatcagctaaagatgtcatggacatggtgctggtgactcaatactttgacaccatgaaagagataggagcatcgtcaaggtcctcgtctgtgttcatacctcacggtcctggggcagttaaagacattgccgtgcaaattcgggatggtctccttcaggccactgcctcacagaattaagctttcttggagttgtaaataacaaatagtatgtgtgtcaggtttttttcaggaaatgcttcttttgtttgaacttataaagtctgcatctttactcttcttatatttgatagattcatagcagtgtctattttatgtgtaagtactgatgtgcagttttgaatacttgtttaaggattagtcttaatgtcaagttgcttgtgaatcattaaggaatttgttatgtaagaattacttcccaaaagatgtgtttttcatttatgctggtgactcaatactttgacaccatgaaagagattggagcatcttcaaagtcctcatctgttttcataccacatggtcctggcgcagttaaggacattgccatgcagattcgggatggtctgcttcaggccaccacttcacagaattaagctttcctggagttgtaaataacaaatagtagcgtgccagattttttttcagtaaatgcttttcttgtttgaacttaaaatgtctgcatctttactcttatattggatagattcatggcagtgtctatttttatgcgtgtaagtactgatgtgcagttttgaatacttgtttgaggatagtcttaatgtcaagttgcttgtgaatcatattatttgggggtttgttatgtaagaattacttcccagaggatgtgcttttctttcagtcctgtcttgcaagtgaatgtgtaaatttgtagttctctatatttactctttgataaaaaatggttcccaa

SEQ ID NO: 80898 - DNA, 3125 bp, Glycine max
  Clone ID: PAT_MRT3847_44067C.1
cttaatgcaggaactgctggtatttggagaatagctgctatcaacgaagctggtgggtggaaagacagaacaacagtggaagatatggaccttgctgttcgtgctagtcttaggggatggaaatttttgtaccttggtgacctccaggttaatcaatgttccatctacttacctattagtacttccaaagttaacaattaacggagaatatgaatgacatatgattatgaattatcatttcaattttcttatactaagtaatggtgccttttttttaaatggtaactttatataggccaaaagtgagcttcccagtactttgagagccttcagattccagcagcacagatggtcatgtggtcctgctaatttgttccgcaaaatggtgatggagattgtgaggaacaaggtaagtactcattgcagttaagtaatatatatatatatataaagggacaatgttgtttaagtaattccatgtctgttctgatgttttcttttgtttacatttattttctgcagaaagttaggttttggaagaaagtgtatgttatatacagctttttctttgttcgcaaaatcatcgcccacatggtcaccttcttcttctactgtgttgtgattccccttacaatcttggtcccagaggttcatgttccaatctggggagctgtttatattccttctgtcatcaccattctcaattcagttggaacaccaaggtccattcaccttctgttctattggatcctctttgagaatgtgatgtctttgcaccgtaccaaggcaacatttataggtctcttagagtatgggagggctaatgaatgggttgtgactgaaaaacttggtgactctgtcaataataataagaataaatcaggagatgctgccaagaagaataatgccatcaaggccacccccaaaaagactcgatccaaatttgttgaaaggtcagttcttaatttatttattttatttttatttgtatttttcgaaagcaaataattgtgtttgcatttggcattaattatagtttcttctctacatctcgattgtgaatttgtgattgtcaatcatgcacaaactggtattatggagatgggttctagactgtgtggtcaataatttaatgattgcaacaaggaaataattttgataggttcctacttattagtgagtaatttttagttattcttcgttgtaaacagttaagattctctatgagtaggtgagcatttctttgatttttttttaattccatttccaaatcaacggcatgccaccctaatcaaaacgtttctgtcacatgcacatgaatatgacataagattttagaaaaccacatgcccatgtcaagatttcagaaaacccacatcaaaataattttagtatgaactcaaaacatgtaatcaaagaggagttatgtcccacttttctactccattattaactctcactttattaaacataggccacgttaaaagagaattcaaatgtacttactgtattagccaaatcacactttacattattgacaagtaccatatgcactttaagaggtcttaaattttctcatattaggcctctaattgcaacaaatattcatttttcatcatctttttttcttcttctgtctaattatgatttctttttcttgtttgaacatgataacagacttaatttactggagttgggatttgctgccttcctcttcgtatgtggatgctatgattatgttcatgggaaacacaactacttcatctacctcttccttcagaccttaacattctcaattgtaggatttggctacgttggcaccatcgtgtaaacctcattgagccaaatttctcaagttacttaagtttcaccaatgttgtgtccatatttttctagtttctcctaaaaaaaatacatcaagggaggctgatttcttcaagcaacaaacgcagtaccaaaatcatctacagctagtttagctcaaatcattttcaattcggaaagaaaaaagtcctttccaagatttcattgccatccatcatcaagaagatacaaatcatcacagacaaagtgctgttattactagaattgcattatacaggcttaagtgcagctatgaagaagtacccaaaaaaagtggttaaattagagccttagaaattaagtagacagtgtgattttgtttgcatagattgttttgtgagattttatagttatatatttcgtgagtccttttattttaggtttgcttagtctgagcccaataatgtggtggataaaaatgcgcttctaattcatgttatttgtcattttttcaccaagaaatgaattttatttaccatagatgcaataatttgctgctttctttgacatcttgtcggtgtggagaactaaagagtaaaataaaggcatccttcaatatttcaccaggaacacaccccttttgcctattcagctttacctctcactcttcaactgtgtctctgataaggttcaaccctttttttgctctctatgccattccaacagattttgatgattctgcatgctctatgtagcttactctgcagttgggaagggcataccagaacaagagtgtaattgcagtgcacggatttattaatagtcttgtagatctgttggctttttcaggatgggcaagtgcaagggttgtggaaagttaggaagaatgaggccaagtcatatgagtgcttatgaattttctctgatgctggctcctgttgtttctgtttgggattgcatagttcgcaaaatgaggtactcctacagacctgagtgggtgtagtggttcggaacatagtagtattagtcttgatacttcaacaaataatatatttagcattattacaattagggaaagagtggaaaagaattacagaaaagaaaaatgtatacagctctaaagaaattcacttgaaggaagtctcaaagacgtcactttagtatttactatttaggtgtagtaaattatatggataccatggcatgcaataaagggcaaaatgtgagaaaggcgaagaagaagcaggtgaaagacgagctggatcgtcttaaacaggctgagaagaaaaagaaacgcttagaaaaggcactcgcgacttccg

SEQ ID NO: 80899 - DNA, 421 bp, Glycine max
  unsure (1)..(421): unsure at all n locations
  Clone ID: PAT_MRT3847_44068C.1
tgtggatgttaaaaatatgccactcccatgaggcccctagatgaagaaattctttgtaaggttgcacaagacatggttgaggaatggtttgattgtgccgataacgtggtactcatgggaagctgtttgagggttagcatattcctgcatctaacattagtcgccggggaaaatcatgctctttaactacccctaatggcacaggaggaaattctgtcttctagtgcaagcgatctcagaactgcaatggtgagtaaaaatagcaagcctcaagctactgcaatgcatgtgggagctatcgaaattatcattgctcgccccgcacgtcccgactgcaacatttgcggtgcactgcttttgggccgtacttatcataccaatcctgaaaatgcagtcngtagtatttttgttgcccctcttc

SEQ ID NO: 80900 - DNA, 142 bp, Glycine max
  Clone ID: PAT_MRT3847_44069C.1
gtgtgttttgtacataaactatttatttttacttgggccgatactacaaagttgaacctgttggcgggaacacaaaactgagttgctcaaaagacccccttccttagatcagggtgcaaaaagaatatttggattaaggggt

SEQ ID NO: 80901 - DNA, 594 bp, Glycine max
  unsure (1)..(594): unsure at all n locations
  Clone ID: PAT_MRT3847_4406C.1
gttatgtcaactttacttggaaagaaaggaatcttgatgggatggtccactaattgcgttgggtctaaactttagtgatgaacaagactagtgtacagaaaatgagccgaaaaagttaacaacggaaacaccgtcctctttgtttgaagaactttaccaattgcaggactcaattgacaacaaaatggtcaaagccattgctttttattattttaaagatttttcccctaaaaatggctacttgtaccataataaccattgaccaaattgtgatctaccagaaagagagagaaacaagtggagacggaataaataaaaaagtggtctgttcacacttagcagatagaaaaaaatggaacagatggaactgtagaaggtacaacacatcggtaattattaggatgagtttctttttttcaaactcgattttgaatggtcttgattattttaaattaattntagttaaaattatgtttaaagttaggtaatacatgtttgaatggttcatctaaatataaagtctacattaattataaattctccccggaaagctgtattttttttactcctaatcaaacatggtttaaaagaaca

SEQ ID NO: 80902 - DNA, 589 bp, Glycine max
  unsure (1)..(589): unsure at all n locations
  Clone ID: PAT_MRT3847_44070C.1
tacggctgcgagaagacgacagaagggcacattagatagggatgcttccttcttatatatattgcagtcttccaattgattctttatccatatcagttgagtacaacaacttgttgctaatttgtactctgcttttacattggacagtgctactaatccttgctttttgctaatccaagtgactaggttttcaccaatgagtggcagcttccactagtgctttttctttcaagtttgtcaccaacatagtcaacatcacagtaactaatcaacctaaattgctagctatgcttaaagcaaagactaagattaggagttccaatttaatatctgaatattcttttgacaacagttaaatgaacttctcttaggtcttgttggaatctggcacattgataaatgtcaaatttatcggattttcatatgcattttgtgatgtttatttggcattttagttaactataggccttgttttgaatcaaattagctntaaattcagttnttactttgtcttaggtagaattttatgttntagttatttttaatgaatttttgctagttttttttttttgcaaaaaccagtcattct

SEQ ID NO: 80903 - DNA, 346 bp, Glycine max
  Clone ID: PAT_MRT3847_44071C.1
aggaaaacctcttggaaaaaaggcctgattgggtttttcaaaaccgccgaaaatcctccaatttctaagaaccgggggggacccgccacaattggttctaggtccgggtttaaaaccaacggtgagggaaaagccccccttacaagataacaaagggggggtggaaaatttaaaagggggagaagtcgtgggccaaaaacacctgtattgatggccccgcagggtggaacgctccccaaaaaacctcaaaaaatagggggttttggcaaaaacaaaaaaaaattgtgttatggctcacagccccccgggctctttttaccaccctggccttgggggggtgtacccc

SEQ ID NO: 80904 - DNA, 268 bp, Glycine max
  Clone ID: PAT_MRT3847_44072C.1
agaaccggggcttaacggatgaataaattaaaacctttaatggcctcaaaccaattccctgccattacctttggaagggatctcaattttatcaggatttttttaccctcgtcattccctttcgattccgcgcctaataaacatttacaggagaacccttaacattaagcaaaagcatttctggttagccccttcaatttaacgttacaagtttttcacaagttcttctaatccaactaagtgaaaatgtttttatttccaccaaaag

SEQ ID NO: 80905 - DNA, 431 bp, Glycine max
  Clone ID: PAT_MRT3847_44073C.1
taagaggggactcacaatatatcaaactatattgttggactacttggcttcaaccaagttctcattagaatccaagatgatggagaaggaaagagaagatgagattgaggacatgtcaatgtcacctccatctattggctccatgcagattgcagggagcaatggctttggtcacagcatggagttcatgtctcaggcataccttccaaatatgtacacagagattgacataaaagttcaggattcaagtttcaaccaagatccccccctccccatttatctcaagtttgaagatgtagagttcagggtaatagatagccaatcggcttccaataaccctgtgaagacaatgatgtcaaaagtaggcacccaacaccacgtggaggaagatagatgcaagaaaattttgaagagtatcacaggaagcattg

SEQ ID NO: 80906 - DNA, 454 bp, Glycine max
  Clone ID: PAT_MRT3847_44074C.1
aaaaaaaaggccggcgggtttttgggaaaaaccacgggggaatcaggccttaaaaaacctttttttttgggggggaaccccaaaagaaccccggaaggggaaaattttggggaaaagaatggggttaattcccccgcgctgttttggcccgggattttttttttttttcgccggccttgggaaaaacccgggtccaaaaaaagggggatctgggggggcctcactagaaaacggggttggaatcaaaagcaaaaaccggcggggtcgcttttggggccccctgggggggggctttgccacgggcccctgatgaaactgggctgggaaaaacccaaggggggctttttaattaaatgccggggggaaagccccgaaattcgaaaaaaaccttcgccctattgggcctctggggagggggggggggcccctctataattttgttcaaaaatggggc

SEQ ID NO: 80907 - DNA, 199 bp, Glycine max
  Clone ID: PAT_MRT3847_44075C.1
atgaaacaatagtaccggggtacttaattaaatactaaatagccttttaaacaaatctcacaaatctacaaaaattatatttatcgttccccaatgaaacctttaacaacggaatcacacacctccctaaaataaaatcacaatccaaataactaccacaactccattattaatagtacccagtccaccctgttaaatt

SEQ ID NO: 80908 - DNA, 192 bp, Glycine max
  Clone ID: PAT_MRT3847_44076C.1
ccctgtctgatacttatcataccaaccctgaaaatgggggtcgtaatatttttggtgggcctttcaaaggcggaaggtccattcgggtggatacatttcgattaccttccgtcatcattgtaccagacatgaatctacggtctcaacttttgagcaccactaccaatggtgattccgtacaaggaaaagacc

SEQ ID NO: 80909 - DNA, 283 bp, Glycine max
  Clone ID: PAT_MRT3847_44077C.1
caacgggttggaataaacatacaacacgaaatgtcatagaaagcgtaagaatctgcaacagatagggatggctgctcttgaggaccaatcataggaactagccatggctgcccaacctaaacctcaaaaccgactcatctttaacatcgtcatcatcattgctatgcacactgaagcacttcccattgctaacagattccaactcactgatgaccctgacaccccgtttacacaatgggttccttgtatccattatcatgtcacatacaaagatcttaatata

SEQ ID NO: 80910 - DNA, 396 bp, Glycine max
  Clone ID: PAT_MRT3847_44078C.1
caaccttaaaaaaagccataggacaattgaccccctgtttcaaaatgtaagataatgtccccccacacaataaaaaagctcggcctgcaaggattggaataccaagtaagccaaaggctatcaattgaattaaaattcacaaaagagagcatttttgcataaacccctaattttttttcgaaggcccactttttaattgaaccaaaaaggcatcccttaagttaaaaccgtccacccatggtgcttcaaaacacccaagtggccgaactaaacagggattttaagagggggccagatcccaagtttaaaggccctgttacataagccagggataactgaaaaattgttgacccgaacccgtgggcggacccgtggccggacccttgggcggcccct

SEQ ID NO: 80911 - DNA, 475 bp, Glycine max
  Clone ID: PAT_MRT3847_44079C.1
attggcctctgccatcctatcctgtgctgtcaacttctaccactattacgacctagcttggggagacggtcacgccaagacactgaccaccagcaatattctgaatatttccctagacaaacactctgggtgggggttgcattccaccaacgagcctccatctggccagatggatcagcagctgacgctcttacccggacattgtgccgggacctggaacagcgcttattatagggcatcaaaaggatcacattgggatgagattgactacgcattcttggggaatttgaacgaagacccatacataattaacaccaatgagttcatgaacggaaaacgcagcaaagagtaatatgtctatctgtggctggacccaagtgcaaatttccatacctattctattgtttggaaatctcaacgcaaaatctcttcagtggatgggaccacgattttagaattcgataacatggctagt

SEQ ID NO: 80912 - DNA, 315 bp, Glycine max
  unsure (1)..(315): unsure at all n locations
  Clone ID: PAT_MRT3847_4407C.1
natttatacntcgtncgtnagctcgannttngnttcntgtaccgnttnnaccactttccatgaangtcngttnntcanngcnnaanctgaanagagtcctcanaataggcaatncnngtatggntgaggtcagtagcatagcagatgacaacagcnncnggtggcngttctgttnagncaaatnacagannanatcaccatgataacatgactcganattcnccagnanggancnctagcccaactgcannccccacagtaggagnnntncagttggaaanagctnngnaggnnngagtctgggtcancagnagc

SEQ ID NO: 80913 - DNA, 219 bp, Glycine max
  unsure (1)..(219): unsure at all n locations
  Clone ID: PAT_MRT3847_44080C.1
gacgaagtggtacccttgttcgtttcacacctctcgatagngaantcgaggcatgggttnacaaagtacttcttagacggtccgtaattatcnntatnaccatgcaaagaggatgtgtctgtcctccnatntaatcanncacatnaaacnanccattgctcacttcagaagcctctnnaatcnaagatgtaaatnccagncnagggttgntnggnaana

SEQ ID NO: 80914 - DNA, 358 bp, Glycine max
  unsure (1)..(358): unsure at all n locations
  Clone ID: PAT_MRT3847_44081C.1
ggtttgagggttgactgtgtgggtttcagcttcattagtgcagttgtggttggtattggggggagtgcttggtgactgggcgcagggcgtttttttttatggtggaggttttttttgggtggtggngtatntgcgggtgtactgcggtntgtgtggcattnctcggtgcaggtggtggctccgagggtggggtgngggggggggtgctggcggggggtnggttnncggtnaagggggagggggagctggtgtgggccantggagcgtttgctttaatggggggagggggtgtgggnttgctgtgttngggtgtagtggcagtngttgggctgagtggggggacgncntggttggtcgg

SEQ ID NO: 80915 - DNA, 430 bp, Glycine max
  unsure (1)..(430): unsure at all n locations
  Clone ID: PAT_MRT3847_44082C.1
accaggtgaccgagcttgccgggtatgtggatctaattccttggcataggtttgggtattgtgcgtccaacaatgaaatttacaaagcaataacggggttccaaagggtacatattgtagattttagcataactcattgcatgcaatggcctacttttatagatgggttagcaaaaaggccagaaggacccccttcacttagaatcacggttccatcttgtagaccacatgtaccccccttggtcaatatttcaatacacgaagttggattgcgtttagggaattttgctaagttcagagatgtcccttttgaattcaatgttataggaaacacagaaggaccattaacacctgcggaattgagcgatgaatcgactagctntcactttgaagcaatgttaagtctcttaaatcctaccatgctaaacct

SEQ ID NO: 80916 - DNA, 415 bp, Glycine max
  Clone ID: PAT_MRT3847_44083C.1
tttttgttttttttggagcagcccaaagagtcatcaagggggcggggtatagcatacgtgagtgtcaaaagcatacccgacccgcacctatacgtattcacctaatgcgtggccacaaaaaaaacaggctcttctacaagagacgttgcctagaatctgacaacggttatttccgcaaaagctgcttcggtgcaaaatacacactttcgacatgggtcccaaatttaaaaaccgaactactacggccagtgtttgtaccgaccccgggggtaaacaattcgcaatcggatgacgacgggtgtattttcaggaaggtctaatcccctttttgcttaaagaaaagcgtttctcctcaatcaagcttgacagatttacccccttgttaccggtttgtaggttcaagagggaaatattt

SEQ ID NO: 80917 - DNA, 172 bp, Glycine max
  Clone ID: PAT_MRT3847_44084C.1
aataccggttgggccggtcctaccggatatcttgatctggtagaagggatgccaggttctgctcaatccctttggtccacttcatgttcgcaagaatttattaatcgccacatgacataatcaaatggacttttagcaattttttttttacatatattttttccttttttta

SEQ ID NO: 80918 - DNA, 414 bp, Glycine max
  Clone ID: PAT_MRT3847_44085C.1
gattgagtaatagagaatatgataaaatattatgagttttatgttatctcagagacttagacagttagacataatgcatatggtttaatctggttatataatagtatgaatgataatactagtattagtaatatgtataattgaggatactttcctatcctaatatgattatgagattcagttatagtgtaagagaatattcttctctttatattgtcttttactgtattcttctcttgtcagttataactgtcactgtcagacagttacaactgactcctcctatgttagctggtcctgatagtatatatagggttgtaactcagtgacttttgtactttccatataagatcaatgtaagttttgtttctattttctctgtaaatctaatatatagcaatttaaattttattt

SEQ ID NO: 80919 - DNA, 357 bp, Glycine max
  Clone ID: PAT_MRT3847_44086C.1
tttgatttcccttcacgcccattggctctttcaaaacacacttatccctttccatccaccaaaccaattctcccaaatctcacaaacaccaccttcattggccctttcacgctacgccgtccgttaacacctcctttttcaccctttgggtctcaaaccacacacccttttaatcggttttgtccttctctccctctcggtgttccgccacattaggccttcttatagcaccttcctccatgttttttccctcgcctcaaataatatttctgggggttccttcccccccccccctctttaactttttttgaggaacctgaacaaatatttggggggctcccttcttgctacgtttca

SEQ ID NO: 80920 - DNA, 634 bp, Glycine max
  Clone ID: PAT_MRT3847_44087C.1
tttttttttttttttttttttttttttttttttttttttttttttttttttttttttttgggagaaaaacgtttttcacatatatactccaccccatacccccaattttttagggaaaaaaacttacagggggatttcagggaaaaaaaaaaataccctactcctcacactttttttttttaaaccccttcgaattacccaatgggacctggttgaaaaaaaaaactattacctgggtggggatttggttttttggaaaggaatttatataaaccatcatatcttatatttggaagttttgagaattaaagtttatggggttttctttgccttccctggccctcggggaattttggggagggagtttttggtaaaccttctatagttttttttgaaaactattatgacatcgccgacccagttggggattttttcctcaaaccggtcatacacaattggcagcgtttgcatgcaaaaaaaaccttggtacgaattaaccctgccacaagaaacaagacattttagtacaattaaacttccgtataaaatcctccataaaaataagattaaattcctcaggttgacccctaaaccctaaaggattttaaaattttcaaaaaaaattaactttcat

SEQ ID NO: 80921 - DNA, 273 bp, Glycine max
  Clone ID: PAT_MRT3847_44088C.1
aaaagggaactattttcattaattttccttaccctggcctacaagggaaaaaaaggaggggggcataaaaaaatttctgaaatagaattaaggaacccaaaaggggggccccaaaaacgggacatccttggaaacttttaaaaaaggggtaattggccttataaaggaccctaaccccccttattatttactagtttcacaaaatttacccgttaatttctggagagtaaaagggaacccccctttcttggtttttggaaaaggggcttgggg

SEQ ID NO: 80922 - DNA, 1194 bp, Glycine max
  Clone ID: PAT_MRT3847_44089C.1
gtccgccaaatatttggggcctaattcctaaataacccctcactctgtttcatgtaatgcttatgtaaaaaaattatacacggtagaatgttttacattggcacatcatagacgagcagtcatttcctcttgaagtacctacttatccaaatttgtggaaaggttcatacacaaagtgggaacgttacacagtagaggatgcatactaaattgtcaacttttccaaaatgagaggcataaatgtgatggcggaagtggatgtccctccccatgcagcatcatggggtattggatatcctgatctttggccatcaccctcctgtaaggagccactagatgtttcgaagaagtttacttttgatgtcctttctggtattctaacacgcactgatatgatccggaaaaatatttccatttgaactatttcacttgggaggtgatgaagtgaatacagattgctggactaatacttccacagtgaataaatggcttcggaatcacaacatgactgctaaagatgcctatcaatattttgtactgaaggctcaaaacatagctcttacaaaaaattggagtccagtaaactgggaagaaaccttcaatacttttccaactaagctccatccacggactgtagtgcataactggttgggccctggggtttgtccaaaggctgttgcaaaaggtttcaggtgtattttcagtaaccaaggtgtatggtatcttgaccatctaaatgtaccttgggatgatgtctatactgctgagccgctagaaggaatacggaaagcttcggaacaaaaacttgtacttggaggagaagtctgtatgtggggtgagacagctgatacatcagatattcagcaaacaatatggcctcgagcggcggcagcagcagaacgcttgtggagtcagagagattctacttcaggaaatgctaacataattgcattgcggcgattgcattacttcagatgtctcttgaatagacgaggggttccagctgctcctgtcaataattttaatgcaagaactgctcctgttggtccaggctcatgctttgaacaataaacttatcatgtttatctagcttggggttagtgaacgttagagcttagtgaattgtggtgaatttacaacattcacattgtaagttattgttgaattcaataaataatacttgttcacttgttt

SEQ ID NO: 80923 - DNA, 1534 bp, Glycine max
  Clone ID: PAT_MRT3847_4408C.1
agtgcatcagatggcatgagcagatttaaaacaagtaggatcaatcttgttgacctagctgggtcagaacggcaaaaatcaacaggtgccgcaggagagcgattgaaggaagctggcaatattaatagatcactctcacagcttgggaatctgattaatattcttgcggaagtctctcaaacaggaaagcagcggcatataccgtatagagattctaggttgacatttttgttgcaggagtctcttggaggaaatgcaaaattagcaatgatttgtgctatttcaccagcacaaagttgtaggagtgaaacattcagtacactgagatttgcacaacgtgccaaagctatcaagaacaaggcagttgttaatgaagttatggaagataatgtgaagcacttgcgacaagtgattcggcaactaagggatgaacttcatcgaattaaagcaaatggttacaacccaatggagtcaagtggaggtcattcagcagcttggatccgacgaagcttgactttattacaatccagcctcaaccggccaccaccattatcccgtcttgatgaagatggtgatgaggagatggagattgatgaggaaggtcttgaggaccatgatggagtttcctacaatgccaatatgccgagtaattttggtacctgttgattgccatgagtctgctgataagacaaagaagcaagttatcaaagcagtagagaaggttttggcaggatctataaggagagaaatggcccttgaagagttctgtgccaagcagacctctgagataatgcagcttaatcgcctggtgcaacagtacaagcatgagagggaatgcaatgccataattgcacagacaagggaagataaaattcttcgccttgagagccttatggatggtgttttacccactgaagagttcatggaggaagagctagtggttcttacccatgagcataagattttaaaggaaaagtatgagaatcatccagaagttttgaagatggagatagagttgaaaaaagtgcaagaggaactagagaagtatcaaaatttctacaaattggggagagagaagtgttgatggaagagatacaaagtttaagaagtcagcttcaattttatgttgactcttcatccacatcagcaaggaagcagtatccattattgcaattgacttacttgtctgagcccagtatggcagcaaccctcaccgccattccagtgtcgacagaggagagagtagagacaaatgaaactcttgcatcatccaggaatgatattgaagtacaatttgaacaagaaagaattaaatggacagaggcagaaagcaggtggatttctctttctgaagaactgagagctgagcttgaaagtagcaggttgctagctgaaaagagaaagcaggaattagatgctgagagacagtgtactcaggagcttcaggaagccatgcacatggctatagaaggccatgcaagacttttagagcaatatgcagatttggaagagaagcacatccatttgcttgcaa

SEQ ID NO: 80924 - DNA, 508 bp, Glycine max
  unsure (1)..(508): unsure at all n locations
  Clone ID: PAT_MRT3847_44090C.1
tttggaaaaaaaaaaaaaaaaaantcgagttttttttttttttttttcataaacaagcgaacaagtattatttattgaattcaacaataacttacaatgtgattgttgtgaattcaccacaaagctctaacgttgactaacccctagccagataaacatgagttacattcacaacagtctagacatacacagatgaagcatatgataagtttattgttcaaagcatgagcctggaccaacaggagcagttcttgcaataaaattcttgacaggagcagctggaatccctcgtctattcaagagacatctgaagtaatgcaaccgcggcaatgcaattatgttaacatttcctgaggtagaatctctccgactccacaagcgttctgctgctgctgctgctcgaggccatattgtttgctgaacatctgatgtatcagctgtctcaccccacatacagacttttcctccaggtccagttttttgttccggagctttacgtattcctttt

SEQ ID NO: 80925 - DNA, 962 bp, Glycine max
  Clone ID: PAT_MRT3847_44091C.1
ccacgcgaccgcggacctatgaataagtttgtgctggtactatttactgtttcctgggtccttctctttggtttgctagatggtaaacctcccataggcagtggtcgagtaatatgggacactggtggccaacagctgttcgcatcttatgcatactacattacggcaaggcatcctgatttaggcagtggtggcctcaaactcatcaagactggaaactcaacttgcccaaatactattttgcaatattttcccaagtacacccatggcctgccaatgtatttgctcatatctgtaataagcaatttcatcgtctatgaaggtaccccactggctatttttatggcaaagaagccaaattgtgttgaatcgttggttcctgatcctatgaagggatctccggatccaccaagtccattgaatcccccaaactcctctagattgttggtgtttgtggacaattcaatccacaagacatgtgtgggtactgctggtcctgaagctcatccaggcctactaacgtatagtggcacttttcacattgagatcctagaaaacgttcgatttggatacagctcttacaagcttgtgttttgtttcgatggctcagactaccaaaattgttcctatattgggacctatgataatggtgagggtggaagacgtttgattctcactgagactaatcccttcttattttcttttgttcatgcacttaaatttgatgggactattaagtccgtaggttgaatgatatatctcaagactagattagattaagattagatggtcttgagtgaatgtaatcacatactttgttgttttgatctgcattaactctgctccaaataaaacctcaatgcaaacattgaataagtgaaatgaataattaatggttatgctttcttgtatgcaaacattgaataagtgaaatgaataattaatggttatgctttcttgta

SEQ ID NO: 80926 - DNA, 3449 bp, Glycine max
  Clone ID: PAT_MRT3847_44092C.1
ggtgggttgaggagagattaaggaatccttttgaccgttgaaaaggtgaaacgggtgaagtgttggaggtttttccttttattcttccctttcttgaaggttttgatagccaggaattgggtaatgctacacttgaaatttctgcatagtacgtgcttgattagttggaattttaggggaccctattctgacatgcgtttttggaagaaatctaggctttgtgattcttattcgcgtaatctcgaacagagaaaatctgattgagctgtagtgtttccgatcttggctgtgcttgcctgggggaccatctttctacttggaaaatggagtgaaactagtaagaagagagataggataaatttgcttgcccatttggctgctgaagaagctctaagagctgaagaaatggccgtggctgatgtaattcctccagtgtctgcttcaaaaaatgaacatcatgtgtgtgctaggtgctctgctccagccagaactcgctgctccagatgcaaaattgttagatattgctctggaaattgtcaaataatccattggaggctaattcacaagcaagaatgccagcaactggaacctcataaagacctgaccttggagatattgggttgggttgagtcactggaagatgcgctgactcagtttacttcccctgaagatttggatggagagaatatgtacagatgtggaaggtgcacatcatatgttcgagctagaaagcaactgagcatacatggcactgctgctcctactacagctgatttttctgtatttaataactttcaacattctgcttttgaaagaacttcacataaatccaacagagaaacattgagaagagataatggctctatatatgaatcttctattgaatcttctgattataaagctagcagttctctctcaagtgtggtaccaaaggaggcgtttatgagacagaagtcaagaaagagcagtgattctgtgttggaagaagaaatttcaatggtgtattcccagtgctatgtaatttatacatgtcagaatgagcatatatactattctacatgaggtcctgtccccgtccaaaggtagaacatactatgaatgccatgcagcaacctgtatatgattcttaatagcacaatccaatggaaatgcagaaacctaataaaccaggacatagtaggcatggcagtcgtcagttttttgtcccagagccatcacctaatactaggccagaaatcaccactcacattattgacaccaccaatggcttccttagaaaaagcaccaataggaatgccctgccggtgacccaaacttatgccgaaaacgtcaggcgtgagttttcagatgccacatcaagtgactggtcccttttcactagctcagatgaggcttctttcacaactgagagcaccagggactccttcagcactgtagactatggtgattcatgcaacatggatccaatttcatctatcttcaactacccctcagaaaagtcctacttgaagttttcacatagtaggccagttaccagggtcttccctgaaaagggtcatgttaaacaagtacagaggattgatcattccaaaagggtcagccattcttcttcaaatgagcatccactttggcatataccccaggggcctgttaaattgtgggaacagttgctatgccaatgctgtcttgcagtgcttaacttctacaaagcctctagttgtctatttgctttatagatcgcactcaaaagcttgttgtgctaaagattggtgtctcatgtgtgagttagagcaacacataatgattttaagagaaaatggggatcctctatctcctagtcggatactttggcatatgcggagcattaactgccatatgggtgaaggaaatcaagaagatgcccatgaatttttaaggcttctaattgcatcaatgcaatctatatgcttggagggacttggtggtgagaaaaaagttgatcctagaatacaagaaacaactttcatacaacatacttttggtggccgtcttcaatccaaggttaagtgtttgaattgtaatcatgaatcagaaaggtatgagaacattatggacctgaccttggagatattgggttgggttgagtcactggaagatgcgctgactcagtttacttcccctgaagatttggatggagagaatatgtacagatgtggaaggtgcacatcatatgttcgagctagaaagcaactgagcatacatgaggctcctaacatcttgactatagttctgaagagatttcaggaaggaagatatgggaaaattaacaagtgcataacttttcctgaaatgctggatatgattcctttcatgaccgggacgggtgatattccaccactttacatgctttatgctgttgttgtgcacctggacacactaaatgcatctttctctggacactatgtttcatatgtgaaagatctgcaaggcaattggttcagaatagatgatattgaggttcagccagtactagttaatcaggtcatgtcagaaggagcatatatcttattctacatgaggtcttgtccccgtcctccggtggaacatactgtgaaagctgtgcagcaatcagtttatgattcttcaaagcacaatccaatggaaatgcagaaacctaataaaccaggacatagcaggcatggcagtcatcagttttttgtctcagagtcatcacccaatgcgaggccagaaatttccactcacattattgacaccaccaatggcttccttagaaaaagcaccaataggaatgccctgccggtgacccaaacttacgccaaaaatgtcaggagtgagttctctgacaccacctcaagcgactggtcccttttcacaagctcggatgaggcttctttcacaactgagagcaccagggactccttcagcactgtagactatggtgattcatgcaacatggatccaatttcatcaatcttcaactaccccccagaaaagtcctacttgaagttttcacatagtaggccagttaccagggtcttccctgaaaagggtcatgttaaacaagtacagaggattgatcattccaaaagggtcagccattcttcttcaaatgaacatccaccaaatgggaattgtggcatgtatgtatattatgggagtaatcctgtgtgtggtactacccagacttctagtcagtgtgaattttagtctttggggaatcctaacttgttgaactgattattagatgcagtaggtgctgtgcctcaaagttttcaatacttagttgattgaggcatatagttcttttaagcacagatgtattttttttttgttattgataattgtaaagatgacggcatcgatcctttagttatctattaatccatcagtcttttcctagtggtatcactgttcaatttcatatttgagactatttttaaacttgagtt

SEQ ID NO: 80927 - DNA, 325 bp, Glycine max
  Clone ID: PAT_MRT3847_44093C.1
gtgaaatataaatcttaaacgtctgtttttcattatctgtcagtcatttgttttccacagtccgattggacagcagagagaattttaacacagtcaaacatgattatggtcattatattggaaattagatgacaactactgtttttgctgctttgacagtaccaatttttttagtattctaatcagtcaggtcgtaatgcataccaatatttaaatttatagaaattttcatgttgtttgttgaaggatcctctgtatgattctaaactctgaactttctcattccttgtgcatggcaagtgatttgttgctctggaataatcgt

SEQ ID NO: 80928 - DNA, 114 bp, Glycine max
  Clone ID: PAT_MRT3847_44094C.1
ataaaagccccaccgactggaattgggacacagggcgacgaatgccactgaatgtgagcagccttaaacaatcatgtttgcatgtttaaaggcgtgtgagccaatgcatttggg

SEQ ID NO: 80929 - DNA, 1391 bp, Glycine max
  Clone ID: PAT_MRT3847_44095C.1
acggctgcgagaagacgacagaagggggcactgcttcttcgttcttctctctggcgacctaactcgaagaatccaaacaggtgtgttgtggaagatgagtggtgttgttagggctgcattgaaatccaccactagtgtttgtgcacttgtgcagagaagccatggcctcctcccaatgaggtgcttctccactgaggcagaacagccacctctgaattcaacgccccgccctcctccgttctttgagactgaccattcaggtttgacatatggtaatctgctcggcgttcgtaaacatgcactgaaaacagatatcatcaactttcttgaaggttgtaatttgactctggaggatgttaaaatggattacgaccgcagctattccctagtttcaacgttgttgcagttccctactcgtgattcctttgaccatgctgtaaaagtgattttaaagaagggtcgcttgtacaaattggacagggttaatcttcaccaatgggaccaagtaaaaccatatgacggaaaaactattttaattcaaggaatgcctcgagcaggtacatatgaagatataggacgcatcctctccggttttgaatttgattcctcctccattagcttgtttttaaggcccggaggtacggcaggtgcggatcccattaaactggccacagtacgtttcaattcaaggactcaagcaatgaatgcatacattgcaaaaaatggaacgttttgccaaaacaatcgcatttggatacaagttatccagtaatacacgcgccccttactggcgctagtgttatagtactgctttaatagagtgcagagtagtttaagttgcttttttcttggtaattttggatttcataatgtcttcggtttaaagggatgcaaggaaatggctaccttgaataaaaacatagttgattggtaattgatgaagagtttggtttttcttcgtattgaaatgtgtttttatattaacgatgaagtcaaggttttttaaatgactttgaaaacgtgttgttgattatatgataatttgagtttagaaaattccatatatcgatgtatctagttatatgaaagatgcatagctttagtccccgtaaaatcagataacctctggtgatagtaacaatacaatcagtgtctattggtctctcatctaggaaagagtgtgtcatgtgtggccccgaattccatatacgggtctccaaaaggagaagaatttttttaaggccaaggatctcgcattttcattaaccaggggccagaaatgagataactttattttgagggtctcaaagcaaaccattctatattataaggactgaaatcatgtttaccccaaggcgacagggtttcaaggtataaaattgattccaagg

SEQ ID NO: 80930 - DNA, 281 bp, Glycine max
  Clone ID: PAT_MRT3847_44096C.1
aaaaaaaaaaaattaatgagaaaaagttttcttgtaaaaaaaaaaaaagggttaacattcgtggcgaaaacaagcttcagtgcgcgctcttgcaacgtacaatgctctccgattgagacagcccaaccttctttacgggcccatggctgacaacatctcaactgggaattccctagctttaccgaactgacctgccttgaaaaacatccgctctgcgacaactgtggtaatagccaatacggccgcattgcccactttttccaattggagggcagtctgaa

SEQ ID NO: 80931 - DNA, 345 bp, Glycine max
  unsure (1)..(345): unsure at all n locations
  Clone ID: PAT_MRT3847_44097C.1
tgtatnnaaatnnannnnacctangtnnagaannnagtgacnanacnnanngnnacccacagncactnacangtnacacgtacagagngntnatgttcagnagtccnntgntannncacganaccanngnanntctnngcncgtgnanaggagcgcgntnctnngantaagnngangccnagatngnnggngnnnannnnncagtaangnananacgcncnatngannagcantgnagnnncatgaancgntgtcnntatcnagagncnngagngncaaganacantatactannagatntgcgantngtgngtctaannnnggngannctatggncangnntnc

SEQ ID NO: 80932 - DNA, 844 bp, Glycine max
  Clone ID: PAT_MRT3847_44098C.1
agggaccaaaacccttgtttaggaaaattttaaggaccaaaaattttttaaaatcaaatacctgtttggctataagcctaaaaaacaatccaaatacactattccctccaatggttaaatatcttcactgggaatgttagccctatcacattgggaatgctaagtcctttgactcaaacaaaattgtttcccataagggatacctgtagtctaaactttaaaccaaatgttaatcatgaaacaacttttttttttggaatggagtgaccattgatgggcataaaaaaactgcccccaatgttgaaaattttatttcgtctaagtgaaaatggatctatccctgccttgggagctgcaatcactccaatagcctcccaataatttgatacatgcagcacttcaagaccaaatttatttgcagtgtcatcaaaaacagtttgatttttttccacagtaattataagtggctttttgtttttatttctagcaaaagcaaaagatgcatcccctccacaagcatttttgggaaggattacagaatccacatcacttgccaatatgcaacctttttccaagcatttggagtccatgaccaagtattgtggagcattactcaggccagcaagcacacatggtaggaaggtatacccaatctcctcagctgctgattttggactaagagataggctcatgggaagtggagacattgcaggagcatgtgcacaaggaatttggaactccttcaccactagatgacttataactgcctcaactcccgccaataagtctattcccattccctgccgatagtcatctacatcatcagtgtcatcatctgggaaac

SEQ ID NO: 80933 - DNA, 464 bp, Glycine max
  Clone ID: PAT_MRT3847_44099C.1
aaaaaataaaaacactttctcttttttttgggatgaataatatcaatctttattgggccaaatcataattttttggggaaaactacaaaagtaaacctattacgtcccacaccatacaattcaaattctttcatcgttaacaagaccccccccccccaagaaattaaacccttaccacagattaattgggactggatgaccataaggctctagcttaattggcacaataaaggctcattgataaattttctccattaattaagtaaacttggcggcagttagaacaaatttggccactgcttcctgttaaagggctgaaatttcccattttgaccatggcactggcaaagtctgcataaaaagttaaaaagctggtgctgtaggtagtgacctgaaaatcagtaaaaccgccactaaaaagttgctgatcaaaatggaaaacccctttcttgttgactaggttc

SEQ ID NO: 80934 - DNA, 736 bp, Glycine max
  unsure (1)..(736): unsure at all n locations
  Clone ID: PAT_MRT3847_4409C.1
tacggctgcgagaagacgacagaaggggtatcttgcatcattctgctgaagaagttctagaacagtcactcagctcagtttggtcgaatatagaattgcatgattttgagtgagattttggcgtcttcttaccaatggttacatttggcttccactttcaacctcaaaacaacaaacacacatgtgcgacgtcctatcttatgaatctaatagataattacaacatcttatgtttgacccttgactcatgatgtctaatgttttattaaaatttctccctcttcgccctttcccctcaactttgcacacatttcttgtttgttatatgtaaccaaattacttgtttgatttcatttcttatttcatgtcttattcacatattatttcttaatccgaaaacagaaataaatgttttctatccttgctctagaaattgtatatatgtgaaaacagaatttcaaaactccaaaacaaaaaactactttcacgttagtaaaataaaaaaaataacataacaatatcatggtaataaagaaatacacanaaattaaattaatgaaagttacataaatgatgcatgaaaagttctattgtaattattttgtatctatcatctatggcatgtataatcacgttaattattaacataaggaaggatctctaaggggaaaaaaaattacctatttctattatatgcttaaaagtaagatatgaagagcctttgtcggaagcaaaa

SEQ ID NO: 80935 - DNA, 552 bp, Glycine max
  Clone ID: PAT_MRT3847_440C.1
tccaacagcttcagcagatgaaagggtttcaagatctgaagctgcctcaattcaaggacatgaagctgcccaacccgaacccgaatccgaatccgaaagcggttaagttcagtttgcctgaggatgatttatctgatgatgaattagacgagtatgacgacgagttcgacgacgagtttgatgacgatgatatggatgatcctcagcatcctctgaataagatgatgatgatgaagccccctatgggtgctaagcctcctattggtagtgtccctatgggtaatggggctcagatgatgtcgaacagtatgatgaatgctcagaaaggtggcaatggtggaggtaataatgggaagaaaggaggtggtggtagtggaggacctgtgcctgttcaagttcataacatgggtggtggaaatgagggtaaaaatggaaatggaggaaaaaaagaaggcggcggcggtggaaataatcaaactcaaggtggaggtaacaaaaacaatggtggcaaaaatggaggtggggtgccagagggtaagaatggaaacaaca

SEQ ID NO: 80936 - DNA, 505 bp, Glycine max
  Clone ID: PAT_MRT3847_44100C.1
acgttcatgtcccgtcgaagctcggaatcgtcggctctctaaccctcccatggaacacccttacaagccgctcgcttatcgcgctctcgggcccctcttcccgcgctcctctctgcacaccactgacctcacatacccggccgggtctgcaattcctgaccctgcttgttccgaatcgacaggcctgcagaggcattacgacatagacgccagctgggactaccaccacaacctcatcaagaactactgggacgagctcgaccgcgccaccgactactacgccgctcacctcatcgacagctacggccgctacgatcatgcttacaaggccaggctatacagctgcgccaacgttactgaaaaaaactctgacgcgacgcactatcaacgctatcgagagcatacctgctagatggaaacgctaagccgactacgccaccgagacatcgtcaaaatcctcagtaactgggccttacgccgtgatcgcgtactggactacgagtcc

SEQ ID NO: 80937 - DNA, 618 bp, Glycine max
  Clone ID: PAT_MRT3847_44101C.1
agggataagaatctttgggacaaatattcatttttcgcctatatgcatatgaaataattagagccataacttactgtttttgatgagatgagaagagacggagagagaataaggcccatccacaaccatatccttaccttttttttcccctatataaacttctatatccataagttttggaaaacagaagggaagagagagagagagagaaaaaagagaaagtgaaaattagaaactcttgtacttggttttatgccaaattagggactcttttggttgtcaattagatcacaaagatatggaggttgccatggaactggaagatgatctattttttgctgatttgagcaaggaaattgctctactaattatggatgaagatgaagatccacttgcttcttgtcctcctgactctcttcaggtactttactactttcatttcttccaacacatgccaccacacatacttttttttttccctcgagccttccaattatggcactttgagaagagattttgtctattacaataatattaacatggtcaaacgaattttcaggctttttctggggcaattcatcctcctccacagtttgctttcatctttgagcatgcttt

SEQ ID NO: 80938 - DNA, 775 bp, Glycine max
  Clone ID: PAT_MRT3847_44102C.1
tctaaagtctgaatgggtgtgacacacaagaaaaacgagcctattgtttttttcttacaccaagcacctaactctcactccttcttcttcgctttcttcacactcccaatttgctcaccatgatctccaattctcttccctcgtaaccagatcatccaaaatgatgaatcacgattccgacgaccaacagcatcacattctccacgcctcccaggacgacgagataatggactcgctgatcctccaccacgacgacgacggctcctccgttcaccatcaccaccgtcctacgtcgccgcaaagccctaattcccctttcaactcgttccttgaccctccctcttacgccgatgcaatcttcacctccttcgattccaacggccacgaccaagccgtcgagtcccccgccgcccgattcggctccggcgactacctccacatctccgtcaccgatcctcagaaggagcaggacctcgccacctccacctccctcgtccctggcgccgccaccttctacacctacctcatcaccacgctcatcaacctccctgaatacggcggcgtcggttccgagttcgccgtccggaggcgattccgtgacgtggtggcgctctcggaacggctggcgttggcgtatcgcgggttcttcatccccggtgcggcctgacaagaagcacggtggagagccaggtgatgcagaagcaggagttcgtggagcagcggcgcgtggcgctggagaagtacctcaggaagctggcggcgcacccggtgatcg

SEQ ID NO: 80939 - DNA, 113 bp, Glycine max
  unsure (1)..(113): unsure at all n locations
  Clone ID: PAT_MRT3847_44103C.1
gacccgccaacatgggccgcgttngcancaaaaccgtgaagaaggcggcccgggtnatcatagaaaagngtacacgcgcctgggcaacgacttccacacaacatannannnnt

SEQ ID NO: 80940 - DNA, 483 bp, Glycine max
  Clone ID: PAT_MRT3847_44104C.1
gctggcatttcaaattcaaggcctctttccaatcttcaaagcagctacagcggcagctccattttccaattgaagttagcagagcaggtgttttcctggcaaatgaatactagaagggagaggtttgctatatccttaatcaggttggattcttaattccagagtttacatggggatgtctgaatgagataatggtttgaagagtgatattttttttgttcaagcatggtatcaaatgtttggtgggcatggaggtttattgaaggagtttgtgtatgtgggaattgggttactggactataaagaagaccgaattttggcaaagacaatatggtataagattcaatttggactatttcgaagctattgcaagataaagttagcgttgggctcttctagcatacttccagtcatgaaaaggcgtgtaggggtattcattttacttgaagaaagcttcaaaataatgatttgaagttggtatct

SEQ ID NO: 80941 - DNA, 285 bp, Glycine max
  Clone ID: PAT_MRT3847_44105C.1
gatactcctaaaggctccatgtaggaacataaaaaggctcaatttataattgcacttcccaaaatcacagttggaggaaccattcttgtgtaatgatctattggcaaattttttggcagaggggcatttttagagcatgtgttgttttgcatcgcacccatcgatttaaggaatgattaaaatggtggccacagttggtattcctgagaatacaagtttattactggcctgtgctatgtatatttcttttatggggcctgcctattctgatatttacaccatttt

SEQ ID NO: 80942 - DNA, 425 bp, Glycine max
  Clone ID: PAT_MRT3847_44106C.1
aaaattaacaacctttaatttttattttaaggtcttacctttaagtttaaattaaaattaacttttaaggtaaaaaaaggtggggccaaccttagccttttccttcctgggattcccggaccacctcagccttgttttaatttttactggacccaggttttttccgaactctcctttccctaatcttacttctcacaagggaaacatctatccatcgctctgctgctgcatagatgtcggacaacagcacataattagctgcatttagaggctcaagctcaaaaagtcgattagcaacaatctctcccaactctgaatcaccgtatagtttacatgccccaagaagtgcaccccaggctccagcatgaggctcccgggggattaattttataagttcataagcatcccttatgtgccctgaccgg

SEQ ID NO: 80943 - DNA, 698 bp, Glycine max
  unsure (1)..(698): unsure at all n locations
  Clone ID: PAT_MRT3847_44107C.1
cattctttctttcagaaatgtagaaaagtagttgctgccagggncgagacatatcagagatgcccggctatatataatcttcaacatgaacctatgaatcaagaaattccattagatacacaaggaaaatatgtgtattctccttcaaacagttactggcagattagacatgagactgctttcaattgtggggatgctttatgattctctgcaggaccacagtccttgccctcctaatgtcacggctacacatatcagcttgaactgccaatcttcaacattcttcataaacactccaagcttcttcttgatctcctctattgcaaccttcacagcttcttcttcaattgcaaaatctacattatgcaatagagactcaatctcaatttcaagcctatcaatgagaatcctaatgttgtctaagtcctttatggcaacataggtaccggcctgcattgagctaatcacttccttctgtcccttcaatgcattttcatagttcctccagagcgagtcaatccacttccccatggatccgattgggatcgacgtagcagcagctatcgcagcagcaacaggtggtgctgcaatggctgctgctacaaccgagcagatcaagactgcagcaaatgtagccacaaagatcatactcgaaaccttcctccatgaatggatgtattttagcttcttataaagct

SEQ ID NO: 80944 - DNA, 259 bp, Glycine max
  unsure (1)..(259): unsure at all n locations
  Clone ID: PAT_MRT3847_44108C.1
ggggaagacacatggaatgggagctgcccgcgagctgaactctcaccgtaagagacaaaagtgggctgacgagtcatacaaaaantctcatctgggaaataaataaaataagccttttactgatgcatcccatgccaaagatattaggcttaaaaagatgggtgttaaaactgagcaacccaactgttccgttctaaaatatacgcacattcaactcatcaaaaataagaagaacatgactacatgtataccaaatgac

SEQ ID NO: 80945 - DNA, 260 bp, Glycine max
  Clone ID: PAT_MRT3847_44109C.1
cgcatgtacgcgtgcacgcgcccgtgagttcggcttctgcctagtgtattgccgttctaaattttatattgtgtgcccttttctatgtattaaccttggtattggatttttctacgaaaatgggtgatttacattggaaatgaaagatgcctagttccaaaacaccaggactctttctctgcgacaacaagtccttaccctctttggtactaccgttcgggaccacagatatctatgccgtcgcttctttcgtttgcgcc

SEQ ID NO: 80946 - DNA, 275 bp, Glycine max
  Clone ID: PAT_MRT3847_4410C.1
cccacgcgtacggttccattcgtgaaactaacaaccacgcaaggcctttatcatggcagcgggttgcccaaaggcgacgcgacactcaaggccacctacgctaagactatcgacgatcccaaagacctatatgactcttcaccactcgaccataccgccttctgaatatgccatgaacttcactgttgaagccatccaatcagagaatccaacctatcagtgtgaaccagacaatcaacggtgacccatacattgaaagacctgacaccccacat

SEQ ID NO: 80947 - DNA, 576 bp, Glycine max
  Clone ID: PAT_MRT3847_44110C.1
aagaaatttaggactggaaagctgtatctaaacatcaaaacacaggctgtgctaaccattttgtcctggttggccagaaatggatttgcccccagagacaatctgattgcctctctagcaaaatcaattatggaaccaccagtcactgaagaggaagacataatggggtgctcctaccttctgaatcttgtggatgcctttagtggggtagaaattatagaagaacagctcaaaatgagaaaagactatcaagaaatttgtaggatcatgagtgttgggatggcatacagcttactacacaattctggaatagggattgatccttctcgacggaaggagctattgaagaggaggtttaaggaaaaacatgcatcacccagttctgatgatatagataaacttggcaaggtacagtcctcattttggaaagagtggaaattgaagttagaggagcaaagcatctcactgagcattctagagcactagagcaaataattcctgggggtgaaacaaaacgctttttggccagggattccatctatattgagaatggcattatccctctcattgagtcag

SEQ ID NO: 80948 - DNA, 3387 bp, Glycine max
  Clone ID: PAT_MRT3847_44111C.1
ggctcgagctctctggaacccctcaccgctgcttctccttttaaaccctattcgctacttcacaacacatctctctgaactgaattaaactacatagaaaaataaaaccaaacctttcttcctactactcccattcccacatttcgacaacatggacgaggacttcgacatgccgacggcggaggcaatgggcgaggacttcgacttcgccggcgccaccggcggcgacctcgacggcagcagcagcaaccccatcttgaaggtcggcgaggagaaggagattggaaaagagggtttgaagaagaaactacttaaagaaggtgaaggatgggacactcctgaagttggtgacgaagttcaagttcactatactgggacgttgcttgatggcactaagtttgattccagcagagataggggaactcctttcagtttcacgcttggacaagggcaagttattaaaggatgggatcaaggtattataacgatgaagaaaggtgaaaattcccttttcaccatcccggctgagctagcttatggtgaaactggttctcctccaacaattccccctaatgcaactcttcaatttgatgtggagctgttgtcttggactagtgtgaaagacatatgtaaggatggaggtttatttaagaagatacttaccaagggggagaaatgggagaacccaaaggatcctgatgaagttttagtcaagtatgaagcatgccttgaagatggaactcttgtggcaaaatctgatggagtggagttcacagtcaatgatggttatttttgtcctgctttgtcaaaggctgttaaaaccatgaagaagggagagaaagtgcttctgacagtgaagccacaatatggatttggtgagaagggtaagccagcacatgatgaagaaggtgcagttccaccaaatgcaacattgcagattactcttgagttagtttcttggaagactgtctcagaagtaacggaggacaagaagatcattaagaagatcctcaaggaaggggaaggatatgagcgtccaaatgagggagccattgtgaaattgaaagtaattggtaagctgcaagatggtactttgtttttgaaaaagggccatgacgatgaaggagagctgtttgaattcaaaactgatgaggagcaagtaattgatgggcttgacagagctgtgttgactatgaagaagggtgagatagcattgttgattataggacctgaatatgcttttggttcatcagagtctcagctggaacttgcagtggttccacctaactccacagtatattacgaggttgagctagtatcatttgagaaggagaaggaatcctgggacatggacacgccagagaagattgaagctgctggtaagaagaaagaagaaggaaatgcattatttaaagctggtaaatatgcaagagcttctaaaagatacgagaaggctgtaaagttcatagagtacgatactgcctttagcgaagaggagaagaagagctccaaagccttgaaggttgcctgtaatctaaacaatgcagcatgcaagttgaaattaaaagattataaacaagcagagaaattttgcctctttcttgttgtactccttcatcttttccttcagagtcacgtactcaagcttgacatccctgttgttaggttcaagctcaagagctttcttaatatcaaattcagccaaatctaaatcagccaactggatatatgcctgggtccgtctataaagagccttcacgttagtactctcaaggtccagtacctttgtgcacaatttctctgcttgtttgtaatcttttaattttaacttgcatgctgcattgtttaaattacaggcaaccttcaaggatttggagctcttcttctcctcttcactaaaggcagtatcgtactctatgaactttacagccttctcatatcttttagaagctcttgcatatttaccagctttaaataatgcatttccttcttctttcttcttaccagcagcttcaatcttctctggtgtgtccatgtcccaggactccttctccttctcaaatgatactagctcaatctcgtaatataatgtggagttaggtggaactactgcaagttcctgttgagactctgatgaaccaaaagcatattcaggtgctatagtcaacaatgctacctcacccttcttcatagtcaacacagctctgtcaagcccatcaattacttgctcctcatcagttttgaattcaaacagccctccttcatcatcatgaccctttttcaaaaataaagtaccatcttgcagtttaccaattactttcaatttcacaatggctccctcatttggatgctcatatccttccccttccttgaggatcttcttaatgaccttcttgtcatcagttacttcagacacagtcttccaagaaactagctcaagagtaatctgcaaagttgcatttggtggaactgcaccttcatcaccatgcgctggcttacccttctcaccaaatccatattgtggcttcactgtcaaaagcactttctctcccttcttcatggttttaacagcctttgaaaaagcaggacaaaaatgaccatcgttgactgtgaactccactccatcagatttagccacaagagttccatcctcaagatgtgcttcatacttcactaaaacttcatcaggatccttggggttttcccatttctctccctcggtaagtatcttcttaaataagcctccatccttacatatgtccttcacactagtccaagacaacagctccacatcaaattgaagagttgcattgggggggattgttggaggagaaccagattcaccataagctagctcagctgggatggtgaaaagggcattttcacctttcttcattgttataataccttgatcccatcctttaataacttgcccttgtccaagcgtgaaactgaaaggagttcccctatctctgctagagtcaaacttcgtgccatcaagcaacgtcccagtatagtgaacttgaacttcgtcaccagcttcaggggtgtcccatccttcaccttctttcaggagcttcttcttcaaaccctctttcccaatctccttctcctcgccgaccttcaggacggggttgctgccgctgccggcgaagtcgaagtcctcgcccatgggctccgccgccgccatgtcgaaatcctcgtccatgttgtggaaatgtgagaatacggagaggaaataaagtttgtagttttgagtgaaaagagagatgtgaagaagcgaatcgggttagggtggagggggaagaaaagagggttttaaaaggggaaagggttccagagagttccacggcaatgggatcagagtgagtataagtgagtagtttg

SEQ ID NO: 80949 - DNA, 592 bp, Glycine max
  Clone ID: PAT_MRT3847_44112C.1
ccacgcgtccgaaaaaaaaaaaaaaaaaaaaaaaaaaaaaaaaaaaaaaaaaaaaaaaaaaaaagaaaaaaaaaaaaaaaaaggaacaaactttctgacggatcgcatgcaaagataaaaggtttttgatagggaaaacctaattttatttggctggccaatagtttaaccacgggccgactgggtaaaaccctggtgtttgccaaattaatggggttacccaacttaccccttttgcaaaacggcttaatttcgaaaagggccgcactagtggacattcccaaaaggtgcgcccttccaatggctattggaacccgccttgtaaatgggacttaccctgggacggtgctttaagctcgcccttagtggcggttacacttggggggacccttacactcgccagttccctttccctcgctttttttcttgcctctcttgccttttttcccttgttagccggatatccgggggtctctttaaggggggggttaagttttgggctccgtttaaggccttaaaaacttgttttccgcgaaggtctccccttaggggcctggttcctgtaaggggccttttccctgttagacggttt

SEQ ID NO: 80950 - DNA, 348 bp, Glycine max
  Clone ID: PAT_MRT3847_44113C.1
ttatggccctgctagctggcaaagctcccagcactgtgggatctatgaggaaaacacaggccttaagaacaacaagcaaaagcccttctgttgaaccaaaaataaacatgcctactgaaaaagcccatggctggacacccgctaccaaggggaaacacaagcgggcatgtggagactaacaatgacacttgaaaaaaaacaaaaacggggggccctttattaaaacccagactactgccgctcctcgaggagagaaccaacaattgaaaagcggcccctaacaaaaaaagaacgggcccccctttaaaaacgaccggaccgacaaacccctggggcaacacaaacaaa

SEQ ID NO: 80951 - DNA, 761 bp, Glycine max
  Clone ID: PAT_MRT3847_44114C.1
tcccggtgtcgacccaccgcgtccgcttataatcacacacacacctaccttaatagctatggaaactggaggctttcacggctaccgcaagctccccaacaccaccgctggtaaaccatatagtattacattaaaataaccatactaatagatactatatgttataccttacattcttttttatgttttttttttcatctattcaatttttcttttaactctatatacgacttggctcgtgctggatatacattactaatatacttctgaaatatatcaatgtatatttaataccatactatatatagtagctgtctcggtgattctaccatgcatgcaacctattcatctcttcagtcttcactttttcttgtcaattccactgaaccctgaggtcatttggtggaatcagttctttcattaatttctaacatttaatttgccgatctctttcttctgcgcaaaatctgatatcctcctaatcatatatatatatatatatatatatatatatatagcttttgaacttgtaagctatatactagcactatatttcttttccgcagatgattttattttcttgattcgtttccctattataaggcctaatctgagtgtgaggtgtgaggtgtctcttccaccctacctaggtggtttcagtaaagcgcataaggtgaaatgaagatgatgacaatagtgggttatggctttatattttagagtggaacaagtggcacgcatgcatgcatgcagttactgac

SEQ ID NO: 80952 - DNA, 784 bp, Glycine max
  unsure (1)..(784): unsure at all n locations
  Clone ID: PAT_MRT3847_44115C.1
ccacgcgtccgaaagaagcctatgaaaaagaaagttctgtttgtgaagaatggtgctgttgtaatgtgccgtgttcaggtgcattattttgcattgtgaatctagaagctaatttttctttcttttttatcttctatattgtattgctgtacattattaaaaaacatgtttggagttgtcatcatgtgaccaggaggtcataggtttgagtgttggaatcagcctcttacaaggtgaggctgtgttctaaattctaatgatctacatggtggttgaccctgtcctgcacatggcaggagctttatggtgctggactgcccttattgtgttgctgtatatgggtttcctagggctatgaaatgtttttttaactgattcttaaagtctcaaatagagagatcagtttattattgatggtagtttgcttttccccccatatattccagtgtatttcattttgtattggaaatgtacttacaggttaataactctatttgcattgagaagttctctgattttccccaacttgggaggttcactcttcgcactgaaggaaaaactgttgctgtgggaaaagtcactggtctgtgaatttgtaacaattttgacttgaggtaatgagtaattcatatgcattattgctttctgntaagctgctcttgcttttcatggtcaactntgtaatactttttaacttttcatatttgttgccgctctggcatatatgacttgattaccctgatatttctggttattttttggttttttaacttggcaggtatct

SEQ ID NO: 80953 - DNA, 357 bp, Glycine max
  Clone ID: PAT_MRT3847_44116C.1
ggtccggaattcccgggtcgaccgcacgcgttcgtccgcagactatcccaaaccaaaaccaatgttcagaacgtaacaaacaaaagaaaaaacctctggttctccctttgttttctcaattgcccctcctattctcagccttttctgtctctccttcctcttgccatgattggaagtaaagatcgtgttgttgactctgaaggtgaaaactccaggagcaagctctcaaggcacaattttgaggccaacaaggagtacccagatgaaaaaggtgttgaatttctgagagattcaaaagtgggtggtggtggtgttgatgggggttttcactcaaaacccaccaacgttgttgctgct

SEQ ID NO: 80954 - DNA, 1317 bp, Glycine max
  Clone ID: PAT_MRT3847_44117C.1
ggggccgtgcatctgcaaaacccaggccttgctcctcatcagcaaaaataataacaaaatttcaaatcctcctggttgggtttcgttgcagttaattccatttgctttattttagattttcattttttttcttggtggctgcaatgtaacagaacaatgtgtctccaatatattacactttctttcagtatctaatgaagctggagaaactgctgcccgtgaagtagaatagtgtgacagtggtaatgatgataatcatgatgtctccttgagaaggtcttccaataggaaaagaagggttgtctttgatttctcagatgaagatgaagatgaagatgatccgacccacgcgtccggttgtcagtttagcatcacctgatctcccaaataaacaatcatctctagattctagacaaaatgacaaaaaaacatcagagaaaaccactctgaattttgatttgcaggaagaaaataaatcaggggttaaggaagaaagagcaactgagcaaaaagctcaccttccactgagagaaaatgtatcagctatcagcaggtgcacaaatactgggaaatcatcttctgagaagttgcagagtggtgctcctgaagtacatttaaataaggatagtgtaaacaatgcccctccatgttcacctaagaggagaaaagtgatagaagaccaggattgatgaacgagggagagaagtaactgaagtagtctgggatggggaggagacagaagagaagaaacctgataaggttacaacaaagaagtctgacagtaacgcatctaccaaagctatcaatagtgctccagcaactaagaagccaccagccaattcaaatgccattagtggaaaaggaggaaagaaagcaggaaactcaaaggatcccaaacagggcaatattctttcatttttcaagagagtttgagaactacactaagaatcacaatgttcaaaagagatgatccttttccgggatcattcagtaatgctagttccttcatgattaagggtattgcattatgcagttctggttcttttagttgaggatttcactgtatctggatgcaggattggttgaaataccttgatgtgttgtgttttcctcacgcattctattgctaatataactaattactctggtcctgttcttgcctaaaaaaaagtatagttcacctagaggtccgtgcccaatgaatcaggttgtgatgggtaactcttgatctcggttgcttgaggttctaatcccaggtcatgcctagtttaagtgagtctgtaaaataaatttaaaaatgagaatatacttttgtat

SEQ ID NO: 80955 - DNA, 430 bp, Glycine max
  Clone ID: PAT_MRT3847_44118C.1
tggttgtatcgctgtggtcttcatcgtctgggggggcttatatcgcttttgtgttggttggcggcgccgcacgccgaaacaatgcccggcaaaggggagggtgctggtttgggcatcgatcttggaaccacctactccagtggcagagagtggccacacgaccggatctgaatgattgtcttctaccgatgaatcaagaccggcgccgactcacgtggggttgactgaaacccaccgtctcatagaggatgctgctccaaacctaatcgccgtggaccacatgaacaccgtgtctattaccgagcggaagactggtcgtaaagtcagcagctcctctggccagggtgatctcaaatagggggcctatgaggtcattgctggcgcgacgtgcaagcctatggtcgcagttgactacacgggtgaagagtat

SEQ ID NO: 80956 - DNA, 1060 bp, Glycine max
  Clone ID: PAT_MRT3847_44119C.1
ccggccgaattcggtcacccagcgttctacggctgcgagaagacgacagaaggggctactaacagagaaaactttcaatttctggttttctgaatttcggatggttgactctaattttaggagctggaaaaggtactaaatctaaagttggacgaaatgtggatccaaggattcagtttttggatcaaaggtttctctttgctggccttaatatctgtaatttccgctctggaacccgaactgggatcgacccgcgtcgtctttcagacaaagtatggagatattgaatttggtttctatccaactgttgcacctaaaactgtggaccacatttataagcttgtgcgacttggaggctataacactaaccatttctttcgggtggataagggattcgtggcccaagtagcagatgttacaaatggaagatcagctccaatgaacgaggaacaaagaagggaagctgtaaagactgttgttggtgaatttactgaagtcaaacatgttcggggtattctttccatgggaagatatgatgatccagacagtgcttcatcttcattttcaatactacttggagatgcccctcatcttgatggcaagtatgcaatatttggaaaagttactaaaggtgatgaaacgttgacaaagctcgagcaactacctacccgcaaagagggtatatttgtaatgccgatggaacgcatcactatcctgtcgtcatattactatgatacagagacagaaaattgcgaggaagacagatcaattttgaagcgcagactagccgcctcagctattgaagttgaaagacagaggatgaaatgcttcccctgataaaagcaaatttgatattaatttggaatgaacattacactgttgcattctcattttatataatgaacaagcagtgtatacagatattgcttttgtcatgtatgagaaattgttctaaatatgcacaaacatgaatttaaagagcttgtttgcaaatttcccgatatctgtttttgatttctatggatagaaaaaaaaggagcttatttgtatatttgcccgg

SEQ ID NO: 80957 - DNA, 409 bp, Glycine max
  Clone ID: PAT_MRT3847_4411C.1
gagagaaaagaagaaattatcattcttgttaagtggataagaccctcttaatccactccaattttaacggaaatattttggacacaggccaaatcctccttgggataaggcaccaaaaaataaccctgaagttaaccttattcttgttccaattaagacttgagagagcccgagaaagggagggggagagagaaacagctttctctccaacgtggtttcttcttacttacccgtttctctgtctcaagctgaacctgttccttttttcagttctccagatatctctggtgggccgattgtttgagactcattaatcctccgatatatccagagacctgaattggttgtttttcaatttccttttcttttttcattgcattcttcatggaatatttcttgagagaaatag

SEQ ID NO: 80958 - DNA, 210 bp, Glycine max
  Clone ID: PAT_MRT3847_44120C.1
ggtaagcgactcctgttttccacacaaacttttgtacattaccaatctgaattctcgagtaagtttttcttgtcaaaacatatatgcagtcaacagaattatccttagttttcaccataaagggtttcctttcctgaatgctgggagttcaatctactgaaaaaacgagggggggggggtatcttcttttatgtctacaccaagcgactg

SEQ ID NO: 80959 - DNA, 2108 bp, Glycine max
  Clone ID: PAT_MRT3847_44121C.1
gcggaagactatgctaaggtgaagagaagagtagcagagctatacaaagaacatgagaaagaacttctggaggcaaacaaaatgttgatgaagaaaatccaagatgatcaattcttagaccttctaactgttaaaacagaagttcgtgctgtatgtaaagagccttacagtatctataaagctgttctcaaatcaaaaagttcaatcaatgagattaaccaaattgcacagcttcgtattattattaaaccgaagcaatgcattggggttgggcctttatgcaatccacagcagatttgctatcatgttctggggttgatccatggaatctggacccctattcctagatctgtgaaggattatattgcaacccctaaaccaaatggctaccagagtcttcagaccaccgtgattccatttttgtatgagagcatgtttaggctagaagtccagattagaacagaagaaatggatttgatagctgagaggggcattgctgctcattatagtgggagagaatttgtcacagggttggttggaagtgcaacaccaagtagtaaaagctcaagagggaagacagtttgtctaaacaacgccaatattgcactgagaattggctggctcaatgcaattagagagtggcaagaagagtttgttggcaacatgagttctagggaatttgtcgacaccattacaagagatctgctgggcagtcgtgtctttgtgttcacaccaaggggagagattaagaatcttcctcagggtgctactgtcattgactatgcttatatgatacacactgaaataggcaacaagatggtagctgcaaaggtcaatggcaatcttgtttctcctgctcatgtacttgcaaatgcagaagttgtagagataatcacatataatgcactttccagcaaatcagcctttcagaggcataagcagtggttgcaacatgctaaaacacgtagtgcaagacacaaaataatgaagtttctgagggagcaagctgcacgctctgctgctgatatcactacggaagcagtcaatgactttgtcactgattctgacggggatagtgaatctgaagaactgtcaaaaggttccagtggctctaaatatacgtggggtaaaatgtttgtgaatggagccgaaatatcaactttaggaagaagtgagaccgtcctccaaagtaacaatggaagtgcttggatccccaaggtcaatggaaaacataataagcatgtgcagcatgaaagtttcaacggcaaaggggagatgttactgcagggaaaccttgtcgcaaagatgattcaagttaacattccaagatataaggaagtcctgccaggtttagaaagttggcaagcccagaaaattgcttcttggcacaatatggaagggcactccatccaatggttatctgtagtatgtatagaccgaaaaggcatgatggctgaggtcactacagcattggccactgcaggcatagccatatgttcttgtgtggctgagattgatggaggaaggggaatggctgttatggtatttcacgtagaaggaaatttggaaaatttggtcagtgcttgctctaaagtagatctgatattgggtgttttgggatggtctaccggttgcagctggccaagcttgatggaagaccgtggcgttctcgaatgctagttgattcgattgcagtggctcttggcgtctactacagtttgcccaacaccagggaattaagttttgtccgcagcagcgtaggcatttatgtggctaaattttgtttatggtatagttctcatatatttgttcgaacttctaaccaaataatccggcagcaacctattgagtcaaaagactcgaaactcaaggcactgtatatagaaaagagtgataggataaaggagtatacaatgtaaagtagttgtgcagaaactaagcatttatccaaggagattgctaggggtctcttattacaaattgtcactttccctggccagtttcaagtcttccatttctacctaatttgtgaaaaatgttaattaatagtactggcattcgtaataggcaggatcagtaaatgcattctgatttcttttcttcaaaaa

SEQ ID NO: 80960 - DNA, 709 bp, Glycine max
  Clone ID: PAT_MRT3847_44122C.1
tggatcctctagagcggccgcttttttttttttttttttttttttttttttggctttaaattcatgtttatgcatatttagaacaatttctcatacataacaaaagcaatatctgtatacactgcttggacattatataaaatgagaatgcagcagtgtaatgttcatcccaaattaatatcaaatttgcttttatcaggggaagcatttcatcctctgcaaagtgacgcatgaaagctatgttaacaagtggaacaaacattatggtcttgaatctgataacgtttattacctgtctttcaacttcaacagctgaggcagctggtctaagcttcaaaattgatctgtcttgctcacaattttctgtctccgtgtcatagtaatatgatgacaggatagtgatgcattccatcggcattacaaatataccctctttacgagtaggtagttactcgagctttgtcaacatttcatcgcctttagtaacttttccaaatattgcatacttgccatcaagatgaggggcatctccaagtagtattgaaaatgaagatgaagcactgtccggatcatcatatcttcccatggaaagaataccccgaacatgtttgacttcactaaattcaccaacaacagtctttacagcttcccttctttgttcctcgttcactggagtcgatctttcatttgcaacatctgctacttgggc

SEQ ID NO: 80961 - DNA, 495 bp, Glycine max
  Clone ID: PAT_MRT3847_44123C.1
gggcgggggaaacaaaaacatacccagggttttaaaacatcaaaaaaaccaacaaaaatttttaaaaaggcggaatggtttctctcccaacccaaaaagggacttttctctttcaaacaaaaaactccccaaaccaccaccgggaaggaaactaaaaccccccctggggggcatggccgacatcaaagggaaaaggggaaacgggccccaacggggccccctcgaccaaaaaaccaggttggggacccgggggcgggctttgggggcggatcttcccaccctgggcctgggcccaagcctggagcggaacattctggaccttccaaagggggaaccccccagggcccctggggggcaaaacaggccccacccccccgggaacccccttccttaagaatcgggggccgccccgcttggtgacttcacccccaacagcacggtgggggacattccaaacccaaccggggcggccatggaaaaactggggaggcattc

SEQ ID NO: 80962 - DNA, 1257 bp, Glycine max
  unsure (1)..(1257): unsure at all n locations
  Clone ID: PAT_MRT3847_44124C.1
gcactatgcttggctgccaactataccntcnctagatacagcacatgtcactgaagagcacaaagatgaagccccatcatttgacacagtttctggcacagccaaacaatctggagtaacatcaattccatctcccgtaacagtttcagattcttctgatacctgcactattgcttggctgccaactataccttccttagataatccttccaccttctcaactgatactaggggttttggaacttcagatacattttccatctcagcagcacagcttttactatctgtcccatcctcaatgtcagctagtcctcttgatccatcctgggattccaagattccttccaccttctcagctgatactgaggattttgggacttcagatacatttcccatctcagcggcacagcttttactatctgtcccctcctcaatgtcagatagtcctcttgatccatcctgggcttccaagattccttcccccttcacagctgataccgagggttttgggacttcagatacatttcccatctcagcagcacagcttttactatctgtcccatcctcaatgtcagctagtcctcttgatccatcctgggattccaagattccttccaccttctcagctgatactgagggttttgggacttcagataaatttcccatctcagcagcacagcttttactacatgtcccttcctcaatgtcagatagtcctcttgatccatcctgggcttccaagatttcttcccccttcacagctgataccgagggttttgggacttcagatacattttccatctgagcagcacagcttttactatctgtcccatcctcaatgtcagccagtcctcttgatccatcccggttcaacaagaggctcgagaagattcgggactgctttgacaccgtgttggacagaatcataaagcaacgtgaagaggaaagaaggaacaagaatgaaaccgttggaaaacgagaatttaaggatatgcttgatgttttgtttgacatatctgaagatgagagttctgaaattaaattaaacaaagaaaacattaaggccttcatcttggtaagtcaataaaaggaactatgctgtttttttccacaagtttcatgcgtgcccattagatttattatatttggatattcaatcgtacaaatttaccttactataattttgtctggttaggtcatatcatcacttatataacccttcttataatttaaaaaaaaaaaaaaaagggcgggcgc

SEQ ID NO: 80963 - DNA, 285 bp, Glycine max
  Clone ID: PAT_MRT3847_44125C.1
tccggttgcaaaaaaacaacaaaagggaggatagggtttttatcgaacaatcatcttctgagggagccacctattgtgcaggggtcccttcaatcgttatagaaaataaatgggcttctaaaactttcatatctagcttacagcattccggctgaaacattatttcttcattctacggagatatagatggagtgcaaacacgccttcatggatgattccaatatcacatggccatcatgtggtggagcatcttgtggctaaaggtggttctgacgtctccaactt

SEQ ID NO: 80964 - DNA, 188 bp, Glycine max
  Clone ID: PAT_MRT3847_44126C.1
cggattcggctcgagctccggtgcgagaagaccacagaaggacgttggtacgtgaaacctgacctatcccaagatctcactagtgaccatgctgaagactggtggagggacccttgccttagccttagacatacttccttgtgtcgtgcactcgctctaccctttggaatccttttttgggggggggg

SEQ ID NO: 80965 - DNA, 311 bp, Glycine max
  Clone ID: PAT_MRT3847_44127C.1
caactccaatcttctatcatcatcgaatccactccacctttgtttcattgtataacgcaatttcctcgcgaggttttttaccaaaaaaagcctgggcacccttctcctcaaccacaccaaacccataatcttaatttccataacatcaaccgcttcttattcaccccggtttcaactattcacccttccccatcttcattaacaatatttcccacttgatccatccatcaacggtgacatcattcaccttcaccaccataatcaccaccacacttacattaccaactacaacaatgccctctaacaacttc

SEQ ID NO: 80966 - DNA, 268 bp, Glycine max
  Clone ID: PAT_MRT3847_44128C.1
aatttcatctccataatcaatgttatgaaagtttacattaaatattaacataataaaattctaattgtgattagagaacatttgcattaaaacacttaaaaaaaactacatgttcacatcaatttgaggggaagagagggatgcagaaggaaaattgaaatgacctttggtagaagagctgcaagaagatgaaggaaggagtgaactgaggtgaacaagatgagtatattgatgaagattgttgctttctgtgtcctcctttcttgct

SEQ ID NO: 80967 - DNA, 757 bp, Glycine max
  Clone ID: PAT_MRT3847_44129C.1
ggctcgaaatttctcttctctctcttcttctcctcttatccgcagcctttcaaaccctagaatttctcgaagtccgagccctttattaacaatcctatgaggctctaatttttttgaggattttgaggttgcgtgagttaggatttggagttggagttggttgaagagggaaagtttgtccgtggtcggtggaatttgagttccgtagtgtttttgttttcttttaaggttatattggtcgtgttcgaagatcagggtttggagatcgaaattaacggtgcggttttggatttgagtgtccgaaatgacttctctgagcagagaattggtgtttctcatactccagtttctggaggaagagaaattcaaagaatccgtacacaagcttgagaaagaatctgggttcttttttaacatgaagtactttgaggaaaaagtgcaggctggcgagtgggaagaggttgagaagtacttatcaggatttaccaaagttgatgataatagatactcaatgaaaatattttttgaaatcaggaaacagaaatatctggaagcacttgatcagcaagacaaggcaaaggccgtggagatattagtgggtgatttgaaaatgttctccaccttcaatgaggagctatacaaagaaataaaccagttattaactcttactaatttcagggagaatgagcatttcagcatgtgacgctaacacccaaaactgctcggtagactgaaaagatagaactgaaaaactcat

SEQ ID NO: 80968 - DNA, 328 bp, Glycine max
  Clone ID: PAT_MRT3847_4412C.1
gggtgtcgcgtcagctagatgttcgacacgaatttctgcattttccttcttccatcggtccgtgacatatacacagacacatttcgtctgacagggaagggtgattcgcgcacagcgtacgggcgcggagtcagtgttcacgtcgcagacccatcatccgcaacggtccgtgcaagttctgcaggctcgatttcggcgaacacaacagctatctcataggggtcattactgatatcatccatgaccctgcacgcggtgatcttcaagccaaagtggcgttctgacactccatccgcgttaagcagcagacggacctctacgtcaccga

SEQ ID NO: 80969 - DNA, 160 bp, Glycine max
  Clone ID: PAT_MRT3847_44130C.1
tttatatcatgcaatagatgtgttccttgaggcacatccttggctcattaattcagagagagagcaatttggtagactcatgaactgccaaaagctctcattggaagcaagcactcatgcagcacataatgaaagattaccactcatagtgattgtgcag

SEQ ID NO: 80970 - DNA, 194 bp, Glycine max
  Clone ID: PAT_MRT3847_44131C.1
aaaagaagagcatgtctatcccccatatattttaatggggccttaacaccggggggaagaatagctacatccatttgattttccgatacaaattattggccgacaaattaactatctcactaattaaacactatacgttacacaattatgtacggacaacataagctatgaggggttgataactaaggcaaata

SEQ ID NO: 80971 - DNA, 520 bp, Glycine max
  Clone ID: PAT_MRT3847_44132C.1
actcaagcgattattatagcatcaccatttgcctttacgttgggcctcctagcttccttttttgcagttatcctaccaattaaagagtatatatggacatatgctgctcttgagtttgcacttgtggctttaaccgtgcatctattttatactatgttgcatttgacggccatatatgccatactactttcatcagttttgggttttggagttgctatgggcatcaactatgcgtatatccagtttgttacttggaggcttcaggtttctcatgttgataacccagtatgaatctcctcacaagggaaacaacttcatgaattttatttctctgtatctactgatatgatgacctgccacgatgtttatcatgaaccttgtgtttgtcaatcaataccactaccatgtagtatatttttttttttgcgaaataaatatcatgaagtgtatatgcaagagagcaagagaagcagaatcttttaacattttttttctatgaaattctaaatttatttcactg

SEQ ID NO: 80972 - DNA, 482 bp, Glycine max
  Clone ID: PAT_MRT3847_44133C.1
cccacgcgtccgggttcttgtatttcgagtttttgcagaaactggaagtcaaggaaggaatgaccagggatggacatacctggagaccaagctcttctggcggggatgtaaatattagatttgagatagggatcaataatggtgatcctgaattggagagttcagttccttcagggcagcttgcgggtacagatcgcactagtgataaggttgaggaaagattgagctttagcatttgcaagaggataatccagttgatgcaagggaacatatggtcagtaccaaacgctcaaggttttcctcaagtcatggccctttttcttcggtttcaactgtggcggtctattgccgtatccaactctgaacctggggaaaattctgagacatccaattcaaattctttcttcagaggtctgcaggtcttgttggccgacaatgacgatgtaaatagagcggtgacacagaagttgcttcagaaacta

SEQ ID NO: 80973 - DNA, 406 bp, Glycine max
  Clone ID: PAT_MRT3847_44134C.1
gggacattgataaaaaaagataatgaacttcctgccttataaggaaagaaagtttacccacccctcccaattttttaataaaaaaaagtttttagtttattccccagccccttaacaggatgctgaaaaccccttccatttgaggtttaaaacaggaaaggggtctgattaaaaattattcctttttaacccttccaatttttaaaccccccttgcccttttgcattggccccaataagggtaagggatcaaaccatgccggataacccgttaaaacacaaaccaaggggcaacaagctcgggggaattaacatattaatggtggcaaagcaggggcgattttcctgtccctgaatccacaaaaaattttgggccaagtccaacaacaagaacggttttttattct

SEQ ID NO: 80974 - DNA, 1146 bp, Glycine max
  Clone ID: PAT_MRT3847_44135C.1
ctcgagccgacgcggccgcacacgcacccaccacccaaccttcagtttctcagcaacttcgctttaacccgtgacggaaaaactcaaaaagcagcgtaaatcaaaatccttggaatccctttgattcccccacttcggttttcaccttattcatctcaaagatttctcctttctctccttttttctctctttgcccttctgggtgtttttgaaacgtgcttaaaccgtgatgggtgctgttgtggagtgctacccgccgcctcgcacggcggtgctgtccctcaacacgctgccgttagggttccgtttccgtcccaccgatgaggagcttattgactactacctgcgctcgaagatcaacggaaatagtgacgatgtttgggttattcgtgagattgatgtctgcaaatgggagccttgggacttgcctgatttgtcagtggtacggaacaaggatccagagtggttcttcttctgtccgcaggaccggaagtatccaaacgggcacaggttgaaccgagctacgaatcatggctattggaaggcgacggggaaggatcgaaagattaagtctggctccaccttgattggaatgaagaagactcttgttttctataccggtcgtgctcccaaggggaagaggaccaattgggttatgcatgagtacaggcctaccttgaaggagcttgaaggaaccaatcctggacagaatccatatgtcctttgtcgattatttaagaaacaagatgagagtcttgaagcttcaaacggtgatgatgtggagcggactgcttcaactcctacaactgccaattactgtcccgacgaaatacaatctgattcagctctggttccagcatcttcctcacaggttactgaagatgataagcctctaccagttatttccgagaactccgaggaagcaatatccaacattataacccctggtgatattcatagtgacgaatgtgatgcttctgatgcacaatatcaaattgttgaaccaattgcaaaggaggatcaactgccgaacgtggacatattttatgacccaacaaatcagcaattagacgacaaattgttctcccctgtccatgcacatttcccagcagatttttattatcaagctaacaatcaatcagaact

SEQ ID NO: 80975 - DNA, 459 bp, Glycine max
  Clone ID: PAT_MRT3847_44136C.1
acagaaatatactattttttcggaaatgaaagacctgggaccaaacgatggacatttgaaaaatgatgcccgtcatgcgaggatcacaaaaaactgaacgcggcagctgcaactctcacacaaaccagaatgattttctcacatgcacgagctggtcaaaactgtgattgagaaagagaacgctcatgcgcgattcttcgagggaagctcacaagaagaaagtcggtgaacatggctccttcacctgtgaaagatgccactgaaatgacgcaagaaaacctgctttgaagctgacaccttccacctgtataagtagttgatccccaccccggtagggggggaatcccgaatgtcaatcctatagcgctgaggaaaaagttctggggatatcagtgactcagccaatattagaaatgcagctactggtggtttcctctgctctcggacgggccatttttt

SEQ ID NO: 80976 - DNA, 154 bp, Glycine max
  Clone ID: PAT_MRT3847_44137C.1
agcacgcatcagcttatgttagtgtttctggatcctatcatcttcagtagtgttcatgtcaatactaatagtacttaggatcctcagatccttgtaatagtccacatgctcgttgagacattctacagctattgaacactcacagcccgacatc

SEQ ID NO: 80977 - DNA, 309 bp, Glycine max
  unsure (1)..(309): unsure at all n locations
  Clone ID: PAT_MRT3847_44138C.1
cggggggggggaacaatttaaagttttattaaaaataatttggagtaccaagcaacattttttttcccgttctcagccaggggacccataaaactgccacaacaccgtnaaggggaaaccaaggcctgaaatttataagcttagaacaatccttgaacacatttggaaccataaaccccattctgagcaccccttattttgcaatacttaatacaccccctggcatccttaagaaacgggtgtcataaaatggagggctccccgggggggggatacaacttaaaaacccccccgagcccaattccaaaa

SEQ ID NO: 80978 - DNA, 333 bp, Glycine max
  Clone ID: PAT_MRT3847_44139C.1
ggctcgagggccgtgccccacagtttgcttttgttgccgaccaccaggcgccgactttagactctaaggctgcagctgccagtgaacccaacgagaccttacctgccctcgacattaacgagggttcgactcgggccattgaattgaccgtacaggagctgtgcacagctgtatggcagatcaatattcacactctggggggcttggtttacgacgatctaacccaccgctttcacgatcaagggattgcacggactgcctacaacgaacgcgactgctttagagacctagtcaccaggcactgatactatgagctgataccagtgtaacatt

SEQ ID NO: 80979 - DNA, 491 bp, Glycine max
  Clone ID: PAT_MRT3847_4413C.1
ttttttttttttttttttttttttttttttttttttttttaatataataaaataaatcacgtaatattatataattaaaaaaatacattattagacgtgtatcaaattaaaatgataaaggcaggaaaaataaaatctgaaagcatagcaataatagtagtggatcgaaattcttgagtcatcatcacacttaagaaatttggtttttgtgagaagcagcacatgtctggtgaaggagggagtttaacgtggagcaggatgagccaccctcttgcgtcggaaatttggccatctctgccaactccctcactttctctctcagttttttccccttgactccttccatcacctccttcaccgtcttcttcaacccttcccttttcacaaaccctctcaccgacccatcacacgtttccaccctcaaccccaccttcacctcctcctccaccattctcgcattcagaaactgctccgccattattggccacccc

SEQ ID NO: 80980 - DNA, 179 bp, Glycine max
  Clone ID: PAT_MRT3847_44140C.1
aaaaataatccaccctagcgcttatgtgggaaagggaaccttacaagatatacgttgtacacatgtatatcaccatacacgtaatatttgggcagatccaatcaatactcttgtaattgaaacctctcacgattgagaggacactaatagcaggggtaacaattcacaagtgttggttt

SEQ ID NO: 80981 - DNA, 285 bp, Glycine max
  unsure (1)..(285): unsure at all n locations
  Clone ID: PAT_MRT3847_44141C.1
ggccaaggcaacnctcntctgantttctganctctcaagtntgttctctcttaaactagttcttcntttcctgancttgtttttnttctgcnnttttcgcttttgataggcgttgcgttctttgtcngttnctnntgccgaaggacgtgtcaacgaaagcgtatncganttgcnatgttgacctcttttgtcnctttcgtgacttgaacagctacgtattntttccgtcgtagtctgttctacggtctcgttgtgccattcctttngttcatttttnnttnnttg

SEQ ID NO: 80982 - DNA, 317 bp, Glycine max
  unsure (1)..(317): unsure at all n locations
  Clone ID: PAT_MRT3847_44142C.1
aatcaattgctcacttattaaaagtgtatgatttttaaatttacacaatccaaccaaccaaccacatattttatattnttactctttttttcccttaaaaaaaaaaataaaataaaaaaaaaatataatattaatttatttaaaaaaatgttcttctctctatattatccaaactttcttactcgttcattccacttcatatctcttctattatttcacctaaattcaatttcactttcctattttttacaacatctttacttttaaaacccttttattacccaatttaatcccctttcattaaaatcccctttttt

SEQ ID NO: 80983 - DNA, 292 bp, Glycine max
  unsure (1)..(292): unsure at all n locations
  Clone ID: PAT_MRT3847_44143C.1
gctcgctgngggcnnngcncctacgtacctacaacaacagttgctgcaacagattgtaccagctctgactcagctagctgtggcaaaccctactggctacttgcaacagttgctttcattcaccaactggctgtgtcgaacttgtgtgtacctacacacacacagtactaatcactacatggtaacatggcgtacttcgtgagacaatgtgctcaacgttttgtaactgctgaaacatgggggatttaaaattaagataatggctatcgtggtctaaaaatttgtgatattg

SEQ ID NO: 80984 - DNA, 685 bp, Glycine max
  Clone ID: PAT_MRT3847_44144C.1
caaaagcctccatataaattcagaacacatgaaggggtgacaaagttggaaaagtggaaaactcatggagcctattggaaactcttatgagtcttctttttccaaagatgaaaaagtggaagctgcagatcttcttctggaggagtgctggttctttgataacttattaaagataacaccaaggatgacaaggtgtcactctgagccttacccttcttccactggcctaatcagccccccagattttttggtgaaggactcaaactcaaactcatcatcaccaagtaaaccactaaacaatggtgctattgtccatccaaagatccagagagcaccatacatgccaccattgagactgagagaagaagaagaagaccaaaaaggaagcagttctacaagaagcaaattggtgcaccaaccaacagatcctgttgtgtctcatgcagcaagtaaacctcattgtgcacaaatgaaaggacgtcataacagtgattgcgttagaaggaaaagcaaacttcttagaacaccatctttgcctccatccatagggagagatgaaaagttgcaagtatatgatactagacctggcagattccacaagcaaccatcaacacctacgcaaattgacattctgccccccaggcaaacctctaagtcttgtagcattccaagatgtagaccagcc

SEQ ID NO: 80985 - DNA, 128 bp, Glycine max
  unsure (1)..(128): unsure at all n locations
  Clone ID: PAT_MRT3847_44145C.1
ctaataggcntgcaggganagtggcangggatntggacantnctgaacaacaattttggacagcctcagcntctggatnantnggataactgcnatttgatgagccgncgaaagaggccntagtncct

SEQ ID NO: 80986 - DNA, 209 bp, Glycine max
  Clone ID: PAT_MRT3847_44146C.1
ctttatagcacttacagatgcaaagagctgtcgattgcacacatcaggtgatagctataggctcttgtaccacgtgtatgtttctttatgctggtttgtacacgagatgtttgtactttgtactatagtttttgtaatcagtctctctttcaagatttacgtctcatataaatagtatgtgcattgtttaagaagataatcaaaggggt

SEQ ID NO: 80987 - DNA, 273 bp, Glycine max
  Clone ID: PAT_MRT3847_44147C.1
tctcgagccgaatcggctcgagaccctcccccaaagccctcagcacttgtctcaacctcttgcttgattcgaatcgcgtcgatttagcgcgaaaattgcttctacacgccaaacgggatttaactcgtaagccaaatgtgtgtgtgtttaatatcttggttaagtaccattgcaaaaatggggatcttgattctgcttttgagattgtagaagaagtgagaaactctgagttttcttaccctaatttagttacttactcgacccttatggacg

SEQ ID NO: 80988 - DNA, 368 bp, Glycine max
  Clone ID: PAT_MRT3847_44148C.1
ctgttgtcgtcctattcatagatatttcctgccctcactttgtgaatattactacattgggcagaccatggctgaaggagcactttaattcgcacagatatcaacgggtccatttacttcgtatcagtcctttacagtttgtgtgggtgttcaaaatgttgcagttgtcgataaaatgctgacttaacagcctatgctgaacatcgggtgcttcttattcatagagtacctattgccagagtgttattgaactaatctattagatcgacaagcaccactattgacaaatagttcattgtacacacaagctacaggatttgctgagttcaagctacccctgcggattgaacgctgaaaatgggataaat

SEQ ID NO: 80989 - DNA, 1576 bp, Glycine max
  Clone ID: PAT_MRT3847_44149C.1
ctgcccccttgcctccggtgctccccccgccccccccgccgcgtcaaatcccccgacgtcgaaatccctttgaaagaacccaccatgatgcacgatttcgcaataacagaaaacttcgtcgtcatccccgaccagcaagtggtatctcttagccatgtccgaagatgacttacctcaccatctgcgcataacacccaacggcgacttaaccaccgtcggccgttacaactttaacggccagttaaaatccacaatgatcgctcaccccaaactcgaccccgtgaccaacaacctccacgccctctcctacgacgtcgtccagaagccatatctcaagtacttccgcttctccccagacggcgtcaaatcccccgacggcgaaattcccttgaaagaacccaccatgatgcacgatttcgccatcaccgagaacttcgtcgtcgtccccgaccagcaggtggtcttcaagttatcagaaatgatcaccggaggctcccccgttgtctacgacaagaacaaggtttccagattcgggattctcgacaagaatgctaaagatgcaaatgatatgaaatggatcgatgctcccgagtgcttctgtttccacctctggaacgcctgggaggagccggaaaatgatgagatcgttgtcatcggttcctgcatgacccccgcggactccattttcaacgaatgcgaagagagtttgaagagcatcttgtcggagataaggctgaatttgaagacaggcaagtccacgagaaaacccattatctcggaatccgaacaagtcaacttggaagccgggatggtcaacagaaacaagctcgggagaaagacgaagttcgggtacttagcacttgcggagccgtggcctaaggtttcgggttttgccaaggttgatttgttcagtggggaggttaagaagtacatgtatggcgaagagaggttcggaggggagcctctgtttcttccaaatggtgtcgacggtgatgaagacgatggccatattctcgcattcgtgcatgatgagaaggagtggaaatcggagctgcagattgtcaatgccaaaactttgaagcttgaggcttcagttaagcttccttccagagttccttatgggtttcacggtacttttattcattccaaggatttgaggaaacaagcttgaattcaattattgggtgacgacggtaaaaaaaaaaaaaatgtgatttttttttcactttgggaggagagatttaactgcgggatgcttgcagatacgcccccggaatctactcctcttcttttctgttgcagatttttatttttactttttcttcattttttttttaaaatttggggttaattacttttgagtgagaggttttggggaccagcgtgtagcttttgggtgtagttagcaatgaagctcagctggtctctgttttttctttcgcttgatgtgcatgtaaagtatattagatgaaaaaaaaggtacatatataatatatcacagtatagaatgtgatatactatgatattatgtggttacggtttactataaactacttctgttcatcattaaaaaccc

SEQ ID NO: 80990 - DNA, 350 bp, Glycine max
  Clone ID: PAT_MRT3847_4414C.1
gctgcgagaagacgacagaggggggataaaaaaaagggccagggacgaaatcgacttgtgccaaaattggggggccaaaattgggaatggtttgggtatttaaataactttcttttgaggttaataactgggttgggttttaactataaggggggttcctaaaaaacttcagaaggatctggtcattaagctttcaaggcttccccttaagaattagggtccttattccaggtggtggccatcagttcaaaataacacccatattctttattatgtgtcacgagttcccggtgggaaagacagaccctactgaacctcttgatgcacatagaagatctcatctttataca

SEQ ID NO: 80991 - DNA, 557 bp, Glycine max
  unsure (1)..(557): unsure at all n locations
  Clone ID: PAT_MRT3847_44150C.1
gcacttgccgagccatggcntaaggtttcaggtttcgctaaagttgatttgttcagtggggaagtgaacaagtacatgtatggggaagagaggttcggtggggagcctctgtttcttccaaatggtgttgacggtgatgaagatgatggctatattctcgcattcgtgcatgatgagaaggaatggaaatcggagctgcagattgtgaatgccaaaactttgaagcttgaggcttccgttaagcttccttctagagttccttatgggtttcacggcacttttattcattcaaatgatttgaggaaacaagcttgaattggtgacggtaaataagtgagtttttcactttctgaggagaggtttaactgtgggatgcttgcagatacgcccccggaatctactcctcttcagtttctgttgcagatttttacttttcttcatttttttcactttgggagtgagaggttttggggaccagcttgtagcttttggggtgtagttagcaatgaagctcagctggtctctgtttttctttcgcttgatgtgcatgtaagtat

SEQ ID NO: 80992 - DNA, 400 bp, Glycine max
  Clone ID: PAT_MRT3847_44151C.1
tcttctttctctctttatggatcaacttgattcgtaagaagcttgcggatcaagttgatccgtaaaagacttacggatcaagttgatcagtaaaagacttacagatcaacttaatccgtaagttttaaaaatcaacttgcggatcaacttgatccgtaagcttcttacggatcaacttgatccgtaagtctaaaaaattaacttgcggaccaacttgatccataagaagcttgcggatcatttatatcaactgcggatcaactaaaacctatgcggatcaacctgaatgagctgggtgcacaaaaatatttttaaaaacacataggggtatttttgtcttttcatgttaaatgttgagtgcattagcaaccctattaaaaaaaaaaaaaaaaaaaaaaaa

SEQ ID NO: 80993 - DNA, 625 bp, Glycine max
  Clone ID: PAT_MRT3847_44152C.1
tttaggaattaaatttgtaatttatatcaattatttataatattaacttccaaacaaggagatgatcccgccactccctcatgaaaacttccaaacaatttagggtttaaagaaaataggaaaaaaaatccttttcacttcattctcttccaaactactctccatcattatgaatcactcgactccatccacttaaaaacctcaggagtctcatttaaattagtaaccagcagatgaagccaaaacgttatgctcctttaaacgtttctggaaatgagctaaacgggtttgtaactgcatgatgccagaagccttctgagacagaatggcatttagttttgctatataatcatccaactgattacctggtttatctgcttcaaccaagaggttcatttcctctctaacaatattcatggtctcctctacttgtttccggtgagcatttacaaggtcgtcttcttcctgtaagagggcagtcaaatcatcatcatctgaatgtactgttttaggttcaacttttgggaagtccttccatttgatctgaccattgggtttcttaaatttatcatctggtgcaccatatggctctacctttccatttttcttccatgatgggttggct

SEQ ID NO: 80994 - DNA, 221 bp, Glycine max
  Clone ID: PAT_MRT3847_44153C.1
cccttaagtgacttttttacattaaaccttaaacccttaaccctccatatatgactgtccagatttaatcctctcattctcataaaagatgttttttcttgtaagatatgttatgacagctgcgagcttaattcagggacatgcatgccataggctgtttgccattttgtataaatgcccgatcttttggatcgttgattttgtgactcaggttgcgagtg

SEQ ID NO: 80995 - DNA, 308 bp, Glycine max
  Clone ID: PAT_MRT3847_44154C.1
acaaaacactacacccgtttaacatagaattagttcagtccggctatgaacgagtaccggctcctgaataacaagaaagcaaatgacctaggaaagcacctacagagtccatacatattctggagcatatgaccttttcccaggcaatgtacgatacaaatgcatcttctctaccttctgcccatgttccagactacaatctccttgctcgtttggatcgaagatctccacattggagcttggcatcttcttggctggctacttgcagggtacggcagtcacttcacaggacgaccttcaaagggatc

SEQ ID NO: 80996 - DNA, 307 bp, Glycine max
  Clone ID: PAT_MRT3847_44155C.1
gcgtacgagagaacgacagatggggaaaggtctgcagttctgatgatgatgatctacatatttttgcggagctgcatcatcagtctcacaacgcagatcagattcacgtccctatccccagcatccagaagtttcacattcacatctagtttccaatgcctgcgagtcatactgctatatggtgtaacatggggcatagatcccgagtatcaaaattggcaccgggaatccatgtcggaataccatggtgactaaatggagtatgctgttgtcgatctgatatggcatgacgtccatgatgactttt

SEQ ID NO: 80997 - DNA, 321 bp, Glycine max
  unsure (1)..(321): unsure at all n locations
  Clone ID: PAT_MRT3847_44156C.1
cttanattgggggggtttttttaattttggccatcatcttgaattaactcttatatatttagaaatttagaaacttgttccatttcagtggtgatttcctccatgtaagagcctgggcatggtgctcaaaaaaatttcactctagtagggctttgcacactggtctggaaaacaagggacagtggaatgggaaaattttttaacccctccggtgctagatcatttcccaatgacaaaaggatcaagggcttgccattgttaaaaagcacacaacccagtttcaataatcacaaatcaggcttacaaaaatctaattgtttg

SEQ ID NO: 80998 - DNA, 305 bp, Glycine max
  Clone ID: PAT_MRT3847_44157C.1
cgtccggttggtgttgtcatgagttgaaacttaatttacttttcaccactaaactacataacaaggcagattttttataaaataacaccaactatacattattaaaaatatcttttccaaatattcatatttaactcattttcttataacttgttcctttcctcataaaaaatctataaatatataaaaataacctattaccctccttcattctatatattacatctataattattaaattctaccatttcatacaatataaaaataatcataatataacacatcatactcacatctctaattta

SEQ ID NO: 80999 - DNA, 365 bp, Glycine max
  Clone ID: PAT_MRT3847_44158C.1
aattaatccccccctttacattctttttcaattcttaaaagggggggggaaattttcaaatagggggagccttcccaaacggggggcatgcctaatttcctttttttggttggaacccaaacccattgaaaagaaaaccctcccccccgatcatgcaaaaaattctgctttttcaaaaaatctggctttggcccggggaacaaaaaaagctggccttagagggtttccagcaatttcaaaggtttgggaaatccctaaaaaaacatcaaaagggggggtttggttgggtttttcaacaagggaactttaatcccccgaagtttggtttgcccattcaaaactccccatttggaaaccctttttgg

SEQ ID NO: 81000 - DNA, 624 bp, Glycine max
  Clone ID: PAT_MRT3847_44159C.1
cccacgcgtgggcccattcgtacgtggacgcgtgggtcaatttgaacattaaaatttatctcattcttataaacagacgctctctatatctgtttcaatgacgctgaacatagcgggtttggctgtgttgtgtattgctgtaataggcatatatgtggtggctgaggatgcatataagtgctacacctgaaatgtacatacggagacattgatacacttggtgaccgccaacagggaatactaaacatcggtcaagtcacaagcgcagacattctttttgatgccaacgacagcctgatcatcaatgtcttcaacagctggaaccagccatatctcatatcgtgcaacggagaccatgggataaggaactcattctaagatggggtattgggaacaacatgcacaatcctactaggagggaacgatacatacgtactctaagagaaggatcaaatcgtaggcttctactactttccaggcgttgcattacacatagctgctgggggcttgggaggcattacgattctgagcaggcatacagtcgcagatctcactgatgatcctgccgatgattacactgtcctcattgcagattggaacaagctcaaccacacggatatgaag

SEQ ID NO: 81001 - DNA, 338 bp, Glycine max
  Clone ID: PAT_MRT3847_4415C.1
ctgtgatttgttctccatcaccgaccgataatgacaaagcgcgttccttaaatacgtacagacgtaaattggccgaatataaagaaattgagaatcggcttaaggaattgcggactaaggaacgcgaaagtcacaaattgttcgacaagtcggaaaatgagattaaatcgcttcaatcggtcggtcaaattgttggcgaagtgcttaaacaattgacagaagagaaattcatagtcaaagcgaccaatgggccacgatatgtggtcggatgtcgtccgaccattgacaagggagaaactgaagcaggggcacacgtgtggctttggacatgaccacgc

SEQ ID NO: 81002 - DNA, 2771 bp, Glycine max
  Clone ID: PAT_MRT3847_44160C.1
aacataaatgacattttataaaagaatcaatatactaccagtacatgagatgagagcaatggcaatgaacataaaccttaatcagctacatgttaaaccctcccaaataccatttggcttcccatcatcatggtatttctattaccactacacagtatttcctacacgcgtttttgatgtgctattcagaacactatacactggtggagaaggatggagccatgttgttggggtggaaggacagaaatttgatatcagcttcagcatggcattgctaaaaacatagatagtaggaaatactgtgtttcaagtggtaatagaaataccatgatgatgggaagccaaatggtatttgggagggtttaacatgtagctgattaaggtttatgttcattgcacgcgtccgaaaccccaaaaacactctgacacaacaaacacaaacacaatcgtcaattaaaacaacaacaatatcgaagctgcacaaattaatatccaacactctcaagctttcgagtttcaaactctgggcgctgaatttggttcatttttctaagagttatatatacttttattgaaattgttgcggttcaagtctgaactaaaacattaagtttgtgcttttctgatttgccagctgctttcaaattatcttaaatcacttgttcagatcagctgatcgccatcatcttaatatggcatattctacaacagctcttgctggtgttgattaccttacatgtcatgttatcctacggcttctatcgcttgaaatatcactggtaactcttgtggtgattgtcactgataatctatcagaggttattcgtgttccacagcctgtgccatggccagccaagttcaaatactcaccaacctttgtttattttgtagctgcattgttcgttactggcctctacagtatcattacaacacttgcatcattctttgccagtaacaagccagccctcaaaaccaagtttgctcctctactttatcttatgggatgcgctgatattgggaataatagcctcagcaacaggcacagctgggggtgtagcatatttgggtttgaagggaaaccggacacgtggtgggttggaataaaatttgccatgtttacgacaagttctgtaggcatgttggtgcctccatagcagtggctttgtttggaagcgttgtgacagtcttgctcatttggctttcagcttacagcattcatagccgagtccccaagtagatggaaggaacatggatcatgcattctgcatatttatgcatacatcttcatttattgtttataaagttagtgtgctcagtaattgttaagagtgtgtagatgacttaatgtgttgcttcagttgtgttgactgttttttgtaaatcagtgttttcccctccaaggacctaatttgtactattttacaagacatgtgcaaaattaattagagcctgaaggtgaattgcgagtcacttacatgcaactgctattacgaaatctgcccctacttaaaatttggttacatggctgccaatggagccattgcgcaagcatgcagaaacgaggatcacatacacatcatagacttccaaattgctcagggaactcaatggatgactcttcttcaagccctttccaaatatgcccgtggcgacggactagaagttgtgggaaacaggatcatcaatccctgtgatccgaacatggggattgatgatcctgtttccaaatatgcccgtggcgacggactagaagttgttgggaaaaggttggccttgatgtctgagaaatttggcatcccagttgagtttcatggagttcctgtttttgctccaaatgtgacaagggaaatgcttgatatcaggccaggagaggccttggctgtgaattttcccttgcaactccatcacacagctgatgagagtgttcatgtgagcaacccaagggatggacttctgagattggtaaggtcactttctcccaaggtgaccacactggtggagcaggaatcaaacacaaacacaacccctttcttcaacaggttcattgaaaccttggattactacttggcaatctttgagtccattgatgtcaccctcccaagagatagcaaggagaggattaatgtggagcaacattgtctggccagggatattgtgaatatcattgcttgtgaaggcaaggaaagggttgagagacatgaactgttcggcaagtggaagtcgaggttaacgatggccggcttccgtcagtgtcctttgagttcttatgtgaattctgtcataagaagccttttgatgtgctattcagaacactatacactggtggagaaggatggagccatgttgttggggtggaaggacagaaatttgatatcagcttcagcatggcattgctaaaaacatagatagtaggaaatactgtgtagtggtaatagaaataccatgatgatgggaagccaaatggtatttgggagggtttaacatgtagctgattaaggtttatgttcattgccattgctctcatctcatgtactggtagtatattgattcttttataaaatgtcatttatgttaaaagttcttgttctataaatatttcgatcttgtgcctgatccctatgaactatgggaatcacaaaattttgaactgactgtctcaataaaaacattctttagggggtaaaaaaaaaaaaaaaaaaaaaaaaaaagataaaaatgcttgcataagctggttaaggtgatttgtaattcgatatctaaaaaaagaatga

SEQ ID NO: 81003 - DNA, 454 bp, Glycine max
  Clone ID: PAT_MRT3847_44161C.1
tacgtaagccgggaactcggctcgagaatctcctctcacatttgacaattacttatcgctattccgcaatacaacatttattacgcggactcggggtaggcttcgaagttcgtattcaaatcggcatctcatggagaataataaaaaatcgctgtggaaataaacagaccatctgaagttacaggcatctaaaatggcgcacctcttactaaccgaaacgacaaaggagcatcagcaacataaaccaagaggctatcacataatggattggttttgacattaacaaggcaggagacaacaactatcacacgttaaaggatccctcttgtgactacaaaaaacacattcctgggtatgtggtcgacaatcactaccctaacatcaacatgaatcctgacattgttgatagcactgactgtggctaaaagaaaagagtttactgtaaacaagcctt

SEQ ID NO: 81004 - DNA, 2146 bp, Glycine max
  Clone ID: PAT_MRT3847_44162C.1
aagctgcacaaattaatatccaacactctcaagctttccactttcaaactctgcccgctcaatttgctttatctttccgagatttatatacacttttattgaaactgttgggattcaagtctgaaacaaaatcttaagaagtttgcggcagctgatgccatcatcttttagtatggattcgcaacagctcttcagtttcgaattaccttacatgtcatctttacccaccgttccatcgcttcttggatccttgaaatatgacacaggaaactcacctaattcacccttctccacttattttgattctgacactctttcggcattgagtgacggccaggagcaatacagccctggagaaatcctctctggtgtcagcccctcttgtaactcttctctggaaaccaaccattatatgtatagatcagtctccactttggacagtttcccattatattctgataggaactctcttctacagactatgagttctaatcagaaaatccaacatgctttgctggagctagaaactgctctgatggcacctgatgacgatcaagttaacacaccgaatacattggccgagagcagcaggccaatggcatcaggccagagatccaggtcctggagcaatgagaaccatgtgtcacaatatactcaaactcagccatcatatgcaactgccaatatgcagtcaagtgaagttgtgcacgtagagaaacggcaaaagttgatggaagaagcaacgctacaagatttcccaccaaacaatttgaagcagttgctgattgcatgtgccaaagccctgtctgaaaacaacacgaaagattttgatcaattggtaggaaaggctaaagatgctgtgtccatcaatggggagccaatccagcggcttggtgcttacatggtagaagggcttgttgcaaggatgcaagcatcggggaatagcatctatcatgcccttaggtgcaaagagcctgaaggtgaagagttgctcacttacatgcaactgctgttcgaaatctgcccctacttaaaatttggttacatggctgccaatggagccattgcgcaagcatgcagaaacgaggatcacatacacatcatagacttccaaattgctcagggaactcaatggatgactcttcttcaagcccttgctgcaagacctggcggtgctccccatgttcggatcacagggattgatgatcctgtttccaaatatgcccgtggcgacggaccagaagttgttgggaaaaggttggccttgatgtctgagaaatttggcatcccagttgagtttcatggagttcctgtttttgcttcagatgtgacaagggaaatgcttgatatcaggccaggagaggccttggctgtgaacttccccttgcaactccatcacacagctgatgagagtgttcatgtgagcaacccaagggatggacttttgagattggtaaggtcactttctcccaaggtgaccacattggtggagcaggaatcaaacacaaacacaacccctttcttcaacaggttcattgaaaccttggattactacttggcaatctttgagtccattgatgtcaccctcccaagagacagcaaggagaggattaatgtggagcaacattgtctggccagggatattgtcaatatcattgcttgtgaaggcaaggaaagggttgagagacatgaactgttcggcaagtggaagtcaaggttaaagatggccggcttccagcaatgtcctttgagttcttatgtgaattctgtgataagaagccttctgaggtgctattcagaacactatacactggtggagaaggatggagccatgttgttagggtggaaggacagaaatttgatatcagcttcagcctggcattgctaaaacatagactgtgtagtagtagaaatattatgatgatgggggaagctgaccacggtttatgtttcattgccagtgctatctcatctcatgtactagtgtagtagtacattgattcttttataaaatgtcacgtatgttaactgttcttgttctataaatatttcgatcttgtgcctgatccctatgaactatgggaatcacaaaattttgaactgactgtctcaataaaaacattctttagggggtagacttcggtgc

SEQ ID NO: 81005 - DNA, 1201 bp, Glycine max
  Clone ID: PAT_MRT3847_44163C.1
tttttaatgcatcaataacatggtattcaatattatttttgtgggaacatatataattacaaatttcaatttatggcacaaatgtcttgtaaaatagtacaaattaggtccttggaggggaaaacactgatttacaaaaaacagtcaacacaactgaagcaacacattaagtcatctacacactcttaacaattactgagcacactaactttataaacaataaatgaagatgtatgcataaatatgcagaatgcatgatccatgttccttccatctacttggggactcggctatgaatgctgtaagctgaaagccaaatgagcaagactgtcacaacgcttccaaacaaagccactgctatggaggcaccaacatgcctacagaacttgtcgtaaacatggcaaattttattccaacccaccacatgtgtgtttcccttcaaacccaaatatgctacacccccagctgtgcctgttgctgaggctattatccccaatatcagcgcatcccataagataaagtagaggagcaacttggttttgagggctggcttgttactggcaaagagtgatgcaagtgttgtaatgatactgtagaggccagtaacggacaatgcagctacaaaatacacaaaggctggtgtgtatctgaacttggctggccatggcacaggctgtggcacaagaataacctctgtttgattaccagtgacgatcaccacaacagctaccagtgatgctgcaaataacacaaaccttaggataacatcaaatttaaagtaatcaacacccgcaggagctggagttgaagatgatgttctgtattcagtgtcgccatgcttgtctgtagaagccatgtgttgctttgcaaggtagcttgctagcttttggttttgataataataaacttagtggtgagatataacaaataaggattaggaatgggtggaatcggcaatcaatccttactatgtctggacctggtaagtttccccgtgttgggtcaaattaagccgcaggctccactcctggtggtgcccttccgtcaattcctttaagtttcagccttgcgaccatactccccccggaacccaaagactttgatttctcataaggtgccagcggacagataaggatagttgaacaaaacaatgatattctgcaaatatatatagatggatatggacttggggggaaagcca

SEQ ID NO: 81006 - DNA, 361 bp, Glycine max
  Clone ID: PAT_MRT3847_44164C.1
ggctcgagctcgagccgaatcggctcgagatgaaattaccgtgaaatatgttgggtgtgcctacacgctacatggcgtcgccgacggaggagctcgttgccgccggcagctcgacaccggtcatcgaagatgacgggggcagcgctgcggaagtggttcgaggagaagaacccatccgcgagtccgtggaggtctgagagcctgtcctggtcgctgatgcccaccagatcgagtcgtcgactaactgcagatccattgctgtgtatggtgaggattctggcttgcttgagggagcccttggccttttgggcggcttgtgactacattgtcgatgggccatgataaccaatgaagtatcggt

SEQ ID NO: 81007 - DNA, 330 bp, Glycine max
  Clone ID: PAT_MRT3847_44165C.1
ctttacctgggacagatttccaagaagaaaagcttactagatggattgttcaaatctggctcattggataaagaacttcaagaaaagggttttgggcaacgtgctctaaataaacttggtgggaagggctatgagaaatacatggactggtggggtactagccctttttgggggaaaaattacggccaccgaatgggccaggcaggctgacttggaatttacaaacggaccattgaacgatgcccacaatttaaagatactggcaagagctgcttcagagatcccttattcaacgatatgttacttgctgaatgctacaaaccttatgcc
